United States Patent Application Publication US 2005/0228172 A9 - sequence listing, part 11

SEQ ID NO: 35590 - DNA, 1333 bp, Homo sapiens
ggtgatggtctccttcagggacacatgtttggaacctattagagagagctagagaaaatcttggtgggaatacagcatttggtaaatattttgagatggtttacagggaatattttctgttctggttccatttgataataaaaaatttctgatattctcaataccttacaaactgattttaagtratcagcaagaactctttaaaaaaagaaaaactgactttttttattattttgtgtcttgaaatcaataacaaaattacaaatgaaataaatttagatttccttcagtactttatacagtaggtggcacaaaagcaatgattcactctgcctggtcgtcccttaaatatatagtcttagagtctcactctatcacccaggctggagtgcagtggcacgatctcagctcactgcaagctccacctcccaggttcacgccattctcctgcctcagcctcccaagcagctgggactacaggtgctcgccaccacgctcagctaattttttgtatttttagcagagacagggtttcaccatgttagccaggatggtctcgatctcctgaccttcatctcctgacccaccttggcctcccaaagtgctgggattacaggcgtgagccaccgcgcccagccacagtcttattgccctcttcacccttctgctatacttttaccatattttcgtcactggttctgtctctcctaagtttgtagtgcctaaaggatattcactgaacaaagatggtggactcttcaacagccttccgctggaatgacacttctgactcagccagattcattaacactgtattagctaaatggtaaaagtaggttatatgatctttgcacacacagagcccatcatactgtttttgcaaactctgaggtttccagcataattacactagagtatttgaaaatgatactgataaattcctttgttattaaaccttgcatatgctctcccaagtaaatgttacagacaccccttcctcaacttatgatggggttgcatctcagtaaacccaccgtaagttaaaaatgtaagttaaaaatgcaccatatacccctaacctaccaaacatcacagcttcgcctggcctaccttaaacatgctcagaacaactcccttagcctatagctaggcaaaatcatctaataacaagcctgttttacacacgttgaacatctcatataatttgttgaatactgtaatgaaagtgaaaggcagaatcattatatgggtacttgaagtatggtttctactaaatgtgtatcacttccacgccatggtaaggttaaacagtcttaaactgaaccactagaag

SEQ ID NO: 35591 - DNA, 1333 bp, Homo sapiens
ggtgatggtctccttcagggacacatgtttggaacctattagagagagctagagaaaatcttggtgggaatacagcatttggtaaatattttgagatggtttacagggaatattttctgttctggttccatttgataataaaaaatttctgatattctcaataccttacaaactgattttaagtaatcagcaagaactctttaaaaaaagaaaaactgactttttttattattttgtgtcttgaaatcaataacaaaattacaaatgaaataaatttagatttccttcagtactttatacagtaggtggcacaaaagcaatgattcactctgcctggtcgtcccttaaatatatagtcttagagtctcactctatcacccaggctggagtgcagtggcacgatctcagctcactgcaagctccacctcccaggttcacgccattctcctgcctcagcctcccaagcagctgggactacaggtgctcgccaccacgctcagctaattttttgtatttttagcagagacagggtttcaccatgttagccaggatggtctcgatctcctgaccttcatctcctgacccaccttggcctcccaaagtgctgggattacaggcgtgagccaccgcgcccagccacagtcttattgccctcttcacccttctgctatacttttaccatattttcgtcactggttctgtctctcctaagtttgtagtgcctaaaggatattcactgaacaaagatggtggactcttcaacagccttccgctggaatgacacttctgactcagccagattcattaacactgtattagctaaatggtaaaagtaggttatatgatctttgcacacacagagcccatcatactgtttttgcaaactctgaggtttccagcataattacactagagtatttgaaaatgatactgataaattcctttgttattaaaccttgcatatgctctcccaagtaaatgttacagacaccccttcctcaacttatgatgggrttgcatctcagtaaacccaccgtaagttaaaaatgtaagttaaaaatgcaccatatacccctaacctaccaaacatcacagcttcgcctggcctaccttaaacatgctcagaacaactcccttagcctatagctaggcaaaatcatctaataacaagcctgttttacacacgttgaacatctcatataatttgttgaatactgtaatgaaagtgaaaggcagaatcattatatgggtacttgaagtatggtttctactaaatgtgtatcacttccacgccatggtaaggttaaacagtcttaaactgaaccactagaag

SEQ ID NO: 35592 - DNA, 1333 bp, Homo sapiens
ggtgatggtctccttcagggacacatgtttggaacctattagagagagctagagaaaatcttggtgggaatacagcatttggtaaatattttgagatggtttacagggaatattttctgttctggttccatttgataataaaaaatttctgatattctcaataccttacaaactgattttaagtaatcagcaagaactctttaaaaaaagaaaaactgactttttttattattttgtgtcttgaaatcaataacaaaattacaaatgaaataaatttagatttccttcagtactttatacagtaggtggcacaaaagcaatgattcactctgcctggtcgtcccttaaatatatagtcttagagtctcactctatcacccaggctggagtgcagtggcacgatctcagctcactgcaagctccacctcccaggttcacgccattctcctgcctcagcctcccaagcagctgggactacaggtgctcgccaccacgctcagctaattttttgtatttttagcagagacagggtttcaccatgttagccaggatggtctcgatctcctgaccttcatctcctgacccaccttggcctcccaaagtgctgggattacaggcgtgagccaccgcgcccagccacagtcttattgccctcttcacccttctgctatacttttaccatattttcgtcactggttctgtctctcctaagtttgtagtgcctaaaggatattcactgaacaaagatggtggactcttcaacagccttccgctggaatgacacttctgactcagccagattcattaacactgtattagctaaatggtaaaagtaggttatatgatctttgcacacacagagcccatcatactgtttttgcaaactctgaggtttccagcataattacactagagtatttgaaaatgatactgataaattcctttgttattaaaccttgcatatgctctcccaagtaaatgttacagacaccccttcctcaacttatgatggggttgcatctcagtaaacccaccgtaagttaaaaatgtaagttaaaaatgcaccatatacccctaacctaccaaacatcacagcttcgcctggcctaccttaaacatgctcagaacaactcccttagcctayagctaggcaaaatcatctaataacaagcctgttttacacacgttgaacatctcatataatttgttgaatactgtaatgaaagtgaaaggcagaatcattatatgggtacttgaagtatggtttctactaaatgtgtatcacttccacgccatggtaaggttaaacagtcttaaactgaaccactagaag

SEQ ID NO: 35593 - DNA, 1333 bp, Homo sapiens
ggtgatggtctccttcagggacacatgtttggaacctattagagagagctagagaaaatcttggtgggaatacagcatttggtaaatattttgagatggtttacagggaatattttctgttctggttccatttgataataaaaaatttctgatattctcaataccttacaaactgattttaagtaatcagcaagaactctttaaaaaaagaaaaactgactttttttattattttgtgtcttgaaatcaataacaaaattacaaatgaaataaatttagatttccttcagtactttatacagtaggtggcacaaaagcaatgattcactctgcctggtcgtcccttaaatatatagtcttagagtctcactctatcacccaggctggagtgcagtggcacgatctcagctcactgcaagctccacctcccaggttcacgccattctcctgcctcagcctcccaagcagctgggactacaggtgctcgccaccacgctcagctaattttttgtatttttagcagagacagggtttcaccatgttagccaggatggtctcgatctcctgaccttcatctcctgacccaccttggcctcccaaagtgctgggattacaggcgtgagccaccgcgcccagccacagtcttattgccctcttcacccttctgctatacttttaccatattttcgtcactggttctgtctctcctaagtttgtagtgcctaaaggatattcactgaacaaagatggtggactcttcaacagccttccgctggaatgacacttctgactcagccagattcattaacactgtattagctaaatggtaaaagtaggttatatgatctttgcacacacagagcccatcatactgtttttgcaaactctgaggtttccagcataattacactagagtatttgaaaatgatactgataaattcctttgttattaaaccttgcatatgctctcccaagtaaatgttacagacaccccttcctcaacttatgatggggttgcatctcagtaaacccaccgtaagttaaaaatgtaagttaaaaatgcaccatatacccctaacctaccaaacatcacagcttcgcctggcctaccttaaacatgctcagaacaactcccttagcctatagctaggcaaaatcatctaataacaagcctgttttacacacgttgaacatctcatataatttgttgaatactgtaatgaaagtgaaaggcagaatcattatatgggtacttgaagtatggtttctactaaatgtgtatcacttccacgccatggtaaggttaaacagtcttaaaytgaaccactagaag

SEQ ID NO: 35594 - DNA, 1096 bp, Homo sapiens
taacttttaccaaaaaagaaactgattttctactgactgacttcctccgttttggctttaaagtcagccattaggcatctattgctgtcatattccccatgggtcttaggttggaccatctgttcttacaaacatcctaaaagaaacaataggccaggcacggtggctcgtgcctgtaatcccagcactttgggaggttgaggcaggtggatcacaaagtcaggagctcaagaccagcctggcctagatggtgaaamcccgtctctactaaaaatacaaaaattaggccggtgtggtggtgggcacctgtaatcccagctactcgggaggctgaggcagagaactacttgaacccggcaggcagaggttgcagtgagccaagattgagccactgcactccagcctgggtgacagagcgaggctctgtgtcaaaaagaaaagaaaagaaaacagtagtgggtacaatatagctggtgttcatgaatgatccttctgtgggccattgattcctgatggcctttcttccagttcttctgtgattctagacttagaagccatgagcttcagcatcaagtcaaggaagctctggaaatgcttgataacccaataggtctgaaggatctacatttgtcttgtacaaagcaaaattccaatgcctgaaagtgcctgacaacataaaggcattcggcaaggtgttaatgactgtggatagaataattcagatgtacctctgactgataagaaatattaaagtcttttttgaacagggctgttgtaatgtttaaatttcagcaaaataaacataagccctaatatgacttaactacagttcgctagaaaatcatgagaaatgcgcttccttacattactctggtgtttattgacctccatggcatgtttaacctcagggggctccttcatgtgggcataatctgagaatcctttggcagcatcatgtttctgcttgtaggccacctgaaaaacacaaataatttttagtcccatttagaggcatataaattcttgcctgctaatttcagtgttttgccaggactttatatatttgaataccaccactgatagttaatttgcctaa

SEQ ID NO: 35595 - DNA, 1096 bp, Homo sapiens
taacttttaccaaaaaagaaactgattttctactgactgacttcctccgttttggctttaaagtcagccattaggcatctattgctgtcatattccccatgggtcttaggttggaccatctgttcttacaaacatcctaaaagaaacaataggccaggcacggtggctcgtgcctgtaatcccagcactttgggaggttgaggcaggtggatcacaaagtcaggagctcaagaccagcctggcctagatggtgaaaacccgtctctactaaaaatacaaaaattaggccggtgtggtggygggcacctgtaatcccagctactcgggaggctgaggcagagaactacttgaacccggcaggcagaggttgcagtgagccaagattgagccactgcactccagcctgggtgacagagcgaggctctgtgtcaaaaagaaaagaaaagaaaacagtagtgggtacaatatagctggtgttcatgaatgatccttctgtgggccattgattcctgatggcctttcttccagttcttctgtgattctagacttagaagccatgagcttcagcatcaagtcaaggaagctctggaaatgcttgataacccaataggtctgaaggatctacatttgtcttgtacaaagcaaaattccaatgcctgaaagtgcctgacaacataaaggcattcggcaaggtgttaatgactgtggatagaataattcagatgtacctctgactgataagaaatattaaagtcttttttgaacagggctgttgtaatgtttaaatttcagcaaaataaacataagccctaatatgacttaactacagttcgctagaaaatcatgagaaatgcgcttccttacattactctggtgtttattgacctccatggcatgtttaacctcagggggctccttcatgtgggcataatctgagaatcctttggcagcatcatgtttctgcttgtaggccacctgaaaaacacaaataatttttagtcccatttagaggcatataaattcttgcctgctaatttcagtgttttgccaggactttatatatttgaataccaccactgatagttaatttgcctaa

SEQ ID NO: 35596 - DNA, 565 bp, Homo sapiens
gatgaatactctagaaatattttaaaatgacatctggtttaaggaggagtaaggggtgaatacagacttcctgtacctaaaaccaacatcactcctcttggcaaacacagaataagctcttattagtagttcaactgaattgatcaaagcatctgggtatsctggagtaaagaaaacatgagtcatggatcatagctgcactaggatgttcttccttccccttctcttctgtctccatccacagcttgtgcatgggaagcttaggtttaggcagatcttgatatcaggaagatgaataaaattgtacatttaatataagacagtgtactgaaaaagcaataaatgtgactagaagagcattagatttttcatggaggtaagatataaacataggtaaagaaaagccaatttcttttgccacttaaactaatactgtagttcctttgagaagctgaggtgggtggatcacttgagtccaggagttcgagaccagcttgggcaacgtggtgaaaccccagagataagataattcttatctctcctaccttaacccaaactaatgata

SEQ ID NO: 35597 - DNA, 541 bp, Homo sapiens
gaaataaattagatataatgcgagttgttctttttagaatttcatgtctgctcatcatctctcatagtctacttcctctctctttcccctttctatacactgtatagattaaaacagtggaatcacatcttctaaagtcagttcataaagcaaaaatggaatcattgaawtgcgccctaggttagagaccgacataccatctcttggtacacccagcatggtcagtttttcctctaggattgaagcagatccgtttctttggtaaagattctgacaaaaatagttagcaattgggatccaggatgtatgcaaaaatatatatatctatctttaaatattagtataacactcagcttggtgagatacttgagccctaggaagcacacaggaattgagactgccttagggaactgcagaatcctatttctcatctcactcaattctgagtggagtgcagtggtgtgtgagcagagccttgggcactcttttgattgtaaaattttctctgtctgtgccaccttttaggcacatatagttgaat

SEQ ID NO: 35598 - DNA, 541 bp, Homo sapiens
gaaataaattagatataatgcgagttgttctttttagaatttcatgtctgctcatcatctctcatagtctacttcctctctctttcccctttctatacactgtatagattaaaacagtggaatcacatcttctaaagtcagttcataaagcaaaaatggaatcattgaaatgcgcyctaggttagagaccgacataccatctcttggtacacccagcatggtcagtttttcctctaggattgaagcagatccgtttctttggtaaagattctgacaaaaatagttagcaattgggatccaggatgtatgcaaaaatatatatatctatctttaaatattagtataacactcagcttggtgagatacttgagccctaggaagcacacaggaattgagactgccttagggaactgcagaatcctatttctcatctcactcaattctgagtggagtgcagtggtgtgtgagcagagccttgggcactcttttgattgtaaaattttctctgtctgtgccaccttttaggcacatatagttgaat

SEQ ID NO: 35599 - DNA, 541 bp, Homo sapiens
gaaataaattagatataatgcgagttgttctttttagaatttcatgtctgctcatcatctctcatagtctacttcctctctctttcccctttctatacactgtatagattaaaacagtggaatcacatcttctaaagtcagttcataaagcaaaaatggaatcattgaaatgcgccctaggttagagaccgacataccatctcttggtacacccagcatggtcagtttttcctctaggattgaagcagatccgtttctttggtaaagattctgacaaaaatagttagcaattgggatccaggatgtatgcaaaaatatatatatctatctttaaatattagtataacactcagcttggtgagatacttgagccctaggaagcacacaggaattgagactgccttagggaactgcagaatcctatttctcatctcactcaattctgagtggagtgcagtggtgtgtgagcagagccttgggcactcttttgattgtaaaattttctctgtctgtgccaccttttaggcacrtatagttgaat

SEQ ID NO: 35600 - DNA, 614 bp, Homo sapiens
aattttagagctagaattcaaagccagatctaactacagagcccaagcctggaaaaaggggagtagggctttgtgggctcaaaggtgattcaccccagttcccagtccctcgggacttcatgctctaccaaggaagtatagcatttttgttgctttctgaatattctcagtctgctcaccctgtgyaagcacctctttcttggcagcattccctattagattcctgtcactgctataacaaataaacttaatggttcaaacaacagaaatttattcgtttgtagttcttaatgccagaggttcaaattcaaagcattagcaggaccgtacttccttcagtggctcttggggagatgccattctttgcctcttccagcttctggtggctgtcagcattcattggcctgttgagcagcactccagtctctgcctttgtcttcacatggccttctcctttgcatcttttaaatctctcctgtgtgtctatatgcttgccattggactcagggcccaccccaataacccaggatggtcacttcttctcaagatacttaattagatctgcaaagaccctttttccaaataaagtcacattcacaagtgctcagaattag

SEQ ID NO: 35601 - DNA, 547 bp, Homo sapiens
agtagtggctgcctgaaatgcatgtctgaaaatttgaagccatgtttttgcttagtcagtgtgtagtggtcatgtgttgatctctgccattggtacagaaagtagaaatgkcatagcatatgccatctgtcacttatggggaccttaaattttcctatttacatttggttcagaccttttgctttgctcagctagtgtaatttataagtcatctcacaatctcatattcttattctgcattatattgctctagccatggacagggaccccttttccttgacatacacacaagccatttgtgtgtatgttggtcacaattaaaaggctatagtgatggaaagagtactttcacataaaccagacatttaactttggacactcctgtctttaaaagtctttcaaatgaaccctctgatattgaattggaatctaatgtattagtatgaactcataatttttattattttagggacagagtctcactgtgtcacccaggctggagtgcaagtggcatgatgatagctcactgcagcctcaaattactggg

SEQ ID NO: 35602 - DNA, 1297 bp, Homo sapiens
tgtatgttagttttaatacaaatttaaaaaggaaaaattccctaggttattcttacataacactgatgctggagaatcactgacttttctctctctactgaattgtaagccctttgagggcagtgaagccatctattttgtctttgtattcccagcatgctttagtgcctacaacatagtacacacaataaatgattattaaataaatgaataagacccaagggagtgcactggtttgtgggttcccttctccctcactctcttccaaacatttgttgcatgcccctcctggaggacatgacagctcacgcctcaaagttacacctcctacacacacccctgaataaacctgtgagatgccacctggcttcttccctaccatacgctgggtgtaactgatccaagcacccagcctgacaagggtaggagaaaggaagcaggtggaggacgttctgtcccagtaccagtacttttgccctgcctgggtctgagccacctggctcaggccttcctcagcaggcctgggaatccagctagaaaaaatatgtccttggagatattgcaatgctaaagcttctatttgcatctctgatgtaatttgcttcctaagccactcagctcaattatgtgggaatttgaaaatgatayatttgaatatttaggagtggctggtgatttttagcaaatttacagtagaaagtgagggggactctgtgtgaaatatcatctaagtcaggggtgtccaatcttttggcttccatgagccacactggaagaggaagaattgtcttgggccacacataaaatacactaacactaatgatagctaatgagctaaaaaaaaaaaagtcacaaaaataaatctcatgtttatgaatttgtgttgggccgtattcaaagccgtcctgagccgcatgcaggctgtgggccacaggctagacaagcttgatataagtcatttatccagtcacaaataattaccaagtgcctcctagggatagagtgatgaacaagtcatctgccttaaagatgcttacagtgaagtggggtaagatgggcaatcaaataataataatgtctttttctagcacttacaatgtgctggacactttacatatgttaaccttaaataatgagatttagagaacatgattaagtatgaagtttgagtgcaaagcttgaggatagccacctggaaacactaactccaaatgagtgggatcagtgctccaaagtggagaagttaagatttcacttatactggcagagatggagaagttccagcagaattacattt

SEQ ID NO: 35603 - DNA, 642 bp, Homo sapiens
aaaaaataatgtggtaggtgaaatctccattcttgttatactgttcttttagcttctatagcacattcattttgtgaaagtcaaggggactctcacaggaaattcggatgaaggaaagataaaarctaaagttctagccaacttcaacaaccccataggcctcatagagtaaatcttttaaaagctagctcctccagaacaggagtggagtggggcccataaaaagccagcccaggtcatctgcctccaatgcacatctgcacactcccaaatctgtctatcccttgccagtctcatgcttccatcctttactgaaggtaaaagcttcagtaaaactctacgccttcacaaagtaagagagatcattcccaggatccttcagaattccagcaggcttgaggatgtcctttatatcccctttcatattagaggtttgcatacattacaaaacatttaaattaacctttactgactgctttttctgtatatccccatacctgaacccacttggggttacacttaatgaatgttattattttaatttagaaacttttagaaataaggaggtttggacaaagggttgtcatttccttctgccacatgccctaacatatttataataataaaatgaacaagttacat

SEQ ID NO: 35604 - DNA, 512 bp, Homo sapiens
ctctatgaatcttgtgatttttagctaaatcaattttcacccttgagacccaatttcctcatctataaagtgttgtaagcattaaaagttataatatttgtgaaaatgctttgaaattatgtgatactctgagaagtaaattttttcatgtgagcccatgaaatcagagcacatagccttttagcataaacttgattccaaatgatatctcttcctttcagacactgtgagcagataaagggatagtttaaggttaagtgatagaggcataatcccttataggcctttgaattcttttaactttgcattctttatttcagagatttttcaggcttctccagattctacagtctaaatagtttgtaaatccacacacttctactttgccagggatttcttagkgtaaaaatatcctgaagtctcacctgccttcaatccttactgtgtccatacccaccattaccaggataatctttgtaaaaggcagaacttacctttgtccattcctcttt

SEQ ID NO: 35605 - DNA, 591 bp, Homo sapiens
tgtttactgatgattgtcctacaatgcacaattatgtactccttttctagattttttcagagaaccaacaagatcatcaatgccatgagtgggaaggatgaactttcataaaatattgaaactggtcatagcagattactttcacttttaaccaacctccacatggtacaaattgaatacacatttataatcattaaaccatgcccagaagttcttttccatcacatttttcatgtatttatgacagtttccatttagttcccatatattccctattgtttattttctgaattataagtctggaaaacagagttgaaagacaccattaaacycacttttgctgttttttaaagagtgtttaaaagttttaaacagttgctggtttttaaagagtgtttttctatttttaaaatacattatctgaactgtatcttgcttttatcaggaagacagtcacaatgtgcgctctaagatacttttatatgcacaattttttttttttttttttttagatgggttctcactgtgtcgcccaggctggagtgcaatagcgtagtcttggctcactgcaaccttcgcctcccaggttca

SEQ ID NO: 35606 - DNA, 1969 bp, Homo sapiens
aaacatgcaactcagactctatcaaactaacttacaatttttaaaaacgttttattgggatttttccttaccatttgttgactctacaatgtctgattaagcctcaatacatcaaagcaattttttttttttgtaactttctctgaggggaacttgcttgaaagtggctataaaaccaattgtttttaatgattaggagatttagttaagtagccttttttcttttattaagagcaaaggtgtaagccttaagctagcagacaacataaacgaaasttttagacgaatacaatgctgtggtaatcattagctgagcacatgactttttttgacaaccagagtaagtttggggggggttacagacaaatattaattggtgctttgctctctccacccaccaccttggggcttagctactaatgcttcatgatcattaaaactttaaagaaattctgaactacattaaaattctttttttctatgaatctattgtctttcaatttcagtaaaatgcctccattcttttacccattttatagtttttttcctctgataatgtttcttaagtattgtttacaatttctgtcaaccatttgttatattgtaaagactttgaactaaagaataatgtgttctcaggtagcatgaaagaaaatcttagtgtaaacttttatctgtctcccatttacctatgcatgtatctacctttgcagcatttgcacagagattgtttctcaatttctttcccttctaagtatgagttgcttcactagtctctgtatgtatatgggataaaaatagagtcactgagttacaaactgaaatgtgtctcttttaatatctaccacccttgaatggaactgggaagtcctcattcagaacagatatttagctctgcctacactttctttaaaatctgagatctgctgaaaactactgctcttctgttgcttgaggcttaatggaacattaatagcaatgcttatctttatattaattaatgctcattaccattttgtatatactgattccttcattctctatagttgtaaccattttgtgacaactacatatatattattcacagagattctctgtgagcagaataaatcgatgatatgttggtaggaaaaactattccttgatctccaacccactttcttctatctgtttgtcatttacatcagaacaaaaatacagaatgttaatgtattgattttttttagtaataatgggttgtaggatacataattattttacaaaataaatcacatgcctcactactctccatcttaattgcataatatctaaaaatagtggttttaaagttatgcctctctagcacattaaaaaaaaaatcataggaaagggtctgtgtgccctacccttgagtggaattcagcactccactaagaggctgtatattagctccatcacacggtgacaggctcagagcgtgtctgtgattcccttgtcatggcaccagtcacctgctggttctcattcaattaaatgggagagccacagggaaatcgttgctggcacagcaattttcttgatagactcagcagctgctgctgtgtaagagcctgcatatgctccacctgatttaatccagtggaaaaaactggagcctaaagcctactgttctgttagaggtgaaacaaaatgcacacttcaaatccactcatattaacctctaacttgcttctctctgtgtgtaagaatttggcaattctaaaattatacttatttctttgtatgcattaaaaacatggctgctgtgaccaaaagcggggagaaaagacatttggactgattttcaggtggtttgtgggaaaaggattaataaaatcaattttgggcaggttaaaacaactctgtgtcggagacaaagggtaatgcttgaagatggactcttcctggccttctcattaggacaggccaggtgaactgactgtccccagat

SEQ ID NO: 35607 - DNA, 1349 bp, Homo sapiens
aaaattttaacagtgctatattactgatgagaaaaggaggcttagagggattatgctgtacttagtaggcagtgaggtcagaattaaaactcaggtgttctgattccagaaacttcatacttatctgctatattctagtccttctgaaacaaagcaccccttttccttgatgtgcagtcaggctccctggaatatatcgtgtagttacatagcatgaaattttatttctaaaataaaactctgcatagtgtttagagtgacctacataatatcagaggggcagtggctgcctctgtgacagaggaggcataagaagtcagtcaaatgactttgtcagcttcatatgcyggaaattaagagtgactgcaggactctactagtttgagctcccaaggtatagaggattggccgttgactttgagctttctcaatcatttattctcatctactgatgggaatagcatattttgtcttggattaaaagaaaaacaactttgcaagcctcattaagccaaggataatatcatctctagagataaaataacatgccagtcattcaatctacaagcaaataaagtacatttataagtatatttgatttttaccatgttagacctcaatggacctgtacgatgaatgctggggcttagtgaggcaaagcatcaaatccgaggccatgtgacagaattggaactagaaccaagaggtattatctttttaccaatgtatctaatggtcacattccttatttcatggttgtgcatttggtcattgattgcttgtagctcttggcattaggataattatttattataaatgaaataaatttgagtcagtgataatatgttgtcaggtatgtgaggttgcaatatactttatatctttaaattcttcaaccaacatacatatagcacgtcacttatgtgataatatctaactcttgataattcaaattggttctcattcttctgatgtcatcagtgccagtctagttctctttctgattatgactatggtgcttactttagtgtagttgcagccataggataccaggattctcaactttccttctcttgtcctccctcttccttttcttgttttttatatttttcattccagctttcttaaaacataaggtctttggtattttctaagacttccatctgtgttttatttcctatcctcttttatttctttcaaaacttggctttgaaagagttcacttagtcttttttaagtttttctgtcccctcacctaggcctgaaaacatgctcaggtactccctaacactggaaataccctcttagccctgcctggagctaataatcttattgttcttcttctatgc

SEQ ID NO: 35608 - DNA, 1349 bp, Homo sapiens
aaaattttaacagtgctatattactgatgagaaaaggaggcttagagggattatgctgtacttagtaggcagtgaggtcagaattaaaactcaggtgttctgattccagaaacttcatacttatctgctatattctagtccttctgaaacaaagcaccccttttccttgatgtgcagtcaggctccctggaatatatcgtgtagttacatagcatgaaattttatttctaaaataaaactctgcatagtgtttagagtgacctacataatatcagaggggcagtggctgcctctgtgacagaggaggcataagaagtcagtcaaatgactttgtcagcttcatatgctggaaattaagagtgactgcaggactctactagtttgagctcccaaggtatagaggattggccgttgactttgagctttctcaatcatttattctcatctactgatgggaatagcatattttgtcttggattaaaagaaaaacaactttgcaagcctcattaagccaaggataatatcatctctagagataaaataacatgccagtcattcaatctacaagcaaataaagtacatttataagtatatttgatttttaccatgttagacctcaatggacctgtacgatgaatgctggggcttagtgaggcaaagcatcaaatccgaggccatgtgacagaattggaactagaaccaagaggtattatctttttaccaatgtatctaatggtcacattccttatttcatggttgtgcatttggtcattgattgcttgtagctcttggcattaggataattatttattataaatgaaataaatttgagtcagtgataatatgttgtcaggtatgtgaggttgcaatatactttatatctttaaattcttcaaccaacatacatatagcacgtcacttatgtgataatatctaactcttgataattcaaattggttctcattcttctgatgtcatcagtgccagtctagttctctttctgattatgactrtggtgcttactttagtgtagttgcagccataggataccaggattctcaactttccttctcttgtcctccctcttccttttcttgttttttatatttttcattccagctttcttaaaacataaggtctttggtattttctaagacttccatctgtgttttatttcctatcctcttttatttctttcaaaacttggctttgaaagagttcacttagtcttttttaagtttttctgtcccctcacctaggcctgaaaacatgctcaggtactccctaacactggaaataccctcttagccctgcctggagctaataatcttattgttcttcttctatgc

SEQ ID NO: 35609 - DNA, 683 bp, Homo sapiens
tctctttttctctgaagtgagtcttagtagaggagtttttcccctcaaaatatctaaaacactaagacatcccttcagaagcccccacgttgacactatgtcatagcaacatgtacccttggtgactctcctctgcctcactattcgagtcactgtcctctgcccacacttgtaccactgctttccaccaacacacacacacctggggaaatggaaagattaatactgtattaagatcatttttcccacttggccctgcaaatgactctgggaggtaggtgggttgggcaggttgggtttacccctattttgcaggtaaggaaacagaggcycagggaagtgaaaagctgtggcctgcctcaggctggtgccagggctgagttgcaaacccaggtgatctggtgccaggctgagatggcagtgccactgtgaggcagtatggcattgcagaaggcagcagggagttagactttgacttagaaagagcagctaacttctgtgagacttagtttcatcagctgaaaaactagtgttttagtctgttttttggtgcttcagaatacctgaaactgggtaatttataaagaaaaggaatttatttcttacagttttggagactgagaagtccagggtcaaggggctgcatctggtgagggtcttcttgctggtggggactccctgca

SEQ ID NO: 35610 - DNA, 1083 bp, Homo sapiens
tcttaagacagggtaccagaataaccttcataaacatgtatctgttcatgtccagtctttcaaaacctgcaaaaatcttcactttccctctgccacaaaataaaaagcaaatttcccaccctagcaatcagggccctccaaacctgaccccaaacaactgtacttcccactctccaagacgccagggrctaagttaaaggaactgaggccaaaccccacagagtgaaggaaaaagaaaatgcgcttacctcaggctggctatgcactaggcactggcaaggtatttgcagttacgcgatctcatgtaattctggtagtctgggtcttcccactttgtctccaaggcccagctgagccctgtgaggaactgcacattcctttcgctcatatatactcctctctgtgtgtctgcaaatagcctaaggctatgaatggaacatgctttgtttgtacacactggtatttgcacatgacaaaaatcaggctttgccacctactaattccctcagattcagaaaaacagctaagttttccaagaatccccaagagctattttaagtaaattttataaatttgtgcgccttcatgaggcttaatctgtactagaagggtctctcattgtacagtgtatctaacacaaccagtcactgtcttccacaggacagcctgtgactatgctgctatgtaaatcgaatgaagagacgcacagagcaaagccttgctactatccttactgtactttcacctaggtctatctaactagtaatcgaaatgtatcatatacaaacattaatttgcataatttaccaaaacactttttgtcatgattcaaatgaatcaatacagctggcccttgaacacgggtttgcactgcatgggtccacttatacacatatttttttcagtaagttacactgcgtgtgcctgcctctcctggccccttccacctcctccaccttttccacctctgtcacccctttctcttcctcttctgcctactcgatgtgaagacctttctttataggatccacttccactgaatgaacagtaaatacgtttttacattttcttttctctagctta

SEQ ID NO: 35611 - DNA, 1083 bp, Homo sapiens
tcttaagacagggtaccagaataaccttcataaacatgtatctgttcatgtccagtctttcaaaacctgcaaaaatcttcactttccctctgccacaaaataaaaagcaaatttcccaccctagcaatcagggccctccaaacctgaccccaaacaactgtacttcccactctccaagacgccaggggctaagttaaaggaactgaggccaaaccccacagagtgaaggaaaaagaaaatgcgcttacctcaggctggctatgcactaggcactggcaaggtatttgcagttacgcgatctcatgtaattctggtagtctgggtcttcccactttgtctccaaggcccagctgagccctgtgaggaactgcacattcctttcgctcatatatactcctctctgtgtgtctgcaaatagcctaaggctatgaatggaacatgctttgtttgtacacactggtatttgcacatracaaaaatcaggctttgccacctactaattccctcagattcagaaaaacagctaagttttccaagaatccccaagagctattttaagtaaattttataaatttgtgcgccttcatgaggcttaatctgtactagaagggtctctcattgtacagtgtatctaacacaaccagtcactgtcttccacaggacagcctgtgactatgctgctatgtaaatcgaatgaagagacgcacagagcaaagccttgctactatccttactgtactttcacctaggtctatctaactagtaatcgaaatgtatcatatacaaacattaatttgcataatttaccaaaacactttttgtcatgattcaaatgaatcaatacagctggcccttgaacacgggtttgcactgcatgggtccacttatacacatatttttttcagtaagttacactgcgtgtgcctgcctctcctggccccttccacctcctccaccttttccacctctgtcacccctttctcttcctcttctgcctactcgatgtgaagacctttctttataggatccacttccactgaatgaacagtaaatacgtttttacattttcttttctctagctta

SEQ ID NO: 35612 - DNA, 626 bp, Homo sapiens
agtcagcttatataaatattaaccagaattaattgataagcttatataaatattaaccagaattaattgataaaacctgtggtcatcctctcccttctccaatttttattctttccagagtgaatgcaggagaggtgttaatttaacattcaatcatcttggctctgggtctcccaactcaaaagtcggctaagtttataactttcccatattcaaagaaatgtacatagatagccctggtaaaagaggcaacatgtagaaggaaggggrtctgcagaacctcccttatttaagtaaatttaaataatcataacttaagtaaattgtattaaattaaaatttacttaagtaattctaatttaagtaaattataggagaaaaccagaagtattctagtagcaaaagggaaacttggcaagcacatcttcatcaagtgagttttcatgagtatttttcatttttgcatgtctgaaaaaaagataaaataggattacattcaagagatgtgtgaaaataaatggttttgccaaatttaggtttttctttttgcataagttttaagtatagaactaaaacgtgacttgttttaaatttcacataataagaattagtaatgttttcataat

SEQ ID NO: 35613 - DNA, 735 bp, Homo sapiens
aaaggttcgatcagttctgtcctagaagtttgctaattagctggaaagacagaatttgtatatcacatgcctaacagcaatatccatcaactagccagaaccaaaaccatgaatattggatcatactgatccatcctggttgtaaatagacaaggcccccatagccaagaatggggctactgcatgcacttgcatggcttgtgtcagaaaggtgccttcctkcagtggtgagggaccactgaagttcagccattctctgtcggggcatctgtgcagagcacacaccttttttaaattgtaccatggcttgccatcctttgcactgtgcagcacagtcagcaaatcttatggagaaggcaagatttaagttgagatgtgggtcagactgggagatacgattgccagaaggcggggctggagcagatcagccagctgggggtagatagacaacatgcagagagctgtggcaggccaggttcctctacagggggctgtccaatagaaagattttatctggattttccagtagccatattaaaaggagtaaaaagaaacaggtgaaattatttttagtaatatattttaactttatatctccaaaatactatcatctcaacatctaaaaaatgttaaatgattattaatgagatagtttacattattttttgtattatgtctttgaaatttggagtacatttcacactgacagcatatctcaaatcagatgctaaattt

SEQ ID NO: 35614 - DNA, 735 bp, Homo sapiens
aaaggttcgatcagttctgtcctagaagtttgctaattagctggaaagacagaatttgtatatcacatgcctaacagcaatatccatcaactagccagaaccaaaaccatgaatattggatcatactgatccatcctggttgtaaatagacaaggcccccatagccaagaatggggctactgcatgcacttgcatggcttgtgtcagaaaggtgccttccttcagtggtgagggaccactgaagttcagccattctctgtcggggcatctgtgcagagcacacaccttttttaaattgtaccatgrcttgccatcctttgcactgtgcagcacagtcagcaaatcttatggagaaggcaagatttaagttgagatgtgggtcagactgggagatacgattgccagaaggcggggctggagcagatcagccagctgggggtagatagacaacatgcagagagctgtggcaggccaggttcctctacagggggctgtccaatagaaagattttatctggattttccagtagccatattaaaaggagtaaaaagaaacaggtgaaattatttttagtaatatattttaactttatatctccaaaatactatcatctcaacatctaaaaaatgttaaatgattattaatgagatagtttacattattttttgtattatgtctttgaaatttggagtacatttcacactgacagcatatctcaaatcagatgctaaattt

SEQ ID NO: 35615 - DNA, 601 bp, Homo sapiens
tgcctgtagacctgggttttattcccagctctaccgctgacaagcaaattgtttaacttttctagaatcaatttcttagtagtataatgaatacaatatcctcatgaaacacacaagcatggcacatgtatacatwtgtaactaacctgcacattgtgcacatgtaccctaaaacttaaagtataataataattaaaaaaataacatgctaaaaaaattaaataaaacaatcacttaaaaagcactctgttcttaacttagaacgtgatcaaaaaatgatagtcatatttattattgttgatattatttttaatattcacgtgtaatattaaaacttcaaaaaccttatttttacaatgcaataaagttttacaaagttgtcccattgtaggcagacctatgccaacctacttgtaaaagtccaaggaagctgagaggacaaataatgtggctgacatatacagttcctcagaaagaaacatataaacatataatgggcatttacaatcagaagccatgtctgtttcttagggagcagcaaaacaggatggtgagtctgcatgctattgtggcccagacccaaggaaagaatatatgtgct

SEQ ID NO: 35616 - DNA, 988 bp, Homo sapiens
ccttctaccctccacatgtcaagtttggtcctaaggctcatctcctcatggcgcacgagggttgcaccagctccagccatcacctcctcactagctatgtccagatgtagagaataaacatttccttctagagtctctttttaagactaaagaaaccgcttcccaaattccttctgtggacgtcccctctggacttatgaacttcagcctgtgtctcttcctaacgacacttggcaaaaggaattgattgctctggttggctaagaccaggggtggcaaacgatggcccggggccaattccatccgccatctgctcttgtaatagccacatccttgtgcttgcttgtagtctatggctgcattcacactacagtgtcagagattatatgcctaaagtatttactagttggtcctttacagagaaagtttgccagccctggtttggactcagatggatgaccagggcaggacagggccatccgtgagcacatagagaaaggggttggtgtcgggggtggaatcattcaggtgggaacacagaggtatctggttcaaatctggctttgcctctgacaagccatgtgtccctgggraccccctaatctctctgaggcttagttcctccgtctgtaaaaagtcaaacctttcaccgtttctgtgtggattaaacaaggtaatagacacaaagcacctggcacggaatagaccctaagcgttatgttccttttaagcctttcctaatggattctatgctgttagactcaccccaaaagagaggctgccacagggatttgcggtttgctaattggaatccaaacattgcttctgctgttacaaaagccaagttacccaaagtagaattggttttaggagcttttttgaaactagaaagagctgacaataaaaactccaaaggagacttgtgcaactggtgatcatgggtgggaaggggtggacgggatgtcttttcttgagggttttaggatcc

SEQ ID NO: 35617 - DNA, 604 bp, Homo sapiens
acatatcacaccattcaccattttaaaaggtataattcagcacttcttaccatgttcacaaggtcgtgtgggggttgctgctgtaggagtagatgagctcacatgaccttgtacgttgcaagaacccagctcacacttatccaacacacggcatcccagctctggccagatcacactctcgtgtctgttttacagatgaggaaactgaggctcagactagaaaaaaaactcactgaagatcacctacctacttcacggagtgttcacggaagattcaaaaacactccagctctctctgcttgagggcgcctcccggccttcttagcgtcaggggtgaccatgagatttgccgaggccacattctcttttcccactggcctgcctactggccacatttaagatgatggctgctctatctgtctgggtctctgagtgaycatggtagcactgtctctctgccaacctgcaagaggcatgtgatgtgtgtgagatacacctcagtcatgtgatgtgtgtgagaggtacacctcagtcatgtgatttgtgtgagatacacctcagtttttaaaccatagagatgttaggctcgattgtcacctcggca

SEQ ID NO: 35618 - DNA, 604 bp, Homo sapiens
acatatcacaccattcaccattttaaaaggtataattcagcacttcttaccatgttcacaaggtcgtgtgggggttgctgctgtaggagtagatgagctcacatgaccttgtacgttgcaagaacccagctcacacttatccaacacacggcatcccagctctggccagatcacactctcgtgtctgttttacagatgaggaaactgaggctcagactagaaaaaaaactcactgaagatcacctacctacttcacggagtgttcacggaagattcaaaaacactccagctctctctgcttgagggcgcctcccggccttcttagcgtcaggggtgaccatgagatttgccgaggccacattctcttttcccactggcctgcctactggccacatttaagatgatggctgctctatctgtctgggtctctgagtgatcatggtagcactgtctctctgccaacctgcaagaggcatgtgatgtgtgtgagatacacctcagtcatgtgatgtgtgtgagaggtacacctcagtcatgtgatttgtgtgagatacacctcagtttttaaaccatagagatgttaggctcgattgtcacstcggca

SEQ ID NO: 35619 - DNA, 1115 bp, Homo sapiens
tgaggctaaacatgctccagtttaagcagctcaggtggggagcagggcttggacacagctggcctctggccccctgtttttgtttggcatgcatggtgtctttcagttttcacacacacacacacacacacacacacacacacacacaaatccagatttccagattcttctaaaattgtttccactgtggccacaattgtgtggctctgagtagcgacataggctgggtacaagacactagggagtgctggggactgtggcaaaactgccaccactccctagagtcttatatctagcctatgtcactctatatttctctagaccctggaggtgtttgagtatatgctcttgtcttggaactcttggtgtttcaggtacaaaatgcagaaaagccatggggtctcggtaagacagagagggctccaatcaaaagacatcaagaagattccattcacaaaatgaccctgcagagccatgtcagcacagagagggggaaaaaagaaccccagtgatgctcagtgaagcccttttattttccactctacctctgatgctgctcaaagtgatgaattagagaagctcatttcctttggttggaaaaaaaaaaacccagaaarcaaaagaaaaagccagtgttcaataaaacgtggaggaatgacgcaatggtgtgcagaaccctcagagcggagctgttaattgcttccttcccaggatgctggccggcccctttctcagggactcggatgcatttgtcaaggaaagtatcagccccccataactctccaaaatgatacaatacatcacttgaaagtaagctaggatcaacacgttgttaactgtttgatctcgcaagtcagaattaatgataggtattttgcacaaagagaaaaaaatgaatgttaaaagcctatttacgttaactaaagacatccctgcaccatcagggttgagttggaggcgatttcctgcggcacagctgttctacgtttgttagtctgcgggtgggtggcagcccagtaatcagagccagactgagggtgtggggagctgaagagatggggggcgggggtcaggaatctttacacagaaaatcccagtgaccacctagagaaaga

SEQ ID NO: 35620 - DNA, 1189 bp, Homo sapiens
ccccctttctaagaatcttccctcttcctggaagcagcacagtctcaaggctgtctcctacctgtagtaggagaacctctttatagcaatcttattttcgactccccgtaggaaatatttaatctcccaggtctcagatctgttctttgtggtgctcttttactcaggctggagaaatacctctctttcttgggatgagatttggttagtgtcacctgaattctaccactctaggaccttgccgcagtctttgcctcaccttctgctgtgctgtgcattcagaatcaacctcactggcttcagatgtttgttttcccacttaaatgtaaatggaagcttctaatgttttctgactcctagctatgctataggcgtgggccaagagtaattttatttgctctgcttttctgttctgtaagactttcaggaggatgtatggacaaatttgaatctaagtggctgctgttatccttagtaatcctgaaggccaaacctgagtctttgaaatgtattaatgaaggtaataattggtcttaattggataataattaccagtgcaaatatttttattccctcaaaggaatcaccgtatcrttcatttaactaactatttactgagcagcaattatgtgcttgtattaggcaaaatctgatctaccacttgctacttgttaagaccctgggagggagctaatgcagacgtaccttatcatccccatttcacacatgagattttccctcaccaattattctgcaggcacattggccttctcccaatttctgaatgatttatgccccaggaccattgcacagccattatttatctgcctggagcactctatcactgactttttttgtaaccttccgactttaatattaccgcttcattattttcttccacactcacctccattatttgttgttactatacattgttcagttcctttgtagctcttgtcacaatttgtattgagatacatagatatttggctgtttgctgatgtattgtctgtctctccattaaactgtaaattctgtgaggacagaaatcacacctgtgttcaatcttgtctgggttcagccacgtcaaagtgctaggaacatgtaggactgcaacaaatatttgccaaatgaatgatgcccagagaggataggcagttagcccaaggtcacacagcaggttaacgga

SEQ ID NO: 35621 - DNA, 1189 bp, Homo sapiens
ccccctttctaagaatcttccctcttcctggaagcagcacagtctcaaggctgtctcctacctgtagtaggagaacctctttatagcaatcttattttcgactccccgtaggaaatatttaatctcccaggtctcagatctgttctttgtggtgctcttttactcaggctggagaaatacctctctttcttgggatgagatttggttagtgtcacctgaattctaccactctaggaccttgccgcagtctttgcctcaccttctgctgtgctgtgcattcagaatcaacctcactggcttcagatgtttgttttcccacttaaatgtaaatggaagcttctaatgttttctgactcctagctatgctataggcgtgggccaagagtaattttatttgctctgcttttctgttctgtaagactttcaggaggatgtatggacaaatttgaatctaagtggctgctgttatccttagtaatcctgaaggccaaacctgagtctttgaaatgtattaatgaaggtaataattggtcttaattggataataattaccagtgcaaatatttttattccctcaaaggaatcaccgtatcattcatttaactaactatttactgagcagcaattatgtgcttgtattaggcaaaatctgatctaccacttgctacttgttaagaccctgggagggagctaatgcagacgtaccttatcatccccatttcacacatgagattttccctcaccaattattctgcaggcacattggccttctcccaatttctgaatgatttatgccccaggaccattgcacagccattatttatctgcctggagcactctatcactgactttttttgtaaccttccgactttaatattaccgcttcattattttcttccacactcacctccattatttgttgttactatacattgttcagttcctttgtagctcttgtcacaatttgtattgagatacatagatatttggctgtttgctgatgtattgtctgtctctccattaaactgtaaattctgygaggacagaaatcacacctgtgttcaatcttgtctgggttcagccacgtcaaagtgctaggaacatgtaggactgcaacaaatatttgccaaatgaatgatgcccagagaggataggcagttagcccaaggtcacacagcaggttaacgga

SEQ ID NO: 35622 - DNA, 1090 bp, Homo sapiens
cttcccctcccttcccctycggtgaagtcttgctctgtcacccaggctggagtgcactggtgcaatcttggctcactgcagcctctgcctcgaggttcaagcgattctcctccctcagcctcccgagtagctgggactacaggtgcaggccaccatgcctggctaatcagaatattttcttagtcaaagattgtcatgatgtgcaattgctgatgaccattgcctagtgaaaagttccatttgttccagaaaagttatgatctatccagtgagattttgttctctgctcacaggacatgagaacagtacagattaatagataatgatggttttgatggagtccagggaaagaactccattattttcacatattgtggtagcagtggaaacctgtaggatttggaaaaccacaataacccgaataatgttcgctttaaatacctcttatatccaaggttagatgagtgagagaattgattacttcccttgctggctgtggtggctcacactggtaatcccaacactttgggaggctgaggcaggaaggtcgcttgagcccaggagttggagaacagcgtgggcgatatagtgaacctcatctctacaaaaaattaaaagattagcctattgggaggctaaggcaggaggattgcttgagcccaggaggcggaggctttagtgagctgagatcatgccacagctctccagcctgggcaacagagggagacactgtctcaaaaaaaaaaaaaaaaaaaaaaaatcccctcaccttgcctccagattaaaatacctattcatctgcatttttctgtgctgtagctgagaaggcagcctctcttctggctacaggaattaacagcaagctaaatagtattgatagaaataacaaatattttcccattacccaaaatgttaagcttccctgctaaatatagtatcttcaattagaataataaaaaggcaaattcacgtgaggaatgtttatcttttattgtttctagaggtctgagtgcttgaggatgtgcatagatgggctgtagagttagaaatacttatatttgaactttagatttgtaatttactagctatg

SEQ ID NO: 35623 - DNA, 1090 bp, Homo sapiens
cttcccctcccttcccctcsggtgaagtcttgctctgtcacccaggctggagtgcactggtgcaatcttggctcactgcagcctctgcctcgaggttcaagcgattctcctccctcagcctcccgagtagctgggactacaggtgcaggccaccatgcctggctaatcagaatattttcttagtcaaagattgtcatgatgtgcaattgctgatgaccattgcctagtgaaaagttccatttgttccagaaaagttatgatctatccagtgagattttgttctctgctcacaggacatgagaacagtacagattaatagataatgatggttttgatggagtccagggaaagaactccattattttcacatattgtggtagcagtggaaacctgtaggatttggaaaaccacaataacccgaataatgttcgctttaaatacctcttatatccaaggttagatgagtgagagaattgattacttcccttgctggctgtggtggctcacactggtaatcccaacactttgggaggctgaggcaggaaggtcgcttgagcccaggagttggagaacagcgtgggcgatatagtgaacctcatctctacaaaaaattaaaagattagcctattgggaggctaaggcaggaggattgcttgagcccaggaggcggaggctttagtgagctgagatcatgccacagctctccagcctgggcaacagagggagacactgtctcaaaaaaaaaaaaaaaaaaaaaaaatcccctcaccttgcctccagattaaaatacctattcatctgcatttttctgtgctgtagctgagaaggcagcctctcttctggctacaggaattaacagcaagctaaatagtattgatagaaataacaaatattttcccattacccaaaatgttaagcttccctgctaaatatagtatcttcaattagaataataaaaaggcaaattcacgtgaggaatgtttatcttttattgtttctagaggtctgagtgcttgaggatgtgcatagatgggctgtagagttagaaatacttatatttgaactttagatttgtaatttactagctatg

SEQ ID NO: 35624 - DNA, 1090 bp, Homo sapiens
cttcccctcccttcccctccggtgaagtcttgctctgtcacccaggctggagtgcactggtgcaatcttggctcactgcagcctctgcctcgaggttcaagcgattctcctccctcagcctcccgagtagctgggactacaggtgcaggccaccatgcctggctaatcagaatattttcttagtcaaagattgtcatgatgtgcaattgctgatgaccattgcctagtgaaaagttccatttgttccagaaaagttatgatctatccagtgagattttgttctctgctcacaggacatgagaacagtacagattaatagataatgatggttttgatggagtccagggaaagaactccattattttcacatattgtggtagcagtggaaacctgtaggatttggaaaaccacaataacccgaataatgttcgctttaaatacctcttatatccaaggttagatgagtgagagaattgattacttcccttgctggctgtggtggctcacactggtaatcccaacactttgggaggctgaggcaggaaggtcgcttgagcccaggagttggagaacagcstgggcgatatagtgaacctcatctctacaaaaaattaaaagattagcctattgggaggctaaggcaggaggattgcttgagcccaggaggcggaggctttagtgagctgagatcatgccacagctctccagcctgggcaacagagggagacactgtctcaaaaaaaaaaaaaaaaaaaaaaaatcccctcaccttgcctccagattaaaatacctattcatctgcatttttctgtgctgtagctgagaaggcagcctctcttctggctacaggaattaacagcaagctaaatagtattgatagaaataacaaatattttcccattacccaaaatgttaagcttccctgctaaatatagtatcttcaattagaataataaaaaggcaaattcacgtgaggaatgtttatcttttattgtttctagaggtctgagtgcttgaggatgtgcatagatgggctgtagagttagaaatacttatatttgaactttagatttgtaatttactagctatg

SEQ ID NO: 35625 - DNA, 1090 bp, Homo sapiens
cttcccctcccttcccctccggtgaagtcttgctctgtcacccaggctggagtgcactggtgcaatcttggctcactgcagcctctgcctcgaggttcaagcgattctcctccctcagcctcccgagtagctgggactacaggtgcaggccaccatgcctggctaatcagaatattttcttagtcaaagattgtcatgatgtgcaattgctgatgaccattgcctagtgaaaagttccatttgttccagaaaagttatgatctatccagtgagattttgttctctgctcacaggacatgagaacagtacagattaatagataatgatggttttgatggagtccagggaaagaactccattattttcacatattgtggtagcagtggaaacctgtaggatttggaaaaccacaataacccgaataatgttcgctttaaatacctcttatatccaaggttagatgagtgagagaattgattacttcccttgctggctgtggtggctcacactggtaatcccaacactttgggaggctgaggcaggaaggtcgcttgagcccaggagttggagaacagcgtgggcgatatagtgaacctcatctctacaaaaaattaaaagattagcctattgggaggctaaggcaggaggattgcttgagcccaggaggcggaggctttagtgagctgagatcatgccacagctctccagcctgggcaacagagggagacmctgtctcaaaaaaaaaaaaaaaaaaaaaaaatcccctcaccttgcctccagattaaaatacctattcatctgcatttttctgtgctgtagctgagaaggcagcctctcttctggctacaggaattaacagcaagctaaatagtattgatagaaataacaaatattttcccattacccaaaatgttaagcttccctgctaaatatagtatcttcaattagaataataaaaaggcaaattcacgtgaggaatgtttatcttttattgtttctagaggtctgagtgcttgaggatgtgcatagatgggctgtagagttagaaatacttatatttgaactttagatttgtaatttactagctatg

SEQ ID NO: 35626 - DNA, 560 bp, Homo sapiens
cttctcaagatttgataagaaaagtgtattttttctgtcttggtatcccttcatgctacctttcaatttcttgtgggtttctctctctctctctctctctctctctctstgtgtgcgtgtgtgtgtgtgtgtgtgtgtgtgtgtgtgtgtgtttgtgtatgtataagaagcctcctgaagtctctcatcagctgtgctcagtttggcagagtcacagtttagttctggaatcttctaggtggcatgagtgtaaagcttataccttgtaagcagccccccgccctttgggtgcactctgtatcctgtgcttaattccgtgatctcgtatcccttttacggatggatggacttgttatgtattaatttaaatatcttaaagctaccccaaacccagcatttctaaaactaaacccattctttttttcctaaatctatttttcttatatttgctatctcagatagtattgcaggatctggccagcagcccgcaatgcaacggggctctctatttgttcccaggcggatcagcaggtcgagaaataatagacacacacaagata

SEQ ID NO: 35627 - DNA, 610 bp, Homo sapiens
aattaggagggtgtgagaatcttggacgttggggaagcatgatgtaattgaggttggagaggaatggctcccaagattttgatttatatacctaaatgaatgggataaaataggaaaaactggaggaatccaagatttgggagacataatagcatgaatttagcttgggattgcagagttttgggaataagagcctttgaaacatccaagtgaagaggttgaatagccagttggctgaagataggggcctttgaggagagagatgggcaggagatctacgaataggagttgatgcttagttgaaaactggagaggagttcaaggctgcaatgagtatgacagcaccactgtactcaagcctgggggacagagtgagactttstctcttaaaaaaaagaaaaagaaaaagaaaaccaaatatcaacagagctcctggctaggtgcagtggctcacacctgtaatcccagcactttgggaggctgaggcaggaagatcacttgagcccaggagttcaagaccagcctgggaaacatagcaagacctcatctccacaaataattaaaaaaatagccaggcattgtagtgtattcctatagtcccagctactca

SEQ ID NO: 35628 - DNA, 612 bp, Homo sapiens
tggagtacagtggcgcaaacacagctcactgcagcctcaagtgattctcctgcctcagcctcccaagtagctgggaatacaggcatgcgccaccacacctggctcatttcttttatttttttttgtagagatggggtcttctcatgttgcctaggctggtctcaaactcctggactcaagcgatcctcctgcctcaacctcccagtgctgggattacaggcatgagccaccatgcccagctgtaagcagattgttttttaaaaaaagacagaaaaaagtgaaaactgttagtgttggaaatgcatgttacagatgagaaaaatktaaaaagccagcaaaaataggaaagtttctgacagcactcttagaattaacggaagctattatgtggtaagtaatgaagggaagtgacaagagcaagaggtgcccagctatgacagtgcagaagtgaacggtacttaataaaaggaatattttaattttttttttttttttttttttttttttagagataggatctccctgtgttgccctggctgatctcaaactcctgggctaaagcaaccctcctgcctcagcctcccaagtaactgggcaaaaataacattttaa

SEQ ID NO: 35629 - DNA, 1299 bp, Homo sapiens
caaattacagaacctcatgaaataagcacatatgtacacatacacgtgagttaattcccacttcaaacaaacaaagcatttaactcttttggtaaacacattgttttggttttggttttagagattctgcaaaagttcttagtcatttggaatttttaagcataaaagtactaaataatattaagcaggaattttttaggtgttgctttttagctcctttttatcagttctgggaagcaaacagtgctgcatctcctttgctctcatagaattctgtaatttttataccacaggtctctgctaaaaggcggcatgtgtttagaaattctaaaaatgagggctctgaactttgtaactgtcctgatacgttttcccttttttaatcccaaccccctggccaaatctgtccttagagatcattgataccttgtattgaaccctagggcgtaagtaattccgttgagaggcttttatacactgaaagccttacgcgtgtgttggttatcttcaggctctgactcagctgagtgtgcatctcacttcgcacattcatgttgtgtcttaatgacacacaaactatttttgaccatgacctgtattgtcacacagtgtgtttcttactgttgacttacagtagacttgctgaggcctgtgatgctgtgctttaaaagccaaaaactttgcaaaatgagggagaaatgtctataataaatgtattatatatacacaaatgtttataataaattttctttttacaactcatagcaagttaaatgttcccagtgggttcactgctccctaggagtgagttcaccattccctagtattttggttatattttctggctactaagatttcagcttctgtggatttttgctttaggtcagcaaaacagcattcactaaattatccactattataatgtgctgagaaaaaactaacccatggaaaattaaggtaagacagaagtcagcaaatttctgtctttggccagatacgtaaaatcattacattttattccatatattgaataaagatcataaatttcaaattctttattacttcaggaatttaacyagtccaatttttatgataagatagggacattttactctcatttgggtttcagtttaaacaaaaggtcttttcagtgaggtttcctactaggaatagcttttgcaggtgatcacagaggtttttctagctggtagcattcacaattgaggtttgcaaagcagtgtagggaactagagccgccacgacagggaggttggcgcctcgggccatgtcaccttcgat

SEQ ID NO: 35630 - DNA, 546 bp, Homo sapiens
aatggtgatttgagacagaatcaagattcgaatttttaaggttttatatcccagggtgaagacatggctgatatcctaatccagtgtctgcatatatgattatagtaatgcctttgaaattgaaagaaaaggcacaaactggggaagaggtagtatctgagctaaggagttcctacattatttgcttttacgtttccagccctttataaacccatatgttgcgctgggcatggtggctcatgcctgtaatcccagcactttgggaggccaaggcaggcagatagatcacttgaggccaggagttcgagatcaccctggccagaatggcaaaaccctgtctctaytaaaaataaaaaaattagctgggcatggtggcacatgcctataatcccagctactcaggaggcagaggcacgagaatcacttgagtccaggagatcaaggctgcagtgagccaagatcgcaccactgtactccagcctgggcaacacagtgagaacctgtctcaaaaaataaaaataaaaaaccctgtacattgtcctggta

SEQ ID NO: 35631 - DNA, 546 bp, Homo sapiens
aatggtgatttgagacagaatcaagattcgaatttttaaggttttatatcccagggtgaagacatggctgatatcctaatccagtgtctgcatatatgattatagtaatgcctttgaaattgaaagaaaaggcacaaactggggaagaggtagtatctgagctaaggagttcctacattatttgcttttacgtttccagccctttataaacccatatgttgcgctgggcatggtggctcatgcctgtaatcccagcactttgggaggccaaggcaggcagatagatcacttgaggccaggagttcgagatcaccctggccagaatggcaaaaccctgtctctattaaaaataaaaaaattagctgggcatggtggcacatgcctataatcccagctactcaggargcagaggcacgagaatcacttgagtccaggagatcaaggctgcagtgagccaagatcgcaccactgtactccagcctgggcaacacagtgagaacctgtctcaaaaaataaaaataaaaaaccctgtacattgtcctggta

SEQ ID NO: 35632 - DNA, 501 bp, Homo sapiens
ctacacctcagtgttgaaatcattctcatgtggcattcagtccttaactcttttaatccactagggggcctggtttctggtagactgtggcactgatgcagaattacgaagacttcagccgtgaggagttagatttttcccccaagttccagtatcttgctctattctttatttcctgcccaaattctaccctagctttcactctgtgcaaagaaagragagcatcatctctcagaccaatggagaattcatattaagcacagcaaactttcataaattttgtttacttcatttgattttctcttgtagttgggaaaataatgtttcgctataaatatccttttcacatttctgttaggctgtaagaaactcggatcctataaatgatgattatcagttgattaactaaacaatgttagaacattcaaaaaggaaaaaatggtaaaaaacctatttgcctacttgaatatctttttatcttaaatcgactgaatttttttt

SEQ ID NO: 35633 - DNA, 3073 bp, Homo sapiens
atactattctaaataaagagttaagacaaatggtagattgaaagaaaatatttgtaacatatatgacaaaggattaatagccttaacagatcaagaatattaattccatcagaaaaagagtaaaaatgggaagacgacatgaaaaggcaatgcacagaggaggaaggcagcaacatgttaatcagtcccccatccactcggtgcctggcacaggaggggccccgcctcccgccagcctcttcctagtgcagacatcactgctgcctaaggatgagtccatcaccatgaagacccaacgttagctccaaacagcttcatggacacagctttggagagagtgccattttaacaaaatcaaagtcctgatacaggaacatgtatttttgcagtacatcttggcagtcacagtaatggctgtctccgcatgagcatctgatgttaatgctcactctgaaccactaaaacacaaagggtgagccccgtgtgccacagccagcccccacgtaggtgagaaggctttaggatccaatcatatatgaggcccgtgtttctttctcatgcacttatgggaacagacaaaaaactatgtttagaaaagatgcattattgaagaaattttaatttaaaaaaaatcaaaagaaaaattgaacagtgcctaaatctttattttcataacctacattttttttcaaattagacagttttacactgaatgacacaaaaggaaacttaaattaccaatagtttacatgtaagcttgattccagtcttaatgaagcagaacaaaaacgaaaccctcgaggagcgaccacatgacccccgcgctgtgagctgctggcggccagcgccctcgcctcgattgtctgcagccctgtagtgggccgcgaggcacgcaagccgcaactacagctcgccagcggggcacacagacaggcatgcaccaccactacccgtcgcccggatacactgaactggttttgaagcctgaactgcagagatcctaatatagcaacgcaggacgtttacggccacccgccagtgacagccggtgatgtgatgacaggagggcctgggtgaaaatgtcaagacactcactctcagagaacgacgactccacttgaaattcatgtctggtgaaacgggaccaggtttttattcttctatttcaaaatgataagcatcatcacacgattttacaagttaaaatgccatttgtcactgctgcatctctgattctataacctgagatactgctgggggtaaaggagggtgttaacttaaaaaaaaaaaagtatgaaagccactctcatcgctgtatgtgacacagcacagttggcatggaccgccacagcttcctattatgataactctcattttcttctgagcagaaactcttgaagtagtatcaggttttttcagacattatatagcaatctgtatttcacctttaattaaaaaggatgctataaaaatcacctccgagcaacgtttcagttcttgatgcagaagactgctgctggctaggcagtaactacagtgtattgaccggagggcagcagagccctccagtggcgactggctaatgcacgcgctgccctcctcatgcagctgttgagctcccacttcggtcgacaaagtgaaggactaagctggctctaaccacacacacacactgcgctgcaatgctcacaccttgggggaaaggacttctcattattaaaaaccaaggactcactggcggacgggcaggccttgtgttttgggaatggctgatggcgccctggcccttccgtagcgaagatgcagctcgtaggcccaggcctcgaggttgcctcccagctttctgagtattgagagtttgggtttcacagatcaattatttctgattttttttttttttttggtcagtgaactgacaactacaaaaaaaaatccccatgttctttaaaatgcatttgaaaaacactagccctgtggctatttctctgtatttgaataatggcaactgctttaaaggaaatggtcaaataggcatgttttcctctggcagggtcaatcatgcttagctgcaggtgatttwaattagattactagtcaccttcacttacgatcctgccagtttttgctctctatatactttaaaactctttcacattagatatgattagtatgcatttacatacattttaaaagagtatgaaaacatctggaggcttttaataagactttccaattcccttttgcagcaaagaggcagaatcagttcaacacaccgatgtaagagaaaaaagaaaatctcaacaaatcaaaataatattcaaaccacaacatttagtttatctacatcccgctcaacagcaacatttataatatatcaataatctgtatcagaattttctctgtagggtacctttttcatatgttctgattatttacaactgtacaagcgaagcacactccaagtgcacgtatttaatacagtattgactatttgcatttacaggattttccaacattctgaaaaaagatcaactgttgaagatctttaaggtatattacaaaaactactactagctcttgtactacagtatgcttactcagtaaaactagcgacaggagatccacgcagtaactgagtaactctgacccactcacgccaacccagggccgggctccatggactctaagctgtcttatacaaaagttaaggcaaagtcattttcaagtttaaataaaattcaagtctttaaatattggatggaaataattttttcttaaaaaaaaccctcagtcttgttaaataacattttgtggaataaagtgtatggttacatttagcaggaaatattcttattttaatgtttgctgcttagaataaagaaaaatttgaggcattttaaaacaaaataatttatatttaactttattataaacttgctaactttagtgcatccttgttcttcagaagtgcagcacttctggaagtgaatcaatgaggccctcgtcttggaggtaaaagagcaggaactttatcctccaccagccaaagagggggaaaaaccacaaacaccat

SEQ ID NO: 35634 - DNA, 672 bp, Homo sapiens
gtggaaatttaaggctaatgtgacaatcctggaatgtactcaatctccaaacaggagcatgaccatctaccaatatgaaaaggactagacacgtcacctggctttcattgtaaagatactgcatcaaaatccaccttaaattctgccctaggaagtgaggaatggttctatctactgcggggccttccctaaagcccagggtggaagagacactgactctgcagacctgggtggggtagcaagcagcayggtcatgtggcgtggaacagacacgtggtaactctggggcacagctggggaaagggcccctggcacaggggacaccggcaacctggagtgctcagcaggttcttcctgggctcttcctatgcacagtaggtaactgggcagaaaacttcctctgtacttcccagagccttcaacgccaggtgtggcagccggccaagtcccacttccacctcctaagcacattagaggccagagtgctgggctgagtgtcctctgtcatctgcagctcgggacgactcctgggatgatattcactgcagtggaggcggcacctcgtggggcagcccagacctcaccagaagctaccgacactacagtgaggttctcccaggcttcttgctccttgtctcatgtagattactacacattttaatcatttccaat

SEQ ID NO: 35635 - DNA, 572 bp, Homo sapiens
tgacgtgctgattttaattcctgtggctctacagatggctcctgacttgtaatggtttgacttacaatctttcaacatgacgatggtgcagaagtgatgcacattcagtattattggggctctgtcccagtgatgccatcatacgtcgagggtcgactgtatacctaaaggtgggattgctggattgcatggtagttctattttcagttttttgaggaacctccattctcttctccatagaggctgtactaatttacagtcccaccaacagtgtacaaggtttccyttgctacacatcctcaccaacacttgttatcattcatctttttaaaataatagccattcaaataagtgtgaggtgataccttattgggggtttaatttatttccctgatgactagaaatgttgagcatttaaaaatattccattggccatttgtatgtctttttttttttttcgagacagagtcttgctctgtcacccatgttggagtgcagtggtgcaatctcagctcactacaacctccacctcctgggttcaagtgattctcctgcctcagcctcccaaatag

SEQ ID NO: 35636 - DNA, 572 bp, Homo sapiens
tgacgtgctgattttaattcctgtggctctacagatggctcctgacttgtaatggtttgacttacaatctttcaacatgacgatggtgcagaagtgatgcacattcagtattattggggctctgtcccagtgatgccatcatacgtcgagggtcgactgtatacctaaaggtgggattgctggattgcatggtagttctattttcagttttttgaggaacctccattctcttctccatagaggctgtactaatttacagtcccaccaacagtgtacaaggtttcccttgctacacatcctcaccaacacttgttatcattcatctttttaaaataatagccattcaaataagtgtgaggtgataccttattgggggtttaatttatttccctgatgactagaaatgttgagcatttaaaaatattccrttggccatttgtatgtctttttttttttttcgagacagagtcttgctctgtcacccatgttggagtgcagtggtgcaatctcagctcactacaacctccacctcctgggttcaagtgattctcctgcctcagcctcccaaatag

SEQ ID NO: 35637 - DNA, 1925 bp, Homo sapiens
agatgcagatgcactgaagcccacacctgccccccagtccagcccagtgagtgtgcatgtgtgtgcatgtgtgcacctgtgtgcgtgtatgtgtacctgtgtctctatgtacatctatgagtgtgtgcatgcatgtgtatgtgtacatgtatgagtgcgtgcatgcattcctgtgtctgccagtgtgtgtacatgtatttgtgcgtgtgtgcatgtatgtgttcacatctgtgtgtgcacatgtgtgtgcctgtgtgtgcatgtctgtgcctgtgtatgcacttatgtgtgcctgtgtgtgcatctacctgggtgtgcacgtacatgtgcctgtgtgtgcatctacctgggtgtgcacgtacgtgtgcctgtgtgtgcatctgagtgagcacagatgtgtgcgcatctacctgggtgtgcatgtatgtgtgcctgtgtgcaggcacctagttgccaaacagatcacgccgactcactagtgatatgtcaacaataaaactggattgtcatctttgtagagcagtagttctcaaagtcagttcttcatcagaaatctaggggccaggcctccaggcagctgtgacacagccaacggccaagagctgcgggtattgatcagactgcagggcgtcggtcctcccaaaaaggtgggcacagctygtccatcagggttgtgggtgcggggcagctgtgtggggccccttcctctcccaccacgacgtctgctcacacagggtctgtgtgcctctctgggtgttcacctgataatacagacctggtggcccagtcttcactcacaagcataggtcccaggctgcttaccagcatgtgaactggctgtgttgcagtcaaatgctcggccccagtatagtcagcgttcactgggaagggtcaggtcttgtgaagccttgagcaccactgggcaggggtggccctcaggactgggccatccacgggaataacatgaattagaaaacagaacactactaaatatttaaaatttttagccaggtgtaatggtgcacccctgtagtcccagttactcgggaggctgaggtgggaggatccactgagcccgggagatggaggctgcagtgagccatgatggcaccaccgcgctccagcctgggcgatggaagaagaccgtgtctcagaaaaaaaaaaaaaaaaaaaaaaccttaaaaataaaagtgttttaaaagctctctaatgtttcttttcatgcttattgttggagatagctgcaccgaaagaccacactctgagtcactgctgtgtcaaattaagtcagggctgctggataacagctgttctattgctgtcactgatttctggtgtatcaaaaacagtccaaataaaacataaatgggatgagaaggggctggaaaccagaagaaatggtgtaacatgttgcagacttcaaaaacggagccacagccatggttttcccatctagcactcaccctctatagctttgtttccttaaagtaaacgagtctgaggaaaaaatggcacacaactttgaaccatgctattaagcatttttaaacagttcttccgactttcccctggtgctcagctctgtcacaggaccaaatgctggccgagcactagggcctgggtggaccaggatctgtgatatttgtgtaaacaatttagtactttaggcctagaatgcttccttctcaaagggctccttcgaccctcactactccgtaaaatgggcaggggacagctgctcatgcacattttaaacaagttcaaaggatgcagagagtagaagattcaacccaggtgttcagaggcaacagtgaataaaagtcaggcttggaaccagctctgagagttgaaggaaaataaattcaatattaaaaaaccaaccatatttctatatgcttgcaatgaacagttaagcaatggaaaaa

SEQ ID NO: 35638 - DNA, 1925 bp, Homo sapiens
agatgcagatgcactgaagcccacacctgccccccagtccagcccagtgagtgtgcatgtgtgtgcatgtgtgcacctgtgtgcgtgtatgtgtacctgtgtctctatgtacatctatgagtgtgtgcatgcatgtgtatgtgtacatgtatgagtgcgtgcatgcattcctgtgtctgccagtgtgtgtacatgtatttgtgcgtgtgtgcatgtatgtgttcacatctgtgtgtgcacatgtgtgtgcctgtgtgtgcatgtctgtgcctgtgtatgcacttatgtgtgcctgtgtgtgcatctacctgggtgtgcacgtacatgtgcctgtgtgtgcatctacctgggtgtgcacgtacgtgtgcctgtgtgtgcatctgagtgagcacagatgtgtgcgcatctacctgggtgtgcatgtatgtgtgcctgtgtgcaggcacctagttgccaaacagatcacgccgactcactagtgatatgtcaacaataaaactggattgtcatctttgtagagcagtagttctcaaagtcagttcttcatcagaaatctaggggccaggcctccaggcagctgtgacacagccaacggccaagagctgcgggtattgatcagactgcagggcgtcggtcctcccaaaaaggtgggcacagcttgtccatcagggttgtgggtgcggggcagctgtgtggggccccttcctctcccaccacgacgtctgctcacacagggtctgtgtgcctctctgggtgttcacctgataatacagacctggtggcccagtcttcactcacaagcataggtcccaggctgcttaccagcatgtgaactggctgtgttgcagtcaaatgctcrgccccagtatagtcagcgttcactgggaagggtcaggtcttgtgaagccttgagcaccactgggcaggggtggccctcaggactgggccatccacgggaataacatgaattagaaaacagaacactactaaatatttaaaatttttagccaggtgtaatggtgcacccctgtagtcccagttactcgggaggctgaggtgggaggatccactgagcccgggagatggaggctgcagtgagccatgatggcaccaccgcgctccagcctgggcgatggaagaagaccgtgtctcagaaaaaaaaaaaaaaaaaaaaaaccttaaaaataaaagtgttttaaaagctctctaatgtttcttttcatgcttattgttggagatagctgcaccgaaagaccacactctgagtcactgctgtgtcaaattaagtcagggctgctggataacagctgttctattgctgtcactgatttctggtgtatcaaaaacagtccaaataaaacataaatgggatgagaaggggctggaaaccagaagaaatggtgtaacatgttgcagacttcaaaaacggagccacagccatggttttcccatctagcactcaccctctatagctttgtttccttaaagtaaacgagtctgaggaaaaaatggcacacaactttgaaccatgctattaagcatttttaaacagttcttccgactttcccctggtgctcagctctgtcacaggaccaaatgctggccgagcactagggcctgggtggaccaggatctgtgatatttgtgtaaacaatttagtactttaggcctagaatgcttccttctcaaagggctccttcgaccctcactactccgtaaaatgggcaggggacagctgctcatgcacattttaaacaagttcaaaggatgcagagagtagaagattcaacccaggtgttcagaggcaacagtgaataaaagtcaggcttggaaccagctctgagagttgaaggaaaataaattcaatattaaaaaaccaaccatatttctatatgcttgcaatgaacagttaagcaatggaaaaa

SEQ ID NO: 35639 - DNA, 1925 bp, Homo sapiens
agatgcagatgcactgaagcccacacctgccccccagtccagcccagtgagtgtgcatgtgtgtgcatgtgtgcacctgtgtgcgtgtatgtgtacctgtgtctctatgtacatctatgagtgtgtgcatgcatgtgtatgtgtacatgtatgagtgcgtgcatgcattcctgtgtctgccagtgtgtgtacatgtatttgtgcgtgtgtgcatgtatgtgttcacatctgtgtgtgcacatgtgtgtgcctgtgtgtgcatgtctgtgcctgtgtatgcacttatgtgtgcctgtgtgtgcatctacctgggtgtgcacgtacatgtgcctgtgtgtgcatctacctgggtgtgcacgtacgtgtgcctgtgtgtgcatctgagtgagcacagatgtgtgcgcatctacctgggtgtgcatgtatgtgtgcctgtgtgcaggcacctagttgccaaacagatcacgccgactcactagtgatatgtcaacaataaaactggattgtcatctttgtagagcagtagttctcaaagtcagttcttcatcagaaatctaggggccaggcctccaggcagctgtgacacagccaacggccaagagctgcgggtattgatcagactgcagggcgtcggtcctcccaaaaaggtgggcacagcttgtccatcagggttgtgggtgcggggcagctgtgtggggccccttcctctcccaccacgacgtctgctcacacagggtctgtgtgcctctctgggtgttcacctgataatacagacctggtggcccagtcttcactcacaagcataggtcccaggctgcttaccagcatgtgaactggctgtgttgcagtcaaatgctcggccccagtatagtcagcgttcactgggaagggtcaggtcttgtgaagccttgagcaccactgggcaggggtggccctcaggactgggccatccacgggaataacatgaattagaaaacagaacactactaaatatttaaaatttttagccaggtgtaatggtgcacccctgtagtcccagttactcgggaggctgaggtgggaggatccactgagcccgggagatggaggctgcagtgagccatgatggcaccaccgcgctccagcctgggcgatggaagaagaccgtgtctcagaaaaaaaaaaaaaaaaaaaaaaccttaaaaataaaagtgttttaaaagctctctaatgtttcttttcatgcttattgttggagatagctgcaccgaaagaccacactctgagtcactgctgtgtcaaattaagtcagggctgctggataacagctgttctattgctgtcactgatttctggtgtatcaaaaacagtccaaataaaacataaatgggatgagaaggggctggaaaccagaagaaatggtgtaacatgttgcagacttcaaaaacggagccacagccatggttttcccatctagcactcaccctctatagctttgtttccttaaagtaaacgagtctgaggaaaaaatggcacacractttgaaccatgctattaagcatttttaaacagttcttccgactttcccctggtgctcagctctgtcacaggaccaaatgctggccgagcactagggcctgggtggaccaggatctgtgatatttgtgtaaacaatttagtactttaggcctagaatgcttccttctcaaagggctccttcgaccctcactactccgtaaaatgggcaggggacagctgctcatgcacattttaaacaagttcaaaggatgcagagagtagaagattcaacccaggtgttcagaggcaacagtgaataaaagtcaggcttggaaccagctctgagagttgaaggaaaataaattcaatattaaaaaaccaaccatatttctatatgcttgcaatgaacagttaagcaatggaaaaa

SEQ ID NO: 35640 - DNA, 528 bp, Homo sapiens
cactctgtggctcctttctcccctttgtttccttctcatcctgttgaccccctgccccaacacccacctgtctgtggcccacgacctcccgtgcccgtggccatgccgtggtgccttggctctgccctccctcggcccccatgcttcccgtccacttcgctggctcacagctttcccgacaccctccctccatcggccccggagcgggctcacacgcaaacacacggactccctcgcaggtgcgaacatgcttgttcgcaggcacacgcagtcctttggccaaggcttctgtgccctggcccagtcgcctcagatggaaccagtttattgggatcctggggtggggtgcaataacaaaaggagctttgttcaagtttatgtgaaagttacaaattcaaaatgagagcagataaagcatgagatacctggtgtgtaaacaggctggtgagtgagaaggccccaggctcgggagggagagagtgtaggtgggcaacttgggggtgsggggggggtaacaggaaccagcga

SEQ ID NO: 35641 - DNA, 959 bp, Homo sapiens
ctgtatgtaatcctaattctaacaatgaaattccctggctgcagagcctcagaaatatgagtctctttgtactctagtcactttttccagactacaccrcagagcctattttaaacagctttaatactatataaaccccattttccttacatctgagatttccttaaatgacgaggaaccagagatactgattttgactttccaatagtttacggccatcaggagccataccttgatcctcaaggcagggagatctcttcagcaaagcattaggttttggcttaaagaatggcgtgttctttgaccaaacaggttcagtcatccctaattctgattcgtaagttcaagagtatgctgatttttattgtaacagaaactgctggtctcttacctcatgaatggttgcagtgcgtttagaatcagttgatcatcgctccttatgtctcaatccttatcctgcccagcttccatattaagtctccataagccaaaaattctaacactcccatgctggcaacataataacctctaactatattttgattccagaaagacaacatttgaaggcatttaaatgccctcaggcaaatctgtggcatctcaatggcctcgtttgtgttgcatggggcttcatttcaaagttgaaccccctctcgggcacatgagcacaggaaacacatacaacactgaaaaacacatttaatgtttgaagcttttattaatatgtatgttggcattagaaataaatcaaggttcctttccttcctggaccagattttgactcatagttacttgctgttattcattttcactcctctgaatctctgtaaattaaaataacctagcctggacaggtcgggtacctcatgcctgtaatcccagtgctttgggagacagaggtaagaggatcacttgaggccatgagtttgagaccagcctgagcaacatagtgcccatct

SEQ ID NO: 35642 - DNA, 937 bp, Homo sapiens
aaagatcttgctcctaaggacagacacaatgagcttatccaataggaaaatttstggctaaaaatggaattttcccacacactcaaattaacataatattcatgataattgggattaacatgcaagcacaagatatttttgtcagtctgaaaaagtaaatcctcccaagctaaaaaaactctccgatgaaagaaaaatcgaaaaataaaacagtaacttttaatgtatttttaaaatttatttttatacacaaaatatcttttattctgaattatacagaatcaaaaccccacacaagcattgtttataagatccactaatgttatattattattattattattttttgagattgagtctcgccctgtcaccgagactggaatgcagtggcacgatctcagctcactgcaacctccacctcctgggttcaagcgattctcctgcctcagcctcctgagtagctgggattataggcatgtgccaccatgcccggctaatttttgtatttttagtagagacagggtttcatcatgttgggcaggttggtcttgaactcctgacctcaagtgatctgtctgcctcggcctcccaaaatgttatatttttataaattttatgctttttataataactgatatgcttacataacagctttctttaaatctgagttaagaaaatttgtcagtatatcattgttttatgtttcctgactataattacttagttgtaaggacaattacaaccacattaatacttgacagaattttgatgcttgatacctgaatactgagtagcatccaattaaaatatcaatgtgattttcatgtgccaaagataatattttattcaagttcccaaaacaaacttgaggagttacattgggtttgaattcaataaaaaaggccaagttaaaatatgaaaagaaatggttttcatt

SEQ ID NO: 35643 - DNA, 668 bp, Homo sapiens
taggttctacaataatgatgttatctgcaggaataattggggagttgcaaatcttgtgacctccagaaaaatggctgataatcatttatgtctacaccttagcagaatccagtctcctctttctcctgatctgattctttcattagcttcccaaaggcagtttagtttggggaagggctattatcattaaactataaattaaatgtctcccaaagttggtttggcccaggcccaggagtgattaaggscagtttggaggttaaaggcaagctgagggttggttaggtcagatctttcactgtcataattttttcactgttataatttttcaaaggcagtttcaaagatggctggagctcctgtgccaacctgtgaccctgaggatggagaagcagcaagagtctgggtccctaaagcactggagggctgacttcctggcttgttttctgtaagagaataaccccctaatatatttaggttgcagtatttggatctctatgaaaagtgctaacccacttgctaatggatatgattggcattgaaggatctccagacttgactccaatcttcccttctggcatttacatcacatattatttctcagtcctagctcgagctactctccaatcgggactcctaccaaattcccatccaggtttaccaacagg

SEQ ID NO: 35644 - DNA, 571 bp, Homo sapiens
attactttttcaattctcagtctataggtggatctcaagttgattatccaactttaaacctattccaggtgtcttattactgaattgaaaatgtatttctagtatgaagtttactgtctctggaaaytgtacctcctagaatgcccatgcaattattagttttgtttcacagttgcctcctcagttctcttactgccccccgacatcccctatcttgttctttttttttttttttcttgacacggagtcttgctctccctctcgactaaagtgcaatgatgcaaacatgattcactgtagcctccacctcccaggctcaaacaatcctcctgcctcagcctccaaaatgttgggattacagttgtgagccactgcacttggccttaccttgttctttttctgccatcttgatatttctgtctagatgagaaaaaaaaatggcactgactctagaggaagggataatactgtagctgttagaattagcaggactcctgcagtggaggacttttaagttagaaggccttaacattgttactaactatatcttgagtaagtctcttgactttgt

SEQ ID NO: 35645 - DNA, 1172 bp, Homo sapiens
atggaatgaaaatagaaaatattttgtggagggagggggacaagatgtctgacttgatgcaactaggaagtgcctctcccaccaagagaaaccaaaatatcaggtaaaccatcacgtttcaaacagatctcttgagtggaaaaactgagtgctgayagaagggtgatacagacattgaggtggaagagggaggaagttgggaaccctacatggagttgccaagcactgggaccagctccagaccttaaacaggtcttgaggaaggggtgagtgaaagaactgcaaggcaacactctcctgctgtggacctccaagatcctagctgcaagagctcccaccacccttacagatatttggattggcaaggggagctgcccagagagtagacagaggcagagtttgagcctgcacggagcccagaaggttttgcggggggcagctacagcaaaacacgaccatcaacaaccatctccctgtggctctaacctctgctgactgccaaggccaggagagagcagggctatctttcccatgggaccagggtgactctaatctgccacgcccccttctctgccagcccctcccaagtcttccggctggctgctcccacaaaagcatacacatagcacagcttccactgcccctcctgagtgctttgctggtggcctgggagcacttcggcccccctgcatagcctgtgctcaaccctaagaggtcagaggacaaagccacaggtccagtcccaatcccccagagttcggacacacagctgaggaatatccaactgagatctatggccagagctagattggggtaagagcccctactctccaaacactgagaagtataaggtgtgggtttgtgggctggagcaggagcagaacgtgcttccctctgcaagaccagccagggaaaggtgtagcctgtttgtcagccaaagcctctgccagaaggagccccatggcccagaacaaccaacagcccagcaatctgtgtgcaggtggagtgagacaaaactagctggtcatgccagctactaggatagacaccgtaaggagatcccgttgtgggagcacgagtggaatggtccccacagccatctgctaggaaaaaaaacccaagctgcagtcaccacaccagctgcatacccacagcaacactgccctgcccag

SEQ ID NO: 35646 - DNA, 1608 bp, Homo sapiens
ggccccgacccccaccccagcctaaacagaatacttgatcgactctccatttcaagctttaatctcagcaagcaattcagatgagtcagrtatcagagtatggccatggtgagatcctactctttcatggagaactgcgaggtccaagtgacaaggaaacaagtaatcatcacatgcaaagttattcagcatggaagatgagttataatgacagatggtaccagtcaaaaaaaatagctctatggaaaaaagcatgctgacaggataccagtgtataagtcaaacatgggcaatgtaataaaatagcaataagggatgacacaacaattttttgagaaatgttcacaagaactgttttaagtgtacctgtacatctgttctctattcgtcatttggaaatagtagttatttcctaatatcatcatcatcatcatcatcatcttcatcaaataaaacaatagaactcaatgttcatagatgtagctgcgctgaaggagatcatgtgccctgaacagaaagggagaagttgagctacgtgattaatgtgctatagatgcagagaacatatgcccaggactttctgtgattgtctcaattttatgtaactttattcttagaaaaaaagggacaatgattgactaaagttatgagaatttaatttttacacaattgtcttttcacatgaaaaagttcacaaatcaagaaaagtttagaaaacataaatatcacaatgatggccttgagaaaataagtatgttggtggcgatgtatgcaggtgggtaaagcaataatcattttcagcaagttgttaatccccgttacaaaatgcagaataaaaataacaagcattctatttagtgtattaactgagtttgtaagacagtaaaaagtaattaatatgggtctgaaatggaaaggaaactgaaatcttcctggtaaagactctaagctgaccctgtggaaggcattcattttgggtaaagtgggagagtgcttgttagtttaggtaacctaagaacctcagctttatacccaaagaaaactaggccttgggtagcctgatgtaaaagttcaagtccaaatagggcattttgcatagtctcaaagtatctcccttcaaatatgtagcaattacaaatggaaaaatagttaacatcagagtgcagcaacttggcagacaacatctaagtgaaggtatcatgattaacattgtgagtaatatatgcacattgacatgtacccctgataggatgtattaagaaggacccgtaacttttctagtatccttcccattggtgtgtaactgcagcataatcatgagaaaatgataaacccaaattgaggaacattctatgaaacaactgagcagaactcttggtgagtgtcaaggttagaaagacaaggaaagaatgaggacctgtcccaaattaggagactaaggagtaaggagtcatgatagctgaacctaatgtgagatcttgggttggatcctagaacagaaaaaaatgacattagttgaaaacctggtgaaatctaagtgatcttagtttattaacttaaaaaagctaatagtgttataacaagattcacttctttgttttgatcaat

SEQ ID NO: 35647 - DNA, 1608 bp, Homo sapiens
ggccccgacccccaccccagcctaaacagaatacttgatcgactctccatttcaagctttaatctcagcaagcaattcagatgagtcagatatcagagtatggccatggtgagatcctactctttcatggagaactgcgaggtccaagtgacaaggaaacaagtaatcatcacatgcaaagttattcagcatggaagatgagttataatgacagatggtaccagtcaaaaaaaatagctctatggaaaaaagcatgctgacaggataccagtgtataagtcaaacatgggcaatgtaataaaatagcaataagggatgacacaacaattttttgagaaatgttcacaagaactgttttaagtgtacctgtacatctgttctctattcgtcatttggaaatagtagttatttcctaatatcatcatcatcatcatcatcatcttcatcaaataaaacaatagaactcaatgttcatagatgtagctgcgctgaaggagatcatgtgccctgaacagaaagggagaagttgagctacgtgattaatgtgctatagatgcagagaacatatgcccaggactttctgtgattgtctcaattttatgtaactttattcttagaaaaaaagggacaatgattgactaaagttatgagaatttaatttttacacaattgtcttttcacatgaaaaagttcacaaatcaagaaaagtttagaaaacataaatatcacaatgatggccttgagaaaataagtatgttggtggcgatgtatgcaggtgggtaaagcaataatcattttcagcaagttgttaatccccgttacaaaatgcagaataaaaataacaagcattctatttagtgtattaactgagtttgtaagacagtaaaaagtaattaatatgggtctgaaatggaaaggaaactgaaatcttcctggtaaagactctaagctgaccctgtggaaggcattcattttgggtaaagtgggagagtgcttgttagtttaggtaacctaagaacctcagctttatacccaaagaaaactaggccttgggtagcctgatgtaaaagttcaagtccaaatagggcattttgcatagtctcaaagtatctcccttcaaatatgtagcaattacaaatggaaaaatagttaacatcagagtgcagcaacttggcagacaacatctaagtgaaggtatcatgattaacattgtgagtaatatatgcacattgacatgtacccctgataggatgtattaagaaggrcccgtaacttttctagtatccttcccattggtgtgtaactgcagcataatcatgagaaaatgataaacccaaattgaggaacattctatgaaacaactgagcagaactcttggtgagtgtcaaggttagaaagacaaggaaagaatgaggacctgtcccaaattaggagactaaggagtaaggagtcatgatagctgaacctaatgtgagatcttgggttggatcctagaacagaaaaaaatgacattagttgaaaacctggtgaaatctaagtgatcttagtttattaacttaaaaaagctaatagtgttataacaagattcacttctttgttttgatcaat

SEQ ID NO: 35648 - DNA, 1608 bp, Homo sapiens
ggccccgacccccaccccagcctaaacagaatacttgatcgactctccatttcaagctttaatctcagcaagcaattcagatgagtcagatatcagagtatggccatggtgagatcctactctttcatggagaactgcgaggtccaagtgacaaggaaacaagtaatcatcacatgcaaagttattcagcatggaagatgagttataatgacagatggtaccagtcaaaaaaaatagctctatggaaaaaagcatgctgacaggataccagtgtataagtcaaacatgggcaatgtaataaaatagcaataagggatgacacaacaattttttgagaaatgttcacaagaactgttttaagtgtacctgtacatctgttctctattcgtcatttggaaatagtagttatttcctaatatcatcatcatcatcatcatcatcttcatcaaataaaacaatagaactcaatgttcatagatgtagctgcgctgaaggagatcatgtgccctgaacagaaagggagaagttgagctacgtgattaatgtgctatagatgcagagaacatatgcccaggactttctgtgattgtctcaattttatgtaactttattcttagaaaaaaagggacaatgattgactaaagttatgagaatttaatttttacacaattgtcttttcacatgaaaaagttcacaaatcaagaaaagtttagaaaacataaatatcacaatgatggccttgagaaaataagtatgttggtggcgatgtatgcaggtgggtaaagcaataatcattttcagcaagttgttaatccccgttacaaaatgcagaataaaaataacaagcattctatttagtgtattaactgagtttgtaagacagtaaaaagtaattaatatgggtctgaaatggaaaggaaactgaaatcttcctggtaaagactctaagctgaccctgtggaaggcattcattttgggtaaagtgggagagtgcttgttagtttaggtaacctaagaacctcagctttatacccaaagaaaactaggccttgggtagcctgatgtaaaagttcaagtccaaatagggcattttgcatagtctcaaagtatctcccttcaaatatgtagcaattacaaatggaaaaatagttaacatcagagtgcagcaacttggcagacaacatctaagtgaaggtatcatgattaacattgtgagtaatatatgcacattgacatgtacccctgataggatgtattaagaaggacccgtaacttttctagtatccttcccattggtgygtaactgcagcataatcatgagaaaatgataaacccaaattgaggaacattctatgaaacaactgagcagaactcttggtgagtgtcaaggttagaaagacaaggaaagaatgaggacctgtcccaaattaggagactaaggagtaaggagtcatgatagctgaacctaatgtgagatcttgggttggatcctagaacagaaaaaaatgacattagttgaaaacctggtgaaatctaagtgatcttagtttattaacttaaaaaagctaatagtgttataacaagattcacttctttgttttgatcaat

SEQ ID NO: 35649 - DNA, 1608 bp, Homo sapiens
ggccccgacccccaccccagcctaaacagaatacttgatcgactctccatttcaagctttaatctcagcaagcaattcagatgagtcagatatcagagtatggccatggtgagatcctactctttcatggagaactgcgaggtccaagtgacaaggaaacaagtaatcatcacatgcaaagttattcagcatggaagatgagttataatgacagatggtaccagtcaaaaaaaatagctctatggaaaaaagcatgctgacaggataccagtgtataagtcaaacatgggcaatgtaataaaatagcaataagggatgacacaacaattttttgagaaatgttcacaagaactgttttaagtgtacctgtacatctgttctctattcgtcatttggaaatagtagttatttcctaatatcatcatcatcatcatcatcatcttcatcaaataaaacaatagaactcaatgttcatagatgtagctgcgctgaaggagatcatgtgccctgaacagaaagggagaagttgagctacgtgattaatgtgctatagatgcagagaacatatgcccaggactttctgtgattgtctcaattttatgtaactttattcttagaaaaaaagggacaatgattgactaaagttatgagaatttaatttttacacaattgtcttttcacatgaaaaagttcacaaatcaagaaaagtttagaaaacataaatatcacaatgatggccttgagaaaataagtatgttggtggcgatgtatgcaggtgggtaaagcaataatcattttcagcaagttgttaatccccgttacaaaatgcagaataaaaataacaagcattctatttagtgtattaactgagtttgtaagacagtaaaaagtaattaatatgggtctgaaatggaaaggaaactgaaatcttcctggtaaagactctaagctgaccctgtggaaggcattcattttgggtaaagtgggagagtgcttgttagtttaggtaacctaagaacctcagctttatacccaaagaaaactaggccttgggtagcctgatgtaaaagttcaagtccaaatagggcattttgcatagtctcaaagtatctcccttcaaatatgtagcaattacaaatggaaaaatagttaacatcagagtgcagcaacttggcagacaacatctaagtgaaggtatcatgattaacattgtgagtaatatatgcacattgacatgtacccctgataggatgtattaagaaggacccgtaacttttctagtatccttcccattggtgtgtaactgcarcataatcatgagaaaatgataaacccaaattgaggaacattctatgaaacaactgagcagaactcttggtgagtgtcaaggttagaaagacaaggaaagaatgaggacctgtcccaaattaggagactaaggagtaaggagtcatgatagctgaacctaatgtgagatcttgggttggatcctagaacagaaaaaaatgacattagttgaaaacctggtgaaatctaagtgatcttagtttattaacttaaaaaagctaatagtgttataacaagattcacttctttgttttgatcaat

SEQ ID NO: 35650 - DNA, 1608 bp, Homo sapiens
ggccccgacccccaccccagcctaaacagaatacttgatcgactctccatttcaagctttaatctcagcaagcaattcagatgagtcagatatcagagtatggccatggtgagatcctactctttcatggagaactgcgaggtccaagtgacaaggaaacaagtaatcatcacatgcaaagttattcagcatggaagatgagttataatgacagatggtaccagtcaaaaaaaatagctctatggaaaaaagcatgctgacaggataccagtgtataagtcaaacatgggcaatgtaataaaatagcaataagggatgacacaacaattttttgagaaatgttcacaagaactgttttaagtgtacctgtacatctgttctctattcgtcatttggaaatagtagttatttcctaatatcatcatcatcatcatcatcatcttcatcaaataaaacaatagaactcaatgttcatagatgtagctgcgctgaaggagatcatgtgccctgaacagaaagggagaagttgagctacgtgattaatgtgctatagatgcagagaacatatgcccaggactttctgtgattgtctcaattttatgtaactttattcttagaaaaaaagggacaatgattgactaaagttatgagaatttaatttttacacaattgtcttttcacatgaaaaagttcacaaatcaagaaaagtttagaaaacataaatatcacaatgatggccttgagaaaataagtatgttggtggcgatgtatgcaggtgggtaaagcaataatcattttcagcaagttgttaatccccgttacaaaatgcagaataaaaataacaagcattctatttagtgtattaactgagtttgtaagacagtaaaaagtaattaatatgggtctgaaatggaaaggaaactgaaatcttcctggtaaagactctaagctgaccctgtggaaggcattcattttgggtaaagtgggagagtgcttgttagtttaggtaacctaagaacctcagctttatacccaaagaaaactaggccttgggtagcctgatgtaaaagttcaagtccaaatagggcattttgcatagtctcaaagtatctcccttcaaatatgtagcaattacaaatggaaaaatagttaacatcagagtgcagcaacttggcagacaacatctaagtgaaggtatcatgattaacattgtgagtaatatatgcacattgacatgtacccctgataggatgtattaagaaggacccgtaacttttctagtatccttcccattggtgtgtaactgcagcataatcatgagaaaatgataaacccaaattgaggaacattctatgaaacaactgagcagaactcttggtgagtgtcaaggttagaaagacaaggaaagaatgaggacctgtcccaaattaggagactaaggagtaaggagtcatgatagctgaacctaatgtgagatcttgggttggatcctagaacagaaaaaaatgacattagttgaaaacctggtgaaatctaagtgatcttagtttattaacttwaaaaagctaatagtgttataacaagattcacttctttgttttgatcaat

SEQ ID NO: 35651 - DNA, 609 bp, Homo sapiens
catgcagctaaaaggaatgagggcagaaaggaagcaggaagtagaagagcattggggtgtgggtggccggcatgtctggagagctagagagaggccagtgcacctggagtgcagaaaacgaggaggaggctgaaaagtaaagaggtcaggcaatagggagccttgtagagcctggcttttactctgacatgggagtctcttgtggagtttttcacataggagggataaggtatgatgtatgctttaacaggttcatcctgactgctgtgttgagaatrtactacagagaagccatggtagaatcgggcagaaagttagagcaatacctaaggggagagctcatggtggctttgataaaggagttgaccatgaagataataagaaaacacaggatgatgtgctgctgtaaggaataaggaggtgagaggaagagaagactcaggaaaatagagttgctgttacttgagtttgggaagattgtgagatgagatcatgtgggtagggatatgtaaatttgctttagggcgtaagtttttggtgctagtatgattccaaatgtggggatcagtggacaggtggatatatattttctggagtttggggaaaaat

SEQ ID NO: 35652 - DNA, 1280 bp, Homo sapiens
tggttttctactttgaaagagcttacctcttgatgaggagaaaacaaacgaaaggcccaacaacccacaaatgaacaagtaaaatgtagatgagacgaaatgctgtggagggcagcaaagcaggcgggggcaggagaaagttttgtgttgtgaacgaactacgagttcaggagtatctggaggttaggctaggcgatgaggaatgggcaaaacaacactagcacagatgatgaatgtgagttggcactggtaatgattccctggcatgctcttttcatctgtgtttttttctgcgtgactttaattgtcctaaatgcaacacaagtactaaactacttgtaaatctattatttattgttcaacattttcctaaatcatgtttgcaacttttaataagcagcacactgtttcctaagaagtaaaagaaagccagaagatcttaagggccaaagttacagtttttaaaaattcttttgaaaaggtttactttacacatctctcccccaccccccaaaatgctataaattgcaccaaattatgcagctgctatactccaatgtgcgtgtgaactggagagtatgctgtgatcttcctggagtggtgactgcttgccacagatccaggggtgctgaactggggtgattacctgggatgcttgcttgcagtgctccaacctttaggatggacaggttgcccttgtgatgtcagcaaacccttgaccagtatataaatgtgagtgtgcatgggcatttagcaggcagattgcatttagcaggtaggttgcattttgttaaaaaaggctgtactcactaaagcattttacttgcacaggtccataagaagacttctgggaaaagataataatatattattaatattattagcatattatatgtaattatatattatataatatataatgtatwataataattatatataataatatattattatcttctggggaaagaatttatatatataaatattattagcatattgtatatattatcttattgtattatacataacatcaggtcttgagatgaaatcatgttatgtattccagagacatggagattcaaaggagcggggctacgttcatctgatattttgagttcctatgcttgctctgccccatacttttgtccagacagtgagggcagaggtaaacttcacaaaagagaaaaagacaagaggggtttatcagagtgtagtctcatgtcttttctgttcatttgtttttttgaattttaatctagattttgaataggtaatgc

SEQ ID NO: 35653 - DNA, 570 bp, Homo sapiens
gtgtaatgagtctcacttggtcgcccaggctagagtgcaatggcacgatctcggctcactgcaacctctgcctctgggttctagaaattctcctgcctcagtctcccaaatagttgggattataggtgcccaccaccatgcccggctaatttttgtatttttagtagagacagggtttcgccatgttggtcaggctggtcttgaattcctgacctcaggtgagcttcccacctgagcctcccaaagtgctgggattacgggtgtgagccccccaaaaaaggcatttaatccatgcatattgtggatttagctctattgtagttgtgattacaatgatatgcaatatcctgccctcaaaaaatttacagtgataagaactacaaataagtaaaacacaataatattgccagataaaacacactataataggtgtattccttggaatataagggaacagaagggtaatagctaacaaatgtgtgtactgatatctcagaggcttttaaggttgaraggaatttgtgatagaaataaaagagtaagagagttattggtagagaccagcacaca

SEQ ID NO: 35654 - DNA, 390 bp, Homo sapiens
tttaattaccctaagctctactaccctgcccttctgaatatttgaatacatttccacacaaacagtagtgcaaaaaatgccatttcctcacatttacatcaatgcttttagaaacaactttctaaaattttcctaygtaatgtggaacataattgttttagtttgcatttctctgatttcaaatgaagctaaccatttcttctggcgtatattagctgttcaattttgtaatgttttcatgcacaacatttttattctactgattttctttttcttgtttatttacagacattctttgcttttctagttatcatcctgtgtcacgtttagctgctacagctgtcttccccgggtccctattcaatggttattttcataactatctcttca

SEQ ID NO: 35655 - DNA, 1149 bp, Homo sapiens
  misc_feature (1)...(1149): n = A,T,C or G
tctgggaaaatcaagaaaacagctgatgattgctgggacaactatgctcttcccagtatcgctaattntgctgcaatgcagttaggcaaatgctctatctccttaattctaaacagctctcactttaagagacacttcataaatcgcttacaggggatttaggaaatctagaatttgatctaaagagcttaataagcatttttcatcttatttaagttctgcagttttaaaagtcatgctattgggatgcatcctagtccgaccgtgagagatatattaaggttttggatctttcatttcattgagcttaaaacccatttctttcagtggagaacatcagctgagtcactacacttgctcgactttcttcttcagcatgtttctacctctcttgctagccagtgaatactgtgcttcactccatggattttaattaatttttcatgatgtacgcttattgatttttacgataaattagagtctatgtttactatatatgagtaaaatttaacactacataagatattgtgtacattatttatttaaaccatttgtactaatttttaattcaacacagaattcatatgggatagagttatgtatacacaagcataatactagcaacaaattaatgataatagtaaatgtttagaaagatctaaaattcctggataaagtataaaacatagactagctctttatatttaaaataagcaatacactccatagttccatgtgacctacatattactgaatagataggtttcacttaattaaacctgtgtgttcacatagaatgtaaaatataatttttaagtaggatatatcaaacatgctacttctacatttaaaaacggaaattactttaagaacaaaaacagcaaagattgaaagaaggaactatttcaagtgttaaattaaaacaaaatcaccagatccctttcaacaatataagtgacaaaatgttgagaggaaaagtgcataatgtagattgaatcatacttcaactgattttccaaatttggctcccttcaagattcrgccaactttttattctttcaccattgcagattaaaccattaaaggtttactcacctatgagtctgatagaatatcttatagaaaacacgaacacatccagagacgaca

SEQ ID NO: 35656 - DNA, 1304 bp, Homo sapiens
tgcatacatttttgtgttgtcaaagagccaatctaagatttaattaataactctagtattttagttggtttaartttctaaattatctttttatttttacaaatttgttatttttattttttactttattttgtcttttctcagattcatgatattaaagttttatttattaaatttttttctttttttcctaagaagtatatttttaaacacaatattgtatttgagaactgcttggattataacccacaaggttttttaatttaatattcattgttttctacaataatggtcaaatatagaggtagaataaaatggtaaattaaaccccatatgtgcatgctaccaaggttcaaaatatttcaattttcttcaattgatttagttgtccttttttctctaaataatttcaaacaaattttccatgggtcaaggtattttgttgatatatactgcaatatttgtctttcatggtacaggtattttcacatgtaactatgatgctattctgttgtagtatttccctgaatatttctgagtttctccaaattattatttagaatttattttttggataagattttaaccaaggttcacatactgcatgtagttgtgacatgccctaagccaggccagaacacttcctttttttctttcttttttatttgcaaacctactttcttttggaatgccccacattctggctgtttctgtttgttctcttataaaatcatttagctaatttccgtaatccctgcatttgttgaaaattgaaggtacatctggagtttccttattttaaaaaatttgaaatgaacactttatagatattcactgagattcatattgttttacataaggaaacacaaaatatcctattgcctatttttagagaagctaagattcaattgtggttcagaagacaacagcttcttttttcctttttgaaattttccatcaaggagtcattcaaaaatttcaattattacttattgtttccgaaataattatttctgaagaattgccaaatgtagattttgaaatatttttactttccttgtattttggctttcatgatacatattcgttcttagctttcttcaaatttagtttttcttctgaaactaaaagaatatgtttttctaattgtttgctaatatttgtcagttttcactttacgtcctcctgctgtctggctaaaaagattaaaatttgtttgcattctaatcagtgtttttacaaagcttggtatttctctatagaactttaaatcatctttttactcttttaatttgcttggtgga

SEQ ID NO: 35657 - DNA, 1304 bp, Homo sapiens
tgcatacatttttgtgttgtcaaagagccaatctaagatttaattaataactctagtattttagttggtttaagtttctaaattatctttttatttttacaaatttgttatttttattttttactttattttgtcttttctcagattyatgatattaaagttttatttattaaatttttttctttttttcctaagaagtatatttttaaacacaatattgtatttgagaactgcttggattataacccacaaggttttttaatttaatattcattgttttctacaataatggtcaaatatagaggtagaataaaatggtaaattaaaccccatatgtgcatgctaccaaggttcaaaatatttcaattttcttcaattgatttagttgtccttttttctctaaataatttcaaacaaattttccatgggtcaaggtattttgttgatatatactgcaatatttgtctttcatggtacaggtattttcacatgtaactatgatgctattctgttgtagtatttccctgaatatttctgagtttctccaaattattatttagaatttattttttggataagattttaaccaaggttcacatactgcatgtagttgtgacatgccctaagccaggccagaacacttcctttttttctttcttttttatttgcaaacctactttcttttggaatgccccacattctggctgtttctgtttgttctcttataaaatcatttagctaatttccgtaatccctgcatttgttgaaaattgaaggtacatctggagtttccttattttaaaaaatttgaaatgaacactttatagatattcactgagattcatattgttttacataaggaaacacaaaatatcctattgcctatttttagagaagctaagattcaattgtggttcagaagacaacagcttcttttttcctttttgaaattttccatcaaggagtcattcaaaaatttcaattattacttattgtttccgaaataattatttctgaagaattgccaaatgtagattttgaaatatttttactttccttgtattttggctttcatgatacatattcgttcttagctttcttcaaatttagtttttcttctgaaactaaaagaatatgtttttctaattgtttgctaatatttgtcagttttcactttacgtcctcctgctgtctggctaaaaagattaaaatttgtttgcattctaatcagtgtttttacaaagcttggtatttctctatagaactttaaatcatctttttactcttttaatttgcttggtgga

SEQ ID NO: 35658 - DNA, 596 bp, Homo sapiens
tgtcctttagcttcaattaagagggtactccataaaactgtgtatcgtacataggcatctaataaggcaataaagttattcagatcgaattcgtcttgtactaccctatttttctacttttctttgataytccctcaagcagctaagtatgcaactgtgttaatcatctgtttacataaaagctttatataattgttatgaaattttgaaatttgtcatgtgtactaccaccttggaagaaaaaaaaaatttttaatctttgcactttatcttctatttaattttataataaactagattgttcatcaaattttacctttttttcttggaactatgtgtgaaatttccattttttgcgtgctagtgtctctgtggtaacatactacagacttaaatgagacttaaaggtttttaacagttggaaggccagtactcaatatttatcctgaagttgccatggctactaatgcagacaaagtttgctgatcaagttcaagctagagatagccagaaaagcacaaggggtctcattaatggtttcaacgattaaccacagtgaaaaatagtgactgaatgttctgtcttggtttcttatt

SEQ ID NO: 35659 - DNA, 557 bp, Homo sapiens
aaatattatacttgtttatactttaaatgccaaattatcagtaagcctgcatgtagtcctgtttaaagttgattgatcttcaagaatatggttataaaggtaaattcattttcaatttcattcaaaggttgttgctaattaaatctataatgattttaacatagaatgattttatgcagttagaatgcactcagttactagaatagaatatccaaatactttttggctgaagaaataaagagaacacctaagaagcaacctgaggtatttggatctagagcctgggcactgattcaattggtttattgaagaattactwaatctaagtttttcccagtcagtacactgttgatgtccctgttcataatttggaagattacagtcatagccttgaatatcacatccttgctatttatcaatatacaaaattgccttcaaatccatcatctttcttaatacactgctgaattattaagttgcactgagggagggtagcaatctcattttgctactcctaaaacttgtttattctgataaattgtctccttccttctacc

SEQ ID NO: 35660 - DNA, 557 bp, Homo sapiens
aaatattatacttgtttatactttaaatgccaaattatcagtaagcctgcatgtagtcctgtttaaagttgattgatcttcaagaatatggttataaaggtaaattcattttcaatttcattcaaaggttgttgctaattaaatctataatgattttaacatagaatgattttatgcagttagaatgcactcagttactagaatagaatatccaaatactttttggctgaagaaataaagagaacacctaagaagcaacctgaggtatttggatctagagcctgggcactgattcaattggtttattgaagaattacttaatctaagtttttcccagtcagtacactgttgatgtccctgttcataatttggaagattacagtcatagccttgaatatcacatccttgctatttatcaatatacaaaattgccttcaaatccatcatctttcttaatacactrctgaattattaagttgcactgagggagggtagcaatctcattttgctactcctaaaacttgtttattctgataaattgtctccttccttctacc

SEQ ID NO: 35661 - DNA, 557 bp, Homo sapiens
aaatattatacttgtttatactttaaatgccaaattatcagtaagcctgcatgtagtcctgtttaaagttgattgatcttcaagaatatggttataaaggtaaattcattttcaatttcattcaaaggttgttgctaattaaatctataatgattttaacatagaatgattttatgcagttagaatgcactcagttactagaatagaatatccaaatactttttggctgaagaaataaagagaacacctaagaagcaacctgaggtatttggatctagagcctgggcactgattcaattggtttattgaagaattacttaatctaagtttttcccagtcagtacactgttgatgtccctgttcataatttggaagattacagtcatagccttgaatatcacatccttgctatttatcaatatacaaaattgccttcaaatccatcatctttcttaatacactgctgaattattaagttkcactgagggagggtagcaatctcattttgctactcctaaaacttgtttattctgataaattgtctccttccttctacc

SEQ ID NO: 35662 - DNA, 1274 bp, Homo sapiens
tgcatagcttaacccagaccttctcaacagcaaatgtgtataagaatcacctggagatcttgttaaaattacatgttcttgttctgtaggtctggagtaggctgagattcatcattttcaggagctccaggcaatggtgatggttctggaccaataaatggccatttctggagtagcaagcatttaatgctttcaaagggcgtgctgattctgcttggaatctgtcactcaaatacatcaacaattagaggtggccaggcgcagtggctcacccccgtaatcccagcactttgggaggctgaggcgggcggatcacagtgtcaagtgttcgggaccagcctggccaacatggtgaaacccatctctactaaaaatacaaaaattctcctgcctcagcctcctgagtagctgtaatctgtttagtaacccattgctgtaacttcaccccaaaatattctttgctgattaatgaaaaaaatttaggacaaattcattcatgcttctaagccaatgtttgttaaatgtctactttatgttaggtacttttctaactggtagagtgtagacagtaaaaaataaagttttttcctttatgactttttacggtagctgattgaaacaggcctatattctgtccaatggtattgaaggctattaagaaaaagaaaacatgaacagagcagaagccaaggaaagtcaatctgagacctgtatacaatgagaagacagcaagccacatggccagagggtgaaagaccattccgtgcacaggggagagccagtgcaaagtgctgaggtgaagtgatgctctgggaacaccagagttgctgaaagtgtccaaacagaaaaggtcaagatagggagggctcagaaaactggtcagagctgtcatctggagggagtgcagggagaggagaaaagttgtctaataactgaagctagcagccctctgcaaaaatataaaatatacataaaatacagaatatgaataaaatgtagaatttgttatcttgaaagatttgggaggtgtaggcattataatttgcatagtagtayagattatgttatctcatcaccacagtcctttgaaatagggtattatcataatcttacagctgactgagctacaaaagttaatgggtggcatgttccactattgacgtcataacccacagtgtccttcctaacaccagctcccttagctcattcctaaggactggccaggcagatggaacaagagaaaggaaccaatacattcattccttttaaatgca

SEQ ID NO: 35663 - DNA, 1274 bp, Homo sapiens
tgcatagcttaacccagaccttctcaacagcaaatgtgtataagaatcacctggagatcttgttaaaattacatgttcttgttctgtaggtctggagtaggctgagattcatcattttcaggagctccaggcaatggtgatggttctggaccaataaatggccatttctggagtagcaagcatttaatgctttcaaagggcgtgctgattctgcttggaatctgtcactcaaatacatcaacaattagaggtggccaggcgcagtggctcacccccgtaatcccagcactttgggaggctgaggcgggcggatcacagtgtcaagtgttcgggaccagcctggccaacatggtgaaacccatctctactaaaaatacaaaaattctcctgcctcagcctcctgagtagctgtaatctgtttagtaacccattgctgtaacttcaccccaaaatattctttgctgattaatgaaaaaaatttaggacaaattcattcatgcttctaagccaatgtttgttaaatgtctactttatgttaggtacttttctaactggtagagtgtagacagtaaaaaataaagttttttcctttatgactttttacggtagctgattgaaacaggcctatattctgtccaatggtattgaaggctattaagaaaaagaaaacatgaacagagcagaagccaaggaaagtcaatctgagacctgtatacaatgagaagacagcaagccacatggccagagggtgaaagaccattccgtgcacaggggagagccagtgcaaagtgctgaggtgaagtgatgctctgggaacaccagagttgctgaaagtgtccaaacagaaaaggtcaagatagggagggctcagaaaactggtcagagctgtcatctggagggagtgcagggagaggagaaaagttgtctaataactgaagctagcagccctctgcaaaaatataaaatatacataaaatacagaatatgaataaaatgtagaatttgttatcttgaaagatttgggaggtgtaggcattataatttgcatagtagtatagattatgttatctcatcaccacagtcctttgaaatagggtattatcataatcttacagctgactgagctacaaaagttaatgggtggcatgttccactattgacrtcataacccacagtgtccttcctaacaccagctcccttagctcattcctaaggactggccaggcagatggaacaagagaaaggaaccaatacattcattccttttaaatgca

SEQ ID NO: 35664 - DNA, 1174 bp, Homo sapiens
ttttaaaacataaaattttaaaaaattgtggctgggtgcggtggccgatgcctttaatcccagcactttgggaggccgaggcgggcggatcatgaggtcaggagatcaagaccatcctggctaaaatggtcaaaccccgtctctactaaaaatacaaaaacttagccgggcgtggtggcgggcgcctatattcccagctactcgggaggctgaggcaggagaatggcgtgaacccgggaggcggagctggcagtgagcccagatcccgccaccgcactccagcctgggcgacagagcaagactccgtctcaaaaaaaraaaaaaaaaagaaaaaaagaaaaaaaaattgtatatgaaattccaataaatgcaaacaggtataaatatgtccgtagcaaacagtaatacttgtaaaaatgtagaaatttataaaaataaatagttatttcctcagctcaccatcaactacagaagtagcttttcattcacaaatatttccatgaaattctcagttttcccaagagaattccactttctctgccatgctcaactctgaattgaagaatgatatcttgcactaacatgataattcaggaaaaccatgtgctcagaactttccaggtagtaaaatctcactgccactcaatatctctcaaattcttaccagagtgaaacaatacttctgtatccccccggtggtataaaatttatttatcctgctaaataatctattgttgaccttaatatttttctgattatgatctcttgcttattcactagaacactgtaactacattacatttaatgacttttttcattttgtagaccataaaaacattaaaacaaacaaacaaacagagatcattaagataagatccggcaaccccacatccaactatccctgggtgttgatcagttatgatggctttttggagctctatatcaattgcctgtttaagagttatattattttgaatttctctttggcttgacttttttcaaggataatagaagaaacagcaacgttacacacttatcagtttctgctgtaatggtgtttccttgaggatactgtacattctattacagagtgtcctcatcctcagagctcctgagggaatgatctttatatttgtaatgtcaggaagtgggggaatgaggaatgggaatgcat

SEQ ID NO: 35665 - DNA, 1174 bp, Homo sapiens
ttttaaaacataaaattttaaaaaattgtggctgggtgcggtggccgatgcctttaatcccagcactttgggaggccgaggcgggcggatcatgaggtcaggagatcaagaccatcctggctaaaatggtcaaaccccgtctctactaaaaatacaaaaacttagccgggcgtggtggcgggcgcctatattcccagctactcgggaggctgaggcaggagaatggcgtgaacccgggaggcggagctggcagtgagcccagatcccgccaccgcactccagcctgggcgacagagcaagactccgtctcaaaaaaaaaaaaaaaaaagaaaaaaagaaaaaaaaattgtatatgaaattccaataaatgcaaacaggtataaatatgtccgtagcaaacagtaatacttgtaaaaatgtagaaatttataaaaataaatagttatttcctcagctcaccatcaactacagaagtagcttttcattcacaaatatttccatgaaattctcagttttcccaagagaattccactttctctgccatgctcaactctgaattgaagaatgatatcttgcactaacatgataattcaggaaaaccatgtgctcagaactttccaggtagtaaaatctcactgccactcaatatctctcaaattcttaccagagtgaaacaatacttctgtatccccccggtggtataaaatttatttatcctgctaaataatctattgttgaccttaatatttttctgattatgatctcttgcttattcactagaacactgtaactacattacatttaatgacttttttcattttgtagaccataaaaacattaaaacaaacaaacaaacagagatcattaagataagatccggcaaccccacatccaactatccctgggtgttgatcagttatgatrgctttttggagctctatatcaattgcctgtttaagagttatattattttgaatttctctttggcttgacttttttcaaggataatagaagaaacagcaacgttacacacttatcagtttctgctgtaatggtgtttccttgaggatactgtacattctattacagagtgtcctcatcctcagagctcctgagggaatgatctttatatttgtaatgtcaggaagtgggggaatgaggaatgggaatgcat

SEQ ID NO: 35666 - DNA, 546 bp, Homo sapiens
ttatgtcttattttctaagtatgatctgaaattttctctgtagatttgagaaattatcagctctaatttttctagtcatgcttattcaatggtcactctgtttttaaccattaccatacagtatttggcacataatctagtcatttctgaatttaatttccagagaggggatgcacatagtgtgaaggacatctttctttttatgaaggtgtatttaaggagcaaacagcaaactgtacttagagtctgataatactgggtttcaaccatagctttcacatttataatcctaagggatttacctaacctttctgaggttcagttttctcattcataaaatgaaacaaaatagataattcaaatatttaatttaaagattaaagtctttaaaatatcaacggkagtgactgatactcagtgagtgcagcagtgattatatctgagcctcaagtcccctgtgggacaggcttttttatgggtatctctctaatttttcagaaaacaaatgaaaatgaatcaaatggaaataattttaaaaaactaaaa

SEQ ID NO: 35667 - DNA, 1104 bp, Homo sapiens
tgtctgtgctcacctatgtgtgttgagcacagatgctaggccctagatacagtggttaacaagaagaaaatagtctctaccttcataggttattttccagtgggggttataagagagtgacactagattttgagatttttttgaaggccaggtctgactgtatcagattatctatatctagcacagtgcattataaatcttaagttctcaatgtctgctaaataatttttcaagctgaaaatgtcagtttcaggttgaaatcactctcaaagctatgatttgttccaagatgaattgttcaacatgaacatatatatgtctattttagtaaacagatacacgtggatatatatagtttaagcatcatcattcttaggtgtagtcaacagaatctactccagcaagtttaatcagaaaggcatttattagacagtaccgggtgatgtacagcatctccaggagggccaagagccaagaatagatgctccgtagccaggagcacctgcaaacagagaaacatctatccaccatgagactgttctaggaaaaacctctttcctcctgtgactcaactctttccccaggtttcccatcagagcttgccccagaaaaactaaatgcttctattgtcatcccacacattgttcccttcccttcttccaaatctcatgtgtgtataaaacctgagccatatatggagctctgactgcgagaaagcatgaaarttgtcgctattaactttccggcctccccagtactgaaaggcatactggaaggggaattggaatgagtaatgtgcaagccaatccatcataaaattgctacagtttacactaagattgttgtcataactagctgactgcttggactgtgttcctagagagaaccataaataaaaggatagaagaaggtttcattcaatgcctagaatgtgtcagggtgagatggacaatccccttccctaaattctactccccagacccgaggggcagcggtaagcaagaagtgactctacacatcctagaaatcttaagctttgcaatggaactgagctgcattctctcagagagaagtaacaatgcctgtctgacccacttcaaagag

SEQ ID NO: 35668 - DNA, 1104 bp, Homo sapiens
tgtctgtgctcacctatgtgtgttgagcacagatgctaggccctagatacagtggttaacaagaagaaaatagtctctaccttcataggttattttccagtgggggttataagagagtgacactagattttgagatttttttgaaggccaggtctgactgtatcagattatctatatctagcacagtgcattataaatcttaagttctcaatgtctgctaaataatttttcaagctgaaaatgtcagtttcaggttgaaatcactctcaaagctatgatttgttccaagatgaattgttcaacatgaacatatatatgtctattttagtaaacagatacacgtggatatatatagtttaagcatcatcattcttaggtgtagtcaacagaatctactccagcaagtttaatcagaaaggcatttattagacagtaccgggtgatgtacagcatctccaggagggccaagagccaagaatagatgctccgtagccaggagcacctgcaaacagagaaacatctatccaccatgagactgttctaggaaaaacctctttcctcctgtgactcaactctttccccaggtttcccatcagagcttgccccagaaaaactaaatgcttctattgtcatcccacacattgttcccttcccttcttccaaatctcatgtgtgtataaaacctgagccatatatggagctctgactgcgagaaagcatgaaaattgtcgctattaactttccggcctcccmagtactgaaaggcatactggaaggggaattggaatgagtaatgtgcaagccaatccatcataaaattgctacagtttacactaagattgttgtcataactagctgactgcttggactgtgttcctagagagaaccataaataaaaggatagaagaaggtttcattcaatgcctagaatgtgtcagggtgagatggacaatccccttccctaaattctactccccagacccgaggggcagcggtaagcaagaagtgactctacacatcctagaaatcttaagctttgcaatggaactgagctgcattctctcagagagaagtaacaatgcctgtctgacccacttcaaagag

SEQ ID NO: 35669 - DNA, 1061 bp, Homo sapiens
attgttttcagtgttctgctattgaaatttccaagaaaaacagctgcttagataacttttcaactgataaacatttgaatactttttcattttagaatataaaatgtatcctttggtattttaacaatgtatttctgcaaaagtcttcctaactataaaatcgacatagaaaaccattgaatttcacaacaaaggactctcacagtgagcaggagcaggggaaccctaagagtgaacaggaatgttagaagggggacccctaccttggatattctgctgaggtaatataaatgacatcttggtctgatacagatgaggagaaggggacaaaattgccattttgtaaagggagcagctccagcccaagcagctcactgtaggcttggtcagaaagcacaaattctagaaggtgaagcttttcttcagcacagcccaggtgtgcacacttccgcagcacctgccgcacccacgcgggcgtcaccttcctcacaggtgttgtgccagaggcagctgtgagctgaacagcagcatccacattccctggtaccttggcaatctgcttccctgagctctggaggtagttgagcacagtttttgtgtattctaaattttcatcaagttctgagaagtacacctgctccaacctgacccagtcacagctaattgaataaatcactgcattctgcaacagctcgctgaayagaggctctaacaccggttgccagtgcaccttgactttgctcgcctccggccaaagcttatagataacatcaactgacaaggggaaatcagagctcttttccatctccagacgttttattgaatctaagatcagagtagcataagctttggggacaacattcatgacaagaaactcattccataaggctgccgggtctctccactggtccagctctctccattttatgctcctgcggttatcagtaaggccaaagaacccactgatgtgaactgggaggcctgtgctgctttcctcaccaggtggtaaaggaaggaaacaaaatgcttttcctgagaaatcagacgttgctccttttgct

SEQ ID NO: 35670 - DNA, 590 bp, Homo sapiens
ctgtggggtgcctgaccggtagaatactccacacagtatgatcgcctattccatccaggagggagaaagggaatcaaactgactgtgacaggtacagcatgccagattggcaggaaagtactgcaaagtgcccatcagtgtgggttccctcctttcctccctgagttccttcatgtgcacatggaacatggatcccttacccttcagaagctgacagagccaacaatgagtcaccttttgcagaccagatgcagactgcaaatactccaaggaagggctcagaatcacgcatgcagactgactttcctgtctcccaggatgcagtaaaatggagcccggagctgggagctgagggaaaccaagtcyaccgggtccccccaacttgacgaggacctcagacggtcaggaggcatcctgttgccttttgatgactcttttcctaaagatactgtgtggtactcatcaggactgtaaccgggccctctctttccatcttgcatttcctatgtaatggccaaagacacttggtatgcctctccccaaaacagactatggcatacttggacatatggagggatgacagtggcaaa

SEQ ID NO: 35671 - DNA, 1929 bp, Homo sapiens
  misc_feature (1)...(1929): n = A,T,C or G
gatcctttgtttctgaacaaataatgtttaaatatggtaaatcaaattctagtactccctctgtagtatattggctgataattttgtgctgttttgtaaacccacactccgtatttctgaagaagtacgactcttccagaaaatgattctgtctaaagaaatccagaattttagacatatacatttatagtttcatttaaactttcttggatcaaatacacagtccaatgcatatggcacatactgaaccttgggacaaaagacttaggtcctacatccatttctacaaatcatttaagaaatttaatgacttctcagttcttgattctcaagtatttcatttattttaatgagcaaaacagatggaatagacattttcccctacagcacaggagttccagtaatacttttgaacaacattggaaatttctgaatgtcttttcagaaaggtgatgttataaatagaatatttcacttaaaactaagcctgattaagatagtccaatgcagtatgttacatttacccctctaaggtggttttggagagcacatggccaagtgtgagcactagagggtactagtatattatgaaaaaaatgtacaactgctgaccacttagtggtcatttaaattttcacagcactttatgaaagacttagggttgttacttctgtgactttccaaataatattatcaattagcagacaataattaaacacacaactcaaagacagcattttatactgaagaacagagagtcaaatagcctcaggatatctaacataaatatgtttatcatgttacaaacacttagattaagtaactggattgtgaaattcacaaacttttaaaattaaacagtacaaattttaggttaccaattctgaaacattagttttctaacaaaaatactaaaacaatttgacagtaatttttaaattcttatttttatcagcattttgcaaacaaagtcaataggtggcattaaattaaaaagaagtcttctttcaagatcaagtgaactcagcaaatattaagttagacaaacttttctactgtgtttaatatactgatgtgtayactactccctgtaaagggaagggatagtacagcaatgaagaaacacagataggaaataaacacataaaaagtcaaatctaaaaaggaaaggataaatggtattattttataccattatataaatgataaataatgatgaatggtaaataaagtaacaccagttatcatttgttattgtgaaatatcccatttgttatctatttagtataatcataaagggcttggattctgaggtccaacatacttcgatgtgaatcttggattctgacatataccaaccacgagacatggggtattgagtaagttactgaataaatcagtttcctcaaatctataatagggacaataatacacctggaccattgctcatattgtgagaaaaacatatgcaaagcactttgcaaatatttaatatgccagcacattaaacattaatacattttgattattatctattctattatatattctagtacaatattgtttaaatatccagaacacattaattgaaagaattagttaaaaatgcaattatatgatttataatttttcaaagtattatcagacaagtacaacaaaagcctaactctttggtgatatgctgctttcttttgacctcgacattcttttccaacattttcccgtaaactttatttcctttannnnnnnnnnnnnnnnnnnnnnnnnnnnnnnnnnnnnnnnnnnnnnnnnnnnnnnnnnnnnnnnnnnnnnnnnnnnnnnnnnnnnnnnnnnnnnnnnnnnaagaattattgccaatattttaatgggatcgtggcaagaaacacagatggactctcattaacaccaccaacagtgtatatgttatga

SEQ ID NO: 35672 - DNA, 1929 bp, Homo sapiens
  misc_feature (1)...(1929): n = A,T,C or G
gatcctttgtttctgaacaaataatgtttaaatatggtaaatcaaattctagtactccctctgtagtatattggctgataattttgtgctgttttgtaaacccacactccgtatttctgaagaagtacgactcttccagaaaatgattctgtctaaagaaatccagaattttagacatatacatttatagtttcatttaaactttcttggatcaaatacacagtccaatgcatatggcacatactgaaccttgggacaaaagacttaggtcctacatccatttctacaaatcatttaagaaatttaatgacttctcagttcttgattctcaagtatttcatttattttaatgagcaaaacagatggaatagacattttcccctacagcacaggagttccagtaatacttttgaacaacattggaaatttctgaatgtcttttcagaaaggtgatgttataaatagaatatttcacttaaaactaagcctgattaagatagtccaatgcagtatgttacatttacccctctaaggtggttttggagagcacatggccaagtgtgagcactagagggtactagtatattatgaaaaaaatgtacaactgctgaccacttagtggtcatttaaattttcacagcactttatgaaagacttagggttgttacttctgtgactttccaaataatattatcaattagcagacaataattaaacacacaactcaaagacagcattttatactgaagaacagagagtcaaatagcctcaggatatctaacataaatatgtttatcatgttacaaacacttagattaagtaactggattgtgaaattcacaaacttttaaaattaaacagtacaaattttaggttaccaattctgaaacattagttttctaacaaaaatactaaaacaatttgacagtaatttttaaattcttatttttatcagcattttgcaaacaaagtcaataggtggcattaaattaaaaagaagtcttctttcaagatcaagtgaactcagcaaatattaagttagacaaacttttctactgtgtttaatatactgatgtgtatactactccctgtaaagggaagggatagtacagcaatgaagaaacacagataggaaataaacacataaaaagtcaaatctaaaaaggaaaggataaatggtattattttataccattatataaatgataaataatgatgaatggtaaataaagtaacaccagttatcatttgttattgtgaaatatcccatttgttatctatttagtataatcataaagggcttggattctgaggtccaacatacttcgatgtgaatcttggattctgacatataccaaccacgagacatggggtattgagtaagttactgaataaatcagtttcctcaaatctataatagggacaataatacacctggaccattgctcatattgtgagaaaaacatatgcaaagcactttgcaaatatttaatatgccagcacattaaacattaatacattttgattattatctattctattatatattctagtacaatattgtttaaatatccagaacacattaattgaaagaattagttaaaaatgcaattatatgatttataatttttcaaagtattatcagacaagtacaacaaaagcctawctctttggtgatatgctgctttcttttgacctcgacattcttttccaacattttcccgtaaactttatttcctttannnnnnnnnnnnnnnnnnnnnnnnnnnnnnnnnnnnnnnnnnnnnnnnnnnnnnnnnnnnnnnnnnnnnnnnnnnnnnnnnnnnnnnnnnnnnnnnnnnnaagaattattgccaatattttaatgggatcgtggcaagaaacacagatggactctcattaacaccaccaacagtgtatatgttatga

SEQ ID NO: 35673 - DNA, 606 bp, Homo sapiens
agtattttattgcaatagttttcttaaaattattttttcacaccaattttgattcaaaacagcccaagaatcaagacattcacaaaaactgactttactacagcatttttctgttacatatgaaaatgtatgtatacaccactgcctcagataattttaaaaagaatgrtttagctatgcattaccagaaatatcaaggatcatattgaattatggttgtatataaagagataatcatctacaataataagtaaaaccaagacttataatggacatgcatatactacaccaaagacgatggaagtgtctcatggacaaaaagggtacaaaatccctctttctgtacacgcactggcaagtgctgacacagttgggccaattctttgagatccttactttcatttcatagtttacactacatgacctgcagcaagccagaccccagcaacagcttcactgactacttccgacatggaattctcactactttgtccgcttatctgcttatgagctgatggactttctccatcagctgggcatgaggaagtgaagggaagaaaactaatgaaaactaaattttagacagttcctttcctccttctgaaa

SEQ ID NO: 35674 - DNA, 606 bp, Homo sapiens
agtattttattgcaatagttttcttaaaattattttttcacaccaattttgattcaaaacagcccaagaatcaagacattcacaaaaactgactttactacagcatttttctgttacatatgaaaatgtatgtatacaccactgcctcagataattttaaaaagaatgatttagctatgcattaccagaaatatcaaggatcatattgaattatggttgtatataaagagataatcatctacaataataagtaaaaccaagacttataatggacmtgcatatactacaccaaagacgatggaagtgtctcatggacaaaaagggtacaaaatccctctttctgtacacgcactggcaagtgctgacacagttgggccaattctttgagatccttactttcatttcatagtttacactacatgacctgcagcaagccagaccccagcaacagcttcactgactacttccgacatggaattctcactactttgtccgcttatctgcttatgagctgatggactttctccatcagctgggcatgaggaagtgaagggaagaaaactaatgaaaactaaattttagacagttcctttcctccttctgaaa

SEQ ID NO: 35675 - DNA, 1750 bp, Homo sapiens
aagggtagagattagttcctaaatacttttgccactgaaggtttcattttagaaaggctgtttttgatgtatgatgacagggaatagatctgagtaagcatgatgactttcaactctactcacaaatttaataaaatcctaagggatcataaactggcagctgctttgtgaaaatgaaatgctaatgttcacaattataatttttatacccatagccataaaatatataaaagtattaggttcttttctaatgcaatacatgtatgatttatgtgtattacagcagattaaatcttttgaggtaagaggggaataaaaagcaccaataagtatgtgtttggtcatttgaaatatgcctccacagtttcatctcaaaagtacttaagtagataaacatctatttggaggtaagaataagaggaacattttacctgaggcaagaatcttaatataccactctaaaaacagagagagagtcatgacagtattgcatgctgctgacattttaaacaatgtgagataagaatagaaacagttttacatgttaagaaagtttattacagatcatgctgatatgttaaaaagcttttataaaggaaagaaataggggaaagtggggaaccaccgatgtgttaagagatggagggagagaggtctggacaatgaccgcaatgaaaccatgaataactgtatttccattggcagtaaattatcacagattagagaactagaaatcattaatggatttctggatccaaacagaacagcagtgccaatacagtgtttaaaaactgaaaatatataaaacaaaaagaaaagtttcctacaakatgtctagggggtaatatgagtgaaaatggatggattcacaggactgtgcaaccaaatcaaagaagaaagcatagccctctttctgaaattaaatattgattcattaatatattaggcaccataattgaggcttatgggcctgggcctcagaatatagccttaaattctggccctacagtttaagacacatataatcctgtgtaaatcatttcactttcttaagccatgtttttcatttgtgaaatgggtacaataatgtcacctcataggatgtctatgggaattaaatcaacttaatttttaaaacaattcacaaagtacctggaacttattgtcaataagtgacttgattctacttattgagtgaattctatgtaaacaagtcttgggaataattttgaaaggctccatgtaaaatgtaggttatttcccaagactgactaaaatggtttgaggatactaaatagatcaatacaaaaatatatttctattgataaataaacttgactaaaataaatttataagagagagagagagtgtgtgtgtgtgtgtgtgtgtgtgtgtgtcctcagcaaaggaggatttttaaggacaaaaagatctaagtttcaattaaaatatcacagacacaccaagtatggaatctcaatcttagctgaataactccaaaatcataataaaatgtaagtacttctcatttgctgagaataacagcaaatgacagttttattcatttctggtataaaatgttcaagttcatttaatgaaccatgatattccttaatacacctagtgaacacaaatttgaccattactttttaagcaattttgtatatatagcattaatttttcttgacagatgaggaaaggtacatgtagtatgaacaaataaaaattttacttggaaaaattattttta

SEQ ID NO: 35676 - DNA, 1750 bp, Homo sapiens
aagggtagagattagttcctaaatacttttgccactgaaggtttcattttagaaaggctgtttttgatgtatgatgacagggaatagatctgagtaagcatgatgactttcaactctactcacaaatttaataaaatcctaagggatcataaactggcagctgctttgtgaaaatgaaatgctaatgttcacaattataatttttatacccatagccataaaatatataaaagtattaggttcttttctaatgcaatacatgtatgatttatgtgtattacagcagattaaatcttttgaggtaagaggggaataaaaagcaccaataagtatgtgtttggtcatttgaaatatgcctccacagtttcatctcaaaagtacttaagtagataaacatctatttggaggtaagaataagaggaacattttacctgaggcaagaatcttaatataccactctaaaaacagagagagagtcatgacagtattgcatgctgctgacattttaaacaatgtgagataagaatagaaacagttttacatgttaagaaagtttattacagatcatgctgatatgttaaaaagcttttataaaggaaagaaataggggaaagtggggaaccaccgatgtgttaagagatggagggagagaggtctggacaatgaccgcaatgaaaccatgaataactgtatttccattggcagtaaattatcacagattagagaactagaaatcattaatggatttctggatccaaacagaacagcagtgccaatacagtgtttaaaaactgaaaatatataaaacaaaaagaaaagtttcctacaatatgtctagggggtaatatgagtgaaaatggatggattcacaggactgtgcaaccaaatcaaagaagaaagcatagccctctttctgaaattaaatattgattcattaatatattaggcaccataattgaggcttatgggcctgggcctcagaatatagccttaaattctggccctacagtttaagacacatataatcctgtgtaaatcatttcactttcttaagccatgtttttcatttgtgaaatgggtacaataatgtcacctcataggatgtctatgggaattaaatcaacttaatttttaaaacaattcacaaagtacctggaacttattgtcaataagtgacttgattctacttattgagtgaattctatgtaaacaagtcttgggaataattttgaaaggctccatgtaaaatgtaggttatttcccaagactgactaaaatggtttgaggatactaaatagatcaatacaaaaatatatttctattgataaataaacttgactaaaataaatttataagagagagwgagagtgtgtgtgtgtgtgtgtgtgtgtgtgtgtcctcagcaaaggaggatttttaaggacaaaaagatctaagtttcaattaaaatatcacagacacaccaagtatggaatctcaatcttagctgaataactccaaaatcataataaaatgtaagtacttctcatttgctgagaataacagcaaatgacagttttattcatttctggtataaaatgttcaagttcatttaatgaaccatgatattccttaatacacctagtgaacacaaatttgaccattactttttaagcaattttgtatatatagcattaatttttcttgacagatgaggaaaggtacatgtagtatgaacaaataaaaattttacttggaaaaattattttta

SEQ ID NO: 35677 - DNA, 1750 bp, Homo sapiens
aagggtagagattagttcctaaatacttttgccactgaaggtttcattttagaaaggctgtttttgatgtatgatgacagggaatagatctgagtaagcatgatgactttcaactctactcacaaatttaataaaatcctaagggatcataaactggcagctgctttgtgaaaatgaaatgctaatgttcacaattataatttttatacccatagccataaaatatataaaagtattaggttcttttctaatgcaatacatgtatgatttatgtgtattacagcagattaaatcttttgaggtaagaggggaataaaaagcaccaataagtatgtgtttggtcatttgaaatatgcctccacagtttcatctcaaaagtacttaagtagataaacatctatttggaggtaagaataagaggaacattttacctgaggcaagaatcttaatataccactctaaaaacagagagagagtcatgacagtattgcatgctgctgacattttaaacaatgtgagataagaatagaaacagttttacatgttaagaaagtttattacagatcatgctgatatgttaaaaagcttttataaaggaaagaaataggggaaagtggggaaccaccgatgtgttaagagatggagggagagaggtctggacaatgaccgcaatgaaaccatgaataactgtatttccattggcagtaaattatcacagattagagaactagaaatcattaatggatttctggatccaaacagaacagcagtgccaatacagtgtttaaaaactgaaaatatataaaacaaaaagaaaagtttcctacaatatgtctagggggtaatatgagtgaaaatggatggattcacaggactgtgcaaccaaatcaaagaagaaagcatagccctctttctgaaattaaatattgattcattaatatattaggcaccataattgaggcttatgggcctgggcctcagaatatagccttaaattctggccctacagtttaagacacatataatcctgtgtaaatcatttcactttcttaagccatgtttttcatttgtgaaatgggtacaataatgtcacctcataggatgtctatgggaattaaatcaacttaatttttaaaacaattcacaaagtacctggaacttattgtcaataagtgacttgattctacttattgagtgaattctatgtaaacaagtcttgggaataattttgaaaggctccatgtaaaatgtaggttatttcccaagactgactaaaatggtttgaggatactaaatagatcaatacaaaaatatatttctattgataaataaacttgactaaaataaatttataagagagagagwgagtgtgtgtgtgtgtgtgtgtgtgtgtgtgtcctcagcaaaggaggatttttaaggacaaaaagatctaagtttcaattaaaatatcacagacacaccaagtatggaatctcaatcttagctgaataactccaaaatcataataaaatgtaagtacttctcatttgctgagaataacagcaaatgacagttttattcatttctggtataaaatgttcaagttcatttaatgaaccatgatattccttaatacacctagtgaacacaaatttgaccattactttttaagcaattttgtatatatagcattaatttttcttgacagatgaggaaaggtacatgtagtatgaacaaataaaaattttacttggaaaaattattttta

SEQ ID NO: 35678 - DNA, 1750 bp, Homo sapiens
aagggtagagattagttcctaaatacttttgccactgaaggtttcattttagaaaggctgtttttgatgtatgatgacagggaatagatctgagtaagcatgatgactttcaactctactcacaaatttaataaaatcctaagggatcataaactggcagctgctttgtgaaaatgaaatgctaatgttcacaattataatttttatacccatagccataaaatatataaaagtattaggttcttttctaatgcaatacatgtatgatttatgtgtattacagcagattaaatcttttgaggtaagaggggaataaaaagcaccaataagtatgtgtttggtcatttgaaatatgcctccacagtttcatctcaaaagtacttaagtagataaacatctatttggaggtaagaataagaggaacattttacctgaggcaagaatcttaatataccactctaaaaacagagagagagtcatgacagtattgcatgctgctgacattttaaacaatgtgagataagaatagaaacagttttacatgttaagaaagtttattacagatcatgctgatatgttaaaaagcttttataaaggaaagaaataggggaaagtggggaaccaccgatgtgttaagagatggagggagagaggtctggacaatgaccgcaatgaaaccatgaataactgtatttccattggcagtaaattatcacagattagagaactagaaatcattaatggatttctggatccaaacagaacagcagtgccaatacagtgtttaaaaactgaaaatatataaaacaaaaagaaaagtttcctacaatatgtctagggggtaatatgagtgaaaatggatggattcacaggactgtgcaaccaaatcaaagaagaaagcatagccctctttctgaaattaaatattgattcattaatatattaggcaccataattgaggcttatgggcctgggcctcagaatatagccttaaattctggccctacagtttaagacacatataatcctgtgtaaatcatttcactttcttaagccatgtttttcatttgtgaaatgggtacaataatgtcacctcataggatgtctatgggaattaaatcaacttaatttttaaaacaattcacaaagtacctggaacttattgtcaataagtgacttgattctacttattgagtgaattctatgtaaacaagtcttgggaataattttgaaaggctccatgtaaaatgtaggttatttcccaagactgactaaaatggtttgaggatactaaatagatcaatacaaaaatatatttctattgataaataaacttgactaaaataaatttataagagagagagagwgtgtgtgtgtgtgtgtgtgtgtgtgtgtgtcctcagcaaaggaggatttttaaggacaaaaagatctaagtttcaattaaaatatcacagacacaccaagtatggaatctcaatcttagctgaataactccaaaatcataataaaatgtaagtacttctcatttgctgagaataacagcaaatgacagttttattcatttctggtataaaatgttcaagttcatttaatgaaccatgatattccttaatacacctagtgaacacaaatttgaccattactttttaagcaattttgtatatatagcattaatttttcttgacagatgaggaaaggtacatgtagtatgaacaaataaaaattttacttggaaaaattattttta

SEQ ID NO: 35679 - DNA, 676 bp, Homo sapiens
agatgtctccttcctaatccccaggtctgtgaatgtggtaggttatgtagattaaggataaaagttgcagatggaattaagcttggtaatcagctgagtttaaaatagggagattaaataggattttacagctggtgaaattacaagctttcttaaaagtagaagagagacagagcagagtcaaagaaagaaataggactatgaaagaaggctcagagaaatgcaatgttgctggttttgaaaatgaagaaagcagactatgagacaaggaatatgagtggtctctagaagatggaaaaggcaaagaaatgaattcttctctagagcctctggaaataaacatagccctaccaataacttgattttagctcagagatactcatatcaaacttccaatctccagaattataagataataatttgttgttttaagccaccatgttagtggcaatttgttatcacaccaaatagaaaactaatgaattattcaaagtagcaaaattagccactatacatgaaataaagtgaatgccaaaagaaaaygaaaaagtacagttctattctttcatttttgtttagagtccaaggaatgtcccaccaaatgccatctcttttatctatacaaatttattttggttattattgatcccacataaacctaaaacattttattggc

SEQ ID NO: 35680 - DNA, 904 bp, Homo sapiens
gtcttgtcaaaagaaatgtagtggagacagtactttcaccattgtccagaggtaatgaggccactgtactccctataatatcagtagaggccattgggaaatagtaacaaagcattcctactcttcccaggcaggatgatattagtggagactcggctgaagaggagaactgagtgaacccagaaggcggaggttgcagtgagccaagatcgcaccactgcactccagccttggtgacagagcaaaactctggctcaaaagaaaaaaaaaaaaagaagaaaagaaaataagagaaaacatttttattttacaggattttagttaaaatggctgtcaaaataacactcaaatatgaaaccacattcaaagagcctatattgattcacaccatttaaaagcttaggcgtgtattggcagtaatacattaagcacagaaaggtgcataaatatgtgtagaatcaagcatatgaaatcaaaaacaagaaagaaaataaaatttagaatcagaagttgaattataggtcatccaccctaaattcttgcttataacaattacagggtcactagaacatggcaaatctcaacattactgtcacgtagctgtgagcctttagataagatgattcattccraaaagcttccaatttgtttcctgcagaataaagacaacgattcccatttcataaaacaatgtataaataatatatgaaaaacatgtataacattatgtctgacatattggaaatactgaagaaatggtagacatttcattataaattctttttctttttcctctgctaccctttccaccaaaagtctgtacttcaagttccatagcgtgcatttgacattgaaaagtgcaagctgctctcccagtaaccactttcttgacccgattcttatc

SEQ ID NO: 35681 - DNA, 758 bp, Homo sapiens
aaagcctaattatcttagaagtctcaattttttggatgaatcttgaaaaataaacatgattattacagaaacatgatttcactatatctatgatctcttacttaaattgatggcaaaaggtggcaatatctgttttgggaaataataaatacatatatcatgttttaattttgatttatgaagctttatatgacaatttataggtttttctgaacttatgaagaataattrcaatataataaaaatttttcatgttaaagttaaaatcagataaatatttgaataaaaatttaaaaattatatggcttggaatctatcaagttgggtacgttattgctgggaaaaagggaatttaacacaagtaatgatagaggcaggaggcagagaaatttaaggcagacaggggcaggtccctggtgaaacccacctttaagccaaagtagcctgaaacccatggcccaaagcgagaatgtctattcctgtttgctcgctctctcccaattggttccttttgaataatgcctttttgccaatcaaatgttgccttttgcaaaactaccaatggccaaccccacctaccccatcctgtgcctataaagaccccagactcagtcagaagaggagagagaagcagcttgactggagagaggcaacttgacttcagaaagacagctagacttctcaggagaggtggcttgactttagaaaagaaccagctgaacttcaggagaagattacctgcccatcccatcccctct

SEQ ID NO: 35682 - DNA, 622 bp, Homo sapiens
catgctatatttcatgaaaaatgaatgatgatctggaaggtagagcattgagcccagagggactagacttaaacccacagaatgaagcccaaacccacagaggattattctcagattgaaacctagtggagtttgcctgtctggattatgagattgcttgacacctttaagtcttttattctttcctttgcaccttttttatttttagtgtttaaacttttattttaggttcagggatacatgtgcaggtttgttatatagggaaactcatgtcaccagggtttgttgtacagattattttgtcacccwggtactaagcctagtatgcaatagttattttttctgatcctctccctcacacactccaccctcttgtaggctccagtgtcccattggtcccctctatgcgtccatgtgttctcatcattcagctcccacttataagtgagagcatgcagtatttggttttctgttactgcgttagtttgttaaagataatggccttcagctccttccatattcctgcaaaatgcacgatcttgtttttgttatgacctttgcacctttgtaaccagaatatctataattattatctcagacctgtcctaatttctatttcagg

SEQ ID NO: 35683 - DNA, 1113 bp, Homo sapiens
aatttttcattttgtaattaatttttagaccacactaaagtygctcttagtgatgatagggcttgtttctttgtttcattgtggctacttcttagcaccttctttagaaagcagttaggagaagatcatttgaaggccaacgagtgttgtgggttattgttaagctgatttaacattatctccccccacaaccacgcttgactagcttcacatttggccaggtgcagtggctcacgtctgtaatccagcactttgggaggctgaggtggaagatcacaaggtcaagagattgagaccatcctggccaacatagtgaaaccctgtctctactaaaaatacaaaaattagctggttgtggtggcgcacgcctgtcgtcccagctactcgggaggctgaggcaggagaattgcttgaacacgggaggtggaggttgcagtgagccaagattgcaccacagcactccagcctgggcgacagagtgagactctgtctcaaaaaaaaaaaaaaaaaaaaaaaagagaaagcaaacgtatttcttcttaaaacagaataaataaatagtctgtctctttctccttctgttcacatttgccccagtttcttctcttgaatcatgacagtttggaaaattgtctggattgcttagtgccactgaatcatgccatggaaggattttgtatttcacttttaaacttctctgtgacaggagaagcactgcttcatggcttcttgcccaaggattttagatggacacagtgggtaataaatggatgaatttttgtttgggttgaagaatctctctgagaagttgacacgtgggggcaatggtttgtttctcttgtatttctgaagttgcaaataatcatgtaagcagttcaaccaggagtttacaccaaacttttaataggcgatatatcattattttttttcccattggtttggataacatccactttaactggcagttagtcatacttagctatttttgttaaagcaggtgatttattgttattttatatttatgacatgattaataagtgaatatggaagattttacattgacttaggggatcaaagttttcattatattaacacctttaattgccatgagtt

SEQ ID NO: 35684 - DNA, 1113 bp, Homo sapiens
aatttttcattttgtaattaatttttagaccacactaaagttgctcttagtgatgataggkcttgtttctttgtttcattgtggctacttcttagcaccttctttagaaagcagttaggagaagatcatttgaaggccaacgagtgttgtgggttattgttaagctgatttaacattatctccccccacaaccacgcttgactagcttcacatttggccaggtgcagtggctcacgtctgtaatccagcactttgggaggctgaggtggaagatcacaaggtcaagagattgagaccatcctggccaacatagtgaaaccctgtctctactaaaaatacaaaaattagctggttgtggtggcgcacgcctgtcgtcccagctactcgggaggctgaggcaggagaattgcttgaacacgggaggtggaggttgcagtgagccaagattgcaccacagcactccagcctgggcgacagagtgagactctgtctcaaaaaaaaaaaaaaaaaaaaaaaagagaaagcaaacgtatttcttcttaaaacagaataaataaatagtctgtctctttctccttctgttcacatttgccccagtttcttctcttgaatcatgacagtttggaaaattgtctggattgcttagtgccactgaatcatgccatggaaggattttgtatttcacttttaaacttctctgtgacaggagaagcactgcttcatggcttcttgcccaaggattttagatggacacagtgggtaataaatggatgaatttttgtttgggttgaagaatctctctgagaagttgacacgtgggggcaatggtttgtttctcttgtatttctgaagttgcaaataatcatgtaagcagttcaaccaggagtttacaccaaacttttaataggcgatatatcattattttttttcccattggtttggataacatccactttaactggcagttagtcatacttagctatttttgttaaagcaggtgatttattgttattttatatttatgacatgattaataagtgaatatggaagattttacattgacttaggggatcaaagttttcattatattaacacctttaattgccatgagtt

SEQ ID NO: 35685 - DNA, 1189 bp, Homo sapiens
gcatttatctgcctctcttcccagtcctggaagacaggaacggtgattccaatagcttgcagggtgcttctcactagcaaggcacatcaacctttgctgaataaacgacctcaggataaggtaaggcattcctaaattactgctgtttctgggactaattttgataattttatcctagtcccaacaaggactctccctttgtagagacagcattcacaacaaaatgaatctttctcaagactaaaataaagaaaagagcatttccaggttcagacctgctcacagagtaaaatagacaaggccagtccatgcctgtctgagtacacgagctgcattctctgtgagtgccccggtcacctcttgggacacagcccaccagcagcagccttgcctgagaccacacggtgctatgtgggtgctggagatgccaggaggcaaggcgggaggcatgggaggcaccggcctggttcctaagaagctcaagtgtccagtgaggagaaatgggctggaaagtagaaaaagacaacgttgtttccaggaaaactaaaatcaaagtcaaggaagtgaggccagcagtcactgctctaagatgcaggggctgtcctcaaggtggccaaggagctccaggaaggcaagactttagggagaggagaaactgagaaaggcttgaaggtcagaaagaaagcagtgtgttggaaggtaacgagaaggggcaggggagagacaaaggagacgcatttgggagggttttaaatactttgctagtgarttttattttttgcctgtttaattaatttaaacctgctaatgaatttaacttttcattatgggggccattaaatatttttgggccaaagagaaagtgacgtgcatgccaagaggtgtttgatgaagatgaagcaggcaggagtccataggtggtggttagagagtagagccggggggcccggcagtccagactccaggtagcttggccctaacaagaaaggagccagcgggagaaatatcaggcaagtaacttgccctggtcctgcagcggcaaggtggcagtgaagctgggacatgaacccaggggtctgactccagcaacctcaccctttgctgctaggcacacctgcatggcagcctcctagctgtacctttcaaatagctgtgagcagcttaaggcttcaatagctacatagatgca

SEQ ID NO: 35686 - DNA, 551 bp, Homo sapiens
tgagacaacagtcagggtgtcttctgggttgcagtcatctcaaggttcagtgggggaaagagctgcttgcaagctcactcatgttgttgttagcaggcctcagtttctgttgggcctcctccctctgactgatgctcaggactgtgaacttcctctgggaatttccccagcaaagcaccaatatgttaggttagaccaaccctacctagtaggtttccactgtggctgaatagatatggtcaaacaatatctgtggcctcaggtccttacagcagttggctggggatggtcctcattcyttgccctgtgggggtctccagagggcagctcacaacagcaaagcttgtttcctgagagcaagtcctggagaagagccagaggagatggaattccagcaaaaaggaagtcacaggctttttataaccctgacctcagaaatacaacctatttcacctgccctattttattgtgaagcagacacagtctgctcacaaaacaagggactgtagatggtggtgatgcccagagcagggatcattatgagtcatttg

SEQ ID NO: 35687 - DNA, 1216 bp, Homo sapiens
gcatcttggcaacagttattttcctcttcctcccaacaacacaaatgatcccccttgcccctggtactcacctccccctttcagccttttcattgggaagtgatgagccatgcgaatacccttcaggtgggcttcctgtccacatatttggtcagctcaacccacaaacaaaggcaatttgcagagatccttggctctgacaacstggatgctgcagataactgaggcagagcctcgggctgcagccagattggtcaggcagccagaacgcctcaggccattttaagaagctcccgcaatcaagttctttacctgacatgacctaggaaatcaagattctcggtgctactggagggaaaattaagtgccttactcaaattatttcaagtgccctgccaagcattactagcttttattttattttcttagttgtttttagttgtctcgatcgtactttaagggcagagagagttgagttagccggatgcctcggttcttgtcagtgcagccgtgactaagaactgcttctctcaaacactggctctatcacttagtggccatgtggccttggcgacagctctctgttaactagggttagcaatggtgcctaccactgcaagcctgttgtaagggtaaaatggttattgtacaaaaaatacttagacctatgactgatggatagtaggagctatgcgtttgtatattgttacaattagatttttccccttttaattattattttacttttctctttcttccctgatctctgcttcccttctcttctccagggagccagtctgaagtatttgatatatggcctgttatcttcatacacaggcttttcaaagtcagaattaattccaggccacacgtcacagccaacagccaatggtgttgtattaacaatttccataagtgctgtgtaaactatgaccagctacagtgatcaccatattctgggctaacaattgaatttacctataaaataacttctttataggcagatgctttgtattgacagtgtataagtctgggttcttatttgcaagcaacagaaattgatcctggctgagaatctcacagaatgtccagccatggggtgggggaatccctcaaatctatgccattttatagggatgtaagggatcatcttcaacatatggctcctaaggctgcccaaggtagagacatccagcaaatgggagagagacggcca

SEQ ID NO: 35688 - DNA, 1216 bp, Homo sapiens
gcatcttggcaacagttattttcctcttcctcccaacaacacaaatgatcccccttgcccctggtactcacctccccctttcagccttttcattgggaagtgatgagccatgcgaatacccttcaggtgggcttcctgtccacatatttggtcagctcaacccacaaacaaaggcaatttgcagagatccttggctctgacaacctggrtgctgcagataactgaggcagagcctcgggctgcagccagattggtcaggcagccagaacgcctcaggccattttaagaagctcccgcaatcaagttctttacctgacatgacctaggaaatcaagattctcggtgctactggagggaaaattaagtgccttactcaaattatttcaagtgccctgccaagcattactagcttttattttattttcttagttgtttttagttgtctcgatcgtactttaagggcagagagagttgagttagccggatgcctcggttcttgtcagtgcagccgtgactaagaactgcttctctcaaacactggctctatcacttagtggccatgtggccttggcgacagctctctgttaactagggttagcaatggtgcctaccactgcaagcctgttgtaagggtaaaatggttattgtacaaaaaatacttagacctatgactgatggatagtaggagctatgcgtttgtatattgttacaattagatttttccccttttaattattattttacttttctctttcttccctgatctctgcttcccttctcttctccagggagccagtctgaagtatttgatatatggcctgttatcttcatacacaggcttttcaaagtcagaattaattccaggccacacgtcacagccaacagccaatggtgttgtattaacaatttccataagtgctgtgtaaactatgaccagctacagtgatcaccatattctgggctaacaattgaatttacctataaaataacttctttataggcagatgctttgtattgacagtgtataagtctgggttcttatttgcaagcaacagaaattgatcctggctgagaatctcacagaatgtccagccatggggtgggggaatccctcaaatctatgccattttatagggatgtaagggatcatcttcaacatatggctcctaaggctgcccaaggtagagacatccagcaaatgggagagagacggcca

SEQ ID NO: 35689 - DNA, 1216 bp, Homo sapiens
gcatcttggcaacagttattttcctcttcctcccaacaacacaaatgatcccccttgcccctggtactcacctccccctttcagccttttcattgggaagtgatgagccatgcgaatacccttcaggtgggcttcctgtccacatatttggtcagctcaacccacaaacaaaggcaatttgcagagatccttggctctgacaacctggatgctgcagataactgaggcagagcctcgggctgcagccagattggtcaggcagccagaacgcctcaggccattttaagaagctcccgcaatcaagttctttacctgacatgacctaggaaatcaagattctcrgtgctactggagggaaaattaagtgccttactcaaattatttcaagtgccctgccaagcattactagcttttattttattttcttagttgtttttagttgtctcgatcgtactttaagggcagagagagttgagttagccggatgcctcggttcttgtcagtgcagccgtgactaagaactgcttctctcaaacactggctctatcacttagtggccatgtggccttggcgacagctctctgttaactagggttagcaatggtgcctaccactgcaagcctgttgtaagggtaaaatggttattgtacaaaaaatacttagacctatgactgatggatagtaggagctatgcgtttgtatattgttacaattagatttttccccttttaattattattttacttttctctttcttccctgatctctgcttcccttctcttctccagggagccagtctgaagtatttgatatatggcctgttatcttcatacacaggcttttcaaagtcagaattaattccaggccacacgtcacagccaacagccaatggtgttgtattaacaatttccataagtgctgtgtaaactatgaccagctacagtgatcaccatattctgggctaacaattgaatttacctataaaataacttctttataggcagatgctttgtattgacagtgtataagtctgggttcttatttgcaagcaacagaaattgatcctggctgagaatctcacagaatgtccagccatggggtgggggaatccctcaaatctatgccattttatagggatgtaagggatcatcttcaacatatggctcctaaggctgcccaaggtagagacatccagcaaatgggagagagacggcca

SEQ ID NO: 35690 - DNA, 1216 bp, Homo sapiens
gcatcttggcaacagttattttcctcttcctcccaacaacacaaatgatcccccttgcccctggtactcacctccccctttcagccttttcattgggaagtgatgagccatgcgaatacccttcaggtgggcttcctgtccacatatttggtcagctcaacccacaaacaaaggcaatttgcagagatccttggctctgacaacctggatgctgcagataactgaggcagagcctcgggctgcagccagattggtcaggcagccagaacgcctcaggccattttaagaagctcccgcaatcaagttctttacctgacatgacctaggaaatcaagattctcggtgctactggagggaaaattaagtgccttactcaaattatttcaagtgccctgccaagcattactagcttttattttattttcttagttgtttttagttgtctcgatcgtactttaagggcagagagagttgagttagccggatgcctcggttcttgtcagtgcagccgtgactaagaactgcttctctcaaacactggctctatcacttagtggccatgtggccttggcgacagctctctgttaactagggttagcaatggtgcctaccactgcaagcctgttgtaagggtaaaatggttattgtacaaaaaatacttagacctatgactgatggatagtaggagctatgcgtttgtatattgttacaattagatttttccccttttaattattattttacttttctctttcttccctgatctctgcttcccttctcttctccagggagccagtctgaagtatttgatatatggcctgttatcttcatacacaggcttttcaaagtcagaattaattccaggccacacgtcacagccaacagccaatggtgttgtattaacaatttccataagtgctgtgtaaactatgaccagctacagtgatcaccatattctgggctaacaattgaatttacctataaaataacttctttataggcagatgctttgtattgacagtgtataagtctgggttcttatttgcaagcaacagaaattgatcctggctgagaatctcacagaatgtccagccatggggtgggggaatccctcaaatctatgccattttatagggatgtaagggatcatcttcaacayatggctcctaaggctgcccaaggtagagacatccagcaaatgggagagagacggcca

SEQ ID NO: 35691 - DNA, 655 bp, Homo sapiens
tgcattcatcaatccttttcacccattcatctacctatttatccattcatgggtgagcaactgacaatcatatagaaacagagacaagcaattatggacatcagagtttttcaaagaagaaaaagttattgagtatttgaaaactaggaaatagttaatttctatatttcgcatcattattcttattgaaaaatagatattctctaatgtaggacatgcagtttgcaaagattagtggctctagagttatttttctatgccttgcagacaagattgaggaattaatacttcgttgcaatgaaataattatacttccacaatatactccattttgttttgttaattggtgcttgtttacatgcaagcaaaattaaattcaataattttcactaaaattaaaatatgattaatgttttctaaaatatactttgtatagatcaatttctcctttctttcatttgcttattttttcyatttaaaaatgtcatctgcatatcacataagttgatgatctttaaatattaataaagataatttcttagtggtgggctttttgatgttgtatacaaattattttgaggctgggcatggtggctcatgcctttaatccctgcactttgggaggccgagcaggatcacttgagctcaggagttc

SEQ ID NO: 35692 - DNA, 655 bp, Homo sapiens
tgcattcatcaatccttttcacccattcatctacctatttatccattcatgggtgagcaactgacaatcatatagaaacagagacaagcaattatggacatcagagtttttcaaagaagaaaaagttattgagtatttgaaaactaggaaatagttaatttctatatttcgcatcattattcttattgaaaaatagatattctctaatgtaggacatgcagtttgcaaagattagtggctctagagttatttttctatgccttgcagacaagattgaggaattaatacttcgttgcaatgaaataattatacttccacaatatactccattttgttttgttaattggtgcttgtttacatgcaagcaaaattaaattcaataattttcactaaaattaaaatatgattaatgttttctaaaatatactttgtatagatcaatttctcctttctttcatttgcttattttttctatttaaaaatgtcatctgcatatcacataagttgatgatctttaaatrttaataaagataatttcttagtggtgggctttttgatgttgtatacaaattattttgaggctgggcatggtggctcatgcctttaatccctgcactttgggaggccgagcaggatcacttgagctcaggagttc

SEQ ID NO: 35693 - DNA, 641 bp, Homo sapiens
tcttctatatcatgttgtggtggttgtaactcagttgtctgtgtcaaagtttatagaactgaataccaaaaagagtgagttttattctatacaaataaataaaaggagaaatcataatcatactaggtaggwtggcagtgaccacatgtagaatataaagcctgccttcactatgggtcggctttaacttgtgaaaacactatgaattcagatgatatgttatgtctttgcttttaagttagaatatgttgttatgttgaaataacataataattggagctgatttctcagcctgttccatcatgtgtttggattttaataaccttattatttaatataatatctaaccattatctttctttggagaaatgtgtacaaaaatctattttgacacaccctgaactaatcattgtactgttggcaatagttctccattaagtgtcagggtcatagacttagaaaaataatacaaaatgtcaaaaatgtgttaatattcttcatctgtagctacacaagttaattttccaagtcaattcaatttcaaatatttacaatcatggaaataaagtgactaaagcagatgacagtaactgatgaacctaaggtatggaggtgctagagagtaagtttggaaatggtag

SEQ ID NO: 35694 - DNA, 566 bp, Homo sapiens
tgcttttgctgcctgttattaatctttttaataaccttgtaatgaccaagtattattagcatgatcaccacagcatcccacttacagacaatggatcagaagtggagaggttgttaatagtagcagggctgagatttggatgcacacagactgccttgggggcctgggctcttacccatcagtctaaactgagtgactttcaagtgagggagacatttctggtggctgggatcagtggtgaatggcattttgaactgagcttagggatgggaggaatttctacaggtagagatgtggaatctcattgtgtgcccagaatggctagagcagaagaacagaaggctcccacggtgtgcagaccattgaaagaaagttggaagccccrggcacaaggaggagaggtgctcagtcaggaagtgctctcttcttttcaattttagaggcatgattgtttctcccagttgaatactgaaaaggatgaactttactgttgagcatctgtgattggaataaatatatccttatctgttctgggcagctttcaaaataatttgttagaaagcacc

SEQ ID NO: 35695 - DNA, 1061 bp, Homo sapiens
tcttgcaagattttctaataacatgatagtccttgttttcaagctgtcaggtagtaaaacagtaatttaatttggcaataacatatgacattctaagaagacgcattagaaggtttttaagaagtgtactgaaatatttttggaatgtccttcaaacaggcaaagtttaaactggaaagagcaaaaagttaaatattatatatttataaaaagtcaaactattttttccttacctggttaaaaaggtgttaccaaggtcgcaaaatagctttgtatattaaaaattttttttattggattaattcctagttgtagtttagctacttatttttgtttttcatttatctttttcacctctatgtagcttatgttattaagttatgttattaagtttttaaataaaacctaggaggcttcttaattctttatgaaaaattctgtgagaataactagctaaattttaaaactacaaccaaataagattgacataataatatgcatatacattgctcttctcacattaacaataatagatttgtatcttctaagatatctctgagaataaaatttccagccatatcatcagctaaattaactcaaatttactatctggatttggctgtttcrcttgtaggttaaaagttaaaaggtttgctatttcttggaatcaaaggttatttaatgaaagaagattaatttcaataaatgatgcatttaaagttttttccaacaaagagtgtaagagatttatcacaggttctaaataacaaatttaatttccctaacatgttaaggagaattttggttcccgcagaggactgagtggactaatcatttataataagactgactttaaacttccttttaacttgacagtagttaattctaactttattaaattagaatccccattaattcacccatttttctttcaccaattttgttttacaattaaggtttatctgcagagttctgttttgaccattatgctgaaagtgctgagttctgctgtttgccttccttcagcctttctggctgaatggcttcctgaatcttctcag

SEQ ID NO: 35696 - DNA, 604 bp, Homo sapiens
agttgattcttgtagatagtgtgagataagggtccaatttctttcttctgcatgtggatatacaatttccttactacaatttatttaagttatttatttatttaatcccattgtgtgctcttggcaactttgttgaagatcaactgacagtaaatgatttgatttatttctggactatctactctgttccactggtttatgtttctatttttatgccagttccatactgttttgattactatggttttgtagtatattttgcaatcaggtagtgtggtgcctctagctttgtttttcttgctcaagattgctttgtctattctgggtcttttgtggttccttttcactgtgtcttgtgtcttctatatgtcttaccctctgtttcatatttcccatccttttgttttaccatgtctcattctgaatatgttcttttgtcatttgtctaactttcataaattttctctttatttatgtctataccattgttaaaccgtttcatttatgttccggaagacaattgtagaagaatttctaaattcctctgtgtattttttaaaaaaataamctgtttatttttgaacagttttattttagatttaca

SEQ ID NO: 35697 - DNA, 1212 bp, Homo sapiens
aaaaccctaggggtggatccagtgcagagccgggggctgagacacatggcatggtggccccttgactacgtctatgctacaatgactcccaggagccacctgctcattcccagcccatgtcaatggccaaaatatttgagagcattcagagattatcatcaatgagtggagccaggcaagggaatgaagaccaaggaagacaaaagtggaatctagaatggytctggtgcagatcgaatcctaaatctggaggacactcatttgcatttgtgttcacagtactgctgattggggtccacgcaccccacagagcaggcacaacctcagagcgctgactccaatagatacaaaccttgtgtgtcaaagaggagctaagagaaagactaaaataggaaccaataaataagtaaacccccaacaaatgaagagaccccccccccattactgcttgaaatggcctcatttttttttttaaacaacaaacatggaaataaaaaccacaacatatcttctcctatgccattctctctcaggagccataagcagctgcaggagatggaaaatagattgtgttagtagcaaaacagttgcccatgacattttcagatggaatggaagaagtgatacagctgtgagaaaacacagtgcttactgtgctaaatttatttcatgaacttccagtattaaaaaatactggcaggcagagattttaaaaatgacactgtgcccttcctaaactctggaatcacattacttagtatttgtggtaatttccaatcaggacagtcattgtcatcactgtagatattcagacaggtgacaaatgatggtgatatcagattggaacaggaaacagccatggagcatttcccagtgtatctatagggagctgctctatcagcagattcctgattaaggttgggtcgagggcacaacccccctgtgtccgtgtagtcatctcatatgtctttgatttgaggacctttgaagtaaaagctttggtctagcaatgttggcattacaacaatattctgatggaggacagggagctggagaactcagcaatggagctgggactaaggctgtgtgtgatgcccagtgtatggctctgacctctgtttgtgggaccagcagcagttctgagccttttcctctctcctgcttctgtacacatgaggactagtgttctcatgcactacacattgccatgca

SEQ ID NO: 35698 - DNA, 1212 bp, Homo sapiens
aaaaccctaggggtggatccagtgcagagccgggggctgagacacatggcatggtggccccttgactacgtctatgctacaatgactcccaggagccacctgctcattcccagcccatgtcaatggccaaaatatttgagagcattcagagattatcatcaatgagtggagccaggcaagggaatgaagaccaaggaagacaaaagtggaatctagaatggttctggtgcagatcgaatcctaaatctggaggacactcatttgcatttgtgttcacagtactgctgattggggtccacgcaccccacagagcaggcacaacctcagagcgctgactccaatagatacaaaccttgtgtgtcaaagaggagctaagagaaagrctaaaataggaaccaataaataagtaaacccccaacaaatgaagagaccccccccccattactgcttgaaatggcctcatttttttttttaaacaacaaacatggaaataaaaaccacaacatatcttctcctatgccattctctctcaggagccataagcagctgcaggagatggaaaatagattgtgttagtagcaaaacagttgcccatgacattttcagatggaatggaagaagtgatacagctgtgagaaaacacagtgcttactgtgctaaatttatttcatgaacttccagtattaaaaaatactggcaggcagagattttaaaaatgacactgtgcccttcctaaactctggaatcacattacttagtatttgtggtaatttccaatcaggacagtcattgtcatcactgtagatattcagacaggtgacaaatgatggtgatatcagattggaacaggaaacagccatggagcatttcccagtgtatctatagggagctgctctatcagcagattcctgattaaggttgggtcgagggcacaacccccctgtgtccgtgtagtcatctcatatgtctttgatttgaggacctttgaagtaaaagctttggtctagcaatgttggcattacaacaatattctgatggaggacagggagctggagaactcagcaatggagctgggactaaggctgtgtgtgatgcccagtgtatggctctgacctctgtttgtgggaccagcagcagttctgagccttttcctctctcctgcttctgtacacatgaggactagtgttctcatgcactacacattgccatgca

SEQ ID NO: 35699 - DNA, 1212 bp, Homo sapiens
aaaaccctaggggtggatccagtgcagagccgggggctgagacacatggcatggtggccccttgactacgtctatgctacaatgactcccaggagccacctgctcattcccagcccatgtcaatggccaaaatatttgagagcattcagagattatcatcaatgagtggagccaggcaagggaatgaagaccaaggaagacaaaagtggaatctagaatggttctggtgcagatcgaatcctaaatctggaggacactcatttgcatttgtgttcacagtactgctgattggggtccacgcaccccacagagcaggcacaacctcagagcgctgactccaatagatacaaaccttgtgtgtcaaagaggagctaagagaaagactaaaataggaaccaataaataagtaaacccccaacaaatgaagagaccccccccccattactgcttgaaatggcctcatttttttttttaaacaacaaacatggaaataaaaaccacaacatatcttctcctatgccattctctctcaggagccataagcagctgcaggagatggaaaatagattgtgttagtagcaaaacagttgcccatgacattttcagatggaatggaagaagtgatacagctgtgagaaaacacagtgcttactgtgctaaatttatttcatgaacttccagtattaaaaaatactggcaggcagagattttaaaaatgacactgtgcccttcctaaactctggartcacattacttagtatttgtggtaatttccaatcaggacagtcattgtcatcactgtagatattcagacaggtgacaaatgatggtgatatcagattggaacaggaaacagccatggagcatttcccagtgtatctatagggagctgctctatcagcagattcctgattaaggttgggtcgagggcacaacccccctgtgtccgtgtagtcatctcatatgtctttgatttgaggacctttgaagtaaaagctttggtctagcaatgttggcattacaacaatattctgatggaggacagggagctggagaactcagcaatggagctgggactaaggctgtgtgtgatgcccagtgtatggctctgacctctgtttgtgggaccagcagcagttctgagccttttcctctctcctgcttctgtacacatgaggactagtgttctcatgcactacacattgccatgca

SEQ ID NO: 35700 - DNA, 1013 bp, Homo sapiens
tccatttagagctgactctttaaagctatgaccttgccttgaccttggcccccaggtcctgccttttggaatgacccgctctcgtattgctgtctttggacctaagcctggaccctgcttcctccatggctccccttgcaattaattgtttagatgagtgaggttctggccctctattggttacagcctcagatgagcacaaatggtcagtttatcgtgtctctagatagaatggatgaagtggcaaggtggaaggcctcgaagaagatgccttttgcctctagctgtttccagtaataacaataataaaatgacttcytctgactatttctagaggactatgtttgaccactggatttcttttggctaatgggatatgatttctttacagaggctcttgctacctttataatctcagtatcaggacccctttcttctctgaggtagaacactccctaaatcatagcactaaagaaaccaggctgtgcttcagagcccaagagaacagtgcttctgaaatagtatgttatgtaagtgctgtgttttgccactgcacaagaaattgttctagataaagtttattaaacgtggcaggagaaggaggaataggttttcgctctatgagcggtagggctgggatgctgccaatatcatttacggtgtctggggaaagccaagggagacacagactggagctgcctcatctcttttccaaaaagcaaagaaaactaaatatagccaagtggaaatgatagcacctttgaaggtacggagaggtttaagttattcagatctcccaagctgattccagcacacacattccctttaatcatcaatctggaaagtatgcctcccattctacttggaaagctttctttgcagcagaggcatctaagaatgcttgatcaaggcctgaagttatgtggctttttgcaatacactgcaatttaatttatatttcaatatacaatttattggtcacagttaataccacctgcctgcagggcaaagga

SEQ ID NO: 35701 - DNA, 780 bp, Homo sapiens
atactgctttttatgagctgtaacagtcaccatgaaggtctgcagcctcactgctgaaracagaaagaccacaagcccaccgagaatgaacgaataacttcagacatgctaccttaagagctgtaacactcaccgtgaaggtctgcagtttcactcctgagccagcgagaccacgaacccaccagaaggaaggaactccaaacacatccaaacatcagaaggaacaaactccagacatgccactttagagagctgtaacaatcactgcagggtgttctcagcttcattcttgaaggcagtgagaccaatgaacccaccaattccagacacactaacactttgcaagactgagctggaaaggatcacttgagcctaggaggtcaaggctacagtgagctatgatcacagcactgcactccagctccagctggggtgacagaacaagaccatatctcttcaaaaaaaaaaaaaaaaatccaaactatgcttatatagatcacaaaaactcacgcttttccagcagtttgaatcctctccgtcctaagccaagatcctcttcatccttcaaggcctagctaaaaagccaactactcaaaatagctttccctcttcatttttcttcagtatttggatttcctctcaaaagtttttttattttccgttgcagttgttttcatgtttagcttaaccaattaaactcagttccttttccatacttcactaacctttctttgccccaaattaagtacagggtttttgcatatgaaaaattcttaagat

SEQ ID NO: 35702 - DNA, 636 bp, Homo sapiens
ctttgagtgcttagattttyttgtatgacatgtagaaaaatgacttgttttaaatataggtcattggatggtctgaatagaggttagaagggaattaatattttccagatgtctgaagttatcacagcttttttttttttttttgagacggagtctcgctctgtcacccaggctggagtgcagtggcgcgatcttggctcactgcaagctccgcctcccgggttaatgccattctcctgcctcagcctccagagtagctggaactacaggcgcccgccaccacgcccagctaattttttgtatttttagtagagacggggtttcaccatgttagccaggacgatctcgatctcctgacctcgtgatctccccgcttcggcctcccgaagtgctgggattacaggcgtgagccaccgcgcccggcccctgatcacagcttaaatgtacttagataaaataaaaatctaattttggggagatgatgtcttaacagcataacacctatgatccaaggtgtcttagagttgatacgacttcaggctgtgtagttttgttttaaatcttgataatttatcattgccccttatctaaaatacttttgcttcttgtcctatttaattaaaaaagaaaacatat

SEQ ID NO: 35703 - DNA, 636 bp, Homo sapiens
ctttgagtgcttagattttcttgtatgacatgtagaaaaatgacttgttttaaatataggtcattggatggtctgaatagaggttagaagggaattaatattttccagatgtctgaagttatcacagcttttttttttttttttgagacggagtctcgctctgtcacccaggctggagtgcagtggcgcgatcttggctcactgcaagctccgcctcccgggttaatgccattctcctgcctcagcctccagagtagctggractacaggcgcccgccaccacgcccagctaattttttgtatttttagtagagacggggtttcaccatgttagccaggacgatctcgatctcctgacctcgtgatctccccgcttcggcctcccgaagtgctgggattacaggcgtgagccaccgcgcccggcccctgatcacagcttaaatgtacttagataaaataaaaatctaattttggggagatgatgtcttaacagcataacacctatgatccaaggtgtcttagagttgatacgacttcaggctgtgtagttttgttttaaatcttgataatttatcattgccccttatctaaaatacttttgcttcttgtcctatttaattaaaaaagaaaacatat

SEQ ID NO: 35704 - DNA, 988 bp, Homo sapiens
aagagaagaaaagaaaaaaaaattattttttatgacgtgcagtacctcttatattttatactccctatttttcactggtgtatagttgaggaatctacatctcctggtttatagggcctggtcatgctttatgcttgactccttggtttcccatccaatttagaagttgctctggattattttttcatttataacaaaatattatcactaattgttgcattaaaacaagcaagaatgggaacctctattttgtacttgtaatttctgtcattatctcaagtaacagcatgttggatacatgcmcaattaacagaaattttactttaaccagtgactacacatgtagaatgaccagcaataatttatcattcttttttagataatttgcagatgttatattacagtgctcttctttaaggacttgaagaaatgcacttagtgcagtgagccgagatcctgccactgcactccagcctgggcgacagagcgagactccgtctcaaaaaaaaaaaaaaaaaaaaaaaagaaatgcacttaggcacttagatgttagattgtggtggggaaggtaccgctgttgccctgtgggccatttactattaatataatagccatctgcactgtacccaacagagtggcctacaagatgctggaaatttctcaggacctagtagccaggatcaatgggcaatctgagagactgtagttcataggtacatggaattgtgacagagtacaaatgcatctgaccacactcactacagtagtttttttaaaaattctattgattttaatgtcctataaccgttttatttcttttttataaatgtttttattaaagaaatgagcttttagaaagcaaatggttaattaaaaattactactgaatttcagttactaaagaaacttggtgatgagtatcatcttcaaaaatatttgtaagcattatcatctgtcataaaagaacataatggtatcatcgaccata

SEQ ID NO: 35705 - DNA, 522 bp, Homo sapiens
tttctggagaaagggtgctcatcgcagatggaacaatggcgggaacatgcttgaacaaaggagggaggcaatttttatcccttatgcagcttgtccctgctactgtgtcccgtctccattggctggagccggacctcacagtctaaactaatacccgattggctaacagctgaaaactttcttaaataggtaaaggcaagggagaacaaaggaaaagaggaagttgcttatgaaagatttaaagaagcaataacatttccaaataaggaaggggcataagctataagctaagatttgcctcggcctgtctagacatgcctgagtaagccaaagcaactaactgggctaaagtgtaagaactaacagttgataggaggctttagagtaagaagctattattcctagtgcctattttatttttaaactaagacgagctttgaagaggaacktttctactttctacaagtcattgcccagtattgtggaatgagaaaggacttgtttgtctgggctatgctgagt

SEQ ID NO: 35706 - DNA, 522 bp, Homo sapiens
tttctggagaaagggtgctcatcgcagatggaacaatggcgggaacatgcttgaacaaaggagggaggcaatttttatcccttatgcagcttgtccctgctactgtgtcccgtctccattggctggagccggacctcacagtctaaactaatacccgattggctaacagctgaaaactttcttaaataggtaaaggcaagggagaacaaaggaaaagaggaagttgcttatgaaagatttaaagaagcaataacatttccaaataaggaaggggcataagctataagctaagatttgcctcggcctgtctagacatgcctgagtaagccaaagcaactaactgggctaaagtgtaagaactaacagttgataggaggctttagagtaagaagctattattcctagtgcctattttatttttaaactaagacgagctttgaagaggaacgtttctactttctacaagtcattgcccagtattgtggaatgagaraggacttgtttgtctgggctatgctgagt

SEQ ID NO: 35707 - DNA, 823 bp, Homo sapiens
gctgtcattcgctgacacctggatgagagtattgctttatttattcccaccattttcacaggaaagaagtttcttaatacctcgacttagcattaataatttgttttttctatttttctctcatatctatcctctctctggaagttgaatcagtactcaataaaaaatcgggattacgctctgagagacaaattctcttttcagaatatccctgctttaagcactatgggaaggtacactgcctttctccactttaaagcctaagcttcttttaggttggatgaaaatcacttgctctttgaaattgtggtctctgcttttccaatcaagggtggcttaggctgccttacagagcaagccccataaaaacgctgccatggggaaatgctgtttgctgagagtttgacacaaaagcccttcagacaagtgttgtttggctgcttatggtagattaagaacaagatcctttgtttccaaaagaaatcaatgtttgttcttaagttcaaagaaaaccagctgttctaaggacgatatgaggacctggacttcattccagccgccaattatctgcaaacacagcagaagcaaaacccatgtctacctagcatggagaattagtcttaggagatccctcagtccagaactcccctacccagtcactcaagtccagcctatgaaattgattttttaaggaaaaaaaagagtgtttatatcaaaatgggagtccacttaggtcaccccctctgaggagcagtcacatcaactactaggcttcttattagctactaagaaatccagaaaacagcatcggtgktttttctaa

SEQ ID NO: 35708 - DNA, 1154 bp, Homo sapiens
  misc_feature (1)...(1154): n = A,T,C or G
gcatattcttaactgttatgtatgtaacaaaggggaagttcagggtwttacaagagcttgtaaagtggggatttcaccccggagagggggtcagaaaggttcacaatcactccaagaagcaggagcagcttcaacagagccagctcattaaccaacgtgcctcaaagactttttcaagcttctcttgcagctgatgatgtaagccatgcaggaggagaggaaagttaccaggggctcatttgcagccaattctggtgctaactgtcaactgcttagccttctcttatttgtgcagcattggtaggaatttattatatctttaaggcagaaaatatgtcagttcatatgttagtttttggaaaaaggtagtattttttgctttgctccgactacactgactaatgggaatattaatattttcagaacattttctcaaagcaaaaacctaagaaaaattcatgttgcacaagttgaataaagaaactctctactattaaggttatttggcgtgtttcataataagctcttcatttctctcagagtgagctgcagaaaatgaggcccattttagtacaaatcctaactgtgtagcagcaatgttctaaaatagaaattacagaaagaaaataagatttttctctgtattaaaattttctctacagatatagntggattttggcatatgtacaataaatcaggacagttttccctgaaagtggtttttttcttgttactattcttccatgctacaaactaaattgtatccccttcaaaaattaatatgttgaagtcctaattccaagcacctcagaatgtgtatggagacaaggtctttaaagaggtaattaaggtaaaataaggtaattacctggaccttaattcagtatggctggtgtttataagaagtggaaatttggagacacacagttacaaagggaagaccatatgaagacacagggagaagccatctacaagtcaagaagagaggcctcagaagaaaccaaccctactgacactttgatctcaaaattctattcccagaactgtgagaaaaataatttctgttatttaaattcctcagtctgtggtactttgttatggcagccatagaaaatgaatacatcccataagaaacaaataaaatttaagactaa

SEQ ID NO: 35709 - DNA, 1154 bp, Homo sapiens
  misc_feature (1)...(1154): n = A,T,C or G
gcatattcttaactgttatgtatgtaacaaaggggaagttcagggtattacaagagcttgtaaagtggggatttcaccccggagagggggtcagaaaggttcacaatcactccaagaagcaggagcagcttcaacagagccagctcattaaccaacgtgcctcaaagactttttcaagcttctcttgcagctgatgatgtaagccatgcaggaggasaggaaagttaccaggggctcatttgcagccaattctggtgctaactgtcaactgcttagccttctcttatttgtgcagcattggtaggaatttattatatctttaaggcagaaaatatgtcagttcatatgttagtttttggaaaaaggtagtattttttgctttgctccgactacactgactaatgggaatattaatattttcagaacattttctcaaagcaaaaacctaagaaaaattcatgttgcacaagttgaataaagaaactctctactattaaggttatttggcgtgtttcataataagctcttcatttctctcagagtgagctgcagaaaatgaggcccattttagtacaaatcctaactgtgtagcagcaatgttctaaaatagaaattacagaaagaaaataagatttttctctgtattaaaattttctctacagatatagntggattttggcatatgtacaataaatcaggacagttttccctgaaagtggtttttttcttgttactattcttccatgctacaaactaaattgtatccccttcaaaaattaatatgttgaagtcctaattccaagcacctcagaatgtgtatggagacaaggtctttaaagaggtaattaaggtaaaataaggtaattacctggaccttaattcagtatggctggtgtttataagaagtggaaatttggagacacacagttacaaagggaagaccatatgaagacacagggagaagccatctacaagtcaagaagagaggcctcagaagaaaccaaccctactgacactttgatctcaaaattctattcccagaactgtgagaaaaataatttctgttatttaaattcctcagtctgtggtactttgttatggcagccatagaaaatgaatacatcccataagaaacaaataaaatttaagactaa

SEQ ID NO: 35710 - DNA, 607 bp, Homo sapiens
tgatggagcaagtgaaaatgcacaagtgctttttcttttctttctttctttctttcttttttttttttttttgagacggagtctcgctctttcacccaggctggagtgcagtggcgcgatctcagctcactgcaagctccgcctcccaggttcacgccattctcctgcctcagcctcccaagtagctgggaccgcaggcgccggcaaccacgcctggctaattttttgtatttttagtagagacgaggtttcaccgtgttagccaggatggtcttgatctcctgacctcgtgatccgcccgccttggcttcccagagtgctgggattacaggcgtgagccaccgcgcccggccctcacaagtgctttttcaaggctctcttgctaacatcccattggccaaagcaagtcacatgaccaaactcagactcaaggaatgaggaaayagactccatgtcctcagtaagaggaactgcaaagtcgcatagacaaggcatgactttaggagggctgaaagagtgggaagatgaaggcagtttactctgtcacactacactgagctaggaggatgtgattcaagggcagctgctgaccattttgcctctcaca

SEQ ID NO: 35711 - DNA, 610 bp, Homo sapiens
tgctaaaatcctgtaatgcacaggcagcctccatagcaaagaattgtctggcctccagtgccaatagtgctaaggctgagaaaccctgctgtacatgagccctgtattcctatttctgcactcatttaatactttattgtgcagctcactctgtacacaacacctggtrcaatgaaaagcacatatttgtataaaatatattctgacccattcaaaaagctcaccgtggaatatggcatattatacaaaacagttataatttgaagttgaaaatgttaagtacaattagggtgatttgttaaaagcactatatggatacagataggaggagagatcattcattctcacttggcagagataagggaaatcttcagtcacggagtgagtgacatttgaataagattttaaaggtgctagagctatggccacatcatataagtatgtgactacacaaaaatatatacactttcaaacacataaacatgcttaaaataccgagtttctttcattcgcatcacattgggaagataatacctctgcacggaatttctttccctgttatttttgttgtttaagagaaaatatgcatggagatgtcctatattatctg

SEQ ID NO: 35712 - DNA, 1131 bp, Homo sapiens
actgtttcattttctccttaagaacttgcagatagactattggcctatctaagctggccttctctcagaggactggggtaactggaytctgttccatgtttcttttatccttcagcaggctagcttgagcaagttcttataacagaagagccaaagagaagagtttttgaagctgggcaactggcatggtcttgctcggagtccaaggggacagtcactagaaagttacagtttagagttatttggcaaagggttttagtgcaggaagtgttgaggaactgatgtcatgtttccttctttctttcctttctttctttctttgtagagtttttgttgttgttgttgttgttgttagaaacggccttgctctgttgcccaagctggaatgcagtggtgtgatcacagctcactgcagctttgacctcttggactcaagcaatcctcctgcctcaggctcatgggtatctaggaccacagctaagtgtcatcatacttggctttttttttttttttagagataaagcctcactgttgtccaaggtgttgaacttctgggctcaaaacgatcccctacttctgcctcccaaagtgctgggattataggtatgagccattgcacccaacctcatttttccatctaccaaaatgtgaaagaactttcaagcagctcttgagagcattccagataggataatctttagggatttcatttgtagcagaactataaacttgaaaccatgtaaatagagaatttctaaaagatagtgctaacgtggttataaatcacactatgtggcagaaaccagtagttgcctcctaatacccattcttcccctttttccttagaaacaaaaccataggcaatttgttcagctaaagggacaagttacctaggctcccttttaggtagaaataatcgatgaaatgtcattgaaactcttaaaggaatgttaggaaaacttcctagggagtgggtatgagccctttgttcttcttttcttctttattttagccttgcaattctaggtctgaatttattctacctggaataaataggtgagtaccagtaggtatcttggatcgttatggaaaagcaaaaggtgagaaagaccctgattccctgatgaacat

SEQ ID NO: 35713 - DNA, 1185 bp, Homo sapiens
taatatgcaaaataaaatggatatattggttttagttttaaagaaaaagtacttggaatcaaagtcaaaatctcaagggactgctcaagtaataaaagatggtagctacattgttttacatatagaaggaaccaaagaggctggaggctgtgaggtggaaggatcagaaggaaaaccacctatagtaggatggggcaaggagagatgagaaatgacagtggggatctgcaggctgtgttctgggcaaataccttgccaaccttctcttttttcttatcagtgaaatattcagtaaagtgttcattgttcactaaggcattatatgagtagattcttgatggaattcaaagaggaggaggagacaggtgacaatctggattctaccacttgcaagttcagaaactcaagacaaactaacttaaggaagagaaaaggaaagtaagttggcttataaaacagggaagtctggggatgaatttagatttacgcatagtaaataacattgttttctctctcatttcccttctctctccctgcccttcaatctctctctctctctccttctctctctctctttctttccatggctgctctgttttcctctttctattggcctcactcttttcctttccactgaagacaggcttcctccatgcaaccagggaaggcacccactggtagccccagattcacattctcccagcccagccatcccagcagaaaagcaattcactcaccacatttgtatatcaattcaaaagaaagctgttcctgtggaatcacgtggccattcttaaaccaatcagtttatcaagcatataatgaaccatgagtgacccagtctggatcacatgaccatcccatggccaaaaagtaattgacaccctgtcagtccatttgtggtgctataacaaaatacctgagactgggtattttrgaaatacagatattcacttcttacaaccctagaggctggcaaatccaaaatcagggcacaagcatctgcaatctggtgaaggccttcttgctgtgtcctcctatggcagaagatagaaggacaaaagggctcaaactccttccatcaaacccttttataatggcatgaatccattcatgagggcagagcctatatgacctaaacacctcccaaaagtcaccatctcccaacacttgcgttggggatta

SEQ ID NO: 35714 - DNA, 539 bp, Homo sapiens
tacaacctgttgcatggcagcatttatctgagccctatgttgccctctgggacttggaagcaaggaaaacagctsaaacataatgcttatgctgcttggtgactgtaaataataaggccccttgtctctgactcaggagtctcatgtcgtctgacaacatccatgatacagtaacaggctaactaattagcttacaagtaggatgaaatcaaatcccacagctgacagaaacagcctgaataacgttaggtgcacctgatctgtgacacttgtacccctcctgttatgacactgagcaccctttattgtaattgcttatttaattcctttattccccaccaggctggaagctatgggaagaaagggctattgcatttcctttgcctagaaaagtgcttggcatatagtaggtttttctcaaatatttatagaaggagtgaatacatggatatagtctgtttaggagtacagaataaaccagttccccaggaggaaagagttttaaaaggtaggcagagtaactgctttcatgtgtcctc

SEQ ID NO: 35715 - DNA, 653 bp, Homo sapiens
agaaaggagaaagtataaggagacacatctgacmccctgtcttcccctcatagcctaaactagtttttctggttttctttcggtccccctgaatccagaggggtccattcagtctgttggggagcttagaattttatttttggtttacaggggccatagcatttaaacttcattactgtgtaaagttaaaggaccaagtgaaaaataagctgcacttttttccacctattatctcatttaatcgtcctggggtgaccacagtgggcaagtattacaatttcctcagttttttgcataaagaatctgaggctcagaaagctgaataaggaacttaggtcctttaattctagcttctctgcccttatcatttcccccttggggttttcctgtggctgtaatttaatttcttttatgcagtagctgaaaataatttattttttataatgctttttttggtggtaaaagcaatccatgctctttgtttaacagaaatagtacagttgacccttgaacaacacagaggttaggggcactaaccggcacccccccctcaccatgcagttgaaaatccatgtatcatttttgactcccccaaaacttaactactaataggctactgctgaccagagtccttactaataacataaacagtt

SEQ ID NO: 35716 - DNA, 653 bp, Homo sapiens
agaaaggagaaagtataaggagacacatctgacaccctgtcttcccctcatagcctaaactagtttttctggttttctttsggtccccctgaatccagaggggtccattcagtctgttggggagcttagaattttatttttggtttacaggggccatagcatttaaacttcattactgtgtaaagttaaaggaccaagtgaaaaataagctgcacttttttccacctattatctcatttaatcgtcctggggtgaccacagtgggcaagtattacaatttcctcagttttttgcataaagaatctgaggctcagaaagctgaataaggaacttaggtcctttaattctagcttctctgcccttatcatttcccccttggggttttcctgtggctgtaatttaatttcttttatgcagtagctgaaaataatttattttttataatgctttttttggtggtaaaagcaatccatgctctttgtttaacagaaatagtacagttgacccttgaacaacacagaggttaggggcactaaccggcacccccccctcaccatgcagttgaaaatccatgtatcatttttgactcccccaaaacttaactactaataggctactgctgaccagagtccttactaataacataaacagtt

SEQ ID NO: 35717 - DNA, 1204 bp, Homo sapiens
tgcattatattttatccctcagacagaaccacagggcaaarctgatttagatgagttttttaaggtactggtataatattatcagtaaaagaaggacaactcagacagcatctggcagtgttgggtttaaagaatatcaaataatatcacaagtgacttaatagcagccatatgctgtgaccttttctagtccttctcttcttcatcttttctgcaacatttgggccagttgaccacctctgcttactcaacactgctttttcctttgacattttccacacctcccttttgcactcctgcagaagttcattgccccctccctgactgatgcttctcagcccttctcagcttctcaccctctctctcctcccaacacctacatcctaaagttttgtttctatggagattttctcatccttcttgtctcttccccgtgtgcttttttcagggaaagtacattttattcacttccagcttcagttatcagtctgatgggtgggatggctgcccggtagagaccgccacccagactcccagttgcagcttcctgctgggccacatggatgttgttaggttagtgttttagagtcaacaaggcctaaacagatctatcatttccatttctctaattagttccctaattttattactgatatcattatacttcctcttactctggttcaaaagtctggctgctgcagcaacttttatccttctggctcataacctttcctcccacctcatctgatcagttagcatattagtccgttctcacactgctatgaagaaacacctgcgactcagtaattaataaagaggtttaattggctcacggttctgtaggctgtataggaagcatgatgctggccatctgctcagcttccgagaagtcctcaggaagcttacagtcatggtggaaggcaaagtagaagctggctcctcttacatggccagagcaagagcaagacagggaggagtgaggtgctacacacttttcaataaccagatctcctgagaactcactcagcatcacaagaacagcaccaaggggactgtgctaaaccattcatgaaggatccactcccacaatccaatcacttcccaccaggccctagctccaacactgaggattacaattgaacatgagatttgggtgggaacacagatccaaatgataacagttagcaaatgctgttgatgtgga

SEQ ID NO: 35718 - DNA, 1204 bp, Homo sapiens
tgcattatattttatccctcagacagaaccacagggcaaagctgatttagatgagttttttaaggtactggtataatattatcagtaaaagaagracaactcagacagcatctggcagtgttgggtttaaagaatatcaaataatatcacaagtgacttaatagcagccatatgctgtgaccttttctagtccttctcttcttcatcttttctgcaacatttgggccagttgaccacctctgcttactcaacactgctttttcctttgacattttccacacctcccttttgcactcctgcagaagttcattgccccctccctgactgatgcttctcagcccttctcagcttctcaccctctctctcctcccaacacctacatcctaaagttttgtttctatggagattttctcatccttcttgtctcttccccgtgtgcttttttcagggaaagtacattttattcacttccagcttcagttatcagtctgatgggtgggatggctgcccggtagagaccgccacccagactcccagttgcagcttcctgctgggccacatggatgttgttaggttagtgttttagagtcaacaaggcctaaacagatctatcatttccatttctctaattagttccctaattttattactgatatcattatacttcctcttactctggttcaaaagtctggctgctgcagcaacttttatccttctggctcataacctttcctcccacctcatctgatcagttagcatattagtccgttctcacactgctatgaagaaacacctgcgactcagtaattaataaagaggtttaattggctcacggttctgtaggctgtataggaagcatgatgctggccatctgctcagcttccgagaagtcctcaggaagcttacagtcatggtggaaggcaaagtagaagctggctcctcttacatggccagagcaagagcaagacagggaggagtgaggtgctacacacttttcaataaccagatctcctgagaactcactcagcatcacaagaacagcaccaaggggactgtgctaaaccattcatgaaggatccactcccacaatccaatcacttcccaccaggccctagctccaacactgaggattacaattgaacatgagatttgggtgggaacacagatccaaatgataacagttagcaaatgctgttgatgtgga

SEQ ID NO: 35719 - DNA, 1204 bp, Homo sapiens
tgcattatattttatccctcagacagaaccacagggcaaagctgatttagatgagttttttaaggtactggtataatattatcagtaaaagaaggacaactcagacagcatctggcagtgttgggtttaaagaatatcaaataatatcacaagtgacttaatagcagccatatgctgtgaccttttctagtccttctcttcttcatcttttctgcaacatttgggccagttgaccacctctgcttactcaacactgctttttcctttgacattttccacacctcccttttgcactcctgcagaagttcattgccccctccctgactgatgcttctcagyccttctcagcttctcaccctctctctcctcccaacacctacatcctaaagttttgtttctatggagattttctcatccttcttgtctcttccccgtgtgcttttttcagggaaagtacattttattcacttccagcttcagttatcagtctgatgggtgggatggctgcccggtagagaccgccacccagactcccagttgcagcttcctgctgggccacatggatgttgttaggttagtgttttagagtcaacaaggcctaaacagatctatcatttccatttctctaattagttccctaattttattactgatatcattatacttcctcttactctggttcaaaagtctggctgctgcagcaacttttatccttctggctcataacctttcctcccacctcatctgatcagttagcatattagtccgttctcacactgctatgaagaaacacctgcgactcagtaattaataaagaggtttaattggctcacggttctgtaggctgtataggaagcatgatgctggccatctgctcagcttccgagaagtcctcaggaagcttacagtcatggtggaaggcaaagtagaagctggctcctcttacatggccagagcaagagcaagacagggaggagtgaggtgctacacacttttcaataaccagatctcctgagaactcactcagcatcacaagaacagcaccaaggggactgtgctaaaccattcatgaaggatccactcccacaatccaatcacttcccaccaggccctagctccaacactgaggattacaattgaacatgagatttgggtgggaacacagatccaaatgataacagttagcaaatgctgttgatgtgga

SEQ ID NO: 35720 - DNA, 1204 bp, Homo sapiens
tgcattatattttatccctcagacagaaccacagggcaaagctgatttagatgagttttttaaggtactggtataatattatcagtaaaagaaggacaactcagacagcatctggcagtgttgggtttaaagaatatcaaataatatcacaagtgacttaatagcagccatatgctgtgaccttttctagtccttctcttcttcatcttttctgcaacatttgggccagttgaccacctctgcttactcaacactgctttttcctttgacattttccacacctcccttttgcactcctgcagaagttcattgccccctccctgactgatgcttctcagcccttctcagcttctcaccctctctctcctcccaacacctacatcctaaagttttgtttctatggagattttctcatccttcttgtctcttccccgtgtgcttttttcagggaaagtacattttattcacttccagcttcagttatcagtctgatgggtgggatggctgccyggtagagaccgccacccagactcccagttgcagcttcctgctgggccacatggatgttgttaggttagtgttttagagtcaacaaggcctaaacagatctatcatttccatttctctaattagttccctaattttattactgatatcattatacttcctcttactctggttcaaaagtctggctgctgcagcaacttttatccttctggctcataacctttcctcccacctcatctgatcagttagcatattagtccgttctcacactgctatgaagaaacacctgcgactcagtaattaataaagaggtttaattggctcacggttctgtaggctgtataggaagcatgatgctggccatctgctcagcttccgagaagtcctcaggaagcttacagtcatggtggaaggcaaagtagaagctggctcctcttacatggccagagcaagagcaagacagggaggagtgaggtgctacacacttttcaataaccagatctcctgagaactcactcagcatcacaagaacagcaccaaggggactgtgctaaaccattcatgaaggatccactcccacaatccaatcacttcccaccaggccctagctccaacactgaggattacaattgaacatgagatttgggtgggaacacagatccaaatgataacagttagcaaatgctgttgatgtgga

SEQ ID NO: 35721 - DNA, 1204 bp, Homo sapiens
tgcattatattttatccctcagacagaaccacagggcaaagctgatttagatgagttttttaaggtactggtataatattatcagtaaaagaaggacaactcagacagcatctggcagtgttgggtttaaagaatatcaaataatatcacaagtgacttaatagcagccatatgctgtgaccttttctagtccttctcttcttcatcttttctgcaacatttgggccagttgaccacctctgcttactcaacactgctttttcctttgacattttccacacctcccttttgcactcctgcagaagttcattgccccctccctgactgatgcttctcagcccttctcagcttctcaccctctctctcctcccaacacctacatcctaaagttttgtttctatggagattttctcatccttcttgtctcttccccgtgtgcttttttcagggaaagtacattttattcacttccagcttcagttatcagtctgatgggtgggatggctgcccggtagagaccgccacccagactcccagttgcagcttcctgctgggccacatggatgttgttaggttagtgttttagagtcaacaaggcctaaacagatctatcatttccatttctctaattagttccctaattttattactgatatcattatacttcctcttactctggttcaaaagtctggctgctgcagcaacttttatccttctggctcataacctttcctcccacctcatctgatcagttagcatattagtccgttctcacactgctatgaagaaacacctgmgactcagtaattaataaagaggtttaattggctcacggttctgtaggctgtataggaagcatgatgctggccatctgctcagcttccgagaagtcctcaggaagcttacagtcatggtggaaggcaaagtagaagctggctcctcttacatggccagagcaagagcaagacagggaggagtgaggtgctacacacttttcaataaccagatctcctgagaactcactcagcatcacaagaacagcaccaaggggactgtgctaaaccattcatgaaggatccactcccacaatccaatcacttcccaccaggccctagctccaacactgaggattacaattgaacatgagatttgggtgggaacacagatccaaatgataacagttagcaaatgctgttgatgtgga

SEQ ID NO: 35722 - DNA, 548 bp, Homo sapiens
aaaaaaagtaaagcatcttgatgtcaacctcctctttttctactctgcttacaaaatatccaygagtcacctgaaatagctttgagtttggatttcttcattacctgggagatagatgatcttaataattcctttcaattgtggaagtctaggttcttattgcaatgtctgcctcagtatctagttgatatggtttggctgttttcccaccccgaacctaatcttgaattataatccccacgtgtcaaaggcaggaccaggtggaagtaactggatcatgggggcagtttcccccatgctgttgtcatgatagtgagtgaatctcatgagatctcatgtttttataagtgtctggcatttcccctgctggcactcattctctctcctgccaccctgtaaagagttaccttctgccatgattgtaggtttcctgaggcctccccagccatatggaactgtgagtcaattaaacttattttctttataagttacccagtcttaggtatttcttcatggcagtgtgagaacagactaatacagtaaatctg

SEQ ID NO: 35723 - DNA, 548 bp, Homo sapiens
aaaaaaagtaaagcatcttgatgtcaacctcctctttttctactctgcttacaaaatatccacgagtcacctgaaatagctttgagtttggatttcttcattacctgggagatagatgatcttaataattcctttcaattgtggaagtctaggttcttattgcaatgtctgcctcagtatctagttgatatggtttggctgttttcccaccccgaacctaatcttgaattataatccccacgtgtcaaaggcaggaccaggtggaagtaactggatcatgggggcagtttcccccatgctgttgtcatgatagtgagtgaatctcatgagatctcatgkttttataagtgtctggcatttcccctgctggcactcattctctctcctgccaccctgtaaagagttaccttctgccatgattgtaggtttcctgaggcctccccagccatatggaactgtgagtcaattaaacttattttctttataagttacccagtcttaggtatttcttcatggcagtgtgagaacagactaatacagtaaatctg

SEQ ID NO: 35724 - DNA, 534 bp, Homo sapiens
aaatttgaccacaccacctccttttctttccctgcttcattgcttcttgagctgggacatctctcaaactgagagatgggacatagcccagactaggatttacacctcagatcccctggctstcagatctttagattcagactgaatgaagccgccagctttcctggatttctggctggactgtgggacatctcagcctccataatcatgtgagtcaactcataataaatttattggtatatatgtatgtgtgtgtgtatatctattggagtgtgtgtgtgtgtctgtgtgcatatagatacacacatatatcctgtttgctctgtttctttggagaaccctgactagtaaagtctcctataaaaactcatgtagtgcttggcgtaagttgaatgtttgttgaaatgtagtgatttacatctttgtttcattttctttactgtattctcttggaatatttttatatgtattaatgccatggtgatactaaaaactcatcacatgatttttaaaaaattggcataatgcttgact

SEQ ID NO: 35725 - DNA, 1248 bp, Homo sapiens
tgaaaatatttgttatttgtctctacagaaaaagtttataaaccccaaattggaatatcttacgtattcctattccatagtagttggttcacaaatgcctccaattaatccactcatgtgtcttgtgttgaaatctgtctgatatggaccacatagtagcttcatgtgtaaggaacataagattgaatcttgtagcaaagtacccttttccctttttccaaattttaaatgatagcaatmtgaatttgatattgtagaaaccaaactataaatttaaaaatcacaatttctaggctgtccgtgaggactgtgattctgaaggtaaatcttattcccttttattaacaaaacagctattctttgattgacaacatcccgccaagagctgttgtacatatttacctggaactaatagctatttcagaaaagaaagaatgttcgcgtaattggaacttatcaaatcctataggaattagaagtcctgcaaacatatccatcagttctaatgcagaaaacagtgtggaaatagactttgccgtgggcagtataattttgagaaaaagcggcttctcctgatcaatcagtctgctttctttgttagtttccttttgctttggaagtgactttaatgattacatagagtaattatcttagcctagattttcaaacatgtttcttccttcattgcttaactgttatgttttgatccttattctaaggattctgcttttttttttttttattgtatactacttcaattttgtttgggaaattagtttttgagaagtatagataagaaactgaaaatatataattgggttgtcacatcaagcatatgcatgaatctatgtcaaggcatttaattcagttaatttacgtgggatcagttgctaaaaccagacgtaggtgtccctgattagctgtgacatagggggaaatcatgtggctattctagtcatggtagagaagatatttagattcatcctgtaattagagctttcagaaggaccataattatatattacattacatacttctccaggccattgcacacaaagggatctttttgggaatttagaaataactgtaataacatgaattttaatgattgacagttataggctaaaatgtaatcatgaacccaatggctttttttgtaggaaaaattttactgacttgcaaatatattacttggactaaacacttcttatatgctaagtgaaaatataaacatgtctcataagaaaa

SEQ ID NO: 35726 - DNA, 1248 bp, Homo sapiens
tgaaaatatttgttatttgtctctacagaaaaagtttataaaccccaaattggaatatcttacgtattcctattccatagtagttggttcacaaatgcctccaattaatccactcatgtgtcttgtgttgaaatctgtctgatatggaccacatagtagcttcatgtgtaaggaacataagattgaatcttgtagcaaagtacccttttccctttttccaaattttaaatgatagcaatctgaatttgrtattgtagaaaccaaactataaatttaaaaatcacaatttctaggctgtccgtgaggactgtgattctgaaggtaaatcttattcccttttattaacaaaacagctattctttgattgacaacatcccgccaagagctgttgtacatatttacctggaactaatagctatttcagaaaagaaagaatgttcgcgtaattggaacttatcaaatcctataggaattagaagtcctgcaaacatatccatcagttctaatgcagaaaacagtgtggaaatagactttgccgtgggcagtataattttgagaaaaagcggcttctcctgatcaatcagtctgctttctttgttagtttccttttgctttggaagtgactttaatgattacatagagtaattatcttagcctagattttcaaacatgtttcttccttcattgcttaactgttatgttttgatccttattctaaggattctgcttttttttttttttattgtatactacttcaattttgtttgggaaattagtttttgagaagtatagataagaaactgaaaatatataattgggttgtcacatcaagcatatgcatgaatctatgtcaaggcatttaattcagttaatttacgtgggatcagttgctaaaaccagacgtaggtgtccctgattagctgtgacatagggggaaatcatgtggctattctagtcatggtagagaagatatttagattcatcctgtaattagagctttcagaaggaccataattatatattacattacatacttctccaggccattgcacacaaagggatctttttgggaatttagaaataactgtaataacatgaattttaatgattgacagttataggctaaaatgtaatcatgaacccaatggctttttttgtaggaaaaattttactgacttgcaaatatattacttggactaaacacttcttatatgctaagtgaaaatataaacatgtctcataagaaaa

SEQ ID NO: 35727 - DNA, 529 bp, Homo sapiens
caggtgcagtggctcatgcctgtaatcccagagttttgggaggccaacatggggggatcacttgaggccaaagtttgagaccaggctgggcaacatagtgaggccctgaatctacaaaaaaatttttaaaaaaattagctgggcatagtggcacgtgcctgtagtcccagctacttaggaggctgaggtgagaagattacttgagtccaggaggtcgaggctgcagtgcaccatgatcatgccactgcactccagcctgggcgacagcgagaccctctctctaaaaamaattatctcctattattacaaaaacctaattactctgaagtcaaatgtctgcttctggttgagttggagaaaaaaatcatgtagaagcaaacttaagagaagaaggcatattaatccggctcataacatattcctgttaaaatgatgtatctttgatggctcttgaaggtgactcttcttttccatttctcctactcttctcttgaacttctgtgaagtttctaactggttaccgtagatc

SEQ ID NO: 35728 - DNA, 1187 bp, Homo sapiens
aaatatatatttttctagtaatttgagatgttgccyttattgtatactaaatccatatataaatgggcctaattctaaattttctcttctgttcctctggctatcttcactaataccaaacttttaaaactacagacttagtagtatgttttactatattgtaggatttagtaccacccctcacacttcttttttgctgtatttctatttttccttgcatcttctataatttctgctttattaaagcttgttgtggcactggatgtatacgtattaaaaaattatttgaattgcagtctttgacatccaatagtaacctttgtttctttcagtgcatttgttttgttctaaattctattttctcagatatcaagattgtaaccctgctttcttttatcctcatttgtccagtaagttttcatcaatccttaaaataaaaataaaaacattattctgaatcactttctttaagttgtgtgatattttttgtcagctaatctacaaatttgcttttacttaaactatatatataaatatatataataaatatatataagatatgtatatatatcttataaataaaaggaaaatttcagattatgtacatgtgtgtttatatagttcatctatttaatcatatttttaatgttactttaatatttatacaaatttttatgtgaatagtttgtcattaaatggtcttttttctcattctctcttttaaatagatattttagtatttaagaaagtctatatttttattctaatgagtaattttatatcagtattattatattagagccctatttctcttttcaatgcctttttgcttctttggttattgcatattggcttcctatgataagcaatattgacattagctattaattttatcttttcctttccttgtcttaagacatatgatttaaagtaatacccacttatgtctagtaatctttttatactttttatttgctttctcccatcatttttgataattgtcctatacctacattgtcagacatacagctactatatattatactatctcctttgagaccattattaatctaagttttacatgtaaacatttttaatgcttatcaaaagtccttaagttgatggttctcttgcagttttggttgttggaagataatttcctagtagctttctccgtagaggtttat

SEQ ID NO: 35729 - DNA, 1187 bp, Homo sapiens
aaatatatatttttctagtaatttgagatgttgcccttattgtatactaaatccatatataaatgggcctaattctaaattttctcttctgttcctctggctatcttcactaataccaaacttttaaaactacagacttagtagtatgttttactatattgtaggatttagtaccacccctcacacttcttttttgctgtatttctatttttccttgcatcttctataatttctgctttattaaagcttgttgtggcactggatgtatacgtattaaaaaattatttgaattgcagtctttgacatccaatagtaacctttgtttctttcagtgcatttgttttgttctaaattctattttctcagatatcaagattgtaaccctgctttcttttatcctcatttgtccagtaagttttcatcaatccttaaaataaaaataaaaacattattctgaatcactttctttaagttgtgtgatattttttgtcagctaatctacaaatttgcttttacttaaactatatatataaatatatataataaatatatataagatatgtatatatatcttataaataaaaggaaaatttcagattatgtacatgtgtgtttatatagttcatctatttaatcatatttttaatgttactttaatatttatacaaatttttatgtgaatagtttgtcattaaatggtcttttttctcattctctcttttaaatagatattttagtatttaagaaagtctatatttttattctaatgagtaattttatatcagtattattatattagagccctatttctcttttcaatgccyttttgcttctttggttattgcatattggcttcctatgataagcaatattgacattagctattaattttatcttttcctttccttgtcttaagacatatgatttaaagtaatacccacttatgtctagtaatctttttatactttttatttgctttctcccatcatttttgataattgtcctatacctacattgtcagacatacagctactatatattatactatctcctttgagaccattattaatctaagttttacatgtaaacatttttaatgcttatcaaaagtccttaagttgatggttctcttgcagttttggttgttggaagataatttcctagtagctttctccgtagaggtttat

SEQ ID NO: 35730 - DNA, 1372 bp, Homo sapiens
catgatttcccagcccaaagtacatgagagatgatggacccatttcccacattctcctcctcttccacagtgaacccagagctttgagttgagatgggggtgccataagattgaagtactctgaaaaacagagcttaaaggcttttaacaggtgaaagtgcggtccaaattcttaatttgtttttgttgttgttgttgttgttgttgtggagggcatctatccaaaagctttcaggacacacatgaactttacacgagcarggaaaaaaatgtgtgctcagatactgagatgttagtgtttttgataatatagcctgatctcatacatacatttatcttagaccattctatgctaaatacatacattcacacagacaaacatatgtgcatacatatctaatggattagttaaaagaaaatacatttcaacttttaaacccagaaaatgtaagtaaatatttaacttatctcaagtgaagactttacacataatgtcgtgaaaacaacacaagtgaaaaagtagatctgactacttgcaaataacacttttgaacatcagaaatatcaacaacttaatgaaaattaatgacatgctgggggaaaacatttttgcaatagagggtttatgtcctaatatataagaggctcttaaaaatgagtatcttaaaatatcagcatcacacacacacacacacacacacacacacacacacagacaaagaatataaacataattcttccaatttataaaaacagaaatacagacagatatcttccaaagccatcagaatttgaaccagtgatgaggagcacatttgctttcctgcccaattaacagtcatagaagatcacctgaactgcccctggggtgtggatatgcaccctgaaaatatttggcataccagagcatagttggatgtgtatatacataattgtgaaaataaattgttttagattttaatatttttccttgtgtctaactttctttaagcaccaacaatttttaaaaatataaaaatattataaatatttgtgtgaggcaagaggaatattgttgggtcttctagttacaaaccataggatcttagagataacaatgaacattcccaaaagctcccatttaggaagtttttggttgatggcatgacccttgaagggatctgacttcctgagagagtgactcataaataattactcctttttatgatacaaatatttttgaagaacagctaaagtcttcattaaaaaagcattatgctcctatgagatttccccatgcctaagattaatatcacagttgaggagacctgagtattttttgttaccttacaattgtacataaataattattttatgcagtgccataggttaa

SEQ ID NO: 35731 - DNA, 1372 bp, Homo sapiens
catgatttcccagcccaaagtacatgagagatgatggacccatttcccacattctcctcctcttccacagtgaacccagagctttgagttgagatgggggtgccataagattgaagtactctgaaaaacagagcttaaaggcttttaacaggtgaaagtgcggtccaaattcttaatttgtttttgttgttgttgttgttgttgttgtggagggcatctatccaaaagctttcaggacacacatgaactttacacgagcaaggaaaaaaatgtgtgctcagatactgagatgttagtgtttttgataatatagcctgatctcatacatacatttatcttagaccattctatgctaaatacatacattcacacagacaaacatatgtgcatacatatctaayggattagttaaaagaaaatacatttcaacttttaaacccagaaaatgtaagtaaatatttaacttatctcaagtgaagactttacacataatgtcgtgaaaacaacacaagtgaaaaagtagatctgactacttgcaaataacacttttgaacatcagaaatatcaacaacttaatgaaaattaatgacatgctgggggaaaacatttttgcaatagagggtttatgtcctaatatataagaggctcttaaaaatgagtatcttaaaatatcagcatcacacacacacacacacacacacacacacacacacagacaaagaatataaacataattcttccaatttataaaaacagaaatacagacagatatcttccaaagccatcagaatttgaaccagtgatgaggagcacatttgctttcctgcccaattaacagtcatagaagatcacctgaactgcccctggggtgtggatatgcaccctgaaaatatttggcataccagagcatagttggatgtgtatatacataattgtgaaaataaattgttttagattttaatatttttccttgtgtctaactttctttaagcaccaacaatttttaaaaatataaaaatattataaatatttgtgtgaggcaagaggaatattgttgggtcttctagttacaaaccataggatcttagagataacaatgaacattcccaaaagctcccatttaggaagtttttggttgatggcatgacccttgaagggatctgacttcctgagagagtgactcataaataattactcctttttatgatacaaatatttttgaagaacagctaaagtcttcattaaaaaagcattatgctcctatgagatttccccatgcctaagattaatatcacagttgaggagacctgagtattttttgttaccttacaattgtacataaataattattttatgcagtgccataggttaa

SEQ ID NO: 35732 - DNA, 516 bp, Homo sapiens
ccccgactcctctaccccacccccaactcacctccacacacattttgcttcactttcttccctggagtactttaaggcaaactctagacatcctatcatttcatcagaaacaaacaaacaaaacttgagaatacatgttaaacttagaaggacayttttctttctccttcttcttcttcccattatgatacagtagacctaagagaaatatgggccaattttaataccatccaatgttttcctgattgtatcaaagataaatctgaacagtcaggttgttctagttagatctaaatgaggaccatatattgtatttagtcattatatttcctaaagttttttttttaatcccacaaatagcatcctgatcttattttgtgtatgccattgatttgttggagaaaatgtgtcatccaccttgctgaatcctccacattctgagtgtggctgcttgctactggaggattccatcttgggccagtggaaaccatcttcacattggatcttgtttcctac

SEQ ID NO: 35733 - DNA, 516 bp, Homo sapiens
ccccgactcctctaccccacccccaactcacctccacacacattttgcttcactttcttccctggagtactttaaggcaaactctagacatcctatcatttcatcagaaacaaacaaacaaaacttgagaatacatgttaaacttagaaggacacttttctttctccttcttcttcttcccattatgatacagtagacctaagagaaatatgggccaattttaataccatccaatgttttcctgattgtatcaaagataaatctgaacagtcaggttgttctagttagatctaaatgaggaccatatattgtatttagtcattatatttcctaaagttttttttttaatcccacaaatagcatcctgatcttattttgtgtatgccattgatttgttggagaaaatgtgtcatccaccttgctgaatcctccacattctgagtgtggctgcttgctrctggaggattccatcttgggccagtggaaaccatcttcacattggatcttgtttcctac

SEQ ID NO: 35734 - DNA, 583 bp, Homo sapiens
aactgccttgcctgtgttttattctaagattatcccacattccagtgaggcaaactcatttacttccttctttttacttctaagatattaaaacttacctaattggattgcattttcccattatttccaccaactgaaatcccaatgattcaaatttctgcttatatgccatcctcttcatgaatttttttcctgttctgatttcaamcaagcattgtcctctgagaattccagaagagtttatctatgccccacttaggtcatttacgttattgtgtctggaattatatttgtctatatccacagatgtcaccattatgagggtacatttggccctggggaagacttaattttattcacattagggttatctagcaacttaataaattatatgttgaaacaaagaatgcaacttactgttacccacatttagacaaccaaaatatcatctatactcccattatttcttttgaaattcaataatgacctataataaaggataatataaaaggacagggaacatttctgagaacccaatgcattttatagatattttatagatcctctttctagaaaaacagca

SEQ ID NO: 35735 - DNA, 1264 bp, Homo sapiens
  misc_feature (1)...(1264): n = A,T,C or G
gcatatcctataaccatttctagggtgaaatggttccaacacactcaagagacttacacacagacaagaaagtgtgaacattcttgcaccttgaaacattgtttgtaatagcaaagaactttgcaacaacctaaatgtccattaatagaaaattgcatacatatcatgtatctataccatgaactactgtatagtaataactatgagtgaactagagttacattgaaacatagataaatctaaaaataatgctgttacatgaataaagcaaattgtaaaaggctacatccaaaattatatgatttagatatattttttctaaaacaatgctactttttcacagaagcatgcttgtgtagtaacagaataaactcccttgtaagaagaaaacacctcaacttgaggatagtggttatctctgaaaagagaatggaagcagaaccacatagaggaattkccttcatttgcatctataatgtggtagtttttgcctttttgttttaaataaagagatttgacaaactgctataaaccttcaaacataagtttatgtatagacggttttttcagttggcnnnnnnnnnnnnnnnnnnnnnnnnnnnnnnnnnnnnnnnnnnnnnnnnnnnnnnnnnnnnnnnnnnnnnnnnnnnnnnnnnnnnnnnnnnnnnnnnnnnnattttacattcccaccagccttgttacagttgctccatattcatgcaaacttggtattgtcagatttttaaaatttagccattctatcactagtagaatggattttgtgatatctctttgtgatttcaataggtatttgcataatgcctaatgatgctaaatatcttttcatttattgtttatatatcttctttggaaaagtgtttattagaatcatttgaaaatattttttcatgggttatctaagtgagttataagaattttttttaggtataaaacagacaaatattttgtaaaacttttcttccagtttatgacttgccatctcatttaaagcagattagtggttgccaggagctaggataaatgagaaggaattgactgcaaagggaaaggagggaatatttggaatgatacaagtagtctatataacgattgtgctggtctttatatgacagtatatatttgtcagaatgtacctaaatttatacttaaaattgattaatgtaattatataaaaattatacagtaacaagttcacttaaattaagattttaattatgatagcatgagttttttttatcagtag

SEQ ID NO: 35736 - DNA, 1264 bp, Homo sapiens
  misc_feature (1)...(1264): n = A,T,C or G
gcatatcctataaccatttctagggtgaaatggttccaacacactcaagagacttacacacagacaagaaagtgtgaacattcttgcaccttgaaacattgtttgtaatagcaaagaactttgcaacaacctaaatgtccattaatagaaaattgcatacatatcatgtatctataccatgaactactgtatagtaataactatgagtgaactagagttacattgaaacatagataaatctaaaaataatgctgttacatgaataaagcaaattgtaaaaggctacatccaaaattatatgatttagatatattttttctaaaacaatgctactttttcacagaagcatgcttgtgtagtaacagaataaactcccttgtaagaagaaaacacctcaacttgaggatagtggttatctctgaaaagagaatggaagcagaaccacatagaggaattgycttcatttgcatctataatgtggtagtttttgcctttttgttttaaataaagagatttgacaaactgctataaaccttcaaacataagtttatgtatagacggttttttcagttggcnnnnnnnnnnnnnnnnnnnnnnnnnnnnnnnnnnnnnnnnnnnnnnnnnnnnnnnnnnnnnnnnnnnnnnnnnnnnnnnnnnnnnnnnnnnnnnnnnnnnattttacattcccaccagccttgttacagttgctccatattcatgcaaacttggtattgtcagatttttaaaatttagccattctatcactagtagaatggattttgtgatatctctttgtgatttcaataggtatttgcataatgcctaatgatgctaaatatcttttcatttattgtttatatatcttctttggaaaagtgtttattagaatcatttgaaaatattttttcatgggttatctaagtgagttataagaattttttttaggtataaaacagacaaatattttgtaaaacttttcttccagtttatgacttgccatctcatttaaagcagattagtggttgccaggagctaggataaatgagaaggaattgactgcaaagggaaaggagggaatatttggaatgatacaagtagtctatataacgattgtgctggtctttatatgacagtatatatttgtcagaatgtacctaaatttatacttaaaattgattaatgtaattatataaaaattatacagtaacaagttcacttaaattaagattttaattatgatagcatgagttttttttatcagtag

SEQ ID NO: 35737 - DNA, 1264 bp, Homo sapiens
  misc_feature (1)...(1264): n = A,T,C or G
gcatatcctataaccatttctagggtgaaatggttccaacacactcaagagacttacacacagacaagaaagtgtgaacattcttgcaccttgaaacattgtttgtaatagcaaagaactttgcaacaacctaaatgtccattaatagaaaattgcatacatatcatgtatctataccatgaactactgtatagtaataactatgagtgaactagagttacattgaaacatagataaatctaaaaataatgctgttacatgaataaagcaaattgtaaaaggctacatccaaaattatatgatttagatatattttttctaaaacaatgctactttttcacagaagcatgcttgtgtagtaacagaataaactcccttgtaagaagaaaacacctcaacttgaggatagtggttatctctgaaaagagaatggaagcagaaccacatagaggaattgccttcatttgcatctataatgtggtagtttttgcctttttgttttaaataaagagatttgacaaactgctataaaccttcaaacataagtttatgtatagacggttttttcagttggcnnnnnnnnnnnnnnnnnnnnnnnnnnnnnnnnnnnnnnnnnnnnnnnnnnnnnnnnnnnnnnnnnnnnnnnnnnnnnnnnnnnnnnnnnnnnnnnnnnnnattttacattcccaccagccttgttacagttgctccatattcatgcaaacttggtattgtcagatttttaaaatttagccattctatcactagtagaatggattttgtgatatctctttgtgatttcaataggtatttgcataatgcctaatgatgctaaatatcttttcatttattgtttatatatcttctttggaaaagtgtttattagaatcatttgaaaatattttttcatgggttatctaagtgagttataagaatttyttttaggtataaaacagacaaatattttgtaaaacttttcttccagtttatgacttgccatctcatttaaagcagattagtggttgccaggagctaggataaatgagaaggaattgactgcaaagggaaaggagggaatatttggaatgatacaagtagtctatataacgattgtgctggtctttatatgacagtatatatttgtcagaatgtacctaaatttatacttaaaattgattaatgtaattatataaaaattatacagtaacaagttcacttaaattaagattttaattatgatagcatgagttttttttatcagtag

SEQ ID NO: 35738 - DNA, 1264 bp, Homo sapiens
  misc_feature (1)...(1264): n = A,T,C or G
gcatatcctataaccatttctagggtgaaatggttccaacacactcaagagacttacacacagacaagaaagtgtgaacattcttgcaccttgaaacattgtttgtaatagcaaagaactttgcaacaacctaaatgtccattaatagaaaattgcatacatatcatgtatctataccatgaactactgtatagtaataactatgagtgaactagagttacattgaaacatagataaatctaaaaataatgctgttacatgaataaagcaaattgtaaaaggctacatccaaaattatatgatttagatatattttttctaaaacaatgctactttttcacagaagcatgcttgtgtagtaacagaataaactcccttgtaagaagaaaacacctcaacttgaggatagtggttatctctgaaaagagaatggaagcagaaccacatagaggaattgccttcatttgcatctataatgtggtagtttttgcctttttgttttaaataaagagatttgacaaactgctataaaccttcaaacataagtttatgtatagacggttttttcagttggcnnnnnnnnnnnnnnnnnnnnnnnnnnnnnnnnnnnnnnnnnnnnnnnnnnnnnnnnnnnnnnnnnnnnnnnnnnnnnnnnnnnnnnnnnnnnnnnnnnnnattttacattcccaccagccttgttacagttgctccatattcatgcaaacttggtattgtcagatttttaaaatttagccattctatcactagtagaatggattttgtgatatctctttgtgatttcaataggtatttgcataatgcctaatgatgctaaatatcttttcatttattgtttatatatcttctttggaaaagtgtttattagaatcatttgaaaatattttttcatgggttatctaagtgagttataagaattttttttaggtataaaacagacaaatattttgtaaaacttttcttccagtttatgacttgccatctcatttaaagcagattagtggttgccaggagctaggataaatgagaaggaattgactgcaaagggaaaggagggaatatttggaatgatacaagtagtctatataacgattgtgctggtctttatatgacagtatatatttgtcagaatgtacctaaatttatacttaaaattgattaatgtaattatataaaaattatacagtaacaagttcacttaaattaagattttaattatgatagcatgagttttttttatyagtag

SEQ ID NO: 35739 - DNA, 662 bp, Homo sapiens
ataagtacacttgttgcttgacagatttgctattggaaattaagtgggggaggtccaatggtcattacaataaatgatgctaatgcactgaacaaacgagaaaaattatatttcaaactcttaccaaaccaaaacattaactttgagtagtttaaaaaacraattgtgaaaaacgacatgtagagtgataagtttgtttatactacaaatatgatttttctgcccatcaagacaccctaaaggaagtgaaaagtcgagctacaaactctaagaatacagttatattgcataaagtgtagaaaggactacaacttgaaagaaaatttcaaacagttcaatagaaaactgggcaataggtacttcaaagaagaggaaacttaaattaacaaaaaacactggaaaatgaactagatcagtaataatcaggaaatgtaaataaaaagtaaaaggggttaccatatcacacccaccagacaagcaaaaatttaagtctgtgtattactaaaaattggaggcgatatggatcaatagaaatttttatatattagtagatggaccgtgaattgaaaaacatctttctttatttacttgacaaataatgattggatatatttatggcatacaatctgatattttgatatatgtgtacattgtagaaagat

SEQ ID NO: 35740 - DNA, 537 bp, Homo sapiens
attttccatgatttggcttttctagataayatgtgcttttcaatactatatgccttcatttctaatagctaactatcagccatttataatagttcagtactcaaaccacttactacctaagacatatttcttttatccctttggaataccatgattataaaatttagccctgaaaaagaatgaaactggttatatgtctcaagtaagctattttggtcaccatttctcccaggaaaaacttactatagatttataatccatatttaaaattgatgaaccttaaggatggaatgaaaatgaaatattcaggcactcaaccttcaacatgatttaaatattgaagtagaattgagggggttagcttgggggaaataaaggaaaaaaggtgaagaaagaagaagaaataaagaattgtctttctgtctgattcatattgctgcaaagaaacttaaacttttacatacaagattaaaatatatattaatggtatgagtgtctatttccactcagtattgcaaggccattcagctgaatctt

SEQ ID NO: 35741 - DNA, 553 bp, Homo sapiens
tgctaaggaaaagtattcagaaattcttggatagcatagaatcctgaaacacttggctttagtgatcctataatgctgaactcagtattctcagaaattgagcatttccctcagcttctagaccagaaattaatcatccctcattttattattttgagactgagtctaaatttggaaataaacaatctctatgtcattgaatctatctttccacaatcctatctttcctcaatattaggcacttgaactagtagtaattcaagtgccgaattaaatggaaagcacattttgcatataactagtagtaagtttattttgcatacaactagtagtaatttgaataagagtcctggaaattacaatacttgcacttacttaatagtaagaaagacccagtgaaggtagtcttactagttagcctgattcaggatggtcacccagtctagaccattcctgttcagaaccaaagttgtatagggccatttcactgtcctaaagacaagccttggcttarcactgaattgtaagggaaatctcccaaaatgtaaaaaag

SEQ ID NO: 35742 - DNA, 1203 bp, Homo sapiens
cagtaatatttttacctaatagcatgtgtaatgtatgatgcccccagctatgcaatttacattgcttttgcaataaactatgccagtttgaccattcccaatttccctgaacttttagtaaagatagatggtctgcaacaattagaggtaaaggattgctataggttactccccaactcccacactcattaccaggtgttatgttctgactgaaagccattgcagaccaaattccgccatatcaaacataaattagcaaacagacacaaaaaattctctttttttttttttggtaaatcttgaactctgtccttttaggcagtctgaaaagtttcatgtatcaaaagtttattctgagactgttgaatacatcaaatatccttgtaaaaaaactaataaacaaaatgaaactaattagcaactagttaaggaagtgaaaccaccaccttgcgagtgtcttagaaggaacttagaagaaggaagttggaagtaaggggcttataggggcttgtgatctggtttcaagttttttaggggcagatctctcaagatatggaactgattgcaactgggcaaagtctggtttgtgacataatagttgaggactggtagacactgagaagtgaggatcttagagctaaatttgataagtaacgtgtttgttaagtgatacttttgcccaaatgaacagactattgtcagtaataaattgatttgcaggaactttctgaagcaactattaacgttatttattgatttatagtcttatgttaccagggaaagatttctggcaaaaaaacggcgggagggggaggggtaagccatattgccatagctgctgtcacaaatgttggcaaagatcatcttaattctcaagagaagttaacactggtctcctggatagatcaactagccttttcatcatagcaatctatgcaaacctcccttaagtgaaatgacacatcactgaatggagatgtaaattcaaggtacctcacagaaggttacagactgctggactatttaaatccattttttctattcatggttcaaacagaaacaacatacttagtycatatttctagtcaactacataatttgaatgccactcaattcaagaaatattacttctgctgtctcgtaagctagtttctatttatctggtaatatgttgaaagacttgctgtagccaccttgggaatg

SEQ ID NO: 35743 - DNA, 1297 bp, Homo sapiens
ctttaatttttggcaaacatagaatagtgtttattttcatttatgttggcaaagacgctgatggattttacaattcctattttttcagctattacagaaactaaattaagctatggaaactgctaaattattttgtttcatagctttcctttaatggttttggtttggtttaaatttatagaaagtagtttctgctagaggtattctcttgggaattactcaaagtaaattttaaaaaaggatacctgaggaaaactattgttaaacaaatattataggccattgttttgaactgaactcttgcactaggcctcaacagaccagcctaaaccaaaatggaatcagtcatgctaaatgccatatcatcaaactgaaactttaaggaaacagatcccaaaacagaccactttttcctaaaaacaggagattccaggaaatctgagtcactgtaataaggaagtcccctctgctttaacccttttaaaaagtaatctgagacggagtctcgctctgttgcccaggctggagtgcaatggcatgatctcagctcactgaaagctccgccacccaggttcacgccattctcctgcctcagcctcccgaatagctgggactaccatcaaaaawaataataataataataataatctgaagtaacctgatgttaaccaatcagtttattttattttattttttcctattgttctgttttctcatttccaccttacaaaacccactgtcctgaacttgcccagtgggagttctcattccattttctggaatagaggattctctcattcatgaatcacaaataaaagccaattagatctacaactaaatttgttgtaattttttcttttaacactattgaggatatacaactaattaataaaactaacttagaaaatattaatttttacttcccttttgtatgaattacacaaagcagtggttttgttaataatttggatgttttccttgtctatttttttaagtaatctttccttttattttaattaatgggttatagtaggaaatccaaacaagtcaacaactgttctcagtcatttatattttatctctgtgtggatggtcactgtatctacaatacagtataataaaaaaagatctacattcagcatatgagatggcaaaaaaaagattgtggaaaaattgagtattattagctttcacgaaaattttgacaagggagtttgaactactttttaattagaagaacatgattttaaaaaacacttttcatctaaactttaaaataattgtgtgtgttaatatg

SEQ ID NO: 35744 - DNA, 1297 bp, Homo sapiens
ctttaatttttggcaaacatagaatagtgtttattttcatttatgttggcaaagacgctgatggattttacaattcctattttttcagctattacagaaactaaattaagctatggaaactgctaaattattttgtttcatagctttcctttaatggttttggtttggtttaaatttatagaaagtagtttctgctagaggtattctcttgggaattactcaaagtaaattttaaaaaaggatacctgaggaaaactattgttaaacaaatattataggccattgttttgaactgaactcttgcactaggcctcaacagaccagcctaaaccaaaatggaatcagtcatgctaaatgccatatcatcaaactgaaactttaaggaaacagatcccaaaacagaccactttttcctaaaaacaggagattccaggaaatctgagtcactgtaataaggaagtcccctctgctttaacccttttaaaaagtaatctgagacggagtctcgctctgttgcccaggctggagtgcaatggcatgatctcagctcactgaaagctccgccacccaggttcacgccattctcctgcctcagcctcccgaatagctgggactaccatcaaaaataataataataataataataatctgaagtaacctgatgttaaccaatcagtttattttattttattttttcctattgttctgttttctcatttccaccttacaaaacccactgtcctgaacttgcccagtgggagttctcattccattttctggaatagaggattctctcattcatgaatcacaaataaaagccaattagatctacaactaaatttgttgtaattttttcttttaacactattgaggatatacaactaattaataaaactaacttagaaaatattaatttttacttcccttttgtrtgaattacacaaagcagtggttttgttaataatttggatgttttccttgtctatttttttaagtaatctttccttttattttaattaatgggttatagtaggaaatccaaacaagtcaacaactgttctcagtcatttatattttatctctgtgtggatggtcactgtatctacaatacagtataataaaaaaagatctacattcagcatatgagatggcaaaaaaaagattgtggaaaaattgagtattattagctttcacgaaaattttgacaagggagtttgaactactttttaattagaagaacatgattttaaaaaacacttttcatctaaactttaaaataattgtgtgtgttaatatg

SEQ ID NO: 35745 - DNA, 637 bp, Homo sapiens
actattgtactccagccctagcacttgtaagaacaagtccatataataatccatataatggtatgaattatattttattatcatctattactatattgttataacaatccacagtaccaagtggttattatcgatgctccataaataattgctgaataatcaatgcgttccctggaaattgtcacaccttaccaccatattcccatctaccctacacaagtcacttgagaaacattgttttataatggtttattatttcttggggaaaaatcatttaagaaatcatatttaaaaatttgatttgtttaataatatgaaaatgttccatatagcatttctacaataaatatattatttgaggataatgcttgttgaactaaaagcagccktcttcgaaagaatctcagaaaatcaccattactcagaaaatcggggaaaaaattctaaagcaatattaaatcttattttcaactctgctttcttgcacctcactacttcttccacctgggaaggaattaaaggtccacgccttaatttattacatgcttttagtatacaaatgttagggaacatgaactgtggatttcctccatgtgattgtctttcagggaaaacttcccactgtctagaagggtgg

SEQ ID NO: 35746 - DNA, 561 bp, Homo sapiens
gtcacagtaagatttcttttctttgtctaagaatgtttttaaaaagacttctaaaatttctatgacagaaagtaaagaggtttagttagaattaatctatgaatctcccataaaaagtatctgtaatgtattgatacaaattccttcgcaaaagcaaacaaaagtttacttcaaataaattacacttaattattattaactttattttaccaaaacagtaacaaaatgtggtataaactattgatagacaactgttgtctttccaactgtcacattcctccttcccacttcttccttcctggccaagatgtcattcaatgacagagtcttaaaatgtcatacatcattttctttaaatttctttgcagctaggttatggggttgtgatccaatcctgcagaagagaccmaaaggaaagtctgccagggagcttctgagaaaagttttccttcctattaaaaagatacgtgggaagaaactgtccatcttttatgacagatgatgttatctctacatgtgatacctaaactacagctacacccttacattcaagaggttaaa

SEQ ID NO: 35747 - DNA, 1239 bp, Homo sapiens
ttcaaatacaaatctatcacacatcttagaatctgtttttgagaactttatttgggtgcctgttcttagactaaggcatagttcaatagaattcccagtgaatttactgtaaagatatggctaagggtgttgtttagatatcacctaatagctttatgaagccctaagacagatgtttctcacaaacctcactgttaaaaataattctgcagcttaaaagtaactgatattaaaaactttgtatctcacagataccacccattatataactaagcttttaccctttgtgttcagtcactaataatctcagggccaaattcatttacattttaatgagcttattaatttttttcatatttaaatttatacttagattggttttaatatttttctttctctgtacctttgtatccttatcctcattcgttctrtgttactatgcatatttttacaatctcccctactacttttgggagtgggataaactattagtaacaaactaaacagaatctggactggagtcagacaaagggtgtaggccagacttcttggtacactttctataccactagatcaaatcagagcatctttcaaagtatttcctcatatttcgcagtggtgtttcaaatcactaaactgaaacattgtgtttttctttagattgctagcagtgaaagaatagactttcttacttcaggggataaaaaccctcactactgttgataaaaaataattttagtcacacacacaagcacagcaccagttaaaattttcaaaggagtatttccctttagggataaaaacaagtttctggcaatttgtctccgagacaaccattaagcataaaaagtgttttacatatatatgtatatatttagtagagcttatgttcctcccttagaacacatttttcttcaaaaagtattttagtggattggctctacatcaaatctctgtcgtctttaaaatggcatgagtcagtctgccatcctttgattgatcaaaacttggaccaaagaagggcagccatatggcacccaactcagtaatgctatgctgcatactgcagaatctggaatcagcaaatgccaagaagcagaatgcatagtgatgtatgaattaatgcaggcagacaggaataaaaatattgatgcatttttaaatcgatattgatacatatacgtcaatgaatagttaccaaattatttttacttcccaacaaatgctctaatgaaagac

SEQ ID NO: 35748 - DNA, 1239 bp, Homo sapiens
ttcaaatacaaatctatcacacatcttagaatctgtttttgagaactttatttgggtgcctgttcttagactaaggcatagttcaatagaattcccagtgaatttactgtaaagatatggctaagggtgttgtttagatatcacctaatagctttatgaagccctaagacagatgtttctcacaaacctcactgttaaaaataattctgcagcttaaaagtaactgatattaaaaactttgtatctcacagataccacccattatataactaagcttttaccctttgtgttcagtcactaataatctcagggccaaattcatttacattttaatgagcttattaatttttttcatatttaaatttatacttagattggttttaatatttttctttctctgtacctttgtatccttatcctcattcgttctgtgttactatgcatatttttacaatckcccctactacttttgggagtgggataaactattagtaacaaactaaacagaatctggactggagtcagacaaagggtgtaggccagacttcttggtacactttctataccactagatcaaatcagagcatctttcaaagtatttcctcatatttcgcagtggtgtttcaaatcactaaactgaaacattgtgtttttctttagattgctagcagtgaaagaatagactttcttacttcaggggataaaaaccctcactactgttgataaaaaataattttagtcacacacacaagcacagcaccagttaaaattttcaaaggagtatttccctttagggataaaaacaagtttctggcaatttgtctccgagacaaccattaagcataaaaagtgttttacatatatatgtatatatttagtagagcttatgttcctcccttagaacacatttttcttcaaaaagtattttagtggattggctctacatcaaatctctgtcgtctttaaaatggcatgagtcagtctgccatcctttgattgatcaaaacttggaccaaagaagggcagccatatggcacccaactcagtaatgctatgctgcatactgcagaatctggaatcagcaaatgccaagaagcagaatgcatagtgatgtatgaattaatgcaggcagacaggaataaaaatattgatgcatttttaaatcgatattgatacatatacgtcaatgaatagttaccaaattatttttacttcccaacaaatgctctaatgaaagac

SEQ ID NO: 35749 - DNA, 504 bp, Homo sapiens
aattctctggctgtggttagatggatgtggcggaagtcagagagattgaaagcgtgagagggaggaacctgccattcctgcggtgggaggacatatggaaggcatgaaagggaatgcaggcagcctcggggaccaaagaccataccagatgacagccagcaaggaaatgaagaaaatggatctgtgtcctacctccaaaaggaagtgattaaggccagcaarctgtgtgagcttagaagcggattcattcttacagcctccagggaggaacacaacactgccaacatcttgatgttggccttgtgagaatttaagcagaggacccagttgagctgcactgcatctggaatcctaacctacagaactatgacatagtaaacgagtgttgtttcaaagcactaggtctgtcacaaagtataatggcggcaacttaagaaaacacaaataagccttcaataaattcagtgaatacatatttagctatgtatttttctggcacttctt

SEQ ID NO: 35750 - DNA, 1051 bp, Homo sapiens
taagtgagataaattgcatagatagggttcttctgaaagggtaaacattaagactgaacatatgtggtcagttgctgtcggaatagctttatgttgtccatactagacaggaatggggcaatagtatgagctcctacaccccttgcataggcatgagtcagacacatggtcaaaaaaagtataacagactaaacaaattcaatagctgtgagatgtttaagtaccagctttgagaatcagctatggtaccctaatttcaatgtaattagaaatagcaaataaaggttatataagccatattaggctataaaccagaggtccccaaccctaaggacacagacttgaaccagtccttggcctgtcaggaaccaggcggcatacccggaagtgagcagcaggcaagcaagcattaccacctgagctccacctcctgtgccatcagcagtgacattaaagtctgtataggagctcaaaccctattgtgaacagtgcatgtgtgasggatctgagtttggagctccttatgagaatctaatgcctgatgatttgaggtggaatagtttcatccagaaactatccccaccatgtgtggaaaagttgccttccatgaatcaagtccctggtggccaaaagtttggggatcactgctataaagtatatagaaatcctagaacttttagtaagagtaaaaatctgtgaaatacatttttttttttaacttttattttagtttcaggggtacaggtgcaggttttttacagaggtcaactgtgtgtcacttttggtgtacagataatttctttaacataaatttcaactgacacaaagcaagaaatacaactcattaaaattttttttaaattttatttttgctgtgaaatatactacttttaactaaaaattttgtggcattagtttgattaatataattttgcttttattactaaaatttcttttttttctgggaaaaataacagctaagttttggagagttgatccctagtttttcagatattagaacataagccactgattaaactgtctaaatgca

SEQ ID NO: 35751 - DNA, 499 bp, Homo sapiens
atcaamctatcagtattggatatagaaaactgaaattttaactgtgcactttaaaaatttatgccacttatatgtattacccattcaaaaatgtgaaaactgtttaaaaaataaagtggcagggaaatgggcattttatatatttctggtgaaagtatacattatttactataacctttttggaaagcaacctggaaatgcgtacacaaactcaaaaagcccattctatttgaggggggaaaggggaaacaacccaaatgtccatcaataggggaatggttgaatgagttgtgggatacttatatatcattactccacttaaatgtaatattccattgggaaagtaagttcagctaaagtaaatgaagcaactgtaacactttagtatagcttaaaaggcatttgaactatgggccaagaggtcagtcctagaacaaagtccatactactcctcccctcacttagcatcctctccatcttcctcctaccaatctagcca

SEQ ID NO: 35752 - DNA, 587 bp, Homo sapiens
tcctcctggccctcttctcttaccattcttgctctccctcatgatctgcttcattcattaagtaagcataaattagcacctccattaatcacattgctttaatatatgctaatgagttacatacctgttttaagttctgagctctttcctgagcttcatacacagcttaaattgccagcttccatttggtcaccttggctttgatttctcccaagcactgcctcagcacatctataagaacaagacaaactaccatccctgttcctcccgcaatcccccaaacttgttattcctttaatatcccttattgtagataattcatggaactgcagaaatggaagatttacctaacaattggttttaggtctyggttttaacatttagctttttataagtttgggcttggatggatatagtgagtttatattatgtccctacagcaggaaattgtttttgcatgtctaaaccaacctgttttaacacttgtaatattctggcaagagttcaggaagagtttaaattacagcagaaactttgtacaaagaaaaccacatttggcatttatagtttaatttgtcttcataaaa

SEQ ID NO: 35753 - DNA, 577 bp, Homo sapiens
tgcccagggcaagagaacaaattgcctagtacaataagactaaataatggaaagctatatattaaagtaacaagacactaaatgtgttttatgctcttacaatgacaaatataccttcataacaacctggaaggtgaggctcaaatttagatttactgaatttccttggaagagtgggtggcttaagggtagacctccaatattcacggtgctcagggcacccagatacacagggaagcacagcagtaagtgatccctgtttttttttttttkgggggggggtgcggggggtgtgccgtttaagagcctaggagtcagacatcctcattcagagatgtggaaaatgctttctctgtctctctaaagctttgtttccccattttcccctttgcacttgtgcccttcacagccttggagaagcagcaggttcctgttctccactgaccctccagaccttagatttctgccaaagccagaggagagacctcctgtgcctcacgctcagtgcttggggctcgagatgaccagggaaggttgcaaggaccctgcccccaaagaattcacaggctcttgggaa

SEQ ID NO: 35754 - DNA, 1126 bp, Homo sapiens
caactctgagctaacatttacctgccctgcccaagggggtctgtatgaaccttcccaacctgatatcataaagctttttcctctctgaaagtctcttttcataaagtttatattcctgccaaggtcttgaccgagaggtctgtggattctaagaaggaaatgctgtagtcaggtggggaggtcatgagaaagatggggtcacagaaatggtggtagcttaataacaggaaaggcagatggaaccatgcctccttcataagggagaacctcacwcaaagatgggctttaaaaagttgcaataaacacagaactcagaattaaggtgagaaagagagaaaaagaaaacatgctctgaatataccacatactgagcaacacgaaattattaatacacatattatctcatttcatgttcccatcttcccttgcagtaagagccattatcctcattttcacagatgaggaaactctggctcagagaggttaagaatcttgttcaatatcatcaagcaagtgagggatagaaaacccaggattgaatctgctttgtctgattgtaaagacttttttttccctcctacagatacagatatttagcctagattggaccacccatgcacttctaaggcatacattgttcccaaattagccctacatccccatgatacctatctttcatagtttaagagagaggttactgtcttctcttattgtctggctctgtccatcaggaagttgtagaatcataggatataaaaactgtaagtacatgagtggtctgttggaacagtggtttgtacatttatttgtagcagaattcatgtttggaattcctatacatgaaactgacattgcatgcagcagactcctcagtattcatctgtatctctctggaagggactcttcaggctcttctaaagaccactgcccctccaagaaacacagtctgatgtactctcaccctcattttctcatttgtacatgaggactctggagatcagggtcaagaagggcttgcccaaggttactcaatggaagaacaaggacaagaatctgtatctcgtgctttctattctacacagtggccaagaaatattcatcagggtaaaggaaaaggtatcctgga

SEQ ID NO: 35755 - DNA, 1471 bp, Homo sapiens
ggttaggagctggagaccagcccggccaacacagcgaatcccagtctccaccaagaaaatacgaaaaccagtcaggcgtggcggcgtgcacctgcaatcgcaggcactcggcaagctgaggcaggagaatcaggcagggaggttgcagtgagccgagatggcagcagtaccgtccagcttcggctcggcatgagagggagaccgtggaaagagagggagagggagagggagaggagactgactctaattttatttttattttttgtagatatggagtcttatgctgaccaggctggtcttgaactcctgacctccagtgatcctccatctcagcctcccaaagccctggaattacaggtatgagccaccatgcccagcagtagtaaagatgaaatgagaggtgaaaataacgasactaaacacataatgaaagccagaatacactgtcagtcacaaagaatagacacaactgtgaatgaagtctgactgagccacttcctcaatgtgtgccctggctgttctgagtctcagtttccacaatttatacattggagaaaataactccttcctcactaggcttgtgagaggatcccaggaggtcatttacctgatatgtgcctgatgcctgacaggtgctcactaaatgctaactgctattgtagttaccttgttactttctccaaataggacacattcagggagaaatgtaagggaaccatatacagggaaatggttaggcatttcttccatgcctacttttccaatgaggaaactaaaactcagaggtcaggtgagctgccttgggtcatacagcaagcaagagtctgactgagcccaccactgaaggccccctgactatggggccaaatgaggttctcttttccctgaaccacatggaggtggcttgtctgtggtgttacaagtggttcagactggctagtgtaacacagagattctgagaaccttgtgggaagggccctgtaatgagttatcggaggactttggtgctttagggacagagaggttgcttgtggcatagtcttggatgtacagattaggtacagcatcttgggaagaagagatagggaaagatgcaaggaaggaaatgaaatgcatatttattatgcacctaccataagctggatgtttcccaatatgctatcttttttaatccccacaaaactcagaggacctctaagatacaatatactcattttacaggcaaggttattgaagatcacacaggctgaagaagggctgctgaattcttcaatatgaaccatccctttgataagaaactgagtgggcctggttcttctcatcccaggagagctctggtgtgcttcctggcatataagtgagtgggaaaggctctgccagtccccagtcccccacccctcttgccactcagcctcaatctgtcaaccaggccagctagcccgtctattaatgctgacattgatttggatca

SEQ ID NO: 35756 - DNA, 1236 bp, Homo sapiens
ttttgttgcagagagcaatttaaaagaagaaaaaaaatccttctctgaatggagacagatgccatatatgttggaccctcaggggattgaaaaggatgaggttcccaagtccagtgttctggggacggacgtgggtggaaggaaactcacaagtgatgggaatccaggatcaactgcaacacccacagcaaggccagcaaggcactaaccacccagtccagggcagggcccttcaaggttttattcccaaggcctccccagtagcctgtctgactgttctctacatgctatttactgagtactaaatattgagtgatgggtgaagtgcacatcatcccccttaactttccccacaactccatgttgagatgctgttgtacatatgagaacacagatactacattgcccaatgtcatcaactagaacagcaggaatctgtgtgctgggaagccwgaccccagaaccagtgctctcaaatccccaccaatgtcatctagtggtcactggagtccttattttggagtcatgatatccatgctaccaattcctatctgagtgacaatgaacatgtcacttccctttctgagttggcttccacactcacaggatggagactgagattccattttgctagggtgttatcaagattcagagatccaaagttacacttaaaagtcatttgagacatttgttctttttttctaccccaccccctgcctaaaaggttctcctcttacccaggatgaactcaagatgtaacattttaaaatgagccttaggaaaaaacctgcaagggttggtaccagctggagaaaaataaatacgctcatgtgggtgccaaagattcaaaagagagaagcagcagcccaaaccagagtctacaccagagggaatcattatggaaggagaaagttcatcctatcattgtgcagaaaggaaggatccatgtgtgactctagggagtaggatccaaagcatcattttctagctctgtaaatagactatggactctttgctagttaggacacagtatctttctaatgttagggcccagaagagggtcttacacagcagtacttagttgttgagctctgaatgcagctaaaattcaactgtgggttgtctaataaccagtttttgcttcaaccaaaggcaagtttgatctagtttgataagatgtgctagatgctggagaatccattaccaacagtcaagaatcacataaaagagctgctc

SEQ ID NO: 35757 - DNA, 1751 bp, Homo sapiens
ggatttcaaaatacctgggctagtgggtcaagacttcttaaagcagggatcagagagaagctggagaatacaggcaaaaggatacctttattatttgtaaaatttaataacaataataataatgtcatttgtcatccatttatcctcaagacctatgataaaagacaaaagaatgatgataaaaataaaagcatgttatcctgggtggaagagagtcctacactggaatttcagacacctgggttctatccaagcatagctcttgtgctctttagcctcaatttgatcatctttatttattacccaaggggaaaatacacacacacacacacacacacacacacacacacacacacggttaagatcaagctaggaagtcagttgtcctaaaaagaaaaaaaaattggaaaagctctaggaaaagcagaatgtgtagttctgacttagaaaattgtcccgaagaaacacaactgtatgctttttatgcttccatttttaaaattacatatataaattcttatttatatttgcatatgcatagggaagaagtgtatggaaggatatgtatctatctatatatacaccaaaccgtggcacatttatctaaagtgggtgagtagttaagaaagggggccttgagtttttttctttatacatttcaacactgtacaaatttattttattttataatgagaatgagctacttttagaaaaccaaaaaaaatttttaaaggaagattgatgatcagatggagaaaataccttatgaatgcaaaaattctattattataattaagatgaacacaattattccagcttttcgtttcagagctaaggagaaggtgtctgatgatcagcattctgatgcctcaggagacactcactggtgcttggcacarccactaaaagttctgtagtcatggcttctgacctcctcaaaccctcaaggagacagcagacccacggcctcatttactctcctctgcattgcctcttgtatctggaccctctctcacagacacagtgcacacctcactggactccactcccacatgtactacatttattttatcactctcctgatcagagaccctttaggccaaataccctagcccgcccttgggctgcactctgaaagaaaagcagcacctaaaacagtgtggagcaccagatgctctattgctccttttgaaaaaatccatcccacaccttcacccaaatcatgaaacactaatacaatttgaaaactgtccttacagacttctgggaatctcttctaaagaaacagctcaaaacacagaaggtggcttctgcccaaaggtgctcagagcagcacggtttataatagactaaatctggaagcaatcaacatgtccaaccagaagacaaagcaaatgctgggatgttccccttcatgaaatattaggcaatattagtgatatatatgaatttgtcctggttaagggttttgttatcaacctgctttggcccaatttggcccgaattccctgctctagaactgagtagctttgtggtcctgagcaaattacctaagttttctctggctcagttttcccatctgtaagaaaagggataataatgagatccacctcagaagccttgaatcatagcaagcattcaaacaattttagctctcatcattgccaccaccaccatactcaaccctgcatgagatatcagataataataatagcaaccatgttttgtgcctgcttagggccatgttctag

SEQ ID NO: 35758 - DNA, 1751 bp, Homo sapiens
ggatttcaaaatacctgggctagtgggtcaagacttcttaaagcagggatcagagagaagctggagaatacaggcaaaaggatacctttattatttgtaaaatttaataacaataataataatgtcatttgtcatccatttatcctcaagacctatgataaaagacaaaagaatgatgataaaaataaaagcatgttatcctgggtggaagagagtcctacactggaatttcagacacctgggttctatccaagcatagctcttgtgctctttagcctcaatttgatcatctttatttattacccaaggggaaaatacacacacacacacacacacacacacacacacacacacacggttaagatcaagctaggaagtcagttgtcctaaaaagaaaaaaaaattggaaaagctctaggaaaagcagaatgtgtagttctgacttagaaaattgtcccgaagaaacacaactgtatgctttttatgcttccatttttaaaattacatatataaattcttatttatatttgcatatgcatagggaagaagtgtatggaaggatatgtatctatctatatatacaccaaaccgtggcacatttatctaaagtgggtgagtagttaagaaagggggccttgagtttttttctttatacatttcaacactgtacaaatttattttattttataatgagaatgagctacttttagaaaaccaaaaaaaatttttaaaggaagattgatgatcagatggagaaaataccttatgaatgcaaaaattctattattataattaagatgaacacaattattccagcttttcgtttcagagctaaggagaaggtgtctgatgatcagcattctgatgcctcaggagacactcactggtgcttggcacaaccactaaaagttctgtagtcatggcttctgacctcctcaaaccctcaaggagacagcagacccacggcctcatttactctcctctgcattgcctcttgtatctggaccctctctcacagacacagtgcacacctcactggactccactcccacatgtactacatttattttatcactctcctgatcagagaccctttaggccaaataccctagcccgcccttgggctgcactctgaaagaaaagcagcacctaaaacagtgtggagcaccagatgctctattgctccttttgaaaaaatccrtcccacaccttcacccaaatcatgaaacactaatacaatttgaaaactgtccttacagacttctgggaatctcttctaaagaaacagctcaaaacacagaaggtggcttctgcccaaaggtgctcagagcagcacggtttataatagactaaatctggaagcaatcaacatgtccaaccagaagacaaagcaaatgctgggatgttccccttcatgaaatattaggcaatattagtgatatatatgaatttgtcctggttaagggttttgttatcaacctgctttggcccaatttggcccgaattccctgctctagaactgagtagctttgtggtcctgagcaaattacctaagttttctctggctcagttttcccatctgtaagaaaagggataataatgagatccacctcagaagccttgaatcatagcaagcattcaaacaattttagctctcatcattgccaccaccaccatactcaaccctgcatgagatatcagataataataatagcaaccatgttttgtgcctgcttagggccatgttctag

SEQ ID NO: 35759 - DNA, 666 bp, Homo sapiens
tttaaatggtttttctccataatttaaacatagaccaacatagaggtttaacagtgtaagagaaagactgaggtttaaaagaactatgttgagattctctggtgtaaaaaaaactggaggactgttttgagttaatttgcatcaatattggcagaagctttagctatcattgatcagcatgtgtttgcatttttaaaatcttttaaatgttggtgtccaatggaaatcctttaagttttaaattttgctaattaagatttaacagcagggagaggagaaggaggaagtaaagaaaaactgctgtccattttcatcactctttcataaaaggtgggactcaatttcaaaatagaggacaattgtttaaattgagaaaagttggcttcatggacagctgttacatggtccttattttcttgctatgctgtsgactggtggaaattgaatgacagagggaagtcgcttaacacgcctgcactgggaacaacaaccctaagccaatctctttgttttaaggatgagcaaattagaattcctgcccatgtatatctaaacatactttaagaagctcagtaaggctgatgcagaagtgtttctttttttttctgaagagagcttcattctctgcttgtgctggccaaagccccttagagatcatgtacctag

SEQ ID NO: 35760 - DNA, 742 bp, Homo sapiens
aattttctgaattaatctatagatttaatgcaatcttaaaattcctatgggcttgtttgcagaaattgacaagtttattcttaaatttttgttgcgactgaatgaacacaaaaaagcccaaatagtcttgaaaaaagctttgaggactcatactttttgatttgaaaacttgacacaaaactacagtaattaagacttcaaaatgaggtactactgacataaggacagacagaccaatggagtagaattgagagcccacaaacaaatcctcacatttatactcaactggtttttaatgaggttgtcaagacaattcaataggaaaaaatatactttttcaataaatagttcaatgaaaacaggattcactctcacaggttacctgataaacatcaacctccaactcctttgtgcaaattcattttaggttacactaaattaaaccttctctcttccatccaccaactctttcccaccactcacctctccacaaactactcattccatctgaaacctttcttctgttccacactgaaaatatattaagggctatgtcaatgtgcagggcatacaggaagcccatttatgataagccattcttttccattgtcacataatctatgtgcaatattgatatycatcttcagtttgtggtaggatattttgtattttctacttatttataattgtttccatttgactgcagtgtctatattattctactcatgtagattatttttat

SEQ ID NO: 35761 - DNA, 639 bp, Homo sapiens
gaaaaagcatagtgtatatagggcttagtactattgatggtttcaggcatccactgagggtcttgggacacatcccccacggataaggcaagactactaaattaagtttgataattatmaatgtggtctttagagggcagtatttcagtgtccagggatgtttaaaaaaaaaaaaaaaaaaaaaaaaaaagcagtaaacgagacagtcaaaccccgaccctcatggattttatattatagacaacaaatagacaacaagaaaacacataaattatcaatataataaagtttccaaaagaaactccaaaacaaaacaggcaaattaaataaattggtctgatgtggagatgggggaatgattttagatttggtgacttctgaggtgaggataagctgagatttgaatatgacagagctagcctttggaagctctgagggaacactgtcccttgcagagggaactcagaggtaaaggacctgaggtgggagcgagcttaaactgtgtgaggaacagaaagaacaccagggcacctgaagtgcggagagtggggaagagagtagcaggagaggaggccgaagcgcaagggaggggaagactgcggcaggtcttggaggtcatgtaggagtcgtctaggaaac

SEQ ID NO: 35762 - DNA, 395 bp, Homo sapiens
cctgaggagcctgaaatttatcagggaggccaaaaagacaaacacctatggtaacaggtggaatgtggtgaggagaaaagtattctccgattggaggagcactcacggtacagaaagaaggatgaggggactccacaggctggggagcttgtccccaacatggccgaggtattcctggctcttcacagacccatggacaaatgccccaccatcagaggacattgggtaggctgcccatacaccctcagcagacactgggcatggtacttgtccactgcgttagacctttcttgcrttgctattaataagtacatgagcccgggcaccagtggctcacacctgtaataaaagcactttgggaggccgagatgggtggatctcgaggtcaagagatg

SEQ ID NO: 35763 - DNA, 494 bp, Homo sapiens
gaaggaaagcatgggacatgggagaatagaagaaatgaattcagatggaaatatgacttccttgcttacctcaacccccatctttgcaacttcttttatcaactgtgwcaatattaataacttctttttcttttaacttttcgttattgaatacagccatcaccacataaccatgatttggtcaaccccagaccatgtatgtaactgatcccgtaagattatagtgccgtatttttactgtacctttcctatatttaaatacaccaatactgaccatcatgttacaattgcctacaggattcagtacagcaatgtgctatatcagcttatagcctaggagcagtaggctagaccacacagcagaagggtacagcaggctgtaccatctaggtttgtgtaagtatactctgtgatgtttgcacaactacaatattgccgaatgatgaatttctcagaacagatctctgtcattaagtgacatatggctataattt

SEQ ID NO: 35764 - DNA, 494 bp, Homo sapiens
gaaggaaagcatgggacatgggagaatagaagaaatgaattcagatggaaatatgacttccttgcttacctcaacccccatctttgcaacttcttttatcaactgtgtcaatattaataacttctttttcttttaacttttcgttattgaatacagccatcaccrcataaccatgatttggtcaaccccagaccatgtatgtaactgatcccgtaagattatagtgccgtatttttactgtacctttcctatatttaaatacaccaatactgaccatcatgttacaattgcctacaggattcagtacagcaatgtgctatatcagcttatagcctaggagcagtaggctagaccacacagcagaagggtacagcaggctgtaccatctaggtttgtgtaagtatactctgtgatgtttgcacaactacaatattgccgaatgatgaatttctcagaacagatctctgtcattaagtgacatatggctataattt

SEQ ID NO: 35765 - DNA, 554 bp, Homo sapiens
cgtctcaaaaacaaaaacaacaaaaaaaaatgtggtcaattgacagatatttaaatatgtaatgtgtcccagggaccatgagccatcaaaatgactacactcgctcctacatgagccacagctctattcatatagtcaagaggtagacaccacacaaatgcccatggatrgataaacagatgcagaaaacattgtaccgaatagaaaacagtttcctcctactgtcctcacaccactctcaatacttccagaacacctcccttctgacaccacactcaacacggatcacgcctgtgaccagatgtgtggggtgtttttcctcaccaagcaattctctgacaccagcagctcctacaatttaactcgcgtctgacgccgtctacgtacactatctacatggagacagtgcagcacccacaggttgagagctgggttccgcaacactatccccacttcagagtccagtcaggtcacttgagcttctgacccgccagctgtaaagcacgtgttctcgtgacccccttctcagattccgtcatttactagagtgactc

SEQ ID NO: 35766 - DNA, 554 bp, Homo sapiens
cgtctcaaaaacaaaaacaacaaaaaaaaatgtggtcaattgacagatatttaaatatgtaatgtgtcccagggaccatgagccatcaaaatgactacactcgctcctacatgagccacagctctattcatatagtcaagaggtagacaccacacaaatgcccatggatggataaacagatgcagaaaacatygtaccgaatagaaaacagtttcctcctactgtcctcacaccactctcaatacttccagaacacctcccttctgacaccacactcaacacggatcacgcctgtgaccagatgtgtggggtgtttttcctcaccaagcaattctctgacaccagcagctcctacaatttaactcgcgtctgacgccgtctacgtacactatctacatggagacagtgcagcacccacaggttgagagctgggttccgcaacactatccccacttcagagtccagtcaggtcacttgagcttctgacccgccagctgtaaagcacgtgttctcgtgacccccttctcagattccgtcatttactagagtgactc

SEQ ID NO: 35767 - DNA, 528 bp, Homo sapiens
gccaggtgcagtggctcacacctgtaatcccagcactctgggaggccaaggtgggcagatcacctgtggtcaggagtttgagaccagcctggccaacatggtgaaaccccgtctctgctaaaaatacagaattagcygggcatggtggcatgtgcttgtagtcccagctacctgggaggctgaggcaggagaatcgcttgaacctggaaggcagagagtgcagtgagctgagatcatgccactgcactccagcctaggcaacaagagcaaaaattcgtctaaaaaaaaaagtcttcagtttttccctatccagattcttcatcagaataatttttaaagttacacaatacagaaatacattttttttttagtatagatagggtcttgctctgttgtccaggctggactcgaactcctgggttcatatgatcctcctgctttggcctcccaaagtgctgggattataggagtgagccaccatgcctggccacattcttttttataaaaaaaaaaatacaaagaagagca

SEQ ID NO: 35768 - DNA, 2301 bp, Homo sapiens
atgaaagaaatgttgcgaatggaaatgacaaatggtggcaggaattgggcactctatgagacaacagacacatccccgattggagagtcagggacaggctcttagaagaaatggcctttatgctgagtcaagttaaccaggagggatgaagggaagaggctcccaacagagggaccagtctgtgctcagagctcccagcatctgcccaaggcctccacagaacagactgttgtgtttttgttttgttttgtttttttgagatacagagtctcattctgtagcccaggctggaatgcagtggcattatctcagctcactgcaatctctgcctcctggttcacctgaggcgattctcctgcctcagcctacctagtagctgggattacagacgtccaccaccatgcccagctaatttttgtatttttagtagagacaggattcactacctgttgaccaggctggtctcgaactcctgacctcaggtgatccacccacctcagcctcccaaactgctgggattacaggcgtgacccaccgcatccggcctagactgttgttgaagctggttttcttcttctttcctcagttcttttcttttacatcttccccccaccattgctctgcccatccgaaggctgtggctggcacaggacagaacagaacctcctagcctcaagttccaaacccacactctccaatagccaggctctcagatgggaagcttcaaagccttgtgacagcctggctgaacctctccagcctgggcgctccctccatttcctgccccggaaacaggcatctcctctggccacctcccaaagcctgtctggaagcctcaggcacccgctcctggaagcctgtacgattcacaacaaagggcccgtccacccagtcgtgctgagcacacccctattcccccgagctctgaattgtcctttgcccaggctaggacaacatctcagagccttctgcctgctgcagactcggctcagcccaaatcactccatgaaattggggtgtggcatctgcctcaaggagcatttctacaacctctgctgcctctaccgcaaatgaaactggctctcacccactggctctcggtgacgggcacagtgcggagccccacagggagtgtgtagaagtcaaaggccccagtgacttctgtgcagtcagccgcacctatgacagccaaagcgccaggtgtgagcgccccgacagcctgagccccatctggcctgccctacagcaggaagacccctcgtgcatgcaccccagaagtcgcctctgggcctgcagagaagcagcaatcagaggctctgcccttcactggctgrccctgggacctgcccttcaaaatcaggccttctccttgaccagacgaggtggctcatgcctggaatccctacactttgggaggctaaggcaggaggatcaccggagtccaggagttcaagaccagcctgggcaacctagtaagacccccaactctataaaaaggatttttttttttgagacagtctcactctgtcacccaggatagagtgcagtggcatgatctcaattcaccgcagcccctgcctcctgggttcaagcaattcccctgcctcagcctcccgagtagctgggattacagacgtgcatcatcatgccctgcaaattttcatatttcagtagagacggggtttcaccatgttggccaggctggtctccaactcctggcctaaagtgatccgcccgcgtcagcctcccgaagtgctgggattacaggcgtgagccaccatgcccggcctacaaaaaaaatttttttaattagccaggcatggtggcatgtgcctgtagtcccagctactcaggaggccaagggaggaggattgcagctcaaagctgcagtgagctgtgatcaggccattgcgttccagcctgggtgacagagtgagaccatcacaaataaataaataaataaataaataaataaataaataaataaataaaaaatctgggcctcccgccaagggtgggaaacatcagaaagctcagaaaagctcagaggaccacacctgcccgttcacctgtcctgggctcctgctgaagccagggctaccagatgggagctaaagacctcccttaagcaagtcccaaaccaccattacctcccacgagtacaggtaggcggggtgttcgtgcatcaggtacggccaccagaggttggcacccagcaccttcagctggccctgggtcccagcctggttgtccacgactttgttgtctgatttcaaaagacacacttccaacttgaactgg

SEQ ID NO: 35769 - DNA, 1129 bp, Homo sapiens
tgctaagggggttgaaaggtactgtattagtttgttttcacactgctgataaagacatacccgagactgrgcaatttacaaaagaaagaggtttattggacttatggttcaacatggctgggaggccacacaatcgtggaggaaggcaaggaggagcaagtcacatcttacatggatggcggcaggcaaagagagagcttgtgcagagaaactcctgtttttaaatcagatctcatgagacccatttgctatcatgagaacagcacgggcaagaccctcccccatgattcagtcatctcccatggggtcccttccgcaacacatgggaattatgggagctgcaagatgagatttagatgggaacatagagccaaactatgtcaggtaggaaggcaggattcaggaaaataaaattctctgtctgattaaagagttcactaaatcacgcctgtaatctcagcactttgggaggccgaggtgggcagatcatgaggtcaggagatcgagaccatcctggctaacacggtgaaaccccatctctactaaaaatacaaaaaattagccaggcgtggtggcaggcgcctgtagtcccagctactcgggaggctgaggcaggagaatggcatgaacctgggaggcggagcttgcagtgagctgagatcacgccactgcactccagcctgggcaacagagcaagactccatctcaaaaaaaaaaaaaaaaaagatttcactaaatagttgcatattcaaatacaagtcacttaactcaccccctcccaaattttaagtcatgcttcagtgtattatgtgtttattacaagttcatacggtgcttaaatcctagtcttcaatctagtaacctcactatgggtaatccttagtgtactattcttgtggatcctttcctttgtttttcttgcctacttaagtgtagggttactttctagatcataccatggagtagtacaatggggaatgtcttaaaaatcaaatacttaagtgcaaaacacaaaataaggtgtaattcagtaacaatcagactaagcaaataaaaaacattctgagttgccttttaaatgtttcaagtgtgggttgcccctgataaatttaattaggcatcataaaga

SEQ ID NO: 35770 - DNA, 2053 bp, Homo sapiens
cataattgtattgtgtgtaaatatatctgtaggataagtttctatcagcgatattgttgcagtttatttagacagctttagaactgattgacttttgcttaggatttacgggctagtcagaatttgctttgcaatatttagacttggtgttgtcaattttatcagctagcttttttactctacacttgtacttaaaataattgaaatttatgtagaaaaaagtatgtttatgattgtgaatctggaattctgtagccgaagcacccacttcccaattgaataattgtttttataaccttactttaaggatttttttaatttagaaaaagtttttgataaagagagatatcttagacacatagctatcatattagaacagaccgtacctcctttctgctctgccaagaatctgtgcttcctaaagatcaatccagggcatttggcagctataggagatgtaactaatctcaaaaagaatgacagtgaccacatttacagtttatactgttcttcttttcatgtcttttggctattaaaaattatatttatataaatataaacatttttaggttatgtaaataattcacaaagttttctgaattcgcttttagattaaatttttaatattttccccattttgatagtaagaaaatgaattgtaaataaaatttccattacgtttctctatccttgaagtttctgtcttgggtaatacatatcttgtgattcatgaactgcaaagaaaaaaaatccacaggattttgtcatcagctacattctatgagcattttcagccagatttcagtacttgtttagatttatattattttgggagaatcttaatttgtagttaaaaaattaaatatgttgcaaaaccaattataaacttcctgttaatgttgaacttttgctagggaaagattctaaggggaatttcctttatccttttaaagggataaatattattcaaatcaccttagtaacagttggaccacagtcatgcaattagtttagtatcactttctaagttagatgatgttggtctggagttgacaacattgattttctgtgaagtttacaatttattattttttaaataagggggaaattttgctttttaaaacttttgcaatttatcacttagtttacgaggcaaaatagatttcaccattttgagaactgtgagttattttctatgtgaagaatatatgtggtaccattgtttttgattgggtctcatagtgcacattatgtaaaagaaaacaaatcttactgtcttttttatgatacagcaaagtgaagactgaggatcctgagtgtgcatagtgcatgcatgttatgygttatatgtgtatgcatacatatgtgtatatatatagttttacaagtttaaaataatatcagtgacttgaaaattgtaagggcttaccagataatctctttgtaggccttggagtagcattgttttttttttttttttcctttggttattgatgggtaataatgctctggtaaatcagtcttttttttttttttgagatggagtttcgctcttgttgcccaggctggagtgcaatggtgcaatctttgctcactgcaacctctgtctcccgggttcaagtgattcttctgcctcagcctcctgagtggctgggattacaggcatgtgtcaccacgcccagctaaatttttttttttttttgagatggatttttgctcttgttgctccggctggagtgcaatggtgcaatcttggctcactgcaacctctacctctcaggttcaagcaattctcctgccgtagactccggagtggctgagattacaggcacccgccatcacacccgactaatttttgtggttttagtagagacagggtaataccatgttggtcaggctggtcttgaactcctgacctcaggcaatccacccgcctcagcctcccaaagtgctggaattacaggcatgagccaccacgcccagcctaattttgtatttttagtagagatggggttttatcatattggtcaggctggtctcgaactcctcacct

SEQ ID NO: 35771 - DNA, 2053 bp, Homo sapiens
cataattgtattgtgtgtaaatatatctgtaggataagtttctatcagcgatattgttgcagtttatttagacagctttagaactgattgacttttgcttaggatttacgggctagtcagaatttgctttgcaatatttagacttggtgttgtcaattttatcagctagcttttttactctacacttgtacttaaaataattgaaatttatgtagaaaaaagtatgtttatgattgtgaatctggaattctgtagccgaagcacccacttcccaattgaataattgtttttataaccttactttaaggatttttttaatttagaaaaagtttttgataaagagagatatcttagacacatagctatcatattagaacagaccgtacctcctttctgctctgccaagaatctgtgcttcctaaagatcaatccagggcatttggcagctataggagatgtaactaatctcaaaaagaatgacagtgaccacatttacagtttatactgttcttcttttcatgtcttttggctattaaaaattatatttatataaatataaacatttttaggttatgtaaataattcacaaagttttctgaattcgcttttagattaaatttttaatattttccccattttgatagtaagaaaatgaattgtaaataaaatttccattacgtttctctatccttgaagtttctgtcttgggtaatacatatcttgtgattcatgaactgcaaagaaaaaaaatccacaggattttgtcatcagctacattctatgagcattttcagccagatttcagtacttgtttagatttatattattttgggagaatcttaatttgtagttaaaaaattaaatatgttgcaaaaccaattataaacttcctgttaatgttgaacttttgctagggaaagattctaaggggaatttcctttatccttttaaagggataaatattattcaaatcaccttagtaacagttggaccacagtcatgcaattagtttagtatcactttctaagttagatgatgttggtctggagttgacaacattgattttctgtgaagtttacaatttattattttttaaataagggggaaattttgctttttaaaacttttgcaatttatcacttagtttacgaggcaaaatagatttcaccattttgagaactgtgagttattttctatgtgaagaatatatgtggtaccattgtttttgattgggtctcatagtgcacattatgtaaaagaaaacaaatcttactgtcttttttatgatacagcaaagtgaagactgaggatcctgagtgtgcatagtgcatgcatgttatgtgttatatgtgtatgcatacatatgkgtatatatatagttttacaagtttaaaataatatcagtgacttgaaaattgtaagggcttaccagataatctctttgtaggccttggagtagcattgttttttttttttttttcctttggttattgatgggtaataatgctctggtaaatcagtcttttttttttttttgagatggagtttcgctcttgttgcccaggctggagtgcaatggtgcaatctttgctcactgcaacctctgtctcccgggttcaagtgattcttctgcctcagcctcctgagtggctgggattacaggcatgtgtcaccacgcccagctaaatttttttttttttttgagatggatttttgctcttgttgctccggctggagtgcaatggtgcaatcttggctcactgcaacctctacctctcaggttcaagcaattctcctgccgtagactccggagtggctgagattacaggcacccgccatcacacccgactaatttttgtggttttagtagagacagggtaataccatgttggtcaggctggtcttgaactcctgacctcaggcaatccacccgcctcagcctcccaaagtgctggaattacaggcatgagccaccacgcccagcctaattttgtatttttagtagagatggggttttatcatattggtcaggctggtctcgaactcctcacct

SEQ ID NO: 35772 - DNA, 2053 bp, Homo sapiens
cataattgtattgtgtgtaaatatatctgtaggataagtttctatcagcgatattgttgcagtttatttagacagctttagaactgattgacttttgcttaggatttacgggctagtcagaatttgctttgcaatatttagacttggtgttgtcaattttatcagctagcttttttactctacacttgtacttaaaataattgaaatttatgtagaaaaaagtatgtttatgattgtgaatctggaattctgtagccgaagcacccacttcccaattgaataattgtttttataaccttactttaaggatttttttaatttagaaaaagtttttgataaagagagatatcttagacacatagctatcatattagaacagaccgtacctcctttctgctctgccaagaatctgtgcttcctaaagatcaatccagggcatttggcagctataggagatgtaactaatctcaaaaagaatgacagtgaccacatttacagtttatactgttcttcttttcatgtcttttggctattaaaaattatatttatataaatataaacatttttaggttatgtaaataattcacaaagttttctgaattcgcttttagattaaatttttaatattttccccattttgatagtaagaaaatgaattgtaaataaaatttccattacgtttctctatccttgaagtttctgtcttgggtaatacatatcttgtgattcatgaactgcaaagaaaaaaaatccacaggattttgtcatcagctacattctatgagcattttcagccagatttcagtacttgtttagatttatattattttgggagaatcttaatttgtagttaaaaaattaaatatgttgcaaaaccaattataaacttcctgttaatgttgaacttttgctagggaaagattctaaggggaatttcctttatccttttaaagggataaatattattcaaatcaccttagtaacagttggaccacagtcatgcaattagtttagtatcactttctaagttagatgatgttggtctggagttgacaacattgattttctgtgaagtttacaatttattattttttaaataagggggaaattttgctttttaaaacttttgcaatttatcacttagtttacgaggcaaaatagatttcaccattttgagaactgtgagttattttctatgtgaagaatatatgtggtaccattgtttttgattgggtctcatagtgcacattatgtaaaagaaaacaaatcttactgtcttttttatgatacagcaaagtgaagactgaggatcctgagtgtgcatagtgcatgcatgttatgtgttatatgtgtatgcatacatatgtgtatatatatagttttacaagtttaaaataatatcagtgacttgaaaattgtaagggcttaccagataatctctttgtaggccttggagtagcattgttttttttttttttttcctttggttattgatgggtaataatgctctggtaaatcagtcttttttttttttttgagatggagtttcgctcttgttgcccaggctggagtgcaatggtgcaatctttgctcactgcaacctctgtctcccgggttcaagtgattcttctgcctcagcctcctgagtggctgggattacaggcatgtgtcaccacgcccagctaaatttttttttttttttgagatggatttttgctcttgttgctcmggctggagtgcaatggtgcaatcttggctcactgcaacctctacctctcaggttcaagcaattctcctgccgtagactccggagtggctgagattacaggcacccgccatcacacccgactaatttttgtggttttagtagagacagggtaataccatgttggtcaggctggtcttgaactcctgacctcaggcaatccacccgcctcagcctcccaaagtgctggaattacaggcatgagccaccacgcccagcctaattttgtatttttagtagagatggggttttatcatattggtcaggctggtctcgaactcctcacct

SEQ ID NO: 35773 - DNA, 897 bp, Homo sapiens
gtaagtcagtcttaaccttagttacttcaccctaagacagagctgggtagaaatcagaagacaagaattaggaaaaagggaagaggcagtgacccatcttaaggtttagactgtattgtttgattgcgagtaaattaaagcctttccttttttgtatgcttatagacctcaggggtcacattctgttcctgagaatagtagctaccattggcaatgaagtatgtgtgcatacatcctggatctaattaggtggttgtgctgcttccatatttttggaacattattctgactttatttgttctatttgtagataagaacattcagaggaacacatctctccccatgtaattatctcatttagcattttgcctactcagagggcatggctaaatgttttaggtacagggaaaagctgactttggtggcagttctttatactgtcttctcaaattaagagggtcctctattcaggaatgtttcctgcataacgaatagacattccttgaagcatgatgaccccccacccactgcatttgaatgtagagcaacatcttacatggaaacagtgatagtataggaaacacaaaataacgtcaaataaactctaattaatagcttcacaaattcaagaagacactgtattgactaaattagtacatattactatgcaaaagtatcattcagagaacagtgttcctgaaaataaaaaaatctgatcgcctgccctcctttatccattactaataaacagacaaaccaaaagccactaccaagtagtgaaatggatatagctaaaaatcaaatatttgaccttgaaaataagtccacgatatcacccaggataccaaataaaaagtaaagtgttaaaaatacaaatgaaaaattaagagacrtcaa

SEQ ID NO: 35774 - DNA, 627 bp, Homo sapiens
cccaacatgaatgaaaccagcatgtttcctataccaaaaagaaaataaattttcatttatattttaacagtgagattgaaacaatctaaggtctctcacccacaggccattctgcagacactcaggttacaacctgaacccaacagagtagctggcttatgtacaggctcatgattacatcatgattatgtgtttccatgccactgtgttcaggaagtaagcggtctggatataagatttctagccatccttgaggtgagtggacagaaggaactgtcaggttagagatgcagcatttcaaaaacaaacagaagggatgaaggaaggggaagtgaaggaacaggtaaagagatatgagactcagagaagagtaatgtctctgtagccaaaattaaagaaaacttcaaaaagaaagtactagatgatacattctttaacagatgactaatattcctggcamaaactttttaaaaactaagtatacatttaaatacataacattccatcctttagccttcaacctaacaacatcaattcctttaaaacagcatttttgaaaagctggtttttttttttccatctgtactcaaaatggtacatctatggtggacacaccctaagatgttc

SEQ ID NO: 35775 - DNA, 555 bp, Homo sapiens
gaattatgggcgtgagccaccaggcctggtctctattatccctttagggttggatagctgagctggaaggaagaagtgaagcaaaaggaggaggaacctgagagatgggggtgatggcaaagtctagggaatacactttaccagccagcatgtggtttgtcctgctcttttgtccctctgctacaagatcggccgtgtcctaaatggaagctgctctgtcaatctgaacatcagagtgaagatgacatggagagaggcagcagctggctcattacagacatgtataatattatgagcatgtagcttttgtagaactagaggtcttttgttgtcaccacataatctgtccartcctgacatacacacaacttgctctgagggtgtgagttctataaaggcagaccatgtcatatttgatttgtacccccggcacccagcacaatgctaagcacacaataaatactcaagtaatattggatgaatgaagcctttctagacttcatctgtacaataaagaagttggagtagatgtactacagggtatcttcaaaggct

SEQ ID NO: 35776 - DNA, 2309 bp, Homo sapiens
aaaataactattttccattctacattaagaaaaaacaaaaacattggggaaagatatttcattcaatctgtttctatgagactgaacaagtcttaatggctgaatgaagattgatggtacacaatggctctcagactgaagaagatttctttacaaagttttaataaaccaggattttctataaaayggaatgcccttcctgccactggagcctggagccattcaatttagatgggtttccaaaagactggttaacatttccctggaaatgacaggaaggaaagtcagacagtgaaggactcagcagggaggaatgactgagcaaaggaacttgctgcagtgctggacttgaactccttggctgcatgactcatttaaagcacccaaggttttgtcaagggaaggtagtggtgaatagacgggagaagagtccactggacatctgcgataaactagctgccaggaaaaattgtcaaaacatccagagtattagcaaagggtcaggggcttctgttctggacacatccagaaaaataaatagctttggatcttgttgggtgaagttggaagaaaagaggattatgctctctaatggaaggcgcaatcccggagagctttaaaacccagggaaaggagacattgaaaggcaaactctctctggagaatggagcaagaacagcctaaggtcatcttagctccttcaccaagacactgcagtggggtctgcagtaggaacatgatgcctgctcacagtgtgacctagaaaaacccggctcctctgttcatctggcccgtgtttccctctgggtcactaggagcctgcctctcccccaggtgcgttcttcttcatggaggagtcttggagacctctcctgcccttccccttcaacagccgacagcacagggccagatgctgcccacccatctttgaaaaacctggacattctcctgactgtcatcaacaagtgaaaggactcattctggagtaagggaaagaggatgagatttaggattagggaaactgggtttggatcttgacttttctttggctgagactctttcacagagtttcgataaatcaggatttattgaagtgaagtgcatgtctcactaccatgtaacctaactgagaccttctggctgacccagcaaattccttctcatctgccagtgggctacagccactgtctttgtccctgtgattcttttgtggatccctttcaaaaccttattttgtgacccgcttgctgcctgatgatcacatttggtaatatccttctccttaggagcaactttgacccctaacgacgtggcaaaccttgtcctatgcattcaataagacagacctgttagataactacttcataaatctaaatgttgaacaggagacacatcgtttggggtagcatataagaagcaggctagagttgctacttaaaatcaaatatcaaattctaagcagttgccagggattggcgtgctggataaaatgtggattcttggcaagcagaattaggctctcttcttgtagcagatgcctctcatgtcccacatcacgttccattggcccatctctgatttcatctctagtttcagtgagcagttctgggtaagcttgacaatgttccacctcaagcgcatgcctgggccttctctgatgtcatgtagcccacttgtattagtccattcttgcattgctataaagaaatacctgagactgggtaatttataaagaaaaaaggtttaattgctcatggttctgcaggctgtacaggaagcaagatgctggcatctgcttggcttctggggagccctcaggaaacttataatcatggtggaaggcaaagcagggagccagcacttcacatggctgggagcaggggcaagacagagagagaggggcagtgctacacagttttaaacaatcagatcttgtgagaactcaccgtagtgagaacagcaccaagggagatggtgctaaaccatttgtgagaaagcacccgatgatccagtcacctctcacagcccccacctttaacattggggattacaattcaacatgagatttgtgtggggacatagatccaaaccatatcacgctcaaccagcatgaaaacagcctggcagtgaggagaggccagtgctcctaggaccagctctcaaaggaagtggacgcctgaaaataaatgctccagaagccctttgctcagatgggctattctgggagctctcagaatcgggaggttttggcagaatcgatctgttcccagttgtggcctttcattaccctgtgtggaagggagaataat

SEQ ID NO: 35777 - DNA, 2309 bp, Homo sapiens
aaaataactattttccattctacattaagaaaaaacaaaaacattggggaaagatatttcattcaatctgtttctatgagactgaacaagtcttaatggctgaatgaagattgatggtacacaatggctctcagactgaagaagatttctttacaaagttttaataaaccaggattttctataaaatggaatgcccttcctgccaytggagcctggagccattcaatttagatgggtttccaaaagactggttaacatttccctggaaatgacaggaaggaaagtcagacagtgaaggactcagcagggaggaatgactgagcaaaggaacttgctgcagtgctggacttgaactccttggctgcatgactcatttaaagcacccaaggttttgtcaagggaaggtagtggtgaatagacgggagaagagtccactggacatctgcgataaactagctgccaggaaaaattgtcaaaacatccagagtattagcaaagggtcaggggcttctgttctggacacatccagaaaaataaatagctttggatcttgttgggtgaagttggaagaaaagaggattatgctctctaatggaaggcgcaatcccggagagctttaaaacccagggaaaggagacattgaaaggcaaactctctctggagaatggagcaagaacagcctaaggtcatcttagctccttcaccaagacactgcagtggggtctgcagtaggaacatgatgcctgctcacagtgtgacctagaaaaacccggctcctctgttcatctggcccgtgtttccctctgggtcactaggagcctgcctctcccccaggtgcgttcttcttcatggaggagtcttggagacctctcctgcccttccccttcaacagccgacagcacagggccagatgctgcccacccatctttgaaaaacctggacattctcctgactgtcatcaacaagtgaaaggactcattctggagtaagggaaagaggatgagatttaggattagggaaactgggtttggatcttgacttttctttggctgagactctttcacagagtttcgataaatcaggatttattgaagtgaagtgcatgtctcactaccatgtaacctaactgagaccttctggctgacccagcaaattccttctcatctgccagtgggctacagccactgtctttgtccctgtgattcttttgtggatccctttcaaaaccttattttgtgacccgcttgctgcctgatgatcacatttggtaatatccttctccttaggagcaactttgacccctaacgacgtggcaaaccttgtcctatgcattcaataagacagacctgttagataactacttcataaatctaaatgttgaacaggagacacatcgtttggggtagcatataagaagcaggctagagttgctacttaaaatcaaatatcaaattctaagcagttgccagggattggcgtgctggataaaatgtggattcttggcaagcagaattaggctctcttcttgtagcagatgcctctcatgtcccacatcacgttccattggcccatctctgatttcatctctagtttcagtgagcagttctgggtaagcttgacaatgttccacctcaagcgcatgcctgggccttctctgatgtcatgtagcccacttgtattagtccattcttgcattgctataaagaaatacctgagactgggtaatttataaagaaaaaaggtttaattgctcatggttctgcaggctgtacaggaagcaagatgctggcatctgcttggcttctggggagccctcaggaaacttataatcatggtggaaggcaaagcagggagccagcacttcacatggctgggagcaggggcaagacagagagagaggggcagtgctacacagttttaaacaatcagatcttgtgagaactcaccgtagtgagaacagcaccaagggagatggtgctaaaccatttgtgagaaagcacccgatgatccagtcacctctcacagcccccacctttaacattggggattacaattcaacatgagatttgtgtggggacatagatccaaaccatatcacgctcaaccagcatgaaaacagcctggcagtgaggagaggccagtgctcctaggaccagctctcaaaggaagtggacgcctgaaaataaatgctccagaagccctttgctcagatgggctattctgggagctctcagaatcgggaggttttggcagaatcgatctgttcccagttgtggcctttcattaccctgtgtggaagggagaataat

SEQ ID NO: 35778 - DNA, 555 bp, Homo sapiens
  misc_feature (1)...(555): n = A,T,C or G
ctgtattcragttatattccaagatttgtctaaaactttcaggttccacgcccaagactagactactcccagggctaggctatcagagaattattagattctctacttcatcctcagctaccactaatgaaaaagacaacggtgcatggaacacggctctaagctccctgaccctgcagcagactgcagccaagctctgcagccctgagttcctgaggacagggacatgcatgtgttgcattaagaaaaataattataagaggcaatagactcccatttggaaacccagagaaaataaaaccannnnnnnnnnnnnnnnnnnnnnnnnnnnnnnnnnnnnnnnnnnnnnnnnnnnnnnnnnnnnnnnnnnnnnnnnnnnnnnnnnnnnnnnnnnnnnnnnnnntttattttcaactacttctacttgattatcaagggtcacctgttctattgtgcctttcccagacatccacttgttcaggtgaaacaaacccttctcctctatgccttcaccatcccttaaacacacatgaattgtgcccctctaaaaggtta

SEQ ID NO: 35779 - DNA, 555 bp, Homo sapiens
  misc_feature (1)...(555): n = A,T,C or G
ctgtattcgagttatattccaagatttgtctaaaactttcaggttccacgcccaagactagactactcccagggctaggctatcagagaattattagattctctacttcatcctcagctaccactaatgaaaaagacaasggtgcatggaacacggctctaagctccctgaccctgcagcagactgcagccaagctctgcagccctgagttcctgaggacagggacatgcatgtgttgcattaagaaaaataattataagaggcaatagactcccatttggaaacccagagaaaataaaaccannnnnnnnnnnnnnnnnnnnnnnnnnnnnnnnnnnnnnnnnnnnnnnnnnnnnnnnnnnnnnnnnnnnnnnnnnnnnnnnnnnnnnnnnnnnnnnnnnnntttattttcaactacttctacttgattatcaagggtcacctgttctattgtgcctttcccagacatccacttgttcaggtgaaacaaacccttctcctctatgccttcaccatcccttaaacacacatgaattgtgcccctctaaaaggtta

SEQ ID NO: 35780 - DNA, 992 bp, Homo sapiens
ttgttaagaggcaaaagcaatatatatatattatacacattccccatgtatgtatctgcatatagaaatcttggaaggatacgcaagaaactgataaaagtaactacctatctgttggataatatataattcatcacctaaactgggacacttttgaaaatgaaagagggtgtgattgatcattcactggaacaaagaaggtaaaccggaactgctctggacaaactagttcattccagctaatggaggtggggtgagggagggagtataggggacccagcaggggtaagaatgaaatttttcaatgtatacatttttatagtgccttaattyccaaaccatgtgtatgtatcaaactatttttacatttaataatcttttaatggaaaggaaaaggcaaaagaatttagccttccaacttgcttagacaaggaagctcatttgcgggcaccactgaatagccaccctgaagagaacccctagatatgaaataaaatcactgctcgtcgcacagccctttggcagcacacaagaaaacagcctcaagaagagagagccgtgcatggcctaaaaaggctgggactctgcacggccggctgagacggggaacatcaggggaatataaacattgtaagacagacgtaaagcagttcaggttttacacaatcatggcaacaaagtgagattgattcagggctgaattaagctctttatattgtttctacttaaaaaggaaatgtattgactacagtcctcctcacagatttatctttcctgacatcaagcacattcataacctattttgaattccaaggaacaatgccggggtttaggaaagtgaataccagtgagttccaccaggccattttagaggctgggcagaagcttctcttaacttctaattgctcaggaagtaggcacaatgttttttttggttttttgggggttttttttaatcagtcataacctcaagttagaaaaatgcctgtccg

SEQ ID NO: 35781 - DNA, 992 bp, Homo sapiens
ttgttaagaggcaaaagcaatatatatatattatacacattccccatgtatgtatctgcatatagaaatcttggaaggatacgcaagaaactgataaaagtaactacctatctgttggataatatataattcatcacctaaactgggacacttttgaaaatgaaagagggtgtgattgatcattcactggaacaaagaaggtaaaccggaactgctctggacaaactagttcattccagctaatggaggtggggtgagggagggagtataggggacccagcaggggtaagaatgaaatttttcaatgtatacatttttatagtgccttaatttccaaaccatgtgtatgtatcaaactatttttacatttaataatcttttaatggaaaggaaaaggcaaaagaatttagccttccaacttgcttagacaaggaagctcatttgcgggcaccactgaatagccaccctgaagagaacccctagatatgaaataaaatcactgctcgtcgcacagccctttggcagcacacaagaaaacagcctcaagaagagagagccgtrcatggcctaaaaaggctgggactctgcacggccggctgagacggggaacatcaggggaatataaacattgtaagacagacgtaaagcagttcaggttttacacaatcatggcaacaaagtgagattgattcagggctgaattaagctctttatattgtttctacttaaaaaggaaatgtattgactacagtcctcctcacagatttatctttcctgacatcaagcacattcataacctattttgaattccaaggaacaatgccggggtttaggaaagtgaataccagtgagttccaccaggccattttagaggctgggcagaagcttctcttaacttctaattgctcaggaagtaggcacaatgttttttttggttttttgggggttttttttaatcagtcataacctcaagttagaaaaatgcctgtccg

SEQ ID NO: 35782 - DNA, 992 bp, Homo sapiens
ttgttaagaggcaaaagcaatatatatatattatacacattccccatgtatgtatctgcatatagaaatcttggaaggatacgcaagaaactgataaaagtaactacctatctgttggataatatataattcatcacctaaactgggacacttttgaaaatgaaagagggtgtgattgatcattcactggaacaaagaaggtaaaccggaactgctctggacaaactagttcattccagctaatggaggtggggtgagggagggagtataggggacccagcaggggtaagaatgaaatttttcaatgtatacatttttatagtgccttaatttccaaaccatgtgtatgtatcaaactatttttacatttaataatcttttaatggaaaggaaaaggcaaaagaatttagccttccaacttgcttagacaaggaagctcatttgcgggcaccactgaatagccaccctgaagagaacccctagatatgaaataaaatcactgctcgtcgcacagccctttggcagcacacaagaaaacagcctcaagaagagagagccgtgcatggcctaaaaaggctgggactctgcacggccggctgagacggggaacatcaggggaatataaacattgtaagacagacgtaaagcagtkcaggttttacacaatcatggcaacaaagtgagattgattcagggctgaattaagctctttatattgtttctacttaaaaaggaaatgtattgactacagtcctcctcacagatttatctttcctgacatcaagcacattcataacctattttgaattccaaggaacaatgccggggtttaggaaagtgaataccagtgagttccaccaggccattttagaggctgggcagaagcttctcttaacttctaattgctcaggaagtaggcacaatgttttttttggttttttgggggttttttttaatcagtcataacctcaagttagaaaaatgcctgtccg

SEQ ID NO: 35783 - DNA, 992 bp, Homo sapiens
ttgttaagaggcaaaagcaatatatatatattatacacattccccatgtatgtatctgcatatagaaatcttggaaggatacgcaagaaactgataaaagtaactacctatctgttggataatatataattcatcacctaaactgggacacttttgaaaatgaaagagggtgtgattgatcattcactggaacaaagaaggtaaaccggaactgctctggacaaactagttcattccagctaatggaggtggggtgagggagggagtataggggacccagcaggggtaagaatgaaatttttcaatgtatacatttttatagtgccttaatttccaaaccatgtgtatgtatcaaactatttttacatttaataatcttttaatggaaaggaaaaggcaaaagaatttagccttccaacttgcttagacaaggaagctcatttgcgggcaccactgaatagccaccctgaagagaacccctagatatgaaataaaatcactgctcgtcgcacagccctttggcagcacacaagaaaacagcctcaagaagagagagccgtgcatggcctaaaaaggctgggactctgcacggccggctgagacggggaacatcaggggaatataaacattgtaagacagacgtaaagcagttcaggttttacacaatcatggcaacaaagtgagattgattcagggctgaattaagctctttatattgtttctacttaaaaaggaaatgtattgactacagtcctcctcacagatttatctttcctgacatcaagcacattcataacctattttgaattccaaggaacaatgccggggtttaggaaagtgaataccagtgagttccaccaggccattttagaggctgggcagaagcttctcttaacttctaattgctcaggaagtaggcacaatgttttttttggttttttkggggttttttttaatcagtcataacctcaagttagaaaaatgcctgtccg

SEQ ID NO: 35784 - DNA, 591 bp, Homo sapiens
gcctggtcaacatggtgaaaccctgcctctattaaaaacaaaaaaagtagccgggagtgttggcaggcgcctgtagtcccagctactcaggaggctgaggcaggagaatcgcttgaacccaggaggcggaggctacagtgagccaagatcatgccactgtactccagcctgggtggcagagtgaaactccatcttgaaaaaaaaaaaaaagggagagaaacaaaggcccaagcccagaagactcagcactgtatatcttacagcagcactggaaagactcccttacatcaaygtaccaggcaaacagtcccattttcctccctgtcaatttgttataagcaattacaacccctggccataattccatgctcacaggaaacagtcacccaacactggatctgccccaactgaagataaattctaagtggagaaaagcaatatgcaaatgaattatctttttacacatcagacatactgctcatatgctcagccaccaggttccacacagactccaggcaataagagaaactgaatttcacaaggtatgtcctagtggcctttcatactaggaaaccgaggtcagcccacagg

SEQ ID NO: 35785 - DNA, 591 bp, Homo sapiens
gcctggtcaacatggtgaaaccctgcctctattaaaaacaaaaaaagtagccgggagtgttggcaggcgcctgtagtcccagctactcaggaggctgaggcaggagaatcgcttgaacccaggaggcggaggctacagtgagccaagatcatgccactgtactccagcctgggtggcagagtgaaactccatcttgaaaaaaaaaaaaaagggagagaaacaaaggcccaagcccagaagactcagcactgtatatcttacagcagcactggaaagactcccttacatcaacgtaccaggcaaacagtcmcattttcctccctgtcaatttgttataagcaattacaacccctggccataattccatgctcacaggaaacagtcacccaacactggatctgccccaactgaagataaattctaagtggagaaaagcaatatgcaaatgaattatctttttacacatcagacatactgctcatatgctcagccaccaggttccacacagactccaggcaataagagaaactgaatttcacaaggtatgtcctagtggcctttcatactaggaaaccgaggtcagcccacagg

SEQ ID NO: 35786 - DNA, 563 bp, Homo sapiens
aaattacaataacatttataaagccaaacattttataatttcaaaatgtggcttctctttaaaaataacaggatctggcaacacagggcctcaaggataacaactggatggagccgggtagtagctgctgccctgtaaatggccaaggctctccgattcatctccctaacgccaaagctgagtgttggctgccattgatcccagttgcatgcactggtttttctcttacaaaagataaatatttatctatcaaaaacaggaaaatgaaaggtcaagagtcttatgtttccagaaaaaaggaagaccacaacatttttgtgagtgcggagaacattcctaacagtttggtcttcaatctcttacccttcatctcgtgctacctgcctgacctctgaagcatttgaggtttagactcccrgactctcttttggaccaaatttcttactatgtcagcaaataaactttaaaatcaaaccactggaaaagaacacagcttaagtacacaacatctcattctcccctaagtatgttggttctttcatctcacctttcctgagaacaca

SEQ ID NO: 35787 - DNA, 472 bp, Homo sapiens
caagaaggctggccatgctggtttccacctgccaactctrtgatgttaaacgagttctcaatctctgatgttcagtttcctcccctgtacacaggcataacatccacaccctgggctgctgctgagcgcacataaaagaagagagctggaagcactaaccacgcatcttctcccagctggtactcaacacctgcacactgccggcccttcttccttccccgccttccttaaggacacaaaatttgagtctagatcatctggcttcaaatttactaaccacaacgtccagttctgcacagtggcagcaagtaggacagtggttctccatctacagggtaaaaggaatcacctgggaagcccaaatctcccagagattcagactctgtccacctggtatgggtccaggtatacacatttcccacaagcatctcagaacatcctgatgcctggggtctagaagtcactttgagaa

SEQ ID NO: 35788 - DNA, 575 bp, Homo sapiens
gaagctgagaggatatgatactgaatgattatttagcactaaaggtttatcttcaaagaggtcttgaaataagaatatgtaattaggctgggcacagtggctcacaactgtagtcctagcacttttggaggccaaggcaggtggatcacttgagctcaggagttgaagaccagactgggcaatatggcaaaaccttgtatttttgtagaaaaagtataaaaattagccaggtatggtggtgtgtgcctgtagtcccagctactcagaaagctgaggtggaaaaattacctgagcctagtggggtcaaggctgcagtgagctgtgatcaggccaccgcactccagcctgggtaacagaaagagtaagacaaagaaaaggaaaaggaaaaggaaaggaaggaagaagaatatataattagtttctacttgagtmttaccggaatgcattttactgaatttcacttatgcaaacatacactggcttacaaaaatgtatgcaacatctttatgaggcagatactttgttatgaaacacaagaggcaaacaatgtagaagattcctctttctgttaagtt

SEQ ID NO: 35789 - DNA, 669 bp, Homo sapiens
agatgttaagtctgctaggaaatctgtagaccacagggaagaaaatgcaaaaagaaaataaagtcctcaaatgcagctaaaaattgctagcttctatttttaaaataaagcaacataatactttttcttccaatttatctaccttcaaaagtcccaacaaatgttgttcgtagtactgaaatctatcatttccctttattttttccattcttcaaattgagctattaagtcaaatgctaattacatgaaacattgttctctgttaataaacgttttgagaagttctgccgcctcaaataaacaamtaaaacattaagtcagtgtggcatttcagttgaatagggaaaaactagattacttaataaatggtacagcaatatttggctaaccatttgggaaaaaataaaattagatgcctacttcacaaattaaatttcagatttgttaaagatttatatataattaaattaaagacagatccttaaaattcaataaaattttaaaaattgcaaaataaaatatgtggctatttagtgtatttgggtattgggaagtcttttgactagttataaacactaagatataatctacaaagagataaatcaacttacaaaaaacttaaaacttcatggatatatagaaagcagcactataacatggaaaaaggaa

SEQ ID NO: 35790 - DNA, 669 bp, Homo sapiens
agatgttaagtctgctaggaaatctgtagaccacagggaagaaaatgcaaaaagaaaataaagtcctcaaatgcagctaaaaattgctagcttctatttttaaaataaagcaacataatactttttcttccaatttatctaccttcaaaagtcccaacaaatgttgttcgtagtactgaaatctatcatttccctttattttttccattcttcaaattgagctattaagtcaaatgctaattacatgaaacattgttctctgttaataaacgttttgagaagttctgccgcctcaaataaacaactaaaacattaagtcagtgtggcatttcagttgaatagggaaaaactagattacttaataaatggtacagcaatatttggctaaccatttgggaaaaaataaaattagatgcctacttcacaaattaaatttcagatttgttaaagatttatatataattaaattaaagacagatccttaaaattcaataaaatttwaaaaattgcaaaataaaatatgtggctatttagtgtatttgggtattgggaagtcttttgactagttataaacactaagatataatctacaaagagataaatcaacttacaaaaaacttaaaacttcatggatatatagaaagcagcactataacatggaaaaaggaa

SEQ ID NO: 35791 - DNA, 669 bp, Homo sapiens
agatgttaagtctgctaggaaatctgtagaccacagggaagaaaatgcaaaaagaaaataaagtcctcaaatgcagctaaaaattgctagcttctatttttaaaataaagcaacataatactttttcttccaatttatctaccttcaaaagtcccaacaaatgttgttcgtagtactgaaatctatcatttccctttattttttccattcttcaaattgagctattaagtcaaatgctaattacatgaaacattgttctctgttaataaacgttttgagaagttctgccgcctcaaataaacaactaaaacattaagtcagtgtggcatttcagttgaatagggaaaaactagattacttaataaatggtacagcaatatttggctaaccatttgggaaaaaataaaattagatgcctacttcacaaattaaatttcagatttgttaaagatttatatataattaaattaaagacagatccttaaaattcaataaaattttaaaaattgcaaaataaaatatgtggctatttagtgtatttgggtattgggaagtcttttgactagttataaacactaagatataatctacaaagagataaatcaacttacaaaaaacttaaaacttcatgkatatatagaaagcagcactataacatggaaaaaggaa

SEQ ID NO: 35792 - DNA, 565 bp, Homo sapiens
tctttatccaatccaccattgatggacacctaggttgattccacgtttttgctattgtgaatagtgctgtgattagcatacaagtgcatgtctcttttgtgtaaaattatttattgtcctttgggtatatacccagtcatgagattgctgggtcaaatggtagttctattttaaattctttgagaaatctccaaattgctttccacagtggctgaactagtttacattcctacraacagtatataagtattcccttttctctgcagccttgccaacatctgttattttttgactttgtaataatagccattctgattggtgtgagatggcatcttattgtggttttgatttgcatttctttgatgttgatataatcaccaaaaacgtaaacatttcagttgctattggttacatgttacgttttctgttgtttttattgttgtgtagttcctcctgagctggttcggctctgtgtccccacccaagtctctcaccttgaattgtaataatccccttgtgttcttggaggaaccccgtgggaggtaattgaatcatggggaggggg

SEQ ID NO: 35793 - DNA, 565 bp, Homo sapiens
tctttatccaatccaccattgatggacacctaggttgattccacgtttttgctattgtgaatagtgctgtgattagcatacaagtgcatgtctcttttgtgtaaaattatttattgtcctttgggtatatacccagtcatgagattgctgggtcaaatggtagttctattttaaattctttgagaaatctccaaattgctttccacagtggctgaactagtttacattcctacaaacagtatataagtattcccttttctctgcagccttgccaacatctgttattttttgactttgtaataatagccattctgattggtgtgagatggcatcttattgtggttttgatttgcatttctttgatgttgayataatcaccaaaaacgtaaacatttcagttgctattggttacatgttacgttttctgttgtttttattgttgtgtagttcctcctgagctggttcggctctgtgtccccacccaagtctctcaccttgaattgtaataatccccttgtgttcttggaggaaccccgtgggaggtaattgaatcatggggaggggg

SEQ ID NO: 35794 - DNA, 1716 bp, Homo sapiens
tgaaatttttagtttagaagaactaggttcctatccccccatctcacttccctggtataacagtactagtcaaataaattaatgtataatgtttgagaatataaacaacattattagctaatttttttgagagcttacactgtattagctctattctaagcatgtcaatcacttaatcctctcaaaaaccctatgtggcaggtactgtcataatccccaatgaacaggtaggagaaaaccaaagcttggaaaagtgaggctgcttgctcagtgttcctgattcagtgagaggcagatctgggtttgagtcacgtgggtctggtttgagggcctaagctttgaattactgtgttccaaaatagctccttaaggcacgcatcactattgcatggaccagaagacagaggttcaggtatttctacagaactgctataggaatcaaaccgtatcatgcgtgctatctgtcaagagccagttcctatttctcttaaatcccatcctcctttctcctgccatgataagatctttagggtcaaagattgtattctacttatcttgggtcctcctccagcttagcctgctatccccatcagagcaaatgataattgtgtgtctaccacaggccaggctggatcgtgatgtatttcaacgttccaaagtcctcgaagcgtttgaggctggcaactaacagttaagtaagaatcacaagaatgattcaaattagtgtgaaaactgtcatgcattatagcacattataaacccatttcctaatggaagttgcagaggggctgccatgagagagatttaagtttgaagggcttaaaagcctgattatctctcagtgatgcctcagcactggggaagtggctgcctggtgtttctctctgtgatggagacctgtgtggtgtaatgaagcagcacagagctctgagatgatgcctggggtacagacagacatcccctgtgatccttccaacagtaagtctttgttggggctgcagaaaaagtgtcccagggtagctccaaattgcatctcttctcccagggagaggaggtgagctgtgcccttctacccagcaccacacccctcaccttccctatgggatccccactaacaaggggccaccaccgatatccagtggcactgaggactgcaggagcagcatgggaggagatgctttgggagaatatgaaggacaagaggtkgcacatcactagcctttgcctgcttagaccttttgtttctagggaaaggtggaacagctcccattatcctttcagcttcatctaaatgacctccaccccacccccaccttgtcagaggacaaaggcgtggatcagatgtttgctgtgagctcctagcatccagggatctcatttcccccttaatggaaaagcagatctactcccccgataccgaataaaactccttagtctctgtgatgtccgctgccagctcagctctcccactctagatgctggataccatgaaaaaaacgatatacacacagtagatccttaatgtgcatgaagatgtcttgaaaccagagtaggagaccaggaggatgactgatacttgttgtgggcaataagtgagttgtttttagggaagggatttcaaaatttggaaactgtaagtaccttaatgcctttggaatgaactgcttagcacctatggtggctgagcaggagatgctgggatggtttacttatgaa

SEQ ID NO: 35795 - DNA, 1716 bp, Homo sapiens
tgaaatttttagtttagaagaactaggttcctatccccccatctcacttccctggtataacagtactagtcaaataaattaatgtataatgtttgagaatataaacaacattattagctaatttttttgagagcttacactgtattagctctattctaagcatgtcaatcacttaatcctctcaaaaaccctatgtggcaggtactgtcataatccccaatgaacaggtaggagaaaaccaaagcttggaaaagtgaggctgcttgctcagtgttcctgattcagtgagaggcagatctgggtttgagtcacgtgggtctggtttgagggcctaagctttgaattactgtgttccaaaatagctccttaaggcacgcatcactattgcatggaccagaagacagaggttcaggtatttctacagaactgctataggaatcaaaccgtatcatgcgtgctatctgtcaagagccagttcctatttctcttaaatcccatcctcctttctcctgccatgataagatctttagggtcaaagattgtattctacttatcttgggtcctcctccagcttagcctgctatccccatcagagcaaatgataattgtgtgtctaccacaggccaggctggatcgtgatgtatttcaacgttccaaagtcctcgaagcgtttgaggctggcaactaacagttaagtaagaatcacaagaatgattcaaattagtgtgaaaactgtcatgcattatagcacattataaacccatttcctaatggaagttgcagaggggctgccatgagagagatttaagtttgaagggcttaaaagcctgattatctctcagtgatgcctcagcactggggaagtggctgcctggtgtttctctctgtgatggagacctgtgtggtgtaatgaagcagcacagagctctgagatgatgcctggggtacagacagacatcccctgtgatccttccaacagtaagtctttgttggggctgcagaaaaagtgtcccagggtagctccaaattgcatctcttctcccagggagaggaggtgagctgtgcccttctacccagcaccacacccctcaccttccctatgggatccccactaacaaggggccaccaccgatatccagtggcactgaggactgcaggagcagcatgggaggagatgctttgggagaatatgaaggacaagaggttgcacatcactagcctttgcctgcttagaccttttgtttctagggaaaggtggaacagctcccattatcctttsagcttcatctaaatgacctccaccccacccccaccttgtcagaggacaaaggcgtggatcagatgtttgctgtgagctcctagcatccagggatctcatttcccccttaatggaaaagcagatctactcccccgataccgaataaaactccttagtctctgtgatgtccgctgccagctcagctctcccactctagatgctggataccatgaaaaaaacgatatacacacagtagatccttaatgtgcatgaagatgtcttgaaaccagagtaggagaccaggaggatgactgatacttgttgtgggcaataagtgagttgtttttagggaagggatttcaaaatttggaaactgtaagtaccttaatgcctttggaatgaactgcttagcacctatggtggctgagcaggagatgctgggatggtttacttatgaa

SEQ ID NO: 35796 - DNA, 667 bp, Homo sapiens
tgtcttgtggtctaattgtgttgttatgggtccttttgccttcatttcacgcaagtagagaaggaagtcagtatcagaaacgccactcagtacagaccaaaacttgactaccgtggttttataagtcatggagagtttattaaactctaccaaattgatagctagaaaggactctgactaggagaagcccataaacttaatggtacttactaatttatgggctattattacaacmtgagtaatctttatataaaagcagtaaagagctgtgatttagttaggacagtgcttactgtctccacttacagagatgacggttccatcaacgtctgagccacataggcccccagcagagtgctccccactgcaaaacagagtgcctttcttttcttgaagcctgtcttctacttgacgaatttatctcctggagatcagttccttattttgacaatccaagcctggcaatggggcaggaagacagcaccatgaggtatagagatgccaactggacactgatcaccttgggctctttcctcaatgcatccttttgctgaccctaaattcaagctgaatatcctccctcgcagtcttcagtttcctcatctgcaaaatggtagggctggcttagtggcttccaagatcgcttctgtgattgtagctgtgtcca

SEQ ID NO: 35797 - DNA, 1243 bp, Homo sapiens
agtgctgaacccctcagcatgtgctaatcccagtagcttaaatgggattttgcaggctgagatgcctaccagcggatctgcaggattctgaaactctctgaaaggggcttaagcctagacacccagatttcttccctgtttggtacctctcaaatttctccaaaaaaatgtcagctgaccccaaagaggcattgggccattctctctttcatctgatagctggggttttagggagtgattctctggccgccatctctgcattgagtcttcctccacgcccctccctcattgtcaaatttgcagtggtcattcctttctgctctttttgggtcttcctctcctacattacaggtggtaaatgaatgagaattgaggaaacggaaaaatgggcttattagaattatggctaaaaataggaataaatccattccaagtgaagacttgaagaaccatcttccaaatgatggacagaagctttggagcatgggtatatgccctttccgctggctcttcctggggtttttgaaatcaatggaagtgagccctgggaccccagctggctcaaatgaggctccttaagccctacctgtgtctccgaagtaggacctggctggtggaaaggccagagcttactcacaaagaagagagcctgaggaaaataaccaaaaggaattgggaatgaatccacccaagtctgcaggaaactagcccaagccatcttcccagaacttttgctggcgcacacagtcggcagtgagtgacctttcagagaagccacagggagaagacaaaatttccaaaagcagccatacccacaagtacgtgtgcttgagcctttgaaggcaccccctactgagactgcaggccaaggctatgccctgctggagtctggccgactcacagtagctctcgcatccttggcgataggatgggctgggggtgaggtgggatgcagagcagcrgaggctcggagatgtgactcccagattattcaggtacagataaaggtgtgcttttcaataataggaacctgctggaggagaaggaggagaaagaagaggaagaagagaacaatggcagcacacacacacacgcacacacgcgcgcgcacactcatgcatttccaaatagggctttacaatagcctttgaccaattagagtgttactaaatagccttcgatttggataacttgaagaaataagcaacaaataatttctgaaaatggcttttttatgtacagt

SEQ ID NO: 35798 - DNA, 1243 bp, Homo sapiens
agtgctgaacccctcagcatgtgctaatcccagtagcttaaatgggattttgcaggctgagatgcctaccagcggatctgcaggattctgaaactctctgaaaggggcttaagcctagacacccagatttcttccctgtttggtacctctcaaatttctccaaaaaaatgtcagctgaccccaaagaggcattgggccattctctctttcatctgatagctggggttttagggagtgattctctggccgccatctctgcattgagtcttcctccacgcccctccctcattgtcaaatttgcagtggtcattcctttctgctctttttgggtcttcctctcctacattacaggtggtaaatgaatgagaattgaggaaacggaaaaatgggcttattagaattatggctaaaaataggaataaatccattccaagtgaagacttgaagaaccatcttccaaatgatggacagaagctttggagcatgggtatatgccctttccgctggctcttcctggggtttttgaaatcaatggaagtgagccctgggaccccagctggctcaaatgaggctccttaagccctacctgtgtctccgaagtaggacctggctggtggaaaggccagagcttactcacaaagaagagagcctgaggaaaataaccaaaaggaattgggaatgaatccacccaagtctgcaggaaactagcccaagccatcttcccagaacttttgctggcgcacacagtcggcagtgagtgacctttcagagaagccacagggagaagacaaaatttccaaaagcagccatacccacaagtacgtgtgcttgagcctttgaaggcaccccctactgagactgcaggccaaggctatgccctgctggagtctggccgactcacagtagctctcgcatccttggcgataggatgggctgggggtgaggtgggatgcagagcagcagaggctcggagatgtgactcccagattattcaggtacagataaaggtgtgcttttcaataataggaacctgctggaggagaaggaggagaaagaagaggaagaagagaacaatggcagcacacacacacacgcacacacgcgcgcgcacacwcatgcatttccaaatagggctttacaatagcctttgaccaattagagtgttactaaatagccttcgatttggataacttgaagaaataagcaacaaataatttctgaaaatggcttttttatgtacagt

SEQ ID NO: 35799 - DNA, 1086 bp, Homo sapiens
cttgagaattgatagcataccttctctaaaatgggaaaataaatgacctcctgttttgcaaggctgtgatgtcattcattgcttcgcagctccagcaagctggaggatcctgcaactccggctaccagccccattcgccatcaaatccacttcgtattttctgttcttttgagaggtgctctctttcctcggtgattgttgctgtaattacacaaatgatctgctccactgtcacttctagtcaaaggtgtcatctaaaattaaaaattcatgtaaaatctagagatgcaacttttaagcagacagtagagacctgatctgattttacaatgtttttcttaaccccttacgtgcctcatggctatgatgtgaggtggtgggacagctcacgggagctgggagattttgcagaacccaccggctgagaagtgtctggatcactctgctggggctgccgttacacagcgccacagatgggggtatggggtagcttcagcagcagaaatgttttgccccacaattctgtagcctggaagcctgaggtcaagatgccggtagaatcggtttctttggagacctctctcctcagttggtggatggttgccttctccgtgggtcttcacatgggctctcctctacgtgtgtctgtccaaattactctgttcctaaggaccccagtcatattgaattagggcccactctagtgacctcattttaccttaattacctctttaaagactctatctcctagtggggtgtggtggccggcgcctgtagtcccagctactggggaagctgaggcaggagaaggcgtgaacccgggaggcagaacttgcagtgagccaaggtcatgccactgcactccaacctgggggacggagtgagactccgtcaaaaaaaaaaaaaaaaagactctatctccaaatacagtcaccatctgagatcmtagggacctcaacacaggaatttagaggggcaccatccagcccctaacaacgtcacactaccctccaaggtgaaccagagtcccagcgggaaggtgtgacaggggaaatccaggtttctgagggagactctgtttccagt

SEQ ID NO: 35800 - DNA, 625 bp, Homo sapiens
cctgggcctaaatataaggcaagctcagagtggacccagtggttggtcatgagatataatgaaataatccattcacaatttgcatttttatgaaatcccttttcccagaagggagatttgaaaaaatgttaatccttagataagaaatctggggctctagaagtgatggtagccacagcaaggtattcagaatctacccttttctgttctcatctgacttgcttcccaaggtgtcctgacagtgaaatgagaaaggggtacgaggttggcaacgagacacatcttgtgaatggggtgactgctttcatatgtatcattacttcatttgatcagcatacaaccccatgaagcaggtaggctaattgctgttagcatttccattttttggattaggaagctcagactcagagatgttaagccatttgtctaaggtttcaccttgcctgaaaaaaggattgcctgccatctgactcaagcctacatcctttctccagggacatactgctagtggggtgggcaggaaaggagtttagagacacctagattggagggataaagtcagcactgcttatatttggcatygtcttttccctggcactgccactgtcaccaccatcccccttct

SEQ ID NO: 35801 - DNA, 891 bp, Homo sapiens
tggcttagttttacctgcttagaatttaacctgttacttttaggtcactgccccaactgaactgctcagactctctcctgagatagcatacagataagagttgaagacataaccttatacagccctcacatttctcttagcatttctgtggtggtctgttagctctccttttaccaacttttctacttctgccaatacctctaagatagcctcaaagacagactgaactctggactacccgccaagggcagagaccaagtctatcttgtccacatttctatcagtatatagcatagtacccggtacataataggtactccataaatgtttgtttgtggctctgtttgctatagagttcaggaagccttttctgggggagatttttttaaagccctggacaaggttagaaggaaatcatgagccatgctcctttctacaaagcaattagggaatgtacatacagataaaaatagtatacaactaatttatacagattcaaacattcatctgagaaaagcctgccaaaactggggatgattcttcctaagatttatccagaagaaatctaaattaggaaaattgcccttctatggagatctttccagtgacagcaactgaactgcaaaaaagactgtcaaatcagacttaacagtcatcacagatcttacctggtatcaagctttataaataatttcaatgacacacagggcccaggacatgcctagtgccttctcaggcccttccttcccacatcacacacgccatcgagcttagaataaaatgtgaggtcttcaagtgagattccatgaggtgatcttatatagtaggggagtgtttcatttatgaaacatctccattttaaacttgaaattaygtgacattttataggga

SEQ ID NO: 35802 - DNA, 859 bp, Homo sapiens
gggtgcggtggctcacacctgtaatcctagcactttgggaggctgaggcaggtgattacctcaggtcaggagttagagaccagcctggccaacatggtgaaatcctgtctctactaaaaatacaaaaattagttgggcatggtggcgtacgcctgttgtcctagctcctcaggaggctgaggcaggaaaatcatttgaacccgggtggcggaggttgcagtgagctgagatggcgccactgcactccagcctgggtgacagagtaagactctgtctcaaaaaaaaaaaaaggtattcctagagtatgtttcgctcagactaatacagcctgatgaaattccagtgccaaataaggaaaaagatcgtgtgctcatggaggaatattactgcctggcaagaagcttcctttaataccacttaaaaagattagcaggaggaagaaaatcacsattacaataaaagaattatcactaaaatttctcagtgcaattcctttctttgatgcctaaacacaggaccttctattctagcaagatggtagttaaggcatatgtatccgaagggcaggagatccctaagtgggtacagaatatcttacaatcatcttcccaaaagtagattaaaagtggactggtgcatttttcagatctaaatattctcctttctctttgccctcacttctgctcttttaaatgttggaaaaaaaaatgaacaaggcaacaaagaaaattttaaaatgctcatggaaaaactcatcttctagaagggaatcttagtgggagggacaattcctcttagagagttatcagtgaagctgtgaaaatatgaggccctggaagccagaggtgtcacccaacaa

SEQ ID NO: 35803 - DNA, 859 bp, Homo sapiens
gggtgcggtggctcacacctgtaatcctagcactttgggaggctgaggcaggtgattacctcaggtcaggagttagagaccagcctggccaacatggtgaaatcctgtctctactaaaaatacaaaaattagttgggcatggtggcgtacgcctgttgtcctagctcctcaggaggctgaggcaggaaaatcatttgaacccgggtggcggaggttgcagtgagctgagatggcgccactgcactccagcctgggtgacagagtaagactctgtctcaaaaaaaaaaaaaggtattcctagagtatgtttcgctcagactaatacagcctgatgaaattccagtgccaaataaggaaaaagatcgtgtgctcatggaggaatattactgcctggcaagaagcttcctttaataccacttaaaaagattagcaggaggaagaaaatcaccattacaataaaagaattatcactaaaatttctcagtgcaattcctttctttgatgcctaaacacaggaccttctattctagcaagatggtagttaaggcatrtgtatccgaagggcaggagatccctaagtgggtacagaatatcttacaatcatcttcccaaaagtagattaaaagtggactggtgcatttttcagatctaaatattctcctttctctttgccctcacttctgctcttttaaatgttggaaaaaaaaatgaacaaggcaacaaagaaaattttaaaatgctcatggaaaaactcatcttctagaagggaatcttagtgggagggacaattcctcttagagagttatcagtgaagctgtgaaaatatgaggccctggaagccagaggtgtcacccaacaa

SEQ ID NO: 35804 - DNA, 859 bp, Homo sapiens
gggtgcggtggctcacacctgtaatcctagcactttgggaggctgaggcaggtgattacctcaggtcaggagttagagaccagcctggccaacatggtgaaatcctgtctctactaaaaatacaaaaattagttgggcatggtggcgtacgcctgttgtcctagctcctcaggaggctgaggcaggaaaatcatttgaacccgggtggcggaggttgcagtgagctgagatggcgccactgcactccagcctgggtgacagagtaagactctgtctcaaaaaaaaaaaaaggtattcctagagtatgtttcgctcagactaatacagcctgatgaaattccagtgccaaataaggaaaaagatcgtgtgctcatggaggaatattactgcctggcaagaagcttcctttaataccacttaaaaagattagcaggaggaagaaaatcaccattacaataaaagaattatcactaaaatttctcagtgcaattcctttctttgatgcctaaacacaggaccttctattctagcaagatggtagttaaggcatatgtatccgaagggcaggagatccctaagtgggtacagaatatcttacaatcatcttcccaaaagtagattaaaagtggactggtgcatttttcagatctaaatattctcctttctcttygccctcacttctgctcttttaaatgttggaaaaaaaaatgaacaaggcaacaaagaaaattttaaaatgctcatggaaaaactcatcttctagaagggaatcttagtgggagggacaattcctcttagagagttatcagtgaagctgtgaaaatatgaggccctggaagccagaggtgtcacccaacaa

SEQ ID NO: 35805 - DNA, 555 bp, Homo sapiens
aatgatgccagtagccacaggctgggtcattgcttttagtgaggcccagcaggcacaacacaactttcttaattaccattactataacctttaccacaccttgtttttcttggggactctcttggtcaggtaatctgggttagatccaacccaatttataaaatttgaggcttttcccactgtaggtaagattacatgctattttaagaaacctcttgggggatgaggaaatatgttgttttttttttaaatattatactgtatatcgattccaaatgctagctgaactttyaaagaaaaacatgagtttccctaaaaatagcctgtctacaatgcctcttagacttgggcactttatacacacagtataacttgcttagcctgcagttagaaataaaataatatttagtgaacacatttaaaaggttaagaaaagctaaatgtaaatgtccccaaaacattaaacattaattaacgtgagctgacttgttatttaaaagttatattctcaaaaaaaaaatctcaaatgagttcctaaatccagatttaaaaacc

SEQ ID NO: 35806 - DNA, 328 bp, Homo sapiens
ctttttaactctgaaacaattgttctccttcttcttcttcctgtttttttttttgktttttttttttttttagacagggccttgctctatcaccctggctggctggagtggtgcagtagcaaactcactctaagcagtaaggcacagtggctcacgcctgtaatcccagcactttgggaagatgaggcaggtggattgtttgagtttaggagtttaagaccagcctgggtaacatggcgaaaccctgtctctacaaaagaaaaaagaatacaaaatattagccaggcatggtggtatgcacctgtagtcccagctactcaggaggctg

SEQ ID NO: 35807 - DNA, 1194 bp, Homo sapiens
cccacacaatgaggtaaaggggcctactgagatgctaacacaatgccattcaccaacggtggaactaaaggagcactgtcacaccacctctggggattcagggttgtgggcatcctcacatgggcaycaccatattcccctgaaggcaacatgcctggtctagccatgggccctgcacagagcttgtttttgtgttggtgcccagagaaaccaatcagatcccacactctcattcatgtgctttctcccacaagggactgagcatggtgggctgagtagaggcaacacccttcccatgagctcagcaaaggggctgagaaaattcctgaatcatctgggagctcactcaggatttgtcagaagggtaattgaatgtggaccagacacttcacttttttttccaaaacttcttgtcctcagactttcctctgaatgcagatgaagtactgaacctctgactagccagttgaaagtgaatggaacagttacagaggacaggatgtgaccctaccaactctctcttgggttaaaggaatgttggctttgtttcccttcgtggaggtctagccatcacatgggacaggaatgaggtcctagggcaactgaatgcatctggttgaggccacttctcaatgttgctggaaggctcctagacttcactccatcccaatcacccataggtcatcagccaagaaccccagatttgtatggtatttttttttccttatttcatggtttgaaatggttcctatgtcttctttcataatgttaaaaatattgctgcaaactgaagaaatattactgggtagaatgagcatttggcccagccatcagatttgtgattcagaatctattcttagaggcaaggagggcacagtgatcaagagtctttcccctgttgaagaaacccatttgcaaagagcaagaggcttttcaccccaggctccttcccgcccctgcacttaaactgttttactgttttttttttctttccttttctctaccatgtcaggagttcacatagccctgcaaatacagggaacttttctatacaagagctttttttttttttttgaaaagcatcttactaggccatacaccaattcatgggacttcctaacctaaagagtccatgcaccctcctgagacacctttttgtcccgaactcaattgcaagcgtctgcttgaagccct

SEQ ID NO: 35808 - DNA, 2003 bp, Homo sapiens
  misc_feature (1)...(2003): n = A,T,C or G
catgcattgggcaaagatggttatcccagaatccccaagtttatatctcttccttctaagggataccagatctcttaattccaattccaaattactgagagaaggaatatatttaagaccattttaggtcaagtgtctacccctaattcagtcagctatggccgggggcaggtcacacaacacaactttggcttctgagtacctttctttagaaggcggtggaggaaagggtgtttcctaagtctgatattttattgccaagagcatgaaaataccccatccagcagatgaagcaaattcccatgctcatcctgcagaatttctgggtaactggtggcatctcctacggcgatatgagaatgctggctgatggagaggacagcgataaatctcggcagcttgacagtatcactgcctccttccctctcccacatccctggaaaaatttaaagtctgcagattaccagatgggaccccaagttaaatgcctgcatactccctgggtgtgtatagctgcaccatttggtgcaagaatgactctagcaaaatagtttcagtgaggtttcttgtgccaagccctattttactactgttggcagaaaagtaatgtgatgacttacttcatagagaggcattgagattagagtctgggctacatatgttctttgtcctgaactttggtttcttttaaatcattaaaacctaatttgagggaaaaacatccttgattttcaagaaatgaaaagataaagtcaaggaaaattataagcatcctctctttctatatttacctctagccttttcagaggaaggagccctctgataaagttgcgtgtggaatgagatgaacattccccaacattctcatcaccagtgtttgtatctttttaaaaatcacgtagcgccttattgccaactgagttttagagagcaggagtctcactgtgaagtcacactggagaggctcttgggagattcttttgaacacagaaaaaaaaatttatgtgtttctccagaatgtctccagttttccatcagtgcttttggtttttgttcagagaacttgttagtacattctgtattttcttttgaatgaattcaaagaagagcagacattactaaatcatttcattgattgaaatgtgcccagaaaaggcctgtggccaaagagccagtgaccgtgacatctttgaggagaagtaatgtctgtaaagataatacgtatgtaagaggaatttcaaccattaaacagtgtcttcctacatgaataatgaatgcataaggatacgattatggaactacttttgatgcaataattatggcagaataaatggtttcttcctcgtgctgtggaagtgaataaagagttgtcttctttcccccttcnccaagaagtcttcatgttctgcgtgcttgttccctagcctaggaatggttttttgtannnnnnnnnnnnnnnnnnnnnnnnnnnnnnnnnnnnnnnnnnnnnnnnnnnnnnnnnnnnnnnnnnnnnnnnnnnnnnnnnnnnnnnnnnnnnnnnnnnnttaggggactgacaatcaaggtactgtgaaagattacagataatgaaatgatgctcagagagcctaagtgtctgagatttccaagatgtcaacccaagcagttgaactccagagtgttcttaaccgagatatccatggcctctattgcacagcaatccaagtaaccatgacatgataccttatatcaatgtcacatggaaaaccaaacagaggtccactacctaccatagcaaaggctagaggaaacccactggctggattcagggtggtgaagggagagtaattaggtcagggaagggagaggcgggcacaacaatagacacactacatctctgcccagctcttgtctcattctaacactcgaaagagttcaatgaaagaggcaataacgaacgcaagcaacgatgtgaagaaaggggaacccytgtcgtacattgttggtgggaatgtaaattagca

SEQ ID NO: 35809 - DNA, 787 bp, Homo sapiens
ccagtggactggataatgctcacccacgttggagagaggaccttcttcactcagtctattgattcaaatgctaatctcttttagaaatacacctggaaataacgttttaccagttgtctgggcatccctttaacccattcaaattgacagataaaattaagtatcacaagtggaaaggaaagcagaagctcttagaaaaaaaattgtattgaccatcaaatkccgtaatatggccttagtaatttgcattagcaggagcccccagagccacagaaagaagaggatgaagatagagaaggaagaagggaagcccatggttgaccctcacagaatctccttcctttggcttctatgatttctcctctttccagcgtctatttcctcacaattctccatcacttgtagggttattccagttcttcaccttgccagtcttgctttcccttccaaaactccaagaatatctatctgtccttgcaaatgattacatagcccctgacttgtggcttgggtttggagtctccttatttccggtgtatggtgagaaatggaatgtaaattattgtttattgtaaatagaaaagatattttcctggcaatgcaacatagcagtctgagaaatttcccttctccccacctgtgtgaatactttatatgtattgaagttcaatctgtgtctatgtgtgtgtatatcttgataattttatgtgttgtttcccaaagtacctcatagattggctcctctcatcctagcctcctctctcaccactcccttacttacactttt

SEQ ID NO: 35810 - DNA, 681 bp, Homo sapiens
cacatgcattctcttactatgtaccactgtctttggttgaggtttcctcaatacagcctgtgccagtaatttattgagggagtgctcttaggagaaacctggagaggattgagggaagcaggatagaacagagaaagacatcaggcaaacatgtgggttcaactgaccctgtggggagctctggaacatgaagaataccacaaagtttttctgtcttaaggtaattggactagccttttatttctccatatcattcagtcattggttgaggattatttttgaaaagggcataccctgccattcctagatgagccacctctcatgagctgagaatgagtctcaggagcagagtgcagctctgaactgttaagaaccaatactgagagcgactggaagatctattaacaactttcctaagtgcttaattacagmattcactccctgaaaattcatcagcccttcctcatgctttattgcttaaaaattgacctatactgtgcttttcaaactttagtgtgcatcagaattgccttgagcattcgttaaaactcagattgcttactcttgccctcagagcttctgattcagtagctcttagactgggcctagtaatttatacttctttctttcttttggtgtaatttttatttctcaaaatttttcatttttaaacgttatttt

SEQ ID NO: 35811 - DNA, 1063 bp, Homo sapiens
tgccatggtacattaaccttatataattttaagtggcaatgtttagagacagcattttctctgaagtcatgttatttgacactgactttatattaagggtatgagagttacttaatgatggaaagtccaaaacagtgatgatcacaaattcatgtttcatgtgaaaggactttgttttagtaaaggggaaaaggggtaagtctctgcaaaatgttagaagttataccctttccccagagtatttcctggttttctaccagcaaatcagccctctgaagtccaagttgtcaggaagcctgtgtctcttgtaaagtgggaagaaaccactccacaattctgctattctctaagcttaatgaaatgctagcaggctgccctgctgttcccgtatcttatatttccaggccttgccacctgtgcaacaaaagcaagcaatctatttagaagagtgtttttcattctcttaactctgaaggtctttattctcagcatgagattattgcaacaacttaacaagccgtgttttctccccctattttcctttcttttctttttgcacctatgtccttttaagtccattcaggccttagggaaacatttagtacttaggctttggtttttcaagctcaatcgggtagaaaatctaacacagaatgtgtgcacaaacgatagctctgcacaatrgggacgaacaaatagcacaaaaagaaaggaagaatatgagcgttcagggagcagggctgcacttgaattcaattttccaacagcagacctgatgctttctctcaagattcccaggtttcaaattggtcatatactgtgggccagttacctggacaatggggggaaatggcagtcggtaattatgatcttggtttctaggttgttaggagactaatattaatcctgaaattgtatgaggaatgtgttcatctggccataattgtatagtcttcttgaaagcatttaccagcaatgctaatttaacacaattctccccagggaagtatttttgagctagtggggttgccaatttattggttaacttaggacactttcttca

SEQ ID NO: 35812 - DNA, 550 bp, Homo sapiens
ttgaaaagagacacagataaaagaaaagacacagaatagattgtaggtaattgtctattaaatgtatgagcactgctgctaatagaatctctgagggtacattgcagttcctatgtctcattcaaaagttttaggatgaaataccattgcttatctacctactgccttcacatatcaaatggtagttactgcagtgggactataaagagtggcaaacttcatgcaaagaatattatacagagcatgcattcatgttttgttgttggtggatagagtagttaggagaagagggatggagtttctgtaatttyttttcagaggccccttccaactctgaaatgatgattgtctgataataaaggtttacagtactatgctgtgatttctctggacatagattgcatttttgcatactagttcaaaagggtcttcatgtgttctttgttaggacttttaccttcctcatctcctaaggataatctatgagtgcaaaacaactctggaaattagcatttatttctaaagaattacttgagcaactaatgtgagt

SEQ ID NO: 35813 - DNA, 777 bp, Homo sapiens
tgcttgtttcataaataaatgaacaaatgagagcataggagttaatcatgagatccctgaagtaagactgacaggttttgagtcctgattgcaccatcaattactagcagaataacaaacctctaggcctatttcctcatctatgargtggaaattacaattttaaagagttgcagtgaagttaaatgacacaaatatatgctaagtccttagccttctccctgacacacaatcagcatttattttattaaatgagagctgccactattactatcaatattattatcataaagacactggactcttaatttctgaggaaccattttccttccaccttctactttctgctgcccaatataattctgctttggaaaattgctttgatggaatcaatgattataataactaaacttgatgaacagtaggatggattgatttttattttctttatttttatagcttactctgtcattatctgtctccatgcaatcaatgaatcttagaatatacacattttagttatttagggttaagatggtagataggaggcagggctaacttgccgctcccactcagatggacagagcagcatgtgggcactcacatcctgaacttttgctccaagaaccactgccagaacataccaggaaagctaaaagaatccacagaccctttgaaggaatggatcacttctgcaggctccctgagttgtcaaaaaaaaggtgtctgcttgctttctccacaggggtaccatggtctgaggaaagttcttagccc

SEQ ID NO: 35814 - DNA, 777 bp, Homo sapiens
tgcttgtttcataaataaatgaacaaatgagagcataggagttaatcatgagatccctgaagtaagactgacaggttttgagtcctgattgcaccatcaattactagcagaataacaaacctctaggcctatttcctcatctatgaagtggaaattacaattttaaagagttgcagtgaagttaaatgacacaaatatatgctaagtccttagccttctccctgacacacaatcagcatttattttattaaatgagagctgccactattactatcaatattattatcataaagacrctggactcttaatttctgaggaaccattttccttccaccttctactttctgctgcccaatataattctgctttggaaaattgctttgatggaatcaatgattataataactaaacttgatgaacagtaggatggattgatttttattttctttatttttatagcttactctgtcattatctgtctccatgcaatcaatgaatcttagaatatacacattttagttatttagggttaagatggtagataggaggcagggctaacttgccgctcccactcagatggacagagcagcatgtgggcactcacatcctgaacttttgctccaagaaccactgccagaacataccaggaaagctaaaagaatccacagaccctttgaaggaatggatcacttctgcaggctccctgagttgtcaaaaaaaaggtgtctgcttgctttctccacaggggtaccatggtctgaggaaagttcttagccc

SEQ ID NO: 35815 - DNA, 777 bp, Homo sapiens
tgcttgtttcataaataaatgaacaaatgagagcataggagttaatcatgagatccctgaagtaagactgacaggttttgagtcctgattgcaccatcaattactagcagaataacaaacctctaggcctatttcctcatctatgaagtggaaattacaattttaaagagttgcagtgaagttaaatgacacaaatatatgctaagtccttagccttctccctgacacacaatcagcatttattttattaaatgagagctgccactattactatcaatattattatcataaagacactggactcttaatttctgaggaaccattttccytccaccttctactttctgctgcccaatataattctgctttggaaaattgctttgatggaatcaatgattataataactaaacttgatgaacagtaggatggattgatttttattttctttatttttatagcttactctgtcattatctgtctccatgcaatcaatgaatcttagaatatacacattttagttatttagggttaagatggtagataggaggcagggctaacttgccgctcccactcagatggacagagcagcatgtgggcactcacatcctgaacttttgctccaagaaccactgccagaacataccaggaaagctaaaagaatccacagaccctttgaaggaatggatcacttctgcaggctccctgagttgtcaaaaaaaaggtgtctgcttgctttctccacaggggtaccatggtctgaggaaagttcttagccc

SEQ ID NO: 35816 - DNA, 818 bp, Homo sapiens
ctggaacccaggagttggtcaaggttaaggtaagctacaaacacacactgcactccagtgggagtgacagagcaagctcctgtctctaaaaatacatatatctaatgtgtgtgtctctctctctctmtatatataatatatataatgtgtgtgtatatatgtatatacacagagagaaaaaacacaaaatagcaatgaatgctaaggagaaaataaaatagcttgtgaataaaacaaaaaatggggttttggggggctactaagttatttactacattattcagatgccagttttgtgatagcacaaagagaattagagtcttaagtctctcatttcttaatgaggacaataaagcccattctacctatccataggatgtgtggggataaatggcatgaatatttctagtaggttatctctctgcttagagattttgcatgtaacagattaggatagtgactggcacacagtgtagactcaataaatgttagcagccattactgatactatgctgatggcaatagcaacaacacaaccttccacaacccttaggccattgaaaatgtgattctctagggctggaatccctttcctcatattctttcccaggtaaagtaactcattctttttagactcattgtaaatggtccttcctcagaggaaacttcctgaatcccgaaaattgaactggtccctttttcttgggcttgtcttacagacctttggtcccacagccatggcaccaacacagtgctgtcttcagtgaatggacatccacatgtcaatttcccacacagggcaccaagaaactctaaga

SEQ ID NO: 35817 - DNA, 517 bp, Homo sapiens
ccagctactcaggaggctgaggtgggaagatcacttgagcccaggaggtggaggcagcagtgagctgtgatcacaccgctgcactccagcctgggcaacagagcaagaccttgtcaaaaaaaaaaaaaaaagaaggaaggaaaggagggatggagggagggaaggaaagaaagagagaaagagacaaaggaaggaaggaagagagagagagagagaaagaaagarggagggagggaggaaggaatatctaatattgggtccagcaccatgccctgctaaacagaggtctacaagtgaaagaaatcgacatagcgttgatcaaaaagaaaattcttctgttatgaaataaagggcactgtgttggatatttcataatcatcagcttctacatgactttcaaatgctcttcatgctcattaacacagattaataatagctttttaattaatactttaatcaaagttggaagagaagtaggcaccagttttaaaagcatggtgagaaactgaataagtga

SEQ ID NO: 35818 - DNA, 516 bp, Homo sapiens
tgccacagccttatttctggtcttcctgtttcaacacttgcacccccacccacaccccagtttctagaaagagcaggaggggtcataaaagaacattataaggagtaaaagagagtcccatttagagagcaacaagctgaagtctaaagaggaacatctctaatgggggaattgaggaaaatggctagaacatttcaaggaataccaaagtctgacaytgcagttgttttccaattctgtgtttaaatcacatacttcacctcccattagccacacaaaacacacaggaaaatatctcttatccattgtcgctttgcgttggtgtgatttggggtttcttgtggtaaatccattcagagagagcacagagaaggtaggaggcaaaatgacaaacagagcaggaaagaaactggagtaagaagtgaccactcagaaagcttaaggcagggtgctgggttccccacagtgcatacaatggaggcttcagtcattttatttcattatgatgagagaagg

SEQ ID NO: 35819 - DNA, 1293 bp, Homo sapiens
aaattcttgcaattttagccattaccagagaatggaaacagcaggaaaaggaagaaaatatagaaaaaaactgagtaaaggggattttcttcagaaggtgaattttctaaaggactgcgctgtctctagcaatatcaaaaactgtaaggaaagtatctcctacctccactaaaccttgcagaattctgacacacatgacgcatccgtaatgcactctggctgcagagggaataaacatgttcagagtcgatgttaagaagatggcagctccaaagaccctgggggaccaaagcattgtgttattcggcaggtctgctgatggatgtgctacttcagctaagcaccagaaacaaacctaacagttcatgaaagatccctgtggaaatccctgtggaaagatcgtacctgtaatcccagcactttgggaggctgaggtgggtggatcacctgaggtcaggagtttgagaccagcctggccaacatggtgaaccccatctctactaaaaatacaaaaaattagccaggcatggcggctggcacctgtaatttggagaaatagatgtgttagggtctagtgyaccccaagctagactcttgggcttctttgattcccaagctctggcccctggaccaactatgaacaaatttttggtggcacagggatgtcctgcctggatgatgtcctgaaaagttggagattggccaggttcaggtaagcttgctagagacctaccatcctgcctggttccccaccgactgatcttttctgactgttactgtatgtttgaggttgtttcctgcttcccagagtcagaaacactgactatccaagaagcattgtatgtcctgggaccagccaagcacaagacaggttgtgtacctgtcttagctcccatttcctggccagctcagggtgccctgggaaaagagagcaagcagcattttcttcccctctcacttatgttgatgatgtttccactctttttatgtgctgggaaattagattatgtgtgattttttttcaaggctgaggtgtaagcggtaacccaggaaaccatagcaaccaatattttatcactttttaaaaagaatacaatagataactaacaataaataaaagacataaattagacaagaacctaaataaatatatgcttattcctatttagatcttatggtagtggcttccaatttttttaccttaacccataaacaaaatatattttatattgcaacccagtccatactcatacatacaaatgtaactgaaacaagtctcaaaaaccaatattt

SEQ ID NO: 35820 - DNA, 1070 bp, Homo sapiens
aacatgacaggtatacccaatgattcatttaagggtggcataaagttatatagaaaagacctacargacggaagacaagtacatcaacacgtagtgaaattaagcagttcacccactgcgtgcttacatggctcctatatctcttcgggaagaagccagagccgtagagaagtcagggcaaaccagaactgttgaggagtaggggtggggggcagagggaaggagctggggagaagtgccagatcataaaggaaatgtaaaagagttacctatctgttctccccctcctgctaacgcaggggctggctcgagcccagcctccctgcccgcatctcagtggagctcttcccccagcattgtctttcagatgaaaagatacatctgttccccactgagatgtttttttgggggagagagtatgttttgttttttattttgattatatattgacaaattattgtatatttttatagggtacaatacggttttatgatttttgaatataaggtggaatgattacactaattaacatatgatctcaaatatttaacttttttatgagaacattagaaatttactctcttagcaatattgaaatatacattcaattattcctatatttagcatgctgtgcaagtgatctttaaaaaaaaatcacacttattcctcctaactgaggctttgtaccctttgactgtctcccaattctgagaacacttttcataaatttgaggaactgcctaaatattataggcttgaacatctgaacttgtcctcagcatgaaagcaggtgagactttttttttttttttaaacaaatgagcaggtaacacccagagaggttaagtggtttagccactggaaagataaggaagttgggtgtgatgtttacttctctatgatgatgcttctcaaactttcatgtgcatacaactcctttggatctcatcaaaatgtcctgggtccagagtggggcttcagattctgcatttctaataaggctctaggaaatgttgaggctcttggtctgtgggccacacttttaatagcatggactacaacacaaagag

SEQ ID NO: 35821 - DNA, 1070 bp, Homo sapiens
aacatgacaggtatacccaatgattcatttaagggtggcataaagttatatagaaaagacctacaagacggaagacaagtacatcaacaygtagtgaaattaagcagttcacccactgcgtgcttacatggctcctatatctcttcgggaagaagccagagccgtagagaagtcagggcaaaccagaactgttgaggagtaggggtggggggcagagggaaggagctggggagaagtgccagatcataaaggaaatgtaaaagagttacctatctgttctccccctcctgctaacgcaggggctggctcgagcccagcctccctgcccgcatctcagtggagctcttcccccagcattgtctttcagatgaaaagatacatctgttccccactgagatgtttttttgggggagagagtatgttttgttttttattttgattatatattgacaaattattgtatatttttatagggtacaatacggttttatgatttttgaatataaggtggaatgattacactaattaacatatgatctcaaatatttaacttttttatgagaacattagaaatttactctcttagcaatattgaaatatacattcaattattcctatatttagcatgctgtgcaagtgatctttaaaaaaaaatcacacttattcctcctaactgaggctttgtaccctttgactgtctcccaattctgagaacacttttcataaatttgaggaactgcctaaatattataggcttgaacatctgaacttgtcctcagcatgaaagcaggtgagactttttttttttttttaaacaaatgagcaggtaacacccagagaggttaagtggtttagccactggaaagataaggaagttgggtgtgatgtttacttctctatgatgatgcttctcaaactttcatgtgcatacaactcctttggatctcatcaaaatgtcctgggtccagagtggggcttcagattctgcatttctaataaggctctaggaaatgttgaggctcttggtctgtgggccacacttttaatagcatggactacaacacaaagag

SEQ ID NO: 35822 - DNA, 577 bp, Homo sapiens
ggttaagactcaccctcctcatatcccccattttccaggtttacttggaaaatagtttccaggtttaccattttcccatttacttgggcagtcatcatattccaactctctggccacacgactggtgcggggatgggcctgtaacccatgtaagtcaatgaataagacccagyttggtagttattaagatataggttgattgcttaaaattgtaagagtggaagagtaagaaggaaagtcaaagagaaaacagttgagccggaaagaaaacggagtcattcaaatcattattcgtaaagagtttcaagaagtggcgtatcaatattctcaacttaatagttgggcaatatttatgtttttgaaactaacaactaaaatacttggataaaatatttctcctgatttaagtaactataatttcagtcatgattcattgttcccagcaggatctgtatctgtgtaagtgggcatagtattgattttttttcaaaagagaagataggtgatctcattaatttccttttcacatcaaagctttccttttagggttttttttttttccttctctcaaaaaaaa

SEQ ID NO: 35823 - DNA, 577 bp, Homo sapiens
ggttaagactcaccctcctcatatcccccattttccaggtttacttggaaaatagtttccaggtttaccattttcccatttacttgggcagtcatcatattccaactctctggccacacgactggtgcggggatgggcctgtaacccatgtaagtcaatgaataagacccagcttggtagttattaagrtataggttgattgcttaaaattgtaagagtggaagagtaagaaggaaagtcaaagagaaaacagttgagccggaaagaaaacggagtcattcaaatcattattcgtaaagagtttcaagaagtggcgtatcaatattctcaacttaatagttgggcaatatttatgtttttgaaactaacaactaaaatacttggataaaatatttctcctgatttaagtaactataatttcagtcatgattcattgttcccagcaggatctgtatctgtgtaagtgggcatagtattgattttttttcaaaagagaagataggtgatctcattaatttccttttcacatcaaagctttccttttagggttttttttttttccttctctcaaaaaaaa

SEQ ID NO: 35824 - DNA, 577 bp, Homo sapiens
ggttaagactcaccctcctcatatcccccattttccaggtttacttggaaaatagtttccaggtttaccattttcccatttacttgggcagtcatcatattccaactctctggccacacgactggtgcggggatgggcctgtaacccatgtaagtcaatgaataagacccagcttggtagttattaagatataggttgattgcttaaaattgtaagagtggaagagtaagaaggaaagtcaaagagaaaacagttgagccggaaagaaaacggagtcattcaaatcattattcgtaaagagtttcaagaagtggcgtatcaatattctcaacttaatagttgggcaatatttatgtttttgaaactaacaactaaaatacttggataaaatatttctcctgatttaagtaactataatttcagtcatgattcattgttcccagcaggatctgtatctgtgtaagtgggcatagtattgattttttttcaaaagagaagataggtgatctcattaatttcyttttcacatcaaagctttccttttagggttttttttttttccttctctcaaaaaaaa

SEQ ID NO: 35825 - DNA, 767 bp, Homo sapiens
tccaaagagagggttggcaggcatgagaggtgggttagatctagcaggatataacactttggggcccaaataaacaaccctataaggaggggctgagagatacatgacttaagcagcagcacacagaaatgctctgtgttcatcaacagaaaactgaacatgggtcaaaggtggggccagcaatcaatgaagctaatamgataagttgtacttaatgtgcatgtgatttttagaattaggtaggtaataaatcttttctactctgtgccatacttgaagtattatcttcacttctagcgttgcattttttgagggaagtacattcactggaatatatttagagttcctctaccaggataatgcaggaactctaaattgtattatatgaagaatggctgaatgaactaggcatgtttacttggcaagtatgggttgagagacatggcaattcttcttcaaataaatgaaaactgaagagaggcaatacttcatctaggtattgccagaggacacaattagggatgaaagctgtaaaggatattttacctcaatgtgaaaacagtttaagccctggcagatgctcaaagtctcaacaaacactaatgggaaagttgtcggagtgtagacttcaaaatgggttgctgagttggtgatattgtttggctctatgtccccaccaaaatatcacctggaactgtaatccccatgagttgagggagaaacctgctggaaggtgactggatcatgggggctgtttcccccatgct

SEQ ID NO: 35826 - DNA, 367 bp, Homo sapiens
ggaaaaaaaaatagtttactcaactttttcaatggtaccaaaaggaacctttgacacttcttggcaaagacatgataatacttttaatgctataagagaaaaaggatcgtcactgagaaaacttcagaaaagaggtcttgatgatgggcttatgcaagatgtacacggcctcgctawgaaccttgatctttttcacatgtaaaaaaacaaaaagcccaaactgtaaagaaaatataatattctaaaaatatgtataggtgtttatctttattctgggttttagaactcaaacattttcttccagcacacctggtcttttgaatgagtgacctctccaaacaaagctaaggacaaaagacaaagagaa

SEQ ID NO: 35827 - DNA, 986 bp, Homo sapiens
cttcaggtctgatccttcaatgacagccttattcctgcaaggaatgagtcctggaggaaaggctggctgggcctataggacagagatgaggaagatggaaaaagggaaaggaaacaaatagtgcttctgagccaaaaaagaggtgaaagctgttgtggcaggagccagggcacccacagaggtcctcctggcagaccatctttacagagccccgcaccctgccagactaggcaaggtgctcagttacacgaccccaaatccacctcaacctcaaggacctcccttgggcccctggacacagacctgtatccaacttggtgagatgccacaggaatccaaaggaaagggctagggtatggggtgagggtgggaggtaaggcttttagctgagaagtgcaaattcctgggcaactggccctcagaatcacatgaggtttggaatgaaaccgtgttttagacctgcctcctctactgaccagccccaagaccttagcaagctgttcaatctctgtgaccttcattagcctaatgtgctgcccaaatgtaaggaatttcagtgctatttatgaaaggaaatgtactgcactcaccccacacccagggccacggggaagaaagtgtcgagagaagctgcacgtgaggctgtgaaaggagcctggggaggggaasaatccccatgcattcctgcagaggctggtggtcgccccagaaaaccaccacttcaggtatggggtaggcagaagacagagagcacaccccatgcctcgctggatgcagccctggtttccagctgtgccaggctcattaccactcccgaggtttcagagtttgctaacatcattaaagcctccatcccgggcagtgagcagcaggcacaatcgttacagatgtctgtgagagatgaatttggctaaaaggacccggtgcagagtcctgggcgcgggcaggattcgccagcacggtaatgatacaccatatgcttgtgc

SEQ ID NO: 35828 - DNA, 986 bp, Homo sapiens
cttcaggtctgatccttcaatgacagccttattcctgcaaggaatgagtcctggaggaaaggctggctgggcctataggacagagatgaggaagatggaaaaagggaaaggaaacaaatagtgcttctgagccaaaaaagaggtgaaagctgttgtggcaggagccagggcacccacagaggtcctcctggcagaccatctttacagagccccgcaccctgccagactaggcaaggtgctcagttacacgaccccaaatccacctcaacctcaaggacctcccttgggcccctggacacagacctgtatccaacttggtgagatgccacaggaatccaaaggaaagggctagggtatggggtgagggtgggaggtaaggcttttagctgagaagtgcaaattcctgggcaactggccctcagaatcacatgaggtttggaatgaaaccgtgttttagacctgcctcctctactgaccagccccaagaccttagcaagctgttcaatctctgtgaccttcattagcctaatgtgctgcccaaatgtaaggaatttcagtgctatttatgaaaggaaatgtactgcactcaccccacacccagggccacggggaagaaagtgtcgagagaagctgcacgtgaggctgtgaaaggagcctggggaggggaagaatccccatgcattcctgcagaggctggtggtcgccccagaaaaccaccacttcaggtatggggtaggcagaagacagagagcacaccccatgcctcgctggatgcagccctggtttccagctgtgccaggctcattaccactcccgaggtttcagagtttgctaacatcattaaagcctccatcccgggcagtgagcagcaggcacaatcgttacagatgtctgtgagagatgaatttggctaaaaggacccggtgcagagtcctgggcgcgggcaggattcgccagcacggtaatgatwcaccatatgcttgtgc

SEQ ID NO: 35829 - DNA, 986 bp, Homo sapiens
ctgtgtgccccccatgccccaggccctcttccaggactagattgtaatgcttctttgtcttccctccagactgtgtctgccgctctatagccccacctcctagcacagtgccagcacaaactagaaactagatgcccaaatagcgttggtgaatgaattaatgaagaagctaaaatgccccccactcccccaaaatttcactgccctttcctggagggctttcccatggaatggagacaagcaagtaaacccagtgacgaggcacaaaagcagagagagggtgggagagcggctgtgggcccctgggctctgtgccaggcactccgtgtgtgaatgctgcgctctggatctcttaggtgtgtaaagttgtgaacacaaccaccctcacctgcctggcaccctctctgaccacggactaccgccctggcctggacactgtggaacgcccagatgagtttggatttgtctttaacaatgtccaatccttgctaatttacaacgacaccaagtttatctactaccccaacccgacctttgaactgcttagccctactggagtcttggatcaaaagccaggatcgcccatcattctgaaggtaggagtgcccgccagagggcagtgccaccaggggcagcaatgccagagggcgcccckcgctcctggcctgactttctttctttctggctctcctttctatgcaattgaacttgcaaagctgtctccttcctacagaaggagctcatgggtagatatcgacccatcaggcgatatagcttgcacccaggcttcttaagaaatactttagaatatttctgttagttcttgtgagctttgggaaccagaggtactgcagtgagttgggagtaactgtttccttttctgtccactctgtggccacaggagcccacacacacatttccagaggtcacagtccctggcactgtccatccaagtgatttgttgccccactactttcgtgaaatcc

SEQ ID NO: 35830 - DNA, 546 bp, Homo sapiens
ccctgggatgggaaggggaggggggccagcccttgcatgagcaaatcccctgttggcaaaacacttaagcactgctctctacctgagggctgggatccaagaccccacatgacagcaataatgacagctaatggatagtgcttagcaggtgccaggcacttttcttagcactttacaaatattaactcattcaaccctgacaacaaccactggggttggatgttattatgactgtctccatttagtgataggaatactgaaaccagagaggttaaatgacttgcccaaggtcacacagccaacgtatggcagaatcaggatttgaacccaaggaagtctaaccttgagtgtttttggaggggaagggaccaggcaccttccagataggcaaaacagggtactcacacatgcaagaaagcccagagggactgggaaactctctagttatcaccctgaggccagaagtgagttgggagaaccggttctttatagccctgtgggatagtgaggtgcctttatccayagaccctgtctcagatgcagcca

SEQ ID NO: 35831 - DNA, 1090 bp, Homo sapiens
ctacccacccgaggtggtttgggacagcctagaaagaggaagtgcgtgagttcctttcctttgtgcttccgagcaacctggacctgcagagtcatggcctgtgctcctccagcctctggcccaaggggctcctgctcacacgcctcggtgcctccccagtgctagggcacaaagcgagggtgcccgacacttcctgcttgtggatgcctttgctgcccctgctctgacctgatccccgccctggctgtacctacttctttscttttttcaaacaagccctttgcttccccacctctgaacactggcttgggggcccctgtgcctgggacacccctttcttcctcccaggccctggcccatctcctccaggaagcttgagtgctcactgcagccaccggcctccctgtaagacagtgagttgtctgcgagctctgctctgagccctggcacatggagcgactcagttacacttaatcagctcttagaggcactggctgggcatggtggctcaacgcctgtaatcccagcactttgggaggccgaggcgggaggattgcttgagcctaggagttggagacaagcctgggcaacatagttgagaccccaccactagaaaaaaaaaaaatagcggagtgcagtggcatggacttgtaatcccagctactcaggaggctgaagcaggaggatcaattgggcctggaagtttgaggctgcagtgactgtgattgtgccactgtcctccagcctgggcaacagagtgagaccctgtttcggaaaaaaaaaaaaaaaaaaaagagaaaagaagtaggcactaacatggttccagttttgccgacgaggaaactcaggctcacagtgattaaatcattttccgaatgtcacacgagaacgtaggaggcaggcagaatccggagccagggatccgcctctggggcctccagtgcctccaagcgagacagccactagaccagcgagccctggagggctgggcagggccttgtcccctggtgcctcccggagcccagcacggggcagggccagctgggcacttagtttggacgagctctgtccctccaggggcttcactttc

SEQ ID NO: 35832 - DNA, 1090 bp, Homo sapiens
ctacccacccgaggtggtttgggacagcctagaaagaggaagtgcgtgagttcctttcctttgtgcttccgagcaacctggacctgcagagtcatggcctgtgctcctccagcctctggcccaaggggctcctgctcacacgcctcggtgcctccccagtgctagggcacaaagcgagggtgcccgacacttcctgcttgtggatgcctttgctgcccctgctctgacctgatccccgccctggctgtacctacttctttccttttttcaaacaagccctttgcttccccacctctgaacactggcttgggggcccctgtgcctgggacacccctttcttcctcccaggccctggcccatctcctccaggaagcttgagtgctcactgcagccaccggcctccctgtaagacagtgagttgtctgcgagctctgctctgagccctggcacatggagcgactcagttacacttaatcagctcttagaggcactggctgggcatggtggctcaacgcctgtaatcccagcactttgggaggccgaggcgggaggattgcttgagcctaggagttggagacaagcctgggcaacatagttgagaccccaccactagaaaaaaaaaaaatagckgagtgcagtggcatggacttgtaatcccagctactcaggaggctgaagcaggaggatcaattgggcctggaagtttgaggctgcagtgactgtgattgtgccactgtcctccagcctgggcaacagagtgagaccctgtttcggaaaaaaaaaaaaaaaaaaaagagaaaagaagtaggcactaacatggttccagttttgccgacgaggaaactcaggctcacagtgattaaatcattttccgaatgtcacacgagaacgtaggaggcaggcagaatccggagccagggatccgcctctggggcctccagtgcctccaagcgagacagccactagaccagcgagccctggagggctgggcagggccttgtcccctggtgcctcccggagcccagcacggggcagggccagctgggcacttagtttggacgagctctgtccctccaggggcttcactttc

SEQ ID NO: 35833 - DNA, 568 bp, Homo sapiens
cacacttctcagagctgcccctggacgaccaggtcatcctgctgcgggcaggtgagtggcgaggcctaggtggggatggggatgccatgcagatgggacacgtaccaggacactccccmctcccgggatactccgcactcccgggacactcccctgtcctgggacactcccccctcccaggacccactcctacctcccgggacactcccctctcctgggacacactcctacctcccgggacactcccccttcccggaacacactcccccctccctggatgctcccatctcccaggacgctcccctctcccaggacgctcccctctcccaggacactcccgactcctgggacacacttctacctcccgggacactccccactcctgggacacacttccccctcctgggacacacttccccctcctgggacacacttccccctccagggacacacttccccctcctgggacatactccccactcctgggatgctcccatctcccaggacgctccccgctcccaggacacacttctacttcctgggacgctcccctttcccgggacactcc

SEQ ID NO: 35834 - DNA, 586 bp, Homo sapiens
ccaggggctggggaaggggcgagccccgtggggcctggagacagctgagtgactgtgtgcctcctccccaggctggaatgagctgctcatcgcctccttctcccaccgctccatcgccgtgaaggacgggatcctcctggccaccgggctgcacgtccaccggaacagcgcccacagcgcaggggtgggcgccatctttgacaggtgggggtggtcccgggaggggcgagggcgcttcggtcacctccgccaccaggccagctgagttcagccrccttggccccggtgcacatcctgcctagtattatttcagtgcatgaagggtgcacacatggaaaaagagaaaagcatgaggaggaggctcagagccctgtgccagccctgcctctggggcatctgtaaccacagggagcacttggcctatctccctccatctcttcttttttcacgatcccatgtatttatccgtgggaaggaaagcttcgtttctttttaaagtgattataccgtagatgcagttttgtaaaagtgtcaattccagttggcatgtcgcaggctgcttgaggctggcacggtaatgccgtgg

SEQ ID NO: 35835 - DNA, 561 bp, Homo sapiens
gtgagtcagggtggttggggtgatgtcaccatgtcacacagtttgggaaggttgaagagggtcagtgatgcaaagcgccagcatgtggtagatgcttgagtcagccccttactactggtggccatttcttctaggggcttcagtgccttgtctatgacagggaggagaggtctgcatggttcatatacggatgcccartggagggaggggctctttccctccgggttccagggggacaatggaagttgcagatggctgagcctgcaccgtagcaggtatacaatgacgcagacactgtgaagtcaactctgacacgattacatcccatctttagaagagacaggcagtggggacctgagaatcaacctcctgagaatcagcagaggattctgggctccacttgtgtgtgtggaggacgggcctctgttccggcatggaggcctcctttctgcatgagtgtcctgataggcctcaggcctgtgtccaaatcttcactgctctgcctgggatcctgggcaagttattgacacttcagagccttccacgtgcacaatcctggtg

SEQ ID NO: 35836 - DNA, 573 bp, Homo sapiens
atccacagggccctcaagcacatgggaagggggtgtctccaggggccactctggaggcctccacaggagtgtccaggcccaaagcctcagggccctggggctctgtctcgtaacaaactgcttcacccttcccactgccaggtgggaccctcctctcrggagagacccacagccaactccaggaagccagcaagtgtgtgtttgcagcatgggggtgggaaggcccctcccttgataaggaaataactgtctgtagttattcccggcgcagccaagaccatcttgtgcattgacattgaccacccctctagaaacacaacctcgaagtcggtgagagatggtggcgtaggagcgtgtcagcctttcaggggacgcctgcactcggccattcactccccaagtcaccttagaaagctcccttcccacccagtcctcagtttccctaactgaccaggtctcatggttccttccagctgcaccttctgggctcccccaggtctcttggggcatctctgtggggtgtccaggtaaggtgctcagaggacagctggccacggcaggaccatggggtga

SEQ ID NO: 35837 - DNA, 573 bp, Homo sapiens
atccacagggccctcaagcacatgggaagggggtgtctccaggggccactctggaggcctccacaggagtgtccaggcccaaagcctcagggccctggggctctgtctcgtaacaaactgcttcacccttcccactgccaggtgggaccctcctctcaggagagacccacagccaactccaggaagccagcaagtgtgtgtttgcagcatgggggtgggaaggcccctcccttgataaggaaataaytgtctgtagttattcccggcgcagccaagaccatcttgtgcattgacattgaccacccctctagaaacacaacctcgaagtcggtgagagatggtggcgtaggagcgtgtcagcctttcaggggacgcctgcactcggccattcactccccaagtcaccttagaaagctcccttcccacccagtcctcagtttccctaactgaccaggtctcatggttccttccagctgcaccttctgggctcccccaggtctcttggggcatctctgtggggtgtccaggtaaggtgctcagaggacagctggccacggcaggaccatggggtga

SEQ ID NO: 35838 - DNA, 441 bp, Homo sapiens
taaataaaaaagtatctgatggcacccaagcacctttccatctccgggtctgtgtcctgagaaaggagggtttcctataaatgacagacagtggacgatgtggtatccagcacacagctccttgcagggaaaggggcaccatgtgggtagcatggctttctttaaygacaaatgagcaaaactgaccacagactgagacagacctcacctaaatcaagaagaaaagaaacataagggggacattttactccttctggagaaaagaaggcatatctccttctctattaatagttaaaacgtgaaaaagacactttcaacaaagccaggccagtgggagggcagaggcacactcacccgggctggcagcacacagggtgacttggcctctgagcacatttgtgagtctgtcgagagccaagcagatgaatggagggttataat

SEQ ID NO: 35839 - DNA, 441 bp, Homo sapiens
taaataaaaaagtatctgatggcacccaagcacctttccatctccgggtctgtgtcctgagaaaggagggtttcctataaatgacagacagtggacgatgtggtatccagcacacagctccttgcagggaaaggggcaccatgtgggtagcatggctttctttaacgacaaatgagcaaaactgaccacagactgagacagacctcacctaaatcaagaagaaaagaaacataagggggacattttactccttctgragaaaagaaggcatatctccttctctattaatagttaaaacgtgaaaaagacactttcaacaaagccaggccagtgggagggcagaggcacactcacccgggctggcagcacacagggtgacttggcctctgagcacatttgtgagtctgtcgagagccaagcagatgaatggagggttataat

SEQ ID NO: 35840 - DNA, 996 bp, Homo sapiens
ccccatcaaggcaagctgggtatttactatgtgacatttagacatatagtaaatatgtgctaaaagcaaagagaagatcctgtaagcaaccatacaaaagacagattccctatcagagagcatgtaggctgccagccaatttccaacaacaacaaaaaaagccccaaacaaaaacaaagccccaaacaattagaaaatattttcaaagtgctccaaaagaactgttaacttcaattctgtaccagataaatgtcattgaaatcatggtggataaggaaaatttcagacaaactaaagctgagctagatcctcctcacagacccactctaaaacaacttgtaaataatataaatcaagaggaaagaaaatgattccagaagggagaatgagatgccagaaggagtgacatgtgaaagaatcatttagatttactcacacattcatccaaggccgactgagtaagtactcttgggaagtcagcagggaagtggggagtagaacagaaagggaggtggccaagggggaggctctcagcaaagcccgaagagtgaagagcagggcttcggcctggctgttaccccactccagggaggggctgggtttttatgcttcccaccctcaggcctggtcaagagtaggtggagagcagccaccgttccctctgattcttccagcctatgggaaaaaatgggctgcaatatcccaagggcaaaaaataaaaatataaataaataaaaagacctagaattgctgctcttggaagcaaaagtccactgacgccagagggtgctcaagaaatggtataaagcggaggccacacatcagccttgtctactttgactgcattaaataatatccaatttgaaagattaaaaaaaagaactaaaatatcagccacagctaacaggagaggatttggtggcagttaaagtgtcttgcgtttcttttactgtttaaragaaaggtagagaaatcaatttcaggcttaggtatgca

SEQ ID NO: 35841 - DNA, 553 bp, Homo sapiens
ggagggcctggtctctcactccaagacagtgccttgaatgctgcatcctccggaggggacacgtactatgtcctcacatggtggaaggcaggaaggcaaaaaggggtctagctaggtcccttgagcccttttataaggacactgatcccattcatggggctgcagcccttataactcaatcgcctctgaagggccccaccctttaatactatcacattgggccttaggctccaacatgtaaatgctgggrggacgcacacgttcaaaccatagcactcaccctccagcggcctgtctccaagtcagagtcttgcagcctggtcaaaaggcccctctgtcacccgtcaggccagcagcttctgggtggagcagccctgtgctgggaccagcgcagccggtggcgtgtgggtaactctcacctcctcccagccccgctcagggacatcgcgcgcagagccagggtttggagtatctgccccggggaagtcgactcggcgcgtgctacaaagtgggtctgttttctaggattttgtttaccccagagagctaagat

SEQ ID NO: 35842 - DNA, 553 bp, Homo sapiens
ggagggcctggtctctcactccaagacagtgccttgaatgctgcatcctccggaggggacacgtactatgtcctcacatggtggaaggcaggaaggcaaaaaggggtctagctaggtcccttgagcccttttataaggacactgatcccattcatggggctgcagcccttataactcaatcgcctctgaagggccccaccctttaatactatcacattgggccttaggctccaacatgtaaatgctgggaggacgcacacgttcaaaccatagcactcaccctccagcggcctgtctccaagtcagagtcttgcagcctggtcaaaaggcccctctgtcacccgtcaggccagcagcttctgggtggagcagccctgtgctgggaccagcgcagccggtggcgtgygggtaactctcacctcctcccagccccgctcagggacatcgcgcgcagagccagggtttggagtatctgccccggggaagtcgactcggcgcgtgctacaaagtgggtctgttttctaggattttgtttaccccagagagctaagat

SEQ ID NO: 35843 - DNA, 553 bp, Homo sapiens
ggagggcctggtctctcactccaagacagtgccttgaatgctgcatcctccggaggggacacgtactatgtcctcacatggtggaaggcaggaaggcaaaaaggggtctagctaggtcccttgagcccttttataaggacactgatcccattcatggggctgcagcccttataactcaatcgcctctgaagggccccaccctttaatactatcacattgggccttaggctccaacatgtaaatgctgggaggacgcacacgttcaaaccatagcactcaccctccagcggcctgtctccaagtcagagtcttgcagcctggtcaaaaggcccctctgtcacccgtcaggccagcagcttctgggtggagcagccctgtgctgggaccagcgcagccggtggcgtgtgggtaactctcacctcctcccagscccgctcagggacatcgcgcgcagagccagggtttggagtatctgccccggggaagtcgactcggcgcgtgctacaaagtgggtctgttttctaggattttgtttaccccagagagctaagat

SEQ ID NO: 35844 - DNA, 1192 bp, Homo sapiens
ccaggcgtgtgtgtgcgcgggtatcagaggagggggattgtgagatcatgagtgacggaggggactgtgagtgtgtgcgtgaggttctatgcacaggcccgggagggcgtgtggacgcagcgcactttgctgagtgacactgtgccggtgcccctaggctcctgctgcttcctccctctttccgcttcacagctgcggggactgcagcagaggaatggccccagtagggaggtcagatattgagccgagaatgaagctttacacaagaaagcgcagaagtgcccccgagtgttccccaggagggcagctacatgttgagaaccacagcgtcctcagagctctgtccccagaaaccagctccaaactggttgtactggttgaatcgattcctcttccttttacttccttcctatttcgtgtgaagtgagggaaattgtggctatggagggagggtgctttcaaacttagtctgcgctccaagaaatgcctggagtctcacgcttgccgtatccttctccagtcgtatttttatccaaaagaaggacctggaggaggatgagagcgttactgctgcacacctaaagtcaagggtgagtttgtgctttgtatttgttcaagacatgcgtttttgattttagaatattgagatttccccttaaattttcagtgaaactagggggatatgcaaattgattcgtgccccctccttcacctttccacttaatagtcacaaaacaatttggcacatcgttcacaccttcctgtgcgctctctttttcgaagctggtatagaaatacacctccagtagttaatrttaaagctccattttagacccatatttgggaaggaggagattagtgtttaggtggaatcacacactagacatcagttggtctttacagacctccttttcaaaacagggaagaatggagatggttggatgatctccattgcctgtgaggcattcggtagtggaaaagtgaccgcacagaaattggtatcaacaagagccaggatttttccagggagtccatgagatgatatttgtaatacttgccagatctctctgaggtttggcagctccagttgtgttttaggcgtgtgtgtgtgagtgtgtgtgtgtgtgtgtgtgtgtgtgtgtgtgtgtactgttgagaggcagtacactgttgtggttaagaataggggagt

SEQ ID NO: 35845 - DNA, 543 bp, Homo sapiens
ccaaaacttgactttaaaaccctttggggccaagtgcagtggctcacacctgtaatcccagcactttgggaggccaagacgggcggactgcttggggctaagagttccagaccaacctgggatacacagccagaccttgtctctactaaaacatgaaaataaataaataactagccgggcgtagtggtgtgcacttgtagtcccagctactagggaggctgaggcgggaggatcacttgagcccaggaagtcaaagctgcagtgaactgtgtggtgagacaggaagaaaatgagtatctaccatggaaaataggaaaagtctaaaaaagatgaaagrgaataggataaagacagatacattttaaaaattttaatggatcgttcatgtgatgatgtcactgcactccagtctgggtgacagagggagactctgcctcaaataaacaaacaaacaaatgaacaaaaccaaaaaacaaaccgtttggtagctctcccttacttatgatgtagtgcagactctttaaagggcttataaggtctata

SEQ ID NO: 35846 - DNA, 610 bp, Homo sapiens
aaaatcattaaaccttccattttcatttacagggcttctcatttctaatcagcactttaaaccatttcttttcttyttttcttgactttcatgcactctggaataaaccttgagaaaacacttacagctaacattttagtcagtgttttatgaaaattacactgtcttttgattaaggcttcattttaataaagagattaaaacaggaaaaaactatgcttccttattcacctctcattttccatataacttgggctgttcctttacttattgaataaaataaagtaatggggcaatctgacaatggatctagtttgtgagttgcctcaagagtatacaatttgtggaatctctttagataaaaaaaagaagaagaagatcttgattttgtacttttatgaaaatttgtgtttcctgaaattacatagctgaagttcctagcagggcctttgaaagtgtctcctcaagccatggtccctgaaaataattcattagcttcatggcgaatttgtcactgtgaacaatacaacctcttctgcttcaacatgagatctgtgacacaaactaactctcacgagactggtaaataggggaatgctctgagtataaa

SEQ ID NO: 35847 - DNA, 610 bp, Homo sapiens
aaaatcattaaaccttccattttcatttacagggcttctcatttctaatcagcactttaaaccatttcttttctttttttcttgactttcatgcactctggaataaaccttgagaaaacacttacagctaacattttagtcagtgttttatgaaaattacactgtcttttgattaaggcttcattttaataaagagattaaaacaggaaaaaactatgcttccttattcacctctcattttccatataacttgggctgttcctttacttattgaataaaataaagtaatggggcaatctgacaatggatctagtttgtgagttgcctcaagagtatacaatttgtggaatctctttagataaaaaaaagaagaagaagatcttrattttgtacttttatgaaaatttgtgtttcctgaaattacatagctgaagttcctagcagggcctttgaaagtgtctcctcaagccatggtccctgaaaataattcattagcttcatggcgaatttgtcactgtgaacaatacaacctcttctgcttcaacatgagatctgtgacacaaactaactctcacgagactggtaaataggggaatgctctgagtataaa

SEQ ID NO: 35848 - DNA, 1126 bp, Homo sapiens
atccaatacttggttagccaatactcatttttcagtaaaatgatctttttcccctaatacttaagtaagtttttccttatacctaatttccttgaagtaagttttttgtattttgttcaaataaaatttctagggaagttgattagtgtggcattcctgaacatgctggatgtcagcctagagacaatgctatattcagattttcagatctaataatccatgttttttatggataaaaatgtcttccagaattaatttcctgccagataaattttgttgaaatatcttaaagtgcattatagttagccagataagtcaaaatagaggtatccatatgctttacttactggggtatttaccccaatatctgtctggcacttggtagaaggtaacatggtaactagcttctgccagtttctgttgagctttggaaccagaaaatttcagctaggcatcatgtgtacttacaaccattctccatgcagcatggcaagagagaactatcacagggatatttcttaaatggtaaaacaattttgagactatccaatatcaacattttaaaatatatcctcaggttatatttctgagccaccatgtttggtaatttatcttaaataacgactggcattttccaaatagcattagaacaacaaacattaagacaaattgccattagtcacattataattttcaattctgaaaggttttttaatcaaaatgttttagtctatttctctttgtctcttgctcttatctatgtacacagtttatttcctttgcataaaggactggccagtaataaaagaatgccccaacaaggcaacttctgttattgctttgattgagtgctccagagaacttccatttgctgagtatgtaatatcagatttgggaagtcatttgccrtaagagcactttctttattgtgtgagaattttgtttttatactttcataagtctttaaacatttagttaatgtatatagatgtttataaattaaattttagtagttcatataatatccataataagaggactttgggagacttaaagtctgattttcagtgtgattatttttacctccaatatactttatacagaatgaaatactgttacaaatgat

SEQ ID NO: 35849 - DNA, 551 bp, Homo sapiens
atgcaaatgtgcactgtytttggatcctactggcctttctcagttgttaaatatcttgtgatgttggcactttaaaaagtgtcacacgctgctgtttggaatgtattaataaaatgatacggccactttggaaaacaatttgacagtttcttgcaaagttaaacatacaactatcatatgatgcgggagttctcctgggaatttacccaagagaaaaaatgaaaacgtatgtccacacaaagacatatgtgcgaatattcaaagcagcattgtggataaacaaattgtggtacatccatacaatggaatactactcggcaaataaataggaatgaactattaatacatgcagcaacataaatgactgtcaaaataattatgctaagttaaaaagctaacaaaagaatacatactagatgatcctgttaatataaaattctggaaaatgtaaactaatctattgtgacaaaataccacaacttcaagaaaggaatttttgtagtaacattgtcttcttttttcagaggacaaaattgagggcttagatcttg

SEQ ID NO: 35850 - DNA, 743 bp, Homo sapiens
tggaaagctgctgcaagaataatcctagacagtatctattggcagatacttaaagggtgtctgtggtggaagctactttacaaatggtttgacatttgaacaaaaaaaactgaatgagttaaagagcaaagcatgagcaggttgcaggaaaagtcctcaaggagggcacaaactgggcctagcagaggtaggtgaaggtgacatttgtgactggagcttgtatgtcgcrgtcaggtcatgagggccttgtagctcgtagcagagagcttgatctcaggcctggatggcatgtatacagcaggtatatgaacatctcaacatggttggaattctcagactttagtgggtaccagaatcacttggagaacttgttacagctcagattgctggccctacgccgaagtttctgactgagcaggcctggggtggggcctcagatcatacatctctaacatgttcctgggaggatgcctgtgctgctagcccaggggactgtactttgagaactattgctctaaggagcagctgcaggtgggtgtggcctttgtccatcctttgccgttaccgcagaaaagagaattacaggtagagcagtttaaatggcaggtgtgccaatgtgattgccacttacctatctttcctaagatgtcttgctttttttaatcccttctttagaatgaacctgaacctctgtttgacatacactccccaaaaggtagaatgagaaattctaaaggctatca

SEQ ID NO: 35851 - DNA, 743 bp, Homo sapiens
tggaaagctgctgcaagaataatcctagacagtatctattggcagatacttaaagggtgtctgtggtggaagctactttacaaatggtttgacatttgaacaaaaaaaactgaatgagttaaagagcaaagcatgagcaggttgcaggaaaagtcctcaaggagggcacaaactgggcctagcagaggtaggtgaaggtgacatttgtgactggagcttgtatgtcgcagtcaggtcatgagggccttgtagctcgtagcagagagcttgatctcaggcctggatggcatgtatacagcaggtatatgaacatctcaacatggttggaattctcagactttagtgggtaccagaatcacttggagaacttgttacagctcagattgctggccctacgccgaagtttctgactgagcaggcctggggtggggcctcagatcatayatctctaacatgttcctgggaggatgcctgtgctgctagcccaggggactgtactttgagaactattgctctaaggagcagctgcaggtgggtgtggcctttgtccatcctttgccgttaccgcagaaaagagaattacaggtagagcagtttaaatggcaggtgtgccaatgtgattgccacttacctatctttcctaagatgtcttgctttttttaatcccttctttagaatgaacctgaacctctgtttgacatacactccccaaaaggtagaatgagaaattctaaaggctatca

SEQ ID NO: 35852 - DNA, 1221 bp, Homo sapiens
cagccatgaatggtattaattcagggagcttgtaaaaagcattttcacgagattggaagcaagactaagtaggtacatgctggcagcataaagagagtctaatctaattattgtagaatcttagagataatctaagtgctgcctaattgcatacaacacattttattgacacttttctatgtgtaaggcacacagaccatgtgtaagctacatgcctattttctatgggcaaaaaccggaatcacccagagggctcgttaaaacacaaatggcggagtcccatccccagagtttctgactccgagtttctggggtgggcctgagaattggcatttctagcaagttcccaggagctgctgatgctgctggttcaagatcacactgtgagaactgctctacaccctcgtgggggggattattccagggttcacttgagcccttctartgggatgggttgtgaaggcggccgatcccaacaggacagctttcttagggttcaccgacactgcgctgaaaagtgcctcccggaaactctctccctggtcctaattctgccggctggaattgctctggacacacctaatcctcatttaataaatgcccatgcacattcatcctaaggagaaggacagagaggggtctgtttggcaaataacattgttatgttccatgccggggaatgcctgtttaatctactttgctaacaataaatttaaatgttaataactggggtgtacatacaccataaacggtacaaatgtcatgtgtacagcttgataaaattttacataggtataccctcattcaactgccttccacctcaagacatggaatattttcacccttcctcaaaattaccacgtgctctttcctggtcctgagcaggccttcaaaggtcagcagtgttctactccagttgccatgggtatttcatgctcctcttgaactttatgcagatggaagcagagagaacatgcgcttttgtatctgatattttcactcaagaagactgtgaggttcaaccatgttctaaatagcaatattagttcttttgtttttattgccttgtggtatcccaagtttgacttgtgtttatagttgtatatgtaattgctccttctatttttttttttgcgggggtagggggtggtgggatggaattttgctcttgttgcccaggctggagtccaatggcactatctcagctcactgcaacctccg

SEQ ID NO: 35853 - DNA, 1221 bp, Homo sapiens
cagccatgaatggtattaattcagggagcttgtaaaaagcattttcacgagattggaagcaagactaagtaggtacatgctggcagcataaagagagtctaatctaattattgtagaatcttagagataatctaagtgctgcctaattgcatacaacacattttattgacacttttctatgtgtaaggcacacagaccatgtgtaagctacatgcctattttctatgggcaaaaaccggaatcacccagagggctcgttaaaacacaaatggcggagtcccatccccagagtttctgactccgagtttctggggtgggcctgagaattggcatttctagcaagttcccaggagctgctgatgctgctggttcaagatcacactgtgagaactgctctacaccctcgtgggggggattattccagggttcacttgagcccttctaatgggatgggttgtgaaggcgrccgatcccaacaggacagctttcttagggttcaccgacactgcgctgaaaagtgcctcccggaaactctctccctggtcctaattctgccggctggaattgctctggacacacctaatcctcatttaataaatgcccatgcacattcatcctaaggagaaggacagagaggggtctgtttggcaaataacattgttatgttccatgccggggaatgcctgtttaatctactttgctaacaataaatttaaatgttaataactggggtgtacatacaccataaacggtacaaatgtcatgtgtacagcttgataaaattttacataggtataccctcattcaactgccttccacctcaagacatggaatattttcacccttcctcaaaattaccacgtgctctttcctggtcctgagcaggccttcaaaggtcagcagtgttctactccagttgccatgggtatttcatgctcctcttgaactttatgcagatggaagcagagagaacatgcgcttttgtatctgatattttcactcaagaagactgtgaggttcaaccatgttctaaatagcaatattagttcttttgtttttattgccttgtggtatcccaagtttgacttgtgtttatagttgtatatgtaattgctccttctatttttttttttgcgggggtagggggtggtgggatggaattttgctcttgttgcccaggctggagtccaatggcactatctcagctcactgcaacctccg

SEQ ID NO: 35854 - DNA, 1065 bp, Homo sapiens
tccagccctaactttcactttctgaaaatcactttctaatcaacaaccaaaaaaaaaaaaaaaaaatccctctatgaccatatagaaatcccaccagtttgaaagctaagtcaacgtaacggaaattgagaagactcaagaataaagacaaaacaattaagagtttggctaaacctgctactctaatgtttatattattgatgaatgacgatttcagaaacgtttkactgcaagagcgtgacaatattttctgacggggtttgccactgaaacttctggccattggagaactttaaaaaacatgaaagatatccatgctgtatgtgcagaactttccagtaaatgccaaactccctcatttatgctacgtggctcacccaagaaaggcttccataaatatttatcgaattaaactgaagggatgacaaaaacccaatgatgtcttgacatccattccgatcctatattctatcattcatccaataagcactgatcagaaaccactgaggcaccgcacaggagactaacagctattgcatggaatacacagaacaccctccatttgtcaaagggagaaggaaaagagaggcaagaacagctatggaagatccagactgagaaggaacttcaaaacaaatttttttacttctagcatataaaaaccaagtatcactacgatcacagtagtcaaaggatttataggagtgaagcttaatttggaagacgaaaatcatgtgactcatgatgataaaagattctgggggccaggcgcggtggctcacatctgtaatcccagcactttgggaggctgagacaggcggatcatgaggtcaagagatcgagaccatcctggccaacatggtgaaaccccatctctactaaagaaaaaaaaatacaaaaattagctgggcatggtggtgcacacctgtagtcctagctactcaggaggctgaggcagaagaatcgcttgaacccgggaggtggaggttgcagtgagcagagatcgagccactgcactcaagcctggcaacagagcaagactccgtctaaaaaaaaagattctgg

SEQ ID NO: 35855 - DNA, 1065 bp, Homo sapiens
tccagccctaactttcactttctgaaaatcactttctaatcaacaaccaaaaaaaaaaaaaaaaaatccctctatgaccatatagaaatcccaccagtttgaaagctaagtcaacgtaacggaaattgagaagactcaagaataaagacaaaacaattaagagtttggctaaacctgctactctaatgtttatattattgatgaatgacgatttcagaaacgttttactgcaagagcgtgacaatattttctgacggggtttgccactgaaacttctggccattggagaactttaaaaaacatgaaagatatccatgctgtatgtgcagaactttccagtaaatgccaaactccctcatttatgctacgtggctcacccaagaaaggcttccataaatatttatcgaattaaactgaagggatgacaaaaacccaatgatgtcttgacatccattccratcctatattctatcattcatccaataagcactgatcagaaaccactgaggcaccgcacaggagactaacagctattgcatggaatacacagaacaccctccatttgtcaaagggagaaggaaaagagaggcaagaacagctatggaagatccagactgagaaggaacttcaaaacaaatttttttacttctagcatataaaaaccaagtatcactacgatcacagtagtcaaaggatttataggagtgaagcttaatttggaagacgaaaatcatgtgactcatgatgataaaagattctgggggccaggcgcggtggctcacatctgtaatcccagcactttgggaggctgagacaggcggatcatgaggtcaagagatcgagaccatcctggccaacatggtgaaaccccatctctactaaagaaaaaaaaatacaaaaattagctgggcatggtggtgcacacctgtagtcctagctactcaggaggctgaggcagaagaatcgcttgaacccgggaggtggaggttgcagtgagcagagatcgagccactgcactcaagcctggcaacagagcaagactccgtctaaaaaaaaagattctgg

SEQ ID NO: 35856 - DNA, 1065 bp, Homo sapiens
tccagccctaactttcactttctgaaaatcactttctaatcaacaaccaaaaaaaaaaaaaaaaaatccctctatgaccatatagaaatcccaccagtttgaaagctaagtcaacgtaacggaaattgagaagactcaagaataaagacaaaacaattaagagtttggctaaacctgctactctaatgtttatattattgatgaatgacgatttcagaaacgttttactgcaagagcgtgacaatattttctgacggggtttgccactgaaacttctggccattggagaactttaaaaaacatgaaagatatccatgctgtatgtgcagaactttccagtaaatgccaaactccctcatttatgctacgtggctcacccaagaaaggcttccataaatatttatcgaattaaactgaagggatgacaaaaacccaatgatgtcttgacatccattccgatcctatattctmtcattcatccaataagcactgatcagaaaccactgaggcaccgcacaggagactaacagctattgcatggaatacacagaacaccctccatttgtcaaagggagaaggaaaagagaggcaagaacagctatggaagatccagactgagaaggaacttcaaaacaaatttttttacttctagcatataaaaaccaagtatcactacgatcacagtagtcaaaggatttataggagtgaagcttaatttggaagacgaaaatcatgtgactcatgatgataaaagattctgggggccaggcgcggtggctcacatctgtaatcccagcactttgggaggctgagacaggcggatcatgaggtcaagagatcgagaccatcctggccaacatggtgaaaccccatctctactaaagaaaaaaaaatacaaaaattagctgggcatggtggtgcacacctgtagtcctagctactcaggaggctgaggcagaagaatcgcttgaacccgggaggtggaggttgcagtgagcagagatcgagccactgcactcaagcctggcaacagagcaagactccgtctaaaaaaaaagattctgg

SEQ ID NO: 35857 - DNA, 1065 bp, Homo sapiens
tccagccctaactttcactttctgaaaatcactttctaatcaacaaccaaaaaaaaaaaaaaaaaatccctctatgaccatatagaaatcccaccagtttgaaagctaagtcaacgtaacggaaattgagaagactcaagaataaagacaaaacaattaagagtttggctaaacctgctactctaatgtttatattattgatgaatgacgatttcagaaacgttttactgcaagagcgtgacaatattttctgacggggtttgccactgaaacttctggccattggagaactttaaaaaacatgaaagatatccatgctgtatgtgcagaactttccagtaaatgccaaactccctcatttatgctacgtggctcacccaagaaaggcttccataaatatttatcgaattaaactgaagggatgacaaaaacccaatgatgtcttgacatccattccgatcctatattctatcattcatccaataagcactgatcagaaaccactgaggcaccgcacaggagactaacagctattgcatggaatacacagaacaccctccatttgtcaaagggagaaggaaaagagaggcaagaacagctatggaagatccagactgagaaggaacttcaaaacaaatttttttacttctagcatataaaaaccaagtatcactacgatcacagtagtcaaaggatttataggagtgaagcttaatttggaagacgaaaatcatgtgactcatgatgataaaagattctgggggccaggcgcggtggctcacatctgtaatcccagcactttgggaggctgagacaggcggatcatgaggtcaagagatcgagaccawcctggccaacatggtgaaaccccatctctactaaagaaaaaaaaatacaaaaattagctgggcatggtggtgcacacctgtagtcctagctactcaggaggctgaggcagaagaatcgcttgaacccgggaggtggaggttgcagtgagcagagatcgagccactgcactcaagcctggcaacagagcaagactccgtctaaaaaaaaagattctgg

SEQ ID NO: 35858 - DNA, 1083 bp, Homo sapiens
tcacaagcccttcattttcacgggagcacctggtggaaggcctggtacttagcagaacctcgggacatcaagaaaactgaaccaccacgagatgagtcattttctgtcatttttactaaaygtcaaaattagacttgctatatttccttttgtttctgtagtaggaagtgagggggtgaaaatatttccataacaatatgctacaaagaaagtcagtaaacctaaacaattttaatcagcatcttgtaatatgggtcattatgaagattatttttttaaaaagcaacatgaaacagataaaaccttaagcatttaaaatggaaactggttaagaaggtgccttttcaagtggaaaaggatttggtatggaaaactttttattttattggagattaagtctcactctgttgccaggctggagtgcaatggtgcgatctcagctcactgtaacttctgcctccccagttcaagcaattctcctacctcacactcccaagtagctgggattacaggcacacaccacacgcctggctaatttttgtatttttagtagaaatagggtttcaccatgttagccaggatggtctcgatctcctgatgtcgtgatccgcccacctcagcctctcaaagtgctgggattacaggcatgagccactgcgcccggccggaaaactttgtagatgattttattctcaaaaagggtagatacattgctaagaatcaacatcttaccttaaacacttccattggaagaggaaatttggcagcatcaataagggatttttccagagtacatttccattcagaggccatcttcaaaggatagatttctgtatcaacagcaaatcacagaagagttgaaggactaacacgttctgccgggtgactctttcctgcatgctaattcccaggctttcctgatacctcagcacggtcagtgaccgtgagtgttcacaccccatacccaccatgagcagccacctgctgaaaggactttctgaaattaaatagcaacttgggattctgctgtcagaaatgaagaataaacttaatagagctcttcttcagggaacatttgtatgc

SEQ ID NO: 35859 - DNA, 1083 bp, Homo sapiens
tcacaagcccttcattttcacgggagcacctggtggaaggcctggtacttagcagaacctcgggacatcaagaaaactgaaccaccacgagatgagtcattttctgtcatttttactaaatgtcaaaattagacttgctatatttccttttgtttctgtagtaggaagtgagggggtgaaaatatttccataacaatatgctacaaagaaagtcagtaaacctaaacaattttaatcagcatcttgtaatatgggtcattatgaagattattttttwaaaaagcaacatgaaacagataaaaccttaagcatttaaaatggaaactggttaagaaggtgccttttcaagtggaaaaggatttggtatggaaaactttttattttattggagattaagtctcactctgttgccaggctggagtgcaatggtgcgatctcagctcactgtaacttctgcctccccagttcaagcaattctcctacctcacactcccaagtagctgggattacaggcacacaccacacgcctggctaatttttgtatttttagtagaaatagggtttcaccatgttagccaggatggtctcgatctcctgatgtcgtgatccgcccacctcagcctctcaaagtgctgggattacaggcatgagccactgcgcccggccggaaaactttgtagatgattttattctcaaaaagggtagatacattgctaagaatcaacatcttaccttaaacacttccattggaagaggaaatttggcagcatcaataagggatttttccagagtacatttccattcagaggccatcttcaaaggatagatttctgtatcaacagcaaatcacagaagagttgaaggactaacacgttctgccgggtgactctttcctgcatgctaattcccaggctttcctgatacctcagcacggtcagtgaccgtgagtgttcacaccccatacccaccatgagcagccacctgctgaaaggactttctgaaattaaatagcaacttgggattctgctgtcagaaatgaagaataaacttaatagagctcttcttcagggaacatttgtatgc

SEQ ID NO: 35860 - DNA, 1083 bp, Homo sapiens
tcacaagcccttcattttcacgggagcacctggtggaaggcctggtacttagcagaacctcgggacatcaagaaaactgaaccaccacgagatgagtcattttctgtcatttttactaaatgtcaaaattagacttgctatatttccttttgtttctgtagtaggaagtgagggggtgaaaatatttccataacaatatgctacaaagaaagtcagtaaacctaaacaattttaatcagcatcttgtaatatgggtcattatgaagattatttttttaaaaagcaacatgaaacagataaaaccttaagcatttaaaatggaaactggttaagaaggtgccttttcaagtggaaaaggatttggtatggaaaactttttattttattggagattaagtctcactctgttgccaggctggagtgcaatggtgcgatctcagctcactgtaacytctgcctccccagttcaagcaattctcctacctcacactcccaagtagctgggattacaggcacacaccacacgcctggctaatttttgtatttttagtagaaatagggtttcaccatgttagccaggatggtctcgatctcctgatgtcgtgatccgcccacctcagcctctcaaagtgctgggattacaggcatgagccactgcgcccggccggaaaactttgtagatgattttattctcaaaaagggtagatacattgctaagaatcaacatcttaccttaaacacttccattggaagaggaaatttggcagcatcaataagggatttttccagagtacatttccattcagaggccatcttcaaaggatagatttctgtatcaacagcaaatcacagaagagttgaaggactaacacgttctgccgggtgactctttcctgcatgctaattcccaggctttcctgatacctcagcacggtcagtgaccgtgagtgttcacaccccatacccaccatgagcagccacctgctgaaaggactttctgaaattaaatagcaacttgggattctgctgtcagaaatgaagaataaacttaatagagctcttcttcagggaacatttgtatgc

SEQ ID NO: 35861 - DNA, 611 bp, Homo sapiens
aagtagatatgtttatgccttcaatatatcaacccaggctacttcagacagacgcttaggatatgaatatgaaattaagcacagttaaaaagcaacartaaacctttgggactgtatttttaatttcttgcatgtctgctttttagcatgaagcgatctattttgatcctcatagcttttgaactcaccttgagctttaagcccctgtttccgcagtttattcagtcataattacagtaagtatcagatcctgccagaactagccaagccatcggtgcactgcccgaagtcattgttacttacacaaagacacacaaagggtaattcacaaccacacatcctctgcgtgtgtgcattgtctataatcctttctagtgtttcctgtctgctgaacttttttcttctagtttggcctttctaaattcttcttagtagtagctaacgtaattgggaacactcaatgggcctcaacacacacttctgtggagactgaaagaatggggcctctgatgtccacagtgagaagggggcactcaggaagacactgcttatcacaggatccccaaaagtaggcacagggaccagttcacagagccccctgcaagctgctc

SEQ ID NO: 35862 - DNA, 612 bp, Homo sapiens
cctcgagcagatggagagtgtgggggcagggttgggaggctgggtctagactgaattgtctagactgaattggaggtgaccacaggcaagtccttaaggtggccagagagcaaatagaaataccagacacccagtcacatttgaatttaatcccgtgctactcacatttcagtggggtcctgtgttttgtgtggyggccctccctgcagctccaggcctgtttcttcacctgccaagcccgatgtacaggctgcctgccacacccactgggggtcccccccgctgtgaggctctggggagacatcgccacatctactcattccgcacgcatggctgcactccctctccaggccaggcacagatctgggtagtggagttaagcagggaacaaaaccaataaaaaccattgatgttaactggcagacagctaaattttttttatttttattattttattttatttattttttgagatggagtcttgctcttgtcacccaggctggagtgcaatggtgcaatctcagctcactgcaacctccacctcctgggttcaagcagttctcctgcctcagcctccaaagtagctgggattacaggcatgtgccatcatga

SEQ ID NO: 35863 - DNA, 1174 bp, Homo sapiens
catattacatagaactgagtcggccaacagaggtggaagtaagcctggggctggggaagggacagatgttctttcttcatagccatgaagtcctatttgacttttaaaagttatgtccatgtcacttttttcttttttgagacagagtctcgctctgtcacccaggctggagtgcagtggcgcgatcttggctcactgcaacctctgcctcccgcggagagactacaggcacgcaccactacacctggctaattttttgtatacacaggtttttgccatgttgacctggtctcaaactcctgagctcaagcgatccacccgccttggcctcccgaagcgtggggtttacaggcgtgagtcactgtgcccagctatgtgtcacttttataacaaacttatctttttaaaaaaagaagggaggggaaggccgggcgtggtggctcatgcctataatcccagcactttggaaggccaaggcaggtggatcatgaggtcaggagatcgagaccatcctggttaacacggtgaaaccccgtctctactaaaaataacaacaacaacaaaaaactagctgggcgtggtggcgggtgcctgtagtcccagctacttgggaggctgaggcaggagaatggcgtgaacccaggaggcggaggttgtagtgagccaagattgcgccactgaactccagactgggtgacagagtgagactccgtctaaaaaaaaaaaaaggaggggaaaggaaaaacagaagcccctagtatatgggtccatgcaccaatgtggaccccccaccttgccctgctgaagcaccaaaggatgcgcagtgcaggtggatcagcacaggtggcatggctaaggactcagagagggactgagcctgcgagcctgcgggaggtcagagacagatgccgatgtgaaaaactaatccgcactaaggggttaattgctccayctctcagctatcacaagggctcttcagcagcttgctgatgctccatatatactcactagctagaagctttgaccctacattagaaagcaacccctgggtgggatgtagctcatggtagccacccctggagaggtgttaggagtgctcagtggagactgcaccccttcccttcccccatgggtcatccaggctcagggtcttatgtttcccaggttccatgtt

SEQ ID NO: 35864 - DNA, 1341 bp, Homo sapiens
gtcatctgtctccttcctgagaacaaatgctccagctggacagggatttttgtttcttccacttcctgctgtctccctgtgacccagtagggtgtctggcatgtagtaggtgctcaataaacatttgtggaggaactgaatgaatgaatgaatgaatgaatgatagtctcttcgtcacagccctgtgcaaggcagcgggatcacctgcattttaggataaggaaactgtggcacaggttgactgagatgctcattgtcacgatactcctgccagggccaggaattgggtgggagtttgagtaccccaagtcaccctccctgggaggtagagggcctcacgctgaaaccaacagcaagcgctcctcagagcaagcacagcccatgctgctgtgagtctgctcactctaaacttcctgcctgccacctttccaggggtgaggtgagcatgacaggcaacaagcaccttcatgtttaagatggaccttttttttatttttttaagagatagggtcttgctctgttgtccaggctgatgtgcagtggcatagttatagctcactgttgcctcgacctcctgggctcgagtgatcctcctgcctcagcctcctgagtagctgggactacaggcatgtgtcaccatgcccactaatatctattttttgtagagatggggttttgctatgttgtccaggctggtcttgaactcatgggctcaagcaatcctcccactttggcctcccaaaatgctgggattacaggtgtgagccactgtgcctgacttaaagtggactgctaacggctctatttttctgattcctcttgggttgcagatagggatgatgttgacagtagagcctggtggcgggagcacggaaatgccactagccatgggactcttgagcacattcctctacttccctgtgcctcagttcccttataggtaaaatggggccacttctgttgtgtgcgtgaaccatggtgaggaccaagtgagtgagtttgcatctgtggagagctccaagtagtgcccggctcccagsgagcactcagcaagggtgagctctcagcatcacccagcagatgacagcatctggccagaaaccacagcaagtgtctgctagggagggaccacaaccagagccaacactggggggggccctgctggctgtctcctgggactctgccctcccccaccctggttctgtcaggaccccagtgtacaactccagcagtcacagcccatgtggaaggtgccctgcagctgcacatgacagtggccctgccaccccttcccatgaagctatgtgccctggaagctgaccccattcatgttgtgaaact

SEQ ID NO: 35865 - DNA, 963 bp, Homo sapiens
  misc_feature (1)...(963): n = A,T,C or G
ttcttttcagatagttcacatgtactctccgtgaaaacatttaactttgagtaatagtgaagagttgtctggcatcaactcttcatctattacattcaatttgattgaattaagcaaaaatttttgctcacagnnnnnnnnnnnnnnnnnnnnnnnnnnnnnnnnnnnnnnnnnnnnnnnnnnnnnnnnnnnnnnnnnnnnnnnnnnnnnnnnnnnnnnnnnnnnnnnnnnnnggatacacagaataatattcatttgaacatctaccttctgttatatctcttttcaaaatcaattttattatgttgtagcacactttgtgtctattcacacagtttgcttcatagcctttgtgtgcttcctatttggggatacacattttatttcctaataactctgcagaacgaagtggtcccctcactctgagcacaagtgaaatgaggagatatcagcatcaagaacatcaaaaacttggtagactagagactcagagcactaccagggcctccaacctagaatacaaactctatgggacagatgatgtaacttgttttagtccaccaacctgctgtgattatttgtatagttagtaagactgccacacagtgaggrgaaaacacctcttagatgtaataaatgggatcagaagagatgatcaatgtaaaggcatggtaaaaggagacaaggagcctggattcagaactcctctgcaaatccccagtagagtcaatcatttgacagctttgagcctaagtatccttgtctaaaaaaatgagggcatgcaactagttattaataatgtccatcattcttttcactcccatattttattaagaaaacagaaaaaaaactctcatataaacaatttaaaagtttagaaattcagcagcctgactgaaagaagctggtttgagatgctactcagctttgaatgtagattcaaacacattcaaatctagagat

SEQ ID NO: 35866 - DNA, 963 bp, Homo sapiens
  misc_feature (1)...(963): n = A,T,C or G
ttcttttcagatagttcacatgtactctccgtgaaaacatttaactttgagtaatagtgaagagttgtctggcatcaactcttcatctattacattcaatttgattgaattaagcaaaaatttttgctcacagnnnnnnnnnnnnnnnnnnnnnnnnnnnnnnnnnnnnnnnnnnnnnnnnnnnnnnnnnnnnnnnnnnnnnnnnnnnnnnnnnnnnnnnnnnnnnnnnnnnnggatacacagaataatattcatttgaacatctaccttctgttatatctcttttcaaaatcaattttattatgttgtagcacactttgtgtctattcacacagtttgcttcatagcctttgtgtgcttcctatttggggatacacattttatttcctaataactctgcagaacgaagtggtcccctcactctgagcacaagtgaaatgaggagatatcagcatcaagaacatcaaaaacttggtagactagagactcagagcactaccagggcctccaacctagaatacaaactctatgggacagatgatgtaacttgttttagtccaccaacctgctgtgattatttgtatagttagtaagactgccacacagtgaggggaaaacacctcttagatgtaataaatgggatcagaagagatgatcaatgtaaaggcatggtaaaaggagacaaggagcctggattcagaactcctctgcaaatccccagtagagtcaatcatttgacagctttgagcctaagtatccttgtctaaaaaaatgagggcatgcaactagttattaataatktccatcattcttttcactcccatattttattaagaaaacagaaaaaaaactctcatataaacaatttaaaagtttagaaattcagcagcctgactgaaagaagctggtttgagatgctactcagctttgaatgtagattcaaacacattcaaatctagagat

SEQ ID NO: 35867 - DNA, 739 bp, Homo sapiens
agccttcaatgcttgactctttattgatttgatttgatccagagagagttttgcaaagtctttacattattaaaatttagtttatatgtttcttcttgtttattttcaatgtggctactagaaaactttacagtatatgtgtaccttacatctgtggctctcattctatttcttttgaatatttgtggtctaagagaatgtatgggctgcccatgattgtatgatcctctataaaagcctatttctgaacaatggtgagttcaaatgatgctcccygacacatttctctgatgagtacttctacgtgcagggtgagggaaagagccaggtgttttagcagtctgctaaaatgagagtagcattaatgtgctcttgggaaaagcaagaagcctggttagtttatgaactaaataaaaggctataccaccttgataagagtgagatcaaagaaggaacatgaattaatctgcatgaagtggagtataggtgtgtgtgtccttggatgtctgcatgtgtgtatgtgtgaatgtccctatgtgtgtctttctacatagctccatgagtgtacgtgcatatgcacacctgtgtgtgttcttacatgtatgcctgtgtgccagtacatacccatgtgtgtgtatgcgcatacatgtgtgccagggtgagtatatacataaatgcttgtgtatatgcacccatgtgtattcctatgtatatgcgcatcatgtgtgtgcctatatgc

SEQ ID NO: 35868 - DNA, 1181 bp, Homo sapiens
gcatgtatagagaggaggaaagttagtttgatttaataaaaagtgtgcatcatgttgtattgcattacattcaaatacataagatagaggagataaaattgaacattgtttacctcccaagaagtgacattctgaagcccagggtaaccaatagacaaccacatgataattagcaatattatttacttacaattttatttatttatttatttatttatttatttatttatttatttatttatttttgagacggagtctcactctgtcacccaggctggagtgcagtggcacgatctctgctcactgcaacctctgccttctgggttcaagggattctcctgactcagcctctagagtagctgggactacaggcacgtgcaaccactcccagctaatttttaaaatatatttttagtagagatggggtttcaccatattggcaaggctggtctcgaactcctgacttcgtgatctgcccaccttagccttccaaagtgctgggattacaggcgtgagccactgcgcctgtactacaatcttatttatgtacctgttttgataagaaaacacttaagagatggaaaatatgaacaaatgcaaacttcagaatcagaaatgttgaattataagagataccaaatcagcaaaacaattcaaaaggtcttataaatttctatttgtgatatagtacagaacayactcattctttcctcagattccaagacatggagaaatttaatcctaattttagtaaactctgatagttaaataatgagtaatatttcatgatatatgagggaaaaaaaccagctaataaatattggataacatatttgactactaaataaagttttaatgaacaccctcaaatatttatttcttaaaaaacatagccagggggtctatactgaccactgatgtcatgcagattaggctataacaaattatttcacaaagtaaaacacaaaggaaaatgtcaagaagaccagtaaacaatcttatatttttcttgatagatttttttgcaaaaggataatattattggcccataatagattagctaaatccgaagttttcctgtttggtttgaagtttataaaagaaaatcacagtctattatttagatggaaagttcaggaaagtgttgaacatagagggactgagtttgtttcattgcatat

SEQ ID NO: 35869 - DNA, 1161 bp, Homo sapiens
ggtcatctcaaaccctatatttgggaagttttggtagtttgggcaatgaccttgtgagcgagggcaaatgagtcctaagaaaaggtctttgaatcatgctcatactgtcattttctgttgcccccaaaatcaccaagcaaagctaaaagactgttccttcttgatacccctgagaaaatgtattatgctttggtgacattttcccttgaaagctatctcttcatatattttaatacaattttcctgtgtacagagtttcactaggccatatgtgaaccacattagtaatgagattgagtacaaaaggatgttaattattaaggctgctttcactatgacatctatatatatcactgtggcattatcctcattgcataagtggtcttatgggtggcaagactaacatgttgacctctcctagagttttagactatcctgagtagaccaaatgtaccaaatgtttgagacctatttacattattacatgtatgatatgacagctaagaatactcagtatatggaaacattgtaaagttgctttaaatatgaacagaatagaattattaatctcaaattaaattgtatgctgttgttcattcagatccattaattggaggttgaagatctggataaaagcaatatttagttcatttcccataacagtggctctcaaggagagaggtctagtccctgagtgtgctttggaaatttacagggacaattttggttgtcccaatagttggatgtgctgttggaatttagtgggtgagatccrgggatgctaatgtcctgcagtgtttgagcagtctgacacaataaagaattgtcctacatcactcatgactgttttgtatatcacagtccattcatgtatgcaaatatatggggtgattagcattatatccctacttcagttaggattacttctctcttgctctcatattatgcaaataaatttggcctgttattatgtaacctaatgctagtttttagtctagtatttgcttatacctcagttctttaattttcctctttggcttgactgcaatgacttacgacctttttataactcttaatccaaagatagtcattgtaagtgggtaaagaaaaaaatctaattaatcaccatgacttctagtgtagtcatgcctaagattttcc

SEQ ID NO: 35870 - DNA, 1161 bp, Homo sapiens
ggtcatctcaaaccctatatttgggaagttttggtagtttgggcaatgaccttgtgagcgagggcaaatgagtcctaagaaaaggtctttgaatcatgctcatactgtcattttctgttgcccccaaaatcaccaagcaaagctaaaagactgttccttcttgatacccctgagaaaatgtattatgctttggtgacattttcccttgaaagctatctcttcatatattttaatacaattttcctgtgtacagagtttcactaggccatatgtgaaccacattagtaatgagattgagtacaaaaggatgttaattattaaggctgctttcactatgacatctatatatatcactgtggcattatcctcattgcataagtggtcttatgggtggcaagactaacatgttgacctctcctagagttttagactatcctgagtagaccaaatgtaccaaatgtttgagacctatttacattattacatgtatgatatgacagctaagaatactcagtatatggaaacattgtaaagttgctttaaatatgaacagaatagaattattaatctcaaattaaattgtatgctgttgttcattcagatccattaattggaggttgaagatctggataaaagcaatatttagttcatttcccataacagtggctctcaaggagagaggtctagtccctgagtgtgctttggaaatttacagggacaattttggttgtcccaatagttggatgtgctgttggaatttagtgggtgagatccggggatgctaatgtcctgcagtgtttgagcagtctgacacaataaagaattgtcctacatcactcatgactgttttgtatatcacwgtccattcatgtatgcaaatatatggggtgattagcattatatccctacttcagttaggattacttctctcttgctctcatattatgcaaataaatttggcctgttattatgtaacctaatgctagtttttagtctagtatttgcttatacctcagttctttaattttcctctttggcttgactgcaatgacttacgacctttttataactcttaatccaaagatagtcattgtaagtgggtaaagaaaaaaatctaattaatcaccatgacttctagtgtagtcatgcctaagattttcc

SEQ ID NO: 35871 - DNA, 1161 bp, Homo sapiens
ggtcatctcaaaccctatatttgggaagttttggtagtttgggcaatgaccttgtgagcgagggcaaatgagtcctaagaaaaggtctttgaatcatgctcatactgtcattttctgttgcccccaaaatcaccaagcaaagctaaaagactgttccttcttgatacccctgagaaaatgtattatgctttggtgacattttcccttgaaagctatctcttcatatattttaatacaattttcctgtgtacagagtttcactaggccatatgtgaaccacattagtaatgagattgagtacaaaaggatgttaattattaaggctgctttcactatgacatctatatatatcactgtggcattatcctcattgcataagtggtcttatgggtggcaagactaacatgttgacctctcctagagttttagactatcctgagtagaccaaatgtaccaaatgtttgagacctatttacattattacatgtatgatatgacagctaagaatactcagtatatggaaacattgtaaagttgctttaaatatgaacagaatagaattattaatctcaaattaaattgtatgctgttgttcattcagatccattaattggaggttgaagatctggataaaagcaatatttagttcatttcccataacagtggctctcaaggagagaggtctagtccctgagtgtgctttggaaatttacagggacaattttggttgtcccaatagttggatgtgctgttggaatttagtgggtgagatccggggatgctaatgtcctgcagtgtttgagcagtctgacacaataaagaattgtcctacatcactcatgactgttttgtatatcacagtccattcatgtatgcaaatatatggggtgattagcattatatccctacttcagttaggattacttctctcttgctctcatattatgcaaataaatttggcctgttattatgtaacctaatgctagtttttagtctagtatttgcttatacctcagttctttaattttcctctttggcttgactgcaatgacttaygacctttttataactcttaatccaaagatagtcattgtaagtgggtaaagaaaaaaatctaattaatcaccatgacttctagtgtagtcatgcctaagattttcc

SEQ ID NO: 35872 - DNA, 633 bp, Homo sapiens
gtccttggtcaggtaatcaaaaggttggcagaaaaggtagcagggtgcatggctcacgcctgtaatcccatcactttgggaggctgaggtgagaggatcacttgaggtcaggagttcaagaccagcctggccaacatggtgaaaccccatctctactaaaaatacaaaaattagcccggcctggtggcagatgcctgtaatcctagctacccgggaggctgaggtgggagaatcgcttgaacccaggaggcagaggttgcagtgagcagagatcgcaccactgcactccagcctgggcgacagagcaagagtccatctcaaaaaaaaaaaaaaaaaaagagagaatcttaaaaatagattcacaaataccttaactgtttgatataacatgaaacaatctgtgtaggccaaagctgctgctttgagttcaggtcttctggctggagttctgccttgtttgttttgactgtacccattggccttgctgacgattttcagtcctttttaaaatgatttgtaagtggaatgcgaggacactggcaaagcagtttgaatctggaattctacattgttattatcccyctcccaccccaaatctctcccaaaactaaatcaacagatttatttttagca

SEQ ID NO: 35873 - DNA, 539 bp, Homo sapiens
agatcctccctttgcaggtttgagcttagttctttagtctcttgatgggagggatcccctgtgtcggtggcagtcccctccctctgttgggattcagcacagtgaaaccacaggagatttcactccactttccagaagtttttggcccagccactcagcctccacgcagacccaaaactcaaatagtgctctgcgaggaacaccagccgcacattgggagttcctttagttttcacccatcacgtgggcattgtaagaaagccaccaaaagcttttttggcttctctttccttcagcacagcctctcagcctgagtcaagcgagatctgcagtccaagcctagaagtgggaaacgctaccagagaggaaaacagctacygtaaccccccaaggggctcaccttgcctgctgcctagacagagcagatttagcaagacaggggaattgcaatagagagtaattcacgcacagccggctgtgcaggagattggatttttattactacttaaattagcctccctgagcatttggggagcagg

SEQ ID NO: 35874 - DNA, 524 bp, Homo sapiens
ggccctaagcagtttctagcttgacttttcccctttcacaaaaatgtaaagcattattttctgatattgcttaatccaagaatatatttaaaagcatataaatctgggatcagaaaacactttctttaaatagtgaatagtttaaatattgtgagccatatggtctcaaactcatattctttgctttttttgttttctgtttgttttatattagtttgttttacagcccttaaaaactgtaaaakactttcttagctcccaggccatacaaaaacagatccataagtttgccaacctctgatatggaaatttgattgactaaggattctttaaacaattttgcatagatattgcctctttctactgaaatttgctaagacagcaatgctaaatttcaagtcgtgcttactaataagtacctgatttataacccttcttatttaccagttaattatgaaagctatattatttcccagcaagtcaagttagggatataattgctattgtcttgaaaaagtttagaa

SEQ ID NO: 35875 - DNA, 2927 bp, Homo sapiens
ctgtcattggaaatcttaggggaaaatggggttgtgtagaagactgtatgttaattatcatcacgcacttttattccttcaagtaattgttctagttatactttatggaatattcagctagaagaggtagtcaacacagaacatggaattacagagctaaggctgggagcggtggctcatgcttgtaatcccagcactttaggaagctgaggcaggtggatcacgaggtcaggagttcaagcccaacctggccaacatggtgaagccccatacgtactaaagattaaaaaaaaaaaaattagccgggtgtggtggcacacacctgtaatctcagctgctcgggagactgagggaggagaatcgcttgagcctaggaggcagaagttgcagtgagccgagatagctccattgcactccagcctgggcgacaggtgagactccgtctcaaaaaaaaaaaaaaaaaagaattacagaactgaagggatctgagaaagtgctggtctagtcgcagactgagatctcataaatccaagaaagaaatatgattctttcagttctttctcaagacctagagaaaaacgaacatcaaactcctctaataaactagtttcttgataaccttttagatgtgctgcatttgggtcctttttgttttttatttgccaatatctgcctctgaactgtgataaatgagaatattagaaaatcactacaactacaaacgtcaatgttttgaagtcagacagattcagtttaaataacaattctagcacttcctagcttttatctttagcaagtttttaaatacctgaacgtcgaactcctcaactagacataagaattgctgtgagaattacaagcaaggcacctggcaccaacttgggcacagaactggccctcagtatacagtggctacagtgatgattcacatggcgttcttccttgcccccatgtttacttcaactacctccctttcaaggcttttcgtgtcctctgttccaataatggaaatgtggtttgaccatgcagaaatcggattgaggcaaattatccaacaaggagctataacaataatcagggaaactggagagtgagcgagaaaaatattaaacatcttagttcatcagaataagaaaaataagaggattgctgggaacctcagattatggtattgaaactatatccacacttagtccttgactttcgagactgactctgccatcgaacatttgcatggttcttagaaacgataaaaaatatcaattttgaattttcaggggaggaaaacaatattgcgtctttaaatgggtttgccttttttagaatttatcactatgattggaattcactttttagttttgtatttcaatgtcatatgttacaagaaacacctttgttaagtgaataaattccctttcaaatttgagataatttgtcttccagactttattaattatactaggttgattgtttatttcattttttgagacagggtcttgctttatcacccaggctggagtgcagtggtgcaatcacgactcactatasccttgacctctctggctcaagcaatccccctacctcagcctcccaagtagctgggactacaggcttgtgccaccatgcccagctaattatgtgtgtgtgtgcgtgcaaacgcatgcacacacacaagcatgcacatgcatgcacaaagatagagcctcgctatgttgcccaggctggtcttgaacttctgggctcaagcaatcctccctctttggccttccaaagtgctgggattatatatgtgagccaccacacccagttaattggttgataaaactaggataataatacctatcccaagccattattgttgtaaggtttaaattaaatatttaagtgtatataaaacctggcaggtactatcgtgcttaataaatgttcatttacttccatcgtcatataatgttactcaacataagtaagtttttttacttactacaaatgttttgaagaaaaaggtaaagaaataatatttctttaaattgatagtgcaaattgtaggtttctttatcttgcaaactttcttttaatttagagctaccgttaacctaaagaaaatctcttaagagagacacggggctaaaatttagtgctttgcaagtacaatatgcttcagtatttgggatttgctttctcaagaagttctgagtacaagtaacaaaatgtttggaagcctattaacgttcggtttggattctgcaaaaagaagtaggtttcaaaactaccaaaatattctaaattacatctatttgggggcaagaaaaaaaaatctagttaagtctagattttattctaagaggaaactattttttgccctttaacgtaagtctcatagggatcaaaatgaaagtcaatttagaggaaatctatttggaaacaagctgaatcccacgccctgggagcaggcagtgcagtctccaccagccccgcccccagggactgagtgaccacagtgttttaacccttcgtgggcattgttctggaaacaggaaaaggacccatcttattccaaaaggcaagtttcatattttaaatgaattcaggataagaaaaataagagggttgcctgttgtttttgcatagaaactatatttctatgcaaacacttccagcagaacttttattttgggttttaaataagagggaagcattgttggagagacacagtgaaattactgtggagaatgtataatggctttgaggctgattgggagaaaatgtgtccagttcctggatcagaaaagataatggtcaccaaaagtagttcccaatatctcatataagcaaaatgtatctcaattcaggtactgtaggtcgagggggaacaatgggtaaatgtgaatgtcatgtctttaaaattcatcttgacttctggattt

SEQ ID NO: 35876 - DNA, 629 bp, Homo sapiens
  misc_feature (1)...(629): n = A,T,C or G
tttccctttctccttgttgcttttggatgttctccagcaggagaagggggatgtgcttaactgcatggtctacgttcagaccacaagtgcccccttcgcatttttattcttccatttttttccacagtcaaagactcttaaattaaagttactagacctctgacaagaatgctaataaatgatttawaagattttcatgaatgaactgtatgactgagagaatgggagtgagtattaacactgcnggcctcatttgattaggctcacgcagacagactctattgaaatcactttttaccctattctcgttgatgaatgttactagtatgctgtttacttcctctaccgaattgcaaatgaatgcaattaaaattctaaagcaaaaatccaaaccctccttgccctgatttagtacacacctaaagtgtccagtttcatacacagtatctgttcaatacatgcaatgaaataaaataaaaatgctcttcagtttaaaggttattttgtggttatgcttgaattatttgagaaaaagtatggctctcctttgacatttccataaaatatgcaacaaaattgaaagtagtaagacaaaatatggtcttaatcatcagctaaacatttatttt

SEQ ID NO: 35877 - DNA, 649 bp, Homo sapiens
gcgcgcrcacacacacacacacacacacacacacacaagcacaccagttgtgaaaaccaaaaatgcctcaagacactgccaaatatcccccatgtaggtgattgaggagaggagggaaaattgtccctggttaacaactgctgctctaaacttaatttatattcataaaattgtctgtttctgaagcaaaaattgatcttttaaatttatttttagatggacacgtttatttcgacttctacgacttatcattctgataagagtttttcatctggctcatctaaaaagacaacttggaaagctgataagaaggctggtaagtgggcaaaacatgcttacgattcagaaaaatattttgtgttttgggacccattggcaagggttgatatctatactgtataatgttctttatttttatgttgatttatgtttcaccaactaataatggttttaaactctcaggtttcaggaaacaaaaggtgatacgaaagtgatggatttgacctagacctcacttatattacaggtttgtgacacttaactgttgatttacttacattaacttcactttttcttgtaattatatttttattttgtttttgcctcatctaagccacattcattcaaagtattctttattcgtgaggct

SEQ ID NO: 35878 - DNA, 551 bp, Homo sapiens
cagaaacctccgttctactgtgaggcccgaggaatgcaaatggaaagtaggactcccacttatgagatcttgtagaaaagaggcccagagaaggggcagtagatttgttcaaggttacacagctagatggtgtgaagacagggcaggactgtggtccctgggtcccttgtctgatgttgttgcagtctctgcattagtgctccataatgggtctgtggtgtgcccggatgtaagggttggtttggagcatttccaccctggctctctggacatggaacttgctggactttgggatttttctgtcagccattgataggagcagagtgttgttgtgttttgtggcagagaccacccatggaagtgatygactgtaagcacagagccagctgcagcccgaggtgatgtggatggagcctaaatgtgttgttctgtgtgtctctccttttccttttaaacaaagtttccctcaccacacaggttttcagccagctcatctactctcaagtgctgggaagttcgtatttccctatctgcagtggctgtaagagatc

SEQ ID NO: 35879 - DNA, 652 bp, Homo sapiens
tgcatggtgctcaaggccagggttggcaccctatgagcactctgtaggctgcaaccgctgctctcactgcaacccctgaggtgccygtcctcaccaccagctgcacattccaggatgaagtttggatgcttgcatcatcaggagtcaccaggaacagcctaagtactgatgtaaacataaatcttaaaatgctgctgtctacagatacaaaaaatacaggcacccaggtcaaactaggcaatgcgatgtgtgtgttcatgctttatgtgtgtgcagtcaagtgccgcatagtgacgtctgggtcaacactggaccacatagggtccggtggtcccttaggttacagtgcagctgaaaaattcctatcatctagtgaccaacgcattgctgacgcaaatctgtgatgaaaagaagaaacaaaccaagcaaaccatcatgatcgtgtttctgaaaagagtgacatctcctcaagaagagcctcaggcaggtcctgcaggagggactccagaaaaaggcattgttatcacagatgacagctccatgcgcacagatgacagctccatgcgtgttactgtccctgaagaccttccagtgggacaagaagtggaggtggaagacagtgatatggatgatactgaccctgtggaggcct

SEQ ID NO: 35880 - DNA, 652 bp, Homo sapiens
tgcatggtgctcaaggccagggttggcaccctatgagcactctgtaggctgcaaccgctgctctcactgcaacccctgaggtgcctgtcctcaccaccagctgcacattccaggatgaagtttggatgcttgcatcatcaggagtcaccrggaacagcctaagtactgatgtaaacataaatcttaaaatgctgctgtctacagatacaaaaaatacaggcacccaggtcaaactaggcaatgcgatgtgtgtgttcatgctttatgtgtgtgcagtcaagtgccgcatagtgacgtctgggtcaacactggaccacatagggtccggtggtcccttaggttacagtgcagctgaaaaattcctatcatctagtgaccaacgcattgctgacgcaaatctgtgatgaaaagaagaaacaaaccaagcaaaccatcatgatcgtgtttctgaaaagagtgacatctcctcaagaagagcctcaggcaggtcctgcaggagggactccagaaaaaggcattgttatcacagatgacagctccatgcgcacagatgacagctccatgcgtgttactgtccctgaagaccttccagtgggacaagaagtggaggtggaagacagtgatatggatgatactgaccctgtggaggcct

SEQ ID NO: 35881 - DNA, 652 bp, Homo sapiens
tgcatggtgctcaaggccagggttggcaccctatgagcactctgtaggctgcaaccgctgctctcactgcaacccctgaggtgcctgtcctcaccaccagctgcacattccaggatgaagtttggatgcttgcatcatcaggagtcaccaggaacagcctaagtactgatgtaaacataaatcttaaaatgctgctgtctacagatacaaaaaatacaggcacccaggtcaaactaggcaatgcgatgtgtgtgttcatgctttatgtgtgtgcagtcaagtgccgcatagtgaygtctgggtcaacactggaccacatagggtccggtggtcccttaggttacagtgcagctgaaaaattcctatcatctagtgaccaacgcattgctgacgcaaatctgtgatgaaaagaagaaacaaaccaagcaaaccatcatgatcgtgtttctgaaaagagtgacatctcctcaagaagagcctcaggcaggtcctgcaggagggactccagaaaaaggcattgttatcacagatgacagctccatgcgcacagatgacagctccatgcgtgttactgtccctgaagaccttccagtgggacaagaagtggaggtggaagacagtgatatggatgatactgaccctgtggaggcct

SEQ ID NO: 35882 - DNA, 638 bp, Homo sapiens
tcagttaaactttcttgcactctctgcactctgcaaaggtaaatgtgttctaagtttacatgtgaaagtattcatggggcttctaggatatgtttcagtaaaatagtaaaaatctgctttctctctctccctctctctctctccttctcgggttcattcaggaaggaacaactgatccaactaaaaagaaactaaggagggcttcctggagaaaggggcacttaggttgagatttggagaatcatcttcaaatgggggaagcatttcaggctttgagtaaacatgagaagataggaaggttcgggactcctttgggaagactgaagagtccaggggattatagagtagggtcttgsgcagtgtgtgctgggtgggcaggaagatggttcagctggaatatagatgatgcttccactgcagtcagtcaggaggatcaggaggagcagtcgggggttttcccaaaaggcagtaacatgatccattgtattatagaaacaggttcgtggctggaactaaggtgggagaacctgagtttgggaagtcaaggtttgtaaaacagtgcagaccagagtaaaggggctctgtctcaccaggggatcaccccagcaggagggcccctgcctgtgcctgaagccact

SEQ ID NO: 35883 - DNA, 1272 bp, Homo sapiens
tccctccttcactctttgaaggatttgttactttattttcccatttgtagacacatggccagttcattgaaatggtacacaatttttactcattttctctaaaccawacctgatatttgtaatcctctgcttaaatacctcattttcgaggcactgctttttcataaaatccacaaagtttattacgatctgacaacaatcgaactgcacaacattatttttttccattccaccccatgtgtgtcatcttccagtccacctgtacttcccactctaacctaaacatataacttcatgattgtgaacataaaatgactttatgtacttcttgcatttctcctcctagaaaattcttgttcaatcttagacacagctccaatataacgtccactgtgaaacattctctgactccccatacagaggttatagcttctatcaggaccccacagaccaatgttcctactgctagtatagtattttctattcatgtgtattggtttatacgtttatctgtcttccaattctttgaccttctgaggtcataaactgtgccttagtcatctggaacagaaaaatacctgatgtggagaaaatatttgcagcttatataccgtacttggtgtctatagcaatcataagtaaaagcataaaaagaagcaacaaaaaaggacataaaaccatagaaaagtaaactaattatttgaacttttaaatcgtactaaagaaatatcaacaagtatgggaaaatgcttcacttaatttatattttaaaaaagcaaatgaaaacagcatcaagatatttattccatcagattggcaataattaaaacatgtatcagccaaaggcgacagaaaatagaaattttgtttcattaataatagtgtaagttgccatgtttttttgtactacatagtaggaaatgtcaaaatttcaaaatgaacacacaattttatctaaaaattctccttctagacatctacagaaatgtttacatttgagtaaaatatattgacagatgatgattgtggcaacttttaatgaattaaaagtgggaaccaatttaaatatttataaataaggaaattgttaaataaattataattcaatattgctatgtagatactaaaggtatataataatgaggtaagcctaaattatatttaaataatatataaatactttaaaatacagcaaatctatatgaaaatgtggccataataatctgctaattgaaaatgaaattaaacaatagaacaatattcataatataa

SEQ ID NO: 35884 - DNA, 1359 bp, Homo sapiens
gattctctttacaatggatgctgatcagttcctggtcaagtgacctaagacatgattgtgtcaatcaagaaaaacagccatgacaacaataatgacaagccctgctgggctaggctgctgactggaaggtacagctacggtgacacaaactttcttcctcagacatctctaaagagatggttctttcttggtaattgccatgtgttcatttaaaaagaaaaggccttgcaactttctaggcacatacacactttcctatgaaaattaaattgttcacaaaatcattatgcccactttcagaaaataagagacaaataactgctgaattggctttgggaggcttatgtaacctatatttacaagtgttttactctgaagcaagtagctgaggaacttagtaaacatctgcaagaataccccaaaattattttttccactgctatgttagtctagctatcacagaactgcagaatcaatctgctatccacaagagccccaaacaccatcacatcaaaagaactgcagatctcaaaaacataataattcagaaccgtagtcaagaaaagcattaaataaaaatccaccaccaccaacctttgcttgggcttctggtgctgtcaccttgacgaccttattgcggtttatcatttgcttcacccatttttctacttggacgttgaatttcatgaaaaccacatagcaaaaataagctgttaagagaagcaagctttcccaccacatgatgacattatccaggaaaaatatgatcagcatgatcaagtcaacaatgtagaaagacacatctcgaaagagcggccaccatgtcaggtttaagatttctctagaaaacagagcacacatgccaataacaaagagratgttgaatactgctgaacctacaattgtgcctatgccaacgttgctgtgagcgataaatacccctatgagagatgtgaaaagttctggggctgaccctcctgcagccatgaaggtggctccagccacatcatcagagatgcccagtttttcagtgatgacagtcaaagaaggaacaaagaactcatcacagacaatggctaaggctatgaacatgtagatcattccaatgacatgcagaatgatcgcaccttttcttctctcctcaagggaaaagatgtctttcgggtagtctccttgggcgtgatctgtactattctcagactcgccttccttagaaagaggtggctgtggagtataatccagaatcttgtcatttaaatctaagagagttctctgatggtaaccctgtgctaccctagggccacttacaacactggcctctcctgtgctctgtgtatctgtctcagaaaaggcactgat

SEQ ID NO: 35885 - DNA, 888 bp, Homo sapiens
aatgatatcacaattatattattaaaaggtagaaatgttaaatgcttaaatattttatctgattaggaataatgatccattaaatctcttggtttaaacaaaggagacacaatcatttattaaaaaccatcaagaatgggcaaaataataaaaatgtttaaaagttttaaaaatcaaattcttgaaaaagtaaatgaaattgtgcggaagtccagaaaaataatggtcagttttaggcatcaatatttaataaaacttcagaaaaataataatgttaaaatggacatgctatggtctgaatgtgtgtgtacctcaaaacatatatattgaaatgtaattcccaatgcaatagtattaggagattgggcctttagggggtgatcaggtcatgaggatggacccctcatgaatgggattagtgcttttataaaataagtcctggggagcttctttgcctcttccaccacgtgaggatgcagaaagaagttgccacatgaagcagagagtgagccctcaccagacactgaatctgttgacactttgatcttggacttctcagcctctagaactgtatgaaaaaaaatttctattctttataagccaccccatttatggtatttttgttatagcagcttgaatggactgagacaggacacattgtgatatatatgtgtagttctggcttgttaagaagatatgtactgaaatgagaatgcttcttttggaaaacataagacagtaaaattttaattattattgacaaagcttcatctgctctatataaacaaacattttctttaaatgmaaaattcagtactttgaagagagaattgaaaattgctcttttgttttttagtcttgggatgctgacatataaaagatctataa

SEQ ID NO: 35886 - DNA, 888 bp, Homo sapiens
aatgatatcacaattatattattaaaaggtagaaatgttaaatgcttaaatattttatctgattaggaataatgatccattaaatctcttggtttaaacaaaggagacacaatcatttattaaaaaccatcaagaatgggcaaaataataaaaatgtttaaaagttttaaaaatcaaattcttgaaaaagtaaatgaaattgtgcggaagtccagaaaaataatggtcagttttaggcatcaatatttaataaaacttcagaaaaataataatgttaaaatggacatgctatggtctgaatgtgtgtgtacctcaaaacatatatattgaaatgtaattcccaatgcaatagtattaggagattgggcctttagggggtgatcaggtcatgaggatggacccctcatgaatgggattagtgcttttataaaataagtcctggggagcttctttgcctcttccaccacgtgaggatgcagaaagaagttgccacatgaagcagagagtgagccctcaccagacactgaatctgttgacactttgatcttggacttctcagcctctagaactgtatgaaaaaaaatttctattctttataagccaccccatttatggtatttttgttatagcagcttgaatggactgagacaggacacattgtgatatatatgtgtagttctggcttgttaagaagatatgtactgaaatgagaatgcttcttttggaaaacataagacagtaaaattttaattattattgacaaagcttcatctgctctatataaacaaacattttctttaaatgaaaaattcagtactttgaagaragaattgaaaattgctcttttgttttttagtcttgggatgctgacatataaaagatctataa

SEQ ID NO: 35887 - DNA, 888 bp, Homo sapiens
aatgatatcacaattatattattaaaaggtagaaatgttaaatgcttaaatattttatctgattaggaataatgatccattaaatctcttggtttaaacaaaggagacacaatcatttattaaaaaccatcaagaatgggcaaaataataaaaatgtttaaaagttttaaaaatcaaattcttgaaaaagtaaatgaaattgtgcggaagtccagaaaaataatggtcagttttaggcatcaatatttaataaaacttcagaaaaataataatgttaaaatggacatgctatggtctgaatgtgtgtgtacctcaaaacatatatattgaaatgtaattcccaatgcaatagtattaggagattgggcctttagggggtgatcaggtcatgaggatggacccctcatgaatgggattagtgcttttataaaataagtcctggggagcttctttgcctcttccaccacgtgaggatgcagaaagaagttgccacatgaagcagagagtgagccctcaccagacactgaatctgttgacactttgatcttggacttctcagcctctagaactgtatgaaaaaaaatttctattctttataagccaccccatttatggtatttttgttatagcagcttgaatggactgagacaggacacattgtgatatatatgtgtagttctggcttgttaagaagatatgtactgaaatgagaatgcttcttttggaaaacataagacagtaaaattttaattattattgacaaagcttcatctgctctatataaacaaacattttctttaaatgaaaaattcagtactttgaagagagarttgaaaattgctcttttgttttttagtcttgggatgctgacatataaaagatctataa

SEQ ID NO: 35888 - DNA, 572 bp, Homo sapiens
cttggtaagaggctcactcagtaagaggcacatgggaaaactgaaacccttaaaagtgattcaggcaggtccattgactcaagatctctctaggcacatgcctattgcccattgaggtgtgaattacctccatgggttaaattgttgatgtagtttctgttaaatatagaatatgactctgaatgactattctccttgctcaggggatggaaaatgattaaaacaaaatgcctgctctgaatgcaattaaaccagggaaaataagaccagaacaaaaatgatcataacgcaaaatatgacagaagtagtttcagaagaatgatgcattgcaaaaaaaaaaaaaaaaaaggctcagcaaacacttcatggaagaagtggcatttaacatgttcattaaaagaagaaaagatgttttctggatacagtaggggagttaccttctgttatggtattagcataggttaagaaatagagacaggaaagcactagagtgaatgggatatccaagtgtaggcaagagggaggagtcccattcagcaagatcttctgggacttgaggtatytgtgagaga

SEQ ID NO: 35889 - DNA, 550 bp, Homo sapiens
tttggtctgtcgtctcccaacaatgcatcttgatgagataagtatatgaagctcygattaggttcaatattttagtcaaatgagctgtttacctccactccccaatgtgtcagtgtagacgcaagatgacttggatgaatatgttagaaactttgagtttgcaggggtgctttcttcctgagaatggcaaattagggctgctctgaaaagttaccctagttttgttttcttgttaggaacattcaaatgagcatgaagaaagagcaaatacttaccagtggtaatttaaaaatgtatatatatatataaaaattagctttattgccatatttctttgactctaagatgtacattttcatatatttttacatttctggaatggaagtaaggctacatgcatgtttaatgtggcatctctgtgttttccttctgttctacctccctccctcattctgcaaatcaaacaaacaactcaaagctctcattaaattgctgtcttacaatcaagggaataagatgatattttctagttcctcactcctgtccccca

SEQ ID NO: 35890 - DNA, 550 bp, Homo sapiens
tttggtctgtcgtctcccaacaatgcatcttgatgagataagtatatgaagctctgattaggttcaatattttagtcaaatgagctgtttacctccactccccaatgtgtcagtgtagacgcaagatgacttggatgaatatgttagaaactttgagtttgcaggggtgctttcttcctgagaatggcaaattagggctgctctgaaaagttaccctagttttgttttcttgttaggaacattcaaatgagcatgaagaaagagcaaatacttaccagtggtaatttaaaaatgtatatatatatatawaaattagctttattgccatatttctttgactctaagatgtacattttcatatatttttacatttctggaatggaagtaaggctacatgcatgtttaatgtggcatctctgtgttttccttctgttctacctccctccctcattctgcaaatcaaacaaacaactcaaagctctcattaaattgctgtcttacaatcaagggaataagatgatattttctagttcctcactcctgtccccca

SEQ ID NO: 35891 - DNA, 550 bp, Homo sapiens
tttggtctgtcgtctcccaacaatgcatcttgatgagataagtatatgaagctctgattaggttcaatattttagtcaaatgagctgtttacctccactccccaatgtgtcagtgtagacgcaagatgacttggatgaatatgttagaaactttgagtttgcaggggtgctttcttcctgagaatggcaaattagggctgctctgaaaagttaccctagttttgttttcttgttaggaacattcaaatgagcatgaagaaagagcaaatacttaccagtggtaatttaaaaatgtatatatatatataaaaattagctttattgccatatttcyttgactctaagatgtacattttcatatatttttacatttctggaatggaagtaaggctacatgcatgtttaatgtggcatctctgtgttttccttctgttctacctccctccctcattctgcaaatcaaacaaacaactcaaagctctcattaaattgctgtcttacaatcaagggaataagatgatattttctagttcctcactcctgtccccca

SEQ ID NO: 35892 - DNA, 536 bp, Homo sapiens
  misc_feature (1)...(536): n = A,T,C or G
cattacacatgaggttgggggttttattataaataaaagaggagaaaaaaatgggttgcttggtgcatactcttcagtcactttaggttttatcaatgaacaaaagggtcagaaaattagagaaaggcagaagaaataagggcaaattttggaaaatggaatgaaaggaaagttatgagaagatcgttcaagtcatttgcacctacttaggaatggacttaaaagaaacatcattctattatataaacattttccagaaaaattaaaacataatggaggcatgttgtttgtttacagggtgactaggtgaacagcccactaaaaggttggaaaggatactttttaaaaaccaattatttccataggttttggggggaacaggtgctatttgggttacgtgaataagttctttagtggttatttgtgagattttggtgtacccatcaacgagaagtagacactgaacccatnttgtaggcttttgtccctcactccactttcncctgagtccycaaagtccatttgcatcctcatac

SEQ ID NO: 35893 - DNA, 1206 bp, Homo sapiens
tgcatacaaactctgttgaatgttttgataaaaactttcagagttggaggtaaactgtcttcataataagctrttttcctagggcttcgttatatacagcacagcatttttttacagcattttattttatgtgcacatttatttttgccactttttaaaggaaatatgtgcaagaatataatgagacggtatatgaataaagattgcagcattaaaaatacatataaaggccaccatgactgcaatttttcatgagtgagaatttggtgagaatagtttacatgctctcctcaatgtttctaaagacacaacactgaatggaagtaatatggacccacagatcagcactcaatgtagcatatcttagaacagctttttccttactcccaggatacacagctgctgcccatattcccctctggggtacagttatgtcagacttgaaagaaaaacccaattcctgctctgccctggtccttttatatccagacgtatagagcattggggaaaaaaagtatgctttcagtatacaggcttcttattaacaaggaatatttataaacactgtgacctcctgattcctgaagcaaactcagctctagcgaggccacatcctcactgaagaatgaaagcggagtcaaggcctatgagccctgatcaagatttctgcctgcagctttatagttcctcaaaaaccagtctccctggagtcacctctttgcgcacaaacatttcacacagaacattgcgtaggattatactttctctcaataggtagtcttcttgctgcagtaataacattctaattgcctggaaaggaatataacttcaagagtatatgcaaccaaaaggtaaaagtaaaagacaaaatcaggttctataaactctagttctatattttcgtgtgtgcgaatgtgtataagcttgtgttattctcatttatgttgattttgtttgttcatcttgttttattttaataagaaagcaaataaaattgcagtgtggttccaaagagcaatcagaaagcacagcactccctgcacaacaggaaaaggaacagaagagaaggttgtgattggctcctggagacctcagcaaccttctccaaactgaacagagtataaaatgtgattttgctctcttcataatgattatcaaattcctgttggctaatacaattatttggcactaaatatcctctacttg

SEQ ID NO: 35894 - DNA, 1206 bp, Homo sapiens
tgcatacaaactctgttgaatgttttgataaaaactttcagagttggaggtaaactgtcttcataataagctgttttcctagggcttcgttatatacagcacagcatttttttacagcattttattttatgtgcacatttatttttgccactttttaaaggaaatatgtgcaagaatataatgagacggtatatgaataaagattgcagcattaaaaatacatataaaggccaccatgactgcaatttttcatgagtgagaatttggtgagaatagtttacatgctctcctcaatgtttctaaagacacaacactgaatggaagtaatatggacccacagatcagcactcaatgtagcatatcttagaacagctttttccttactcccaggatacacagctgctgcccatattcccctctggggtacagttatgtcagacttgaaagaaaaacccaattcctgctctgccctggtccttttatatccagacgtatagagcattggggaaaaaaagtatgctttcagtatacaggcttcttattaacaaggaatatttataaacactgtgacctcctgattcctgaagcaaactcagctctagcgaggccacatcctcactgaagaatgaaagcggagtcaaggcctatgagccctgatcaagatttctgcctgcagctttatagttcctcaaaaaccagtctccctggagtcacctctttgcgcacaaacatttcacacagaacattgcgtaggattatactttctctcaataggtagtcttcttgctgcagtaataacattctaattgcctggaaaggaatataacttcaagagtatatgcaaccaaaaggtaaaagyaaaagacaaaatcaggttctataaactctagttctatattttcgtgtgtgcgaatgtgtataagcttgtgttattctcatttatgttgattttgtttgttcatcttgttttattttaataagaaagcaaataaaattgcagtgtggttccaaagagcaatcagaaagcacagcactccctgcacaacaggaaaaggaacagaagagaaggttgtgattggctcctggagacctcagcaaccttctccaaactgaacagagtataaaatgtgattttgctctcttcataatgattatcaaattcctgttggctaatacaattatttggcactaaatatcctctacttg

SEQ ID NO: 35895 - DNA, 720 bp, Homo sapiens
ttatgttactgtttcgatgacgggcttaggaaaatttaagtgtctctgatatttccctaagtctgaaaaaactgttattttgaaaaatggaggaattgtgtgcttaacaactatcttacaagacaacagcttgtaaaaattaaaaagtaaaaattggttccactgtctgcatcacatcagcattagaagactgagctaagaaagtwgttacggctgagttggacaactacagctgaggttatgtcatagggttagtcagtttatcacttctattcatagtgaacttgatcatacactgatgtgtaatccaccttataaattatagagaattttaattagctgctttttaaggaaacagtatttgaaatacagctagcaccaattttctgcaattcttaaagcaaagataatttaccgtactataagcttaaatttgaagaatgaatgttctttcagtggcatttctgaaactttgctattgacctaggttaggggacagaatgggtgtgctgtcggggctgggcagaggagtgtagcccagagcagttactgcgcagtacaatttatttgaagctggtgttatattcaaaaagagagaaagattttgcattctataatatgttcttgttcacataacataaaatattctgaattacttgctaagtaaattatttaactgctgccctcctttaaaatatctaccaataaaattaagctcag

SEQ ID NO: 35896 - DNA, 720 bp, Homo sapiens
ttatgttactgtttcgatgacgggcttaggaaaatttaagtgtctctgatatttccctaagtctgaaaaaactgttattttgaaaaatggaggaattgtgtgcttaacaactatcttacaagacaacagcttgtaaaaattaaaaagtaaaaattggttccactgtctgcatcacatcagcattagaagactgagctaagaaagtagttacggctgagttggacaactacagctgaggttatgtcatagggttagtcagtttatcacttctattcatagtgaacttgatcatacactgatgtgtaatccaccttataaattatagagaattttaattagctgctttttaaggaaacagtatttgaaatacagctagcaccaattttctgcaattcttaaagcaaagataatttaccgtactataagcttaaatttgaagaatgaatgttctttcagtggcatttctgaaactttgctattgacctakgttaggggacagaatgggtgtgctgtcggggctgggcagaggagtgtagcccagagcagttactgcgcagtacaatttatttgaagctggtgttatattcaaaaagagagaaagattttgcattctataatatgttcttgttcacataacataaaatattctgaattacttgctaagtaaattatttaactgctgccctcctttaaaatatctaccaataaaattaagctcag

SEQ ID NO: 35897 - DNA, 616 bp, Homo sapiens
ggagagctaaagttagtgattctcagcatatatttgtaagagatctttgtgtgagtcatcacagctagctttaaaattgacacaaaggacacaggaaactggcaatctataaaagaaaaatgtcattcttcataaacatatgtttcaaagcccagactcccaaataaagcaatgcacatttaaaacaattaattaaaatgctacgtttcatctatgaaattggaaaacattaaaaattataatattcaacactactaagtatgtagcaatgtggcagaaactttaaaaagctgataagccttgacccagaaattctgcttctacgaaatcagaaattcatgtgtaaagctatttgttgtagtattttttataatgttaaatattgcaataaatggcaacatgaaaatggctttctatattatgataatactaaacagtaaatagcattttagaaaaacatttaatgatggggaaaaggctccataataggccaaaaatttgtaaaaaccttaaaattgtatatattcaayatggtaaatataaaattttgtatgtccaatatgttcctatttatttaaatacataggtgtgtatatatatgtctatgtacatatgc

SEQ ID NO: 35898 - DNA, 517 bp, Homo sapiens
agctgctccccatcaggaaactatgcttgcagcagttaggaattgtacattgctgctgctaataggaacctgacaagtgggggcttacagagattacggggttatttattcatttatttggttacaagaagtccaaagtcaggcggcccagggctggtacggcagctccacagcgccatctgggaggagagactcaggctccttttctctttctgtctcatcatcctgggcacaggactatcattctccaattgggctcatggtccaaatatggctgctgaagctccagacatcacattcacattctaaacaggaaaaaggaggaaggggagaaagacagacaggaacacgacagttcagtctgctccctttaaaaagctttctgggtgcactactcaccattccagctgtcatctccctggcaagagctgtgtcacatgactttttttggctgcaagggaaggcaggaaaagctattattttaaaactygggttatattggcatccaacataaaac

SEQ ID NO: 35899 - DNA, 622 bp, Homo sapiens
gcagtaatcttacaagcctataaaagttgggtggctagcagggtccttccctgtcttctgaggggtctgggtcaattcagctctgggaccttcttaagggcccttttgaagtcctgtcatcttcagtttttttagcaactcacattctgatatgacctgccagggagagggtgaaaatgatcagcaatggcaacttccactattataattcattttcctgatggtaaaactaggacatgctcattgcagagaatttggaaagtatgaaataaaaagaagaaaataaaaggtaaccatattttcccacccactgataatcaccatcaactttctgatgtccttctcttcctttttaagcttcagttttccgggtcttgatttttaaactatttcaatcatgcgtycatccttatttattgagagcatactattgttctgttcccgtcatcagtgatgtagcgatagaataaataaagtcctgttctcatggagatgaaataatatcagagacagttactaaaattcagagggcagaaagaccatgggaaaatcttcaaacacttggaagttaaacagcatacttctaaataattcatgggtcaaagaaggagtctcaaaggga

SEQ ID NO: 35900 - DNA, 1326 bp, Homo sapiens
tgcatagctgttaaagaaaaaaattagcttattttgtgtgttaaaaactgatttgaaaaccttgatcaaagaatattattataattgacacttcaagtatttttccagatatctcaaccaaaacagtggattgaatgtctttatgcttaagacagagctacatattgagggggaaaaatgccctgattaaagaagaaaaatctttcacattttttggaggaacattctaaatatatagagaattaagatggctgctgtagcattcatttgtaggcagtattacgtttgaattggattaacgtgtctgtattggaagctttgtatgtagcaagggactcccatgcaagctgccatcttggatattgaatgtattaaaatccacactgctgactgtcaaatcatacaactttgatcttctgtgaaatgtgtgcatcaatagtaaaattgccagatgccatcattgttttggattttgagttctttctggataccagattaagtgggtggatactaaataagcagaaattctaataaatgtgaccattctttagtgagcttgtttgaagaaacaggcagttgtataagcaattggcttatgcaaattctagtttgaatttgttcacagccactttatgaagacaaactttctctttacttcctaataagagatttctaattttgccaaacctatattggatgacaaatagagataaaacttgaatgacagtgtttaaaagtttaaggaatgttgctacggcattaagtgtatattactttatcagacattctgtctctactatggaaattatattatctttcatttaagaatgatagtgatgtatagtatcataaagcaaactgattattttttggtgatcttactataaatatcaaataattatgtccacttgtgcgggattggcacataatagttattaataatggcattttataatttacaatataacttctcgattaacaatataaattaattttattaaataatatctatttgaaatccagttattactaaatatccgcaagtcctctttttccctttatgtttggtgatacatacagttgctctccttagaaatgctgtcacaactgcttttgtttcctgaggcactgcttcacactgaatttcattttggctagctaaaagatgcactaaaggattttaatataatatgtaacagagtgattacatggagtcctcactgtaagttctcatatcatgtaaataggggaaagaaagwaataaatcaattgttattgaatgaaagaataagactcatgcaaattagaaggccaaaaatctgttta

SEQ ID NO: 35901 - DNA, 949 bp, Homo sapiens
tggcatgcatgggtgtaccaaggcaaagggacggggcaggaggaggagccgagggagtgcattgtctgtgcagaacttaaagcaacaataaaatccactataacgcagtctgctgcttattatcactgtgtccacagttctyaacgatgtcctggatacatgctctgctttctgcccccccaaatgccacttcctggcagccaaagactaaaaaaaggcctaagcaccccttcattgttggggccctggtaagctccaaattcagtgaccttgtcttctgcttcttgtctgtttcccacacatctctggtcactgggtaggggcttggtccacacctgcttggcagatccttcctgtttcctctagttgttgataccagaataatctaatttaaaatacttggccgggctcggtggctcacacctgtaatctcagcacttcgggaggccgagatgggtggtcaggagttcgagaccagcctggccaactgaaatccggtctctactaaaaatacaaaaattagctggacgtgatagcacacgcctgcaatctcagctactcgggaggctgaggcaggagaatcactggaacccgggaggcggaggttgcagtgagccgagatcgcgccactgcactccagcttgagcgacagagcaagactccatctcaaaaacaaaaaacaaaaaacaaaaacaaaccactcaaggaataaacaaaatcctatagagccattatttgctaggtacctctaatagcaatccctttgatagcacttgctgtgtgtccgttagggtctaaccacttgggctcagatgatcttgttgacttctcacaataacctcgtggggtgggttctcttatcacccccatgttacagaggaggaaagggaggagctcagagtttaagggacttgcccaaggccgtgtaggtgatgagcaggcagaacta

SEQ ID NO: 35902 - DNA, 949 bp, Homo sapiens
tggcatgcatgggtgtaccaaggcaaagggacggggcaggaggaggagccgagggagtgcattgtctgtgcagaacttaaagcaacaataaaatccactataacgcagtctgctgcttattatcactgtgtccacagttcttaacgatgtcctggatacatgctctgctttctgcccccccaaatgccacttcctggcagccaaagactaaaaaaaggcctaagcaccccttcattgktggggccctggtaagctccaaattcagtgaccttgtcttctgcttcttgtctgtttcccacacatctctggtcactgggtaggggcttggtccacacctgcttggcagatccttcctgtttcctctagttgttgataccagaataatctaatttaaaatacttggccgggctcggtggctcacacctgtaatctcagcacttcgggaggccgagatgggtggtcaggagttcgagaccagcctggccaactgaaatccggtctctactaaaaatacaaaaattagctggacgtgatagcacacgcctgcaatctcagctactcgggaggctgaggcaggagaatcactggaacccgggaggcggaggttgcagtgagccgagatcgcgccactgcactccagcttgagcgacagagcaagactccatctcaaaaacaaaaaacaaaaaacaaaaacaaaccactcaaggaataaacaaaatcctatagagccattatttgctaggtacctctaatagcaatccctttgatagcacttgctgtgtgtccgttagggtctaaccacttgggctcagatgatcttgttgacttctcacaataacctcgtggggtgggttctcttatcacccccatgttacagaggaggaaagggaggagctcagagtttaagggacttgcccaaggccgtgtaggtgatgagcaggcagaacta

SEQ ID NO: 35903 - DNA, 949 bp, Homo sapiens
tggcatgcatgggtgtaccaaggcaaagggacggggcaggaggaggagccgagggagtgcattgtctgtgcagaacttaaagcaacaataaaatccactataacgcagtctgctgcttattatcactgtgtccacagttcttaacgatgtcctggatacatgctctgctttctgcccccccaaatgccacttcctggcagccaaagactaaaaaaaggcctaagcaccccttcattgttggggccctggtaagctccaaattcagtgaccttgtcttctgcttcttgtctgtttcccacacatctctggtcactgggtaggggcttggtccacacctgcttggcagatccttcctgtttcctctagttgttgataccaraataatctaatttaaaatacttggccgggctcggtggctcacacctgtaatctcagcacttcgggaggccgagatgggtggtcaggagttcgagaccagcctggccaactgaaatccggtctctactaaaaatacaaaaattagctggacgtgatagcacacgcctgcaatctcagctactcgggaggctgaggcaggagaatcactggaacccgggaggcggaggttgcagtgagccgagatcgcgccactgcactccagcttgagcgacagagcaagactccatctcaaaaacaaaaaacaaaaaacaaaaacaaaccactcaaggaataaacaaaatcctatagagccattatttgctaggtacctctaatagcaatccctttgatagcacttgctgtgtgtccgttagggtctaaccacttgggctcagatgatcttgttgacttctcacaataacctcgtggggtgggttctcttatcacccccatgttacagaggaggaaagggaggagctcagagtttaagggacttgcccaaggccgtgtaggtgatgagcaggcagaacta

SEQ ID NO: 35904 - DNA, 949 bp, Homo sapiens
tggcatgcatgggtgtaccaaggcaaagggacggggcaggaggaggagccgagggagtgcattgtctgtgcagaacttaaagcaacaataaaatccactataacgcagtctgctgcttattatcactgtgtccacagttcttaacgatgtcctggatacatgctctgctttctgcccccccaaatgccacttcctggcagccaaagactaaaaaaaggcctaagcaccccttcattgttggggccctggtaagctccaaattcagtgaccttgtcttctgcttcttgtctgtttcccacacatctctggtcactgggtaggggcttggtccacacctgcttggcagatccttcctgtttcctctagttgttgataccagaataatctaatttaaaatacttggccgggctcggtggctcacacctgtaatctcagcacttcgggaggccgagatgggtggtcaggagttcgagaccagcctggccaactgaaatccggtctctactaaaaatacaaaaattagctggacgtgatagcacacgcctgcaatctcagctactcgggaggctgaggcaggagaatcactggaacccgggaggcggaggttgcagtgagccgagatcgcgccactgcactccagcttgagcgacagagcaagactccatctcaaaaacaaaaaacaaaaaacaaaaamaaaccactcaaggaataaacaaaatcctatagagccattatttgctaggtacctctaatagcaatccctttgatagcacttgctgtgtgtccgttagggtctaaccacttgggctcagatgatcttgttgacttctcacaataacctcgtggggtgggttctcttatcacccccatgttacagaggaggaaagggaggagctcagagtttaagggacttgcccaaggccgtgtaggtgatgagcaggcagaacta

SEQ ID NO: 35905 - DNA, 949 bp, Homo sapiens
tggcatgcatgggtgtaccaaggcaaagggacggggcaggaggaggagccgagggagtgcattgtctgtgcagaacttaaagcaacaataaaatccactataacgcagtctgctgcttattatcactgtgtccacagttcttaacgatgtcctggatacatgctctgctttctgcccccccaaatgccacttcctggcagccaaagactaaaaaaaggcctaagcaccccttcattgttggggccctggtaagctccaaattcagtgaccttgtcttctgcttcttgtctgtttcccacacatctctggtcactgggtaggggcttggtccacacctgcttggcagatccttcctgtttcctctagttgttgataccagaataatctaatttaaaatacttggccgggctcggtggctcacacctgtaatctcagcacttcgggaggccgagatgggtggtcaggagttcgagaccagcctggccaactgaaatccggtctctactaaaaatacaaaaattagctggacgtgatagcacacgcctgcaatctcagctactcgggaggctgaggcaggagaatcactggaacccgggaggcggaggttgcagtgagccgagatcgcgccactgcactccagcttgagcgacagagcaagactccatctcaaaaacaaaaaacaaaaaacaaaaacaaaccactcaaggaataaacaaaatsctatagagccattatttgctaggtacctctaatagcaatccctttgatagcacttgctgtgtgtccgttagggtctaaccacttgggctcagatgatcttgttgacttctcacaataacctcgtggggtgggttctcttatcacccccatgttacagaggaggaaagggaggagctcagagtttaagggacttgcccaaggccgtgtaggtgatgagcaggcagaacta

SEQ ID NO: 35906 - DNA, 594 bp, Homo sapiens
tcacccaggctggagtacagtggcacgatcccagctcactgcaagctccgcctcccaggttctggccattctcctgcctcagcctctggagtagctgggactacaggtgcccaccaccacacctggctaattttttgtatttttagtagagatggggtttcactgtgttagccaggatggtcttgatctcctgacctcgtgatctgcctgcctcggtctcccaaagtgctgggactacaggcatgagccactgcacctggcggggacttgtcagtctcttataattgcttatgataaatcatgcaccatgtacccacgtgtgcatgtgtgcgcgtgcacacacacacacacacacacacgtacagacactattagttctgtttytctggagaaccctagtacaactatctgctgagtaaactccttctttgtagcccagccaaaatgccagcttctctgttacaagattttataaaaaggcagcaatgaagcagagccgtggaatttggggtctctctcagtttaatctttgtgttacaggcagtgagccagaggcttacagccccgaggggcccacttttaaaacatttcatg

SEQ ID NO: 35907 - DNA, 360 bp, Homo sapiens
ttgggctggatgtggtggtcttcacaccagtgacagaggttgaaccaggtgatagtgcttttgccagaagcacctgtatttattttattaacccctttttattattagaaaatgactgctgcctcatagtccagggtcattcaaaaaatatttttggaggtgatacaaaaataaggaaatgtatatatatttttttgttgtgagggggtgggtggatgggaatttccttgtatgaaagaaaattctaccagaatagaagatcctgtaagtcagccctasgtgtcctgttgagctgcaggcagtgggcaggttgtgcctgcctttcctcaccttgaagcaatgaaacacctcccagtatcg

SEQ ID NO: 35908 - DNA, 658 bp, Homo sapiens
atttacaggaggaaataagaagatagatgatagatagatagatagatagagatatgaaaccttgcacctagcttccattatgaatttcacagatataggcttattaagggagggtgtggtgaggctacatataaacaaacataggattttagttgacttaagttctgtacaaactggagtattatcttgagttataggtgctacatttaaaatttttgtttggcttaattttgttttaattagattttatttaggagaaatccattaaaatattgaaggtacttaaaactagttggatgggagataagaaaggaagtggggttgtgggttattaatctttaaaaggagaatactttgtaggattgaactggctgccttcagatatttgaaaaattgccacagcaaagagcaattacattcattgtgctacagcactggaaggcagagcaagaatcratgaacagaagttatgaggagatggattttggttaaatgtaaggaagaactaacatttagagccaaaatcaggtaagctagccactgttagcttttatgcgccctgaaaaatatcatctggggaatccatttaacagaaacctattagattaaatagtccttcagatccctttcccatctgaggctaattctaagaccattt

SEQ ID NO: 35909 - DNA, 1195 bp, Homo sapiens
ttccagtcagtattcagcactcggatgggcattgcagctcagatgggaggtgaaaagggagtgttccytgtaccctgtgggcattttgtggtatttctcaatttcttatctacagcattctctttttaggctttacacacaaggcactcttaattttcctgccttcagatcttgttgctcaacctctcttgtacatttttttctggctgttaaaagtaacaaaaaatatttgcccaattatcacctaagaaagcctcccagcaacatgacttgcagctcctggggcattttctgtgtgacacatctctattttagaagcttctgtgggacaacctgcagagtggcctagttgttcatctgtgactgggtaatgtggcccagtgatgtggtagaggttctaacccacttcccttaaggcaaaggtttttcaccgtgttcactctaggtgtgtggataatgataactgcagtctgtatagcgtgtgacagtttacaagggctctaggtgtgtggataataactgctgtttgtatagtgtgtgacagtttgcaagggtgttcatcacactgtctaatattgttatttatatattacagctaagaaaatgggtatacaaagacagtaagcatccttccccaaaatctctgtgcccaggaagcaagtgccatgtcttctgatttccaacccgtctgttcttcccactcttccaatgctgatactccatcatagtgagtccctcttcctctccttctgctggctttttcctctccttgttatagtttggaattttttaaggctaaaggaaaagaaaagaaaaatcaaagaaaagattaaaagccatccttaattaactgctgacattatcttaccttacctttcattttcagtgccttgtttataggcatgaaatgcttagcattcttctatcaccattttaaaaaataaaagtagcattattagaacctcccttcacaaattgtagacaacattgctagtcctattggcactaaataggactagtttttgactttagatctcaaaataaactaggtcttgtttttttttttaacttgtcattgttgttatatactagtgttatttgttaaggccataattaggagataatgtttggctttgagagggaatctaaccacacatatctctctgagcacaaaagcttcagtaaaacttacttt

SEQ ID NO: 35910 - DNA, 1195 bp, Homo sapiens
ttccagtcagtattcagcactcggatgggcattgcagctcagatgggaggtgaaaagggagtgttccttgtaccctgtgggcattttgtggtatttctcaatttcttatctacagcattctctttttaggctttacacacaaggcactcttaattttcctgccttcagatcttgttgctcaacctctcttgtacatttttttctggctgttaaaagtaacaaaaaatatttgcccaattatcacctaagaaagcctcccagcaacatgacttgcagctcctggggcattttctgtgtgacacatctctattttagaagcttctgtgggacaacctgcagagtggcctagttgttcatctgtgactgggtaatgtggcccagtgatgtggtagaggttctaacccacttcccttaaggcaaaggtttttcaccgtgttcactctaggtgtgtggataatgataactgcagtctgtatagcgtgtgacagtttacaagggctctaggtgtgtggataataactgctgtttgtatagtgtgtgacagtttgcaagggtgttcatcacactgtctaatattgttatttatatattacagctaagaaaatgggtatacaaagacagtaagcatccttccccaaaatctctgtgcccaggaagcaagtgccatgtcttctgatttccaacccgtctgttcttcccactcttccaatgctgatactccatcatagtgagtccctcttcctctccttctgctggctttttcctctccttgttatagtttggaattttttaaggctaaaggaaaagaaaagaaaaatcaaagaaaagattaaaagccatccttaattaactgctgacattatcttaccttacctttcattttcagtgccttgtttataggcatgaaatgcttagcattcttctatcaccattttaaaaaataaaagtagcattattagaacctcccttcacaaattgtagacaacattgctagtcctattggcactaaataggactagtttttgactttagatctcaaaataaactaggtcttktttttttttttaacttgtcattgttgttatatactagtgttatttgttaaggccataattaggagataatgtttggctttgagagggaatctaaccacacatatctctctgagcacaaaagcttcagtaaaacttacttt

SEQ ID NO: 35911 - DNA, 534 bp, Homo sapiens
tggttcctcctcttgtgcttagtacaaattgagaaatagaataaagaaaggatagatggaaaccaaatacggctgcttggcattctgaggaatccaagctgccagtcttccatatcttgttatggtgccgtctgtgtccttctcagctgcctagcagaaaacagcctgcagaatcttgtgtgtttggtgcttctactaagaggtaaaaagcatcacttctgctcacatgttattgtccaaagtgaagtcccatggccatgcctaatttcagggagccatatgcccagaaagaaggatgaatggggamtcttgatgatcacttccataagcagcaacttagataatctcattctgtttacttggtttggtccaacgtactttcattctccccacacttactatcttcttcctgattcccactctgagtcaaggcctaggagatgatgtatgttgaggcaagacgaggcccaggtagcatcttcacctggttttaccctttttcaatctttctccagttcctcacacagcactgaa

SEQ ID NO: 35912 - DNA, 633 bp, Homo sapiens
aattgtattccccaatgtaggagatggggcctgatggaaggtgtttttgtcatgcatggaggcaggtccccaggacttggtgcagttctcatgatagtgagtgagttcttgcaaaatttggttgttgtaaagtgtgataccacccctgccccracacacatacagtctctcttgctcttgcttttgccatatgaagtgccttctgttttgccttccgttatgagtaaagcatgtacaagcatggcactggaatgtactgcaggctgtaatacgtgagactggctcatttatttaaaaaaagaggtttaattggctcatggttcggcaggctttaaaacatggcactggcatctgcttggcttctggggaaccagcttctgggaaccatgaacggcctaatacacccagcttcttatagctgggcccattcattcttgtctaccacccaatctcttgagccacttcctgtggctcccacaacctcccactatggcattgtatttttctttcttgtacagttacagagcagctataattcaagatttatgaacttttgaggttcattcttctgatgatgattggaactcatgcatgagtttccactaatgttccattttatagaaaagggcttcc

SEQ ID NO: 35913 - DNA, 580 bp, Homo sapiens
aactgaataaaaataatgaccattactgaacactgactatgttccaggtactggactaagcactgagcatacagctattgctcgcaacttataataacaaatgaataaaattctacctttggtctccatttacagatgacagaagtaagacttggagaaattaagtaagatgaccaaaagttaagtcagacctcattctatttgacgccaaggtttgtgtagcatatatgacatctagaccacaaactccaatgtatatgaaatagctcattttttataaaattaacaamaattgttctcatagtctattttgctagagtggtagagaattcagttgaagtcactactgggacttgccacaccatagagttgtgctgaattcctaaagttagttatagggagtgccacatcatctgagatgtagtcattggtcctttgtccactgggtaccattaagaatctctctgttccagactgtgtgatcctttccactaacacataacacctccctggggtggtattttgctactgagaaatgcctgggcccttgactttgaccctctttttggttcaggaggca

SEQ ID NO: 35914 - DNA, 498 bp, Homo sapiens
ggagcaggcacaggccctgagctgagctacagaaatcactgccaaggagaagcgtgacccccatcaagggctgggagcagcagccctgcctcccttggggaggctcacaggccacacacaagggctgggctgtggggaccacaccacggcaggaaggccaggctctgctcagccttaagaaccatgccagcgggttgcataaatatcttcttttgagaagtgtctgttcatatccttcacccactttgtggtggggtttttttcttatcaatttgtttgaattcttcgtagattctggatattagccctttgtcagatgagtagattgcaaaaatgttcccccattctgtaggttgtctgttcactccaatgggagtttcttttgctgcaaagaagctctttagtttagatcccatttgtcaattttggcttttgttrccattgcttggtggggggagggggagggaaagcattaggagatatacctaatgtaaatga

SEQ ID NO: 35915 - DNA, 518 bp, Homo sapiens
agacctgggcatcatctgatttataccaagtacaaattgacaggggggcatgcacagtcatggctgaattgtaagcctgagagtggagatgctattggggcccagcaatgtgcccagttgacatattaggctccaagtcaataatccctcacatatgctcagaatctctacarggatgaactaacaatgattgttctccaggcactgttctagaggccttatattagtgcttctgaaactacatcagaatcactggggggattgttgggctccatcctcgtagttttggattcaacaggtctggggtgggacctgagaatttgcatttccagcacattcccaggtaggctgaagctgctggtccagggatacatgtgaagaaccattgccttacatgtgctttttaattacattctcagaagaactcatctttgaatttacaggtgaaggttaaggatggaattcaaggttccatggccagttactgggagagctgggattctagcccaccctcagct

SEQ ID NO: 35916 - DNA, 521 bp, Homo sapiens
aattaaatgagataccatgtttcatcagtcagattagcaaagaagtaaagtttgttcgtatgctgtgttgatgagggaatgcagaaacaggcactctcaaacattgctgatggatggtgtataaatgggtacaatctctttggagggctatttggcaatagctatcaaatttaaagtgcataaaccactatcatttgtatttttagcagtttcccttgcacatgattagaatatatatttaaaaggatataactggtcacttttgaggaggggaaccaggttcctaggggaaaggatgggagggggcttctcactgtgtaatctcttgaacttctggtattttgaactatatgaattaaaaatttaaacctaacctacttaataaaatgcacatagcttttgacctcgcaatatattgagggtatacatattgtggcaggccagatctcactaacacagacctccataacaaatgtttcagtactgactgacrtggttaagtattaaaagccagtgccctt

SEQ ID NO: 35917 - DNA, 1214 bp, Homo sapiens
gcatctgtcattagctggttggctggctggtgactggctgacagaatggtctcactcaaacatctcgcagttggcaggatgtccttctgggtgccttggttttcttctgcatggcctaccatccttcaagcgggccagcttggacatatttacatggaggtctctgtggggataagtagatttgggtgagggtggaggggctgatataaaacaaagagtttgactttgaacatcttaagattgggatgcctgtttgaccttgaagtgaggatgtagaataggcagttagatattagagttcagagttcaggggagaagtctgggttaaaggtatatatttggaggtcatctgcaaagatacatttaaagtcatgagactgggtgagctcagcatgggagtgtgaatagaaaaggggtctgggaatgagtcctgtggctcactatagtctagatgttaggggaggttttggggagggagatgtttggtctccctaggagggagaccaagacagagtgacctcccagaagttgagtgcggttgagtggaggagaaggaagtaaccacctgtgtcaaatgcctgcccatgtatcagtatgaggcttgggagagtggccactgcattagcaacacaaaagtcattggagactttgacaagaaatgaggatgaaagacatattggagtagtttctagagagaatagaaagaaaagggtgagaggaaatagagacagcttttcccccaatatttcacttagaaaaatttcaaacacacagaaagcttgaaagaaagaagtacacagtgtatacccacatacacactatttagattatatcattaatcttttaatagatttgttttctcacatatctatctatctaatcctctatccatacagagacccatcttttctatattagaggaataggcaagtagggcagaactggaggaagatgggggtcagaagaaggttcacccactctgtgtgtgtgtgtgtgtgtgtgattgtaaatatagcagcatgtttatatgctgatggagatgatcaaatagcgaaggtgcaatggatgatgctgggagagttaatatttggggygatgtgtatggataagtgaaggagtatggactttgggtgcagcagtggagaaattggccttgggtaggctcttctgcaataaggagagagggaacagaaaataaagacagatgcatgcaa

SEQ ID NO: 35918 - DNA, 690 bp, Homo sapiens
tgccactctctgagtctccttccttgcctctctccttcccgtttaatttcaaactctcacatttcttgtgcatttctcctcttaaggacagagacactgggtcattctgtaatgtgctggaaaaatccacaatccttaataaaaaggcaggcagaacctttcttccccacagcaggggtagctgagcagtgcttggccaggcagagggagggccatctctttatcccctccccttcccttgtcccccagggggtacgttcctggaagcactaatggttcttaagtttaggcagtgtccagctgtgaagtgaggctccattcttcaaagaagtcagcagccacctgctctgcaggagacaggggagaaatcgaaccctcaactagagagacagtgggtggtacactctggctgctggctgcagccacctgcctcccatccgtgcagctgggactgatggacccaaccaagaggttcagcccagcccctggaagaaaagctggcccctcccagagggcatgacttcctacttgtcaacctagaacttcwccattgtcattgaccctgatcccaagcctcctcctgagaactcagtttcttcctcgtgccaatgacagctgcagcctatgtcctaaaaaactgagtccctagacatctgccgacctagagataaagccctttgtcccccttgc

SEQ ID NO: 35919 - DNA, 499 bp, Homo sapiens
gttctggctctgtcacctaggctagagtgcagtggtgcaattatggctcactgcagcctccaactcctgcgctcaagtcatcctcccaccttagcctcctgagtagctgggactacaggcacatgccaccaggcttggctaattttaatactttttgtagagacagggtyttgctatgttgcccagactggtctcaaactcctgggctcaagcaatcttgctgcctcaacctcccagagtgctgggattacaggcacgagccaccgctcctggccagtccctctcatttaaacaattgtccctcatttgtctgcatggaaccacctcagctaatccaggtgcctccctaatcctgccaaaaaacctggaaaagggtctgcttcttattctctgggaacaaaagggcatagattttgcatttgaaagatgaaagaaaattgaatccagacatgaatagtagctctcaatcacttggcagttagccattttttctttcttt

SEQ ID NO: 35920 - DNA, 570 bp, Homo sapiens
ttacttgccgtacgttttgaaaaagaataaaatggggttttctaaaatcctttaaagtcaggcttttttctgatatgggcaggtgaaccttccagtggaaaccaggggtccacagaaaggaagtttgcaggtcagctcaaaccagctcaactagctcaggtcacccaccagctactttccagtgctctcccaacaggctgggctggaggagacagagatttgagagatcaagccttgccttggagcactcacaatctaaggggggaaactgaggcaaaaacaccatcctgcaggtgagggcagggagcagcccttgctggtcccccaaggccccgcctctcctgccccgcctcgcagaattcaatggatctcagcacgacaaatattcatcaggatcctggtcagtgccagaagtgttgaaaaaaggcaaaagttctcaccgtgctgcctctgccctgttctctgcacctttgcttgcttcagccaccccatgagagatggagttggggttatttcctgacctgctcmgaacaactccccaaatgcctacagaatgcctagagaatgcca

SEQ ID NO: 35921 - DNA, 1329 bp, Homo sapiens
gtatacatcccagcttaggggcagaggcaaccccagccacctttctgaaccagtcctagatgcttagaaagcctgagtagagagttatcacttggaaaaaattatttgtggtttctctgaaattcaaatttaactaggtgtcatattttatctagcaaacctatacctatcagaacatgtgtgtggtactttacaagtgagacataaacatctgttgtttgagccatcatataattaggagtttgttatagtagccagcattaccttagctaataccctatcactctcctgaggcatcagatattacatagtccaggcagatgagcttagtctagcctggtcgatgtacatgcagctgtacatatcatcagctcttcttgcctggactactctagttcaataaacctttggggttttctcccttccatgaacacatttagagcacctggaaggaagagaggactaacttggttcttgcccaacccccacccccaggagctctccacttagcgtaaccacaaacaggtacaaactaagtctcagagggctcagagattaagtcattcagggatgacaggagtgtgggggaggatttggagaacagtagcagcaacactgggtccctcctggaaacgtggtaacagccaccatctttgacacccatagagcaagtgccttggtggacaaataaccagcccttccatgctgggactggctagatgaggagctgtgaggtcaggaatacagaatcttgtagttggatcccgggacccattgtgggggtttccagggagttatttctaatgtggcccaaaataaagagccaagattttggagcttcatagacacaggttcgagtcctggctttgctgaactatatgaccttattatgcagtttatttcacctctccaagcctcagtttctatccccatacgatgagatagctccaaacaagtacagcaggattacccaaggtgatgaaccgaaagtgtctagctcatggtttgtgcctagcaaacaatacttcctctctgagggtctggttcctgaagaagagaggtgaggggagcctacgttttttattattccccagtttccactaatatgcccgtcctccactccyacttccttggaacatggcctggagaccacagcaaccgtgattggcttgaaggagctatgtttctgatgcctctttctttccaatcgatgacaaaagagtttccatcgccataaaaattgagtttcaaatagaagctgggttccaggccagcccccaaaccagcctcattaataatattgctaaatccctgccccttaatagcaaa

SEQ ID NO: 35922 - DNA, 837 bp, Homo sapiens
acccagctgcagttgttattttctgatgggtcagctgtaccccacccgggcaagaccagaacccaatgtgcagccaacttcaagcttgcatcttttatctttacaacagacaggggagagcccttctttctccagctacagtataaaatcccaaggacagactctgatcggctgcattcagtcatgtgctctggccagggaagtgcagtgccatgacctgcagccctgagaacaactgggagcacttcctgggagaagggaaatgctcaactgggcagaaaaaccataaagttcacacagatgttgcacacattatctcattattcctcacaaccatcctgtgaaataggcactattataatacccattttgcaggtgaggaaactgagactcagaaagggtaaattatctgcccactgtcatccagttagaaagtggcagggccagggatcaaatccaggtcagctggaccccaaagcccaagctctttgcctccactcatgaacatagacttggcaacttgaaggagacactggaaaaccttcccagtcttaaaaatgctgaaaggtctgagctgagggttcrgttcctagacaaggagacatggtggggatggggaagggagggcggagcaaaagcagagtcctcggtccacaggcctggtctgtggcttctgggttgggtctcttctttttgccatgaagggatggttagggcagagattaaaccagaggagaaggtccaagcaataacccaggtgagctcaggggcttgtgtgggctcctccaccttgatgggggtctgctccattgaaaagcacttctctccattgcatgc

SEQ ID NO: 35923 - DNA, 798 bp, Homo sapiens
tcccagctactcgggaggctgaggcaggagaatggcgtgaacccaggaggcggagcttgcagtgagccgagattgcgccactgcactccagtatgggtgacagagcaagactccgtctcaaaaaaaaaaaaaaaaaaagaaaacacatgcatacatcaaaacctgcacacggatgattacagcagcataaaagcccaaaagtaaaaactcaaaagtccttcaactggtgaataaacacattttggtatatccaattgactactgtcaacaatattattcaaactattattcaacaataaaaaatgagctactaatatagacaaccacatggataagtctcaaaatcatcatgctaaatgaaaagaagttatacccaactcccatgtagtaaacgattccacctatataatactctggaaaaaaaacaaaactatagagatggaagtcctatcagtgattgcaagggcctgggagaagaaaggattgcctataatataaaagagcaagatgaaactttttagggtgatggaaacattctaatctcaactatggtggtagttacacaactacatatattcatcaaaactcatcaaagtgtacatctaaaaagggtaaattccaccatatgtaaattatatctcaataaacctgatcccccaaaaggattttaaagtaaatgtgctaaagaactctaatttaaagattacaattgtcagactagatrtttataagagaaaatagaatatgttgtcacttacagtaaggctaagcagtgcttcatatatgtttatatgtgat

SEQ ID NO: 35924 - DNA, 567 bp, Homo sapiens
aatgagatttctgaatcataaaagatagattgaactacgtgtctgcatggcatgtgtattttattgtattctaaacttatttgaaaaatttatgatgagtacttggcagtacttctccatgtgtgttccaacaggttttacacaataaaagggctctmtcgtcagagctgaaaaatgttgcttcctcctgctcaatgttcatccctcccttccctggaaactacacctcagttttcctttggggacccaccccaccccttcagccctcatgcagttcatgtagttcacacgagattgaccccacacatacacactgctccgtccaggggtggaccccaattcaagcctggatgattagtatcttctattgctacaatgatcagctcagggatcagcataaaactcaagcccagcaagactcaattcaggtacttttactggaaccactgggaagcaaaggcccttttctctccattgggattactagctaaaaggatgttgtaaggcctatgtaagagggcattgtagaagaaaacaaagccaaaaggtgaagaccaagacctcact

SEQ ID NO: 35925 - DNA, 567 bp, Homo sapiens
aatgagatttctgaatcataaaagatagattgaactacgtgtctgcatggcatgtgtattttattgtattctaaacttatttgaaaaatttatgatgagtacttggcagtacttctccatgtgtgttccaacaggttttacacaataaaagggctctctcgtcagagctgaaaaatgttgcttcctcctgctcaaygttcatccctcccttccctggaaactacacctcagttttcctttggggacccaccccaccccttcagccctcatgcagttcatgtagttcacacgagattgaccccacacatacacactgctccgtccaggggtggaccccaattcaagcctggatgattagtatcttctattgctacaatgatcagctcagggatcagcataaaactcaagcccagcaagactcaattcaggtacttttactggaaccactgggaagcaaaggcccttttctctccattgggattactagctaaaaggatgttgtaaggcctatgtaagagggcattgtagaagaaaacaaagccaaaaggtgaagaccaagacctcact

SEQ ID NO: 35926 - DNA, 509 bp, Homo sapiens
tgtgaggccctggattctcacctgtgcaacctcttggggtagatcggatattattcccaattttcattccctcctggaatagaattatacacccatgcgctttgccgtgtgactttgcagtagctcccactggagtaggcagagcatatttctctaccccgctgaagtgtgggtttggccatgtgacttgggatattagtggatgtgccaaaggcataggcttgaaatatggctgggtttttggcttggtggtttgagcttctcccatgtgctacaagactaacgtgtcccaggtagctgatggttccagaagagggactcatggagctgacccgaatctgatccgtggcctgcagcgaaatcgagctgacccacagaatgaccsacccccgctgacccacaggcctatgagagatggaaataaacatggcaagctactggcttggtggggttgtttgttacacagtcttatcatggcagaaacctgaccattccacatgtataataat

SEQ ID NO: 35927 - DNA, 571 bp, Homo sapiens
ccagtggccgaaagggtgagactgtctttttactttttgctaccttccctttccctgtcctcctgtgcaggtaccttgaggttatgcggaaactccagaaaacatacaggatggagccagccggcagccagggagtgtggggtctggatgacttccagtttctgcccttcatctggggcagttcgcagctgataggtactrgagcgggaggtgcctatccctccacccccaaccaaggctgcgttctgtggccctcccctgcccctcctgcgctccctccttcccttcttcctgcccagggcagacagtgacagcttggaaagcagggcattagaccagctattgagggaggctgtttactgtcgaccttctgctgtgagagcccgtgtggtgggctggaggaggcggaggccaagcgccaccaagataatgggaagtgacatgggctggagcaagggcgcacgcctggtgcataatggactggtgtgaaatgcgccccagctcctggcagcagctgtggggttttatgttgaaaatgagggacccttttgatttggtgaccagtgtcatc

SEQ ID NO: 35928 - DNA, 1002 bp, Homo sapiens
tggctgtggccagggctctgctccccaccccaccatgagcttggtttccatccttctttccctcccctcctggcgcctctttggcccactcgtcaccctggtgcttctccctcttaggttccacagctgatttttgaggagagggaacctgggccagtcatagcacccgtttgtctctaagttagttggaggttaagatcacagccacagagtgaggctcttactctctctgaggccataagtcttgttccaccccagccaggaggtgcctaacatactctgttttctgtggccaaaggtgtgggaggaggccctggtcagtcttggcagatccaaccctcgcatgcccagaacggctcctgtgagagctagtgtccaggtgtggcaggcatgggggtgctgttgcgggagctgcagctggaagctggggttggctgcctgtgggccaggccagcttctgtgataggccctgtcacttgctctccagctctgctcctctgctaggagcccgggctgggctgggctcagggagtcgggcctcccccstgctcagccattcccctgttcagcgctctttttcccctgccccccacacaggctgctgggaattgcccaggggtggggggaactcagtgtcagctggttcttattgtctcgctctgaagtgccaagatgcctttttcagtccagagaactgaaagctggagaaaacaggctttgggacccggcctcagcctcttaggcttacgttcaaatgtccccacgtctcttctctagaactgggacctgggctgggggtccccagtgatcaggagggttctttccacctcaggttcccaacttccctctctgggccaagtgatggcacctggctgcctctcttctcggtttctaccttgtaggtttgggctgccttttctctttctctctctcgtgggtctcgttgtggagtgggtgtctttggatagaaggagtgaggaactgggggaggaaggcctgggg

SEQ ID NO: 35929 - DNA, 628 bp, Homo sapiens
aggaggctgtgttttcaaggttggggaagatttgctcccaagcgactcccttgatgtcttgttatgaatagcatggctctttcttctgagttgggatgtccccarccctgcatcccctccaccaagctctcctccattaggtcttagagggctcactctctttgtagctggtgaaaaattcttaacttggcatttctgtaagacatgcgtagggaccctgggctcctgctgctgtgccacacggattcctctgacctccaagtggacatgcagcacctgggaagttcccaagtcctgattcgagatgccctgggcatgagtcagtaagtccttggaactcaagttatctaaggcaagagacatgccagtgaaatggctctgaggttggctatgcttcctctggaccaactttaactggctcaacatctgatttttaagatatgatgatttaggagtttgaggaactgatattcttggtgggaaaatttcagtttcatgagaagtgcttcttttcacgtttgtcactaagcagcttcctgacttgctggttgtcaagttgttcctagtttgtgattgaagagtacagatctcctcttccttgaacatctccttcgacccattggtgaca

SEQ ID NO: 35930 - DNA, 645 bp, Homo sapiens
agcatgagacttcatacaagcccctttctcctcttcttgtgcacatacagtcacacacacacacacacacacacacagccacagctgcatgcatgctctttgggtttctttttatctttcacctatgttccctttaaaagtaggcatttgaatccctccaagcacagccagctctgtcatttgtcacatgcacccattgatctccctggtacctgaggccttgaattgacttagttctcccttttaggcagtacctgttttctcccagaagagcatttagcttagtgttaaaagcacagtgtgttccctctttgttaacttaacctctgtgttgtttttttaaaatcagatttgaaagaacagggaccctagaaagtctgtgatatgtaaatatttagccaggcagatagggatagtaagcattttctctcttaacacaaaacatgattttatttgctaaagctgtaatcttgtttgataatccatcagtttattatcagctatgtggtgagacataatgctacagggagataatcaagaaccttgcctgacactacagggttgattacagtgcctggagaagagagaggcttctggagaggattatgttaaacatagcctttctatttgcagttgatttcmtcc

SEQ ID NO: 35931 - DNA, 706 bp, Homo sapiens
atatttgctttttaatatatgtcatatagcaaactggattaataaatagaaacacatagtgtagtctttaagcatatgtgtgattataaaaataaatccattttgcattcacagaatagaaaataccctttaattagtgaaattgattacatatcgwatatagtaatgagcttcagctagatgcaagccctcattggatcaaagtcagtttagataagggcagctgaaggtcacagagggagatgcccagcaggttcatttgcataaaaaattactgttagaaataggacactgaggcagctctagcattttgatctcttggcctttgtcatggagattcctagtagtgaagggagtaaggccagtgtcccagataatgattaactgttttaatggcattcattcattcattccacactaactactcatgcagaaaaaagggttatgtaaaatgacattagaagaaaatcatttgtaatcgttgcatcgggctgcactttgaggagacattaggagtaaatccgtggcgtggtaggcttatgctttatcttctgatatttactgagtttactggtgcatgaaaagctttcagcaagaatagcagatgggatggacctttcataggtaatgctatctaccaggttattacttctatatattgatagtaaagtaatctccaagatatcaccctacaaatatagattat

SEQ ID NO: 35932 - DNA, 644 bp, Homo sapiens
gacccgaccatcatcacaagacagtagtacctctggcagctcaaatgaacccttttatattgaactctcacgtaactcactctttccctcacaacttcatatccttgcactctacatcccttctgagccttaccccagacctctttaccccttyggaggccttggatggctctgcctctgattattcttttcttaatttgaatgttgcttttctcctcacaaagtcattctcatgaggaaggagctctgccaggacctgagtggggtagatgcagttcagcctcagttaggacctctcctccaaccatgttcttggcttgcctcacttgagaagtaattttaaaatgttattttgctgtctttccataaagttttggtgacctatacgtggtactctgaattcagtgacttcacatattacatttcatctagctggccttgaccgttcacaaagtccatttctagctagctcagataatctccctcccacataacagcttacatactatgtccccacatggtttacatttatctttctacatttcttatctatttccctataaagaggggctcatctataatacttttctagctgtcctggtttcatttttttccttattatttagccacttcaatttaaaacc

SEQ ID NO: 35933 - DNA, 1583 bp, Homo sapiens
cccctcttgactccgagcacacatgcacatttcctatcattccatttggctttatttactatatctttacactaatccatggagattcatgaaacaacagggacttcttagaacaaggtaacactttttattttattttttttaatgcattcaagttttgcctttccgttttaccactggggcctctgcatgtggaattaaaagtaacaaatgtccccagagcctgtgcacctggagtgtgatgcctgtaaagaactggaaaaacaatgatggaagcctgtctgggatggagggagtatggcctgaagtaggccccaagtggttccgttttttgattaaaaaaactttttattttgctgggcgcggtggctcatgcctgtaatcccagcactttgggaggccgaggcaggcagatcatgaggtcaggagattgagaccatccaggctaacacggtgaaaccccgtctctactaaaaatacaaaaaattagccgggcatggtggtgggcacctgtagtcccagctactcaggaggctgagacagaagaatggtgtgaacccaggaggcggggcttgcagtgagccgagatcgtgccactgcactctagcctgggcgaaagagcaagactccgtctcaaaaaaacaaaacaaaacaaaacaaaaycaactttttttttttttttttttttaaagaagtgaggtctctctgtgttgcccaggctggagtacagtggcaggatcatagctcactgcagcctcgaactcctggccacaagtgatcctcccaccttagcctctcaaaatactgtgattacaggcgtgagttaccatgcccagacttgttccattttttatggtcccaagagtgttagaactcagagtttctgtgtagcactctcctaacctcccactggaggtatccacatgcctctgggccacctggtgtccccagcctcagtgggagagaaggaggcaagtcccataagacttggctctcaacaagcaggctctctgctgctgcctcgccctgtgacttcagcacgtccttgaacctttctgaacctatttccttgcctctaaactgaggctgacaatggctggcctgatacacctcatgcagattttgacaatttccagagaaaaaaatcatttattcaacaaacattcgttgattgcctatgtgccaagcattgttccaagaactgaaaagcagtaaatgaggcaaagtccctaccttcagagacagacaataaacgaaaaagatattaacataaatgctatgaagagaaataaagcaggttaaggggtatatgtgcatgcatgtgctatttcagacagggttgtcaaggaaggtctctgaggaagtgacatttgaatagagacctgaatgacatttaaagccatggcatggactgagatcactggtgaaggagttaagagagagaagcaatctgatgaacaagcccttggccagtctaacatctcaacggcatgacatggaaacacatctgtaaaggggaaagtgggaacaacctccctcacagcactgtccagagctctgcacctgtgaggcactggaaggaa

SEQ ID NO: 35934 - DNA, 636 bp, Homo sapiens
gacagtgctttccaaataatctgaaatttcctttattgctttacagtcatgactgggacttggagatttgtcttgactgaatagctgaatgagtatcttcatgtggccaaatgtcgttagtgacaaaaggtcaatacatcaacctacttgctcmtagtacagaaaagaacaattaaaataagtggggtgggcaaatacagagcatgtgcattttctccctaagataccctggacaaattacttgttgagcagcaactgctaacagcagttactcatactgaattaaagaagccatcactatactcttttgtcatcctccccactaaaaaaaaatactgaagtggtagatgagccctgcctaaaataatgaaggacccttcattattaaataatcatttaattattattataattaataataatcattattatcatttaattattattaataataatcataattattattaaataatcaatttcaaatctttgaatgggtcattgtttagtaaagggaatggttattgaaagcagggagatgaataaatggaactagcccagctctccataaaaagttagttactagcttatttgtgaaagaatctgccaatcaaattatagacagttaaaaaatgt

SEQ ID NO: 35935 - DNA, 636 bp, Homo sapiens
gacagtgctttccaaataatctgaaatttcctttattgctttacagtcatgactgggacttggagatttgtcttgactgaatagctgaatgagtatcttcatgtggccaaatgtcgttagtgacaaaaggtcaatacatcaacctacttgctcatagtacagaaaagaacaattaaaataagyggggtgggcaaatacagagcatgtgcattttctccctaagataccctggacaaattacttgttgagcagcaactgctaacagcagttactcatactgaattaaagaagccatcactatactcttttgtcatcctccccactaaaaaaaaatactgaagtggtagatgagccctgcctaaaataatgaaggacccttcattattaaataatcatttaattattattataattaataataatcattattatcatttaattattattaataataatcataattattattaaataatcaatttcaaatctttgaatgggtcattgtttagtaaagggaatggttattgaaagcagggagatgaataaatggaactagcccagctctccataaaaagttagttactagcttatttgtgaaagaatctgccaatcaaattatagacagttaaaaaatgt

SEQ ID NO: 35936 - DNA, 636 bp, Homo sapiens
gacagtgctttccaaataatctgaaatttcctttattgctttacagtcatgactgggacttggagatttgtcttgactgaatagctgaatgagtatcttcatgtggccaaatgtcgttagtgacaaaaggtcaatacatcaacctacttgctcatagtacagaaaagaacaattaaaataagtggggtgggcaaatacagagcatgtgcattttctccctaagataccctggacaaattacttgttgagcagcaactgctaacagcagttactcatactgaattaaagaagccatcactatactcttttgtcatcctccccactaaaaaaaaatactsaagtggtagatgagccctgcctaaaataatgaaggacccttcattattaaataatcatttaattattattataattaataataatcattattatcatttaattattattaataataatcataattattattaaataatcaatttcaaatctttgaatgggtcattgtttagtaaagggaatggttattgaaagcagggagatgaataaatggaactagcccagctctccataaaaagttagttactagcttatttgtgaaagaatctgccaatcaaattatagacagttaaaaaatgt

SEQ ID NO: 35937 - DNA, 636 bp, Homo sapiens
gacagtgctttccaaataatctgaaatttcctttattgctttacagtcatgactgggacttggagatttgtcttgactgaatagctgaatgagtatcttcatgtggccaaatgtcgttagtgacaaaaggtcaatacatcaacctacttgctcatagtacagaaaagaacaattaaaataagtggggtgggcaaatacagagcatgtgcattttctccctaagataccctggacaaattacttgttgagcagcaactgctaacagcagttactcatactgaattaaagaagccatcactatactcttttgtcatcctccccactaaaaaaaaatactgaagtggtagatgagccctgcctaaaataatgaaggacccttcattattaaataatcatttaattattattataattaataataatcattattatcatttaattattattaataataatcatwattattattaaataatcaatttcaaatctttgaatgggtcattgtttagtaaagggaatggttattgaaagcagggagatgaataaatggaactagcccagctctccataaaaagttagttactagcttatttgtgaaagaatctgccaatcaaattatagacagttaaaaaatgt

SEQ ID NO: 35938 - DNA, 514 bp, Homo sapiens
atctccatactgttttctgtggaggttgtatttatttacattctcactattggtatataagcgtccccttttctgtgaatccttgccatctgttatttcttgtctttttaataataaccatcctgactggctgcttctcattattttcaaattactcaatttctttctagttccatccaaacctacactttcggcccaggccgccttgaatggtggcttataagataattagggaaaaaaatgaacggtcctggcttaaggtcagagttaggagaaaatcatgagtaattaaatatgatcttttcaaagaaatgagtgttgctgctgctatgttggttgttgaggaagcataaaaaagtgattctgatgtaacttggctggaaaacttgagatattataaatgtgtccacctctttggatgtcccttacctgragaacccatgaagtacaaggatatgctgtaaaaatgtactgacaattttaataattgatttttaaaattccttgacaagca

SEQ ID NO: 35939 - DNA, 779 bp, Homo sapiens
tctttgtaactaagtagtccaagggttgatacttggagaatactctattcttcaacaatctttcactcactgattttagcacctgctggccattcttacctaggtcacttattaattactagggcagtcataaaataccggttctctctcccatcatccttctatatttattggggattggcactcttcaaaagtatttcatgacagcaaaaaaaaaaaaaaaaaaaaaaaacccaggaccacctatgcaagagtgttagagtgaagaagttccctgtggagaactaagccctgctgaggaagaacacacgcccaagtgaggtctgaagtcagtgctaaatacacacaactctgcgtcggctgctatgaagatatgaagacattttccctatggttaatctggttcaaaggaattattccattctattgtgtaagctgtggatgtttaccatattctttgtcccaagatgatgatgggatactggcacaggatctaaaggaactacattttcaggcttyatacaataacttctgacttcctccctggagtagagaggaggcatctgaaaacatcacactgggaacattggtcctgactgaaaaccccaggagatcaattctaaagtatgtttggccctgaaactttttttaacagtatctaccaaatgccttaaaattatactctttcattccttatctcaaatggcttcagttcaaagaaggaaatggtatttctttccatccctttctatcttgcttatggagagacaacctgagcc

SEQ ID NO: 35940 - DNA, 779 bp, Homo sapiens
tctttgtaactaagtagtccaagggttgatacttggagaatactctattcttcaacaatctttcactcactgattttagcacctgctggccattcttacctaggtcacttattaattactagggcagtcataaaataccggttctctctcccatcatccttctatatttattggggattggcactcttcaaaagtatttcatgacagcaaaaaaaaaaaaaaaaaaaaaaaacccaggaccacctatgcaagagtgttagagtgaagaagttccctgtggagaactaagccctgctgaggaagaacacacgcccaagtgaggtctgaagtcagtgctaaatacacacaactctgcgtcggctgctatgaagatatgaagacattttccctatggttaatctggttcaaaggaattattccattctattgtgtaagctgtggatgtttaccatattctttgtcccaagatgatgatgggatactggcacaggatctaaaggaactacattttcaggctttatacaataacttctgacttcctccctggagtagagaggaggcatctgaaaacatcacactgggaacattggtcctgactgaaaaccccaggagatcaattctaaagtatgtttggccctgaaactttttttaacagtatctaccaaatgccttaaaattatactctttcattccttatctcaaatggcttcrgttcaaagaaggaaatggtatttctttccatccctttctatcttgcttatggagagacaacctgagcc

SEQ ID NO: 35941 - DNA, 617 bp, Homo sapiens
atgggacatggcaaatctgggaaagtgtcctgggtgcatcctggtggaggggataacagggcaagaccagaaaaagaaagaaaatgaggaggtgaagaggcagtagtaccaccatcttgagattttaaaaaaatacaagataaaatgcagggagcacaaatctttggtaggctcycatttctgtgatttatttggcaggtgctttcatctaaacctcccagcacacctgtgtgaggaccttgttttggaagtgagaaaactcaggctcacagggcttaagtaacttgctcaagagtgggcacacagaatttgtggatccaggactggagcttcaaccttttctccaagttggcaacaccacacagccttcagagggctttataaaaatagggctcccagtataaacatagggaggctcaacaacttctcacccaaatagaaggacaaaagtgggcagcttccctctcaataagatctatggttctcatcttcacctatctgccccgtaaacacacagattgagctgcatattcctttatttatttttcctcctttgagatggccaaggctgttaattttcaaaagatcgcagttatagaaacatttggaggaaggac

SEQ ID NO: 35942 - DNA, 1216 bp, Homo sapiens
  misc_feature (1)...(1216): n = A,T,C or G
tcttctcttgaatattacactctaaagaatttttttwaaaaacgtctcagacctttttcctacatatccaaggctaaatgaattccctctttcagaacacttctacatacagaacaaacctaaataggcatcaaggcctatttccaacaccctggtacagaccaacctcattccatgcctctgctccccttgaccccaactttcccttagctaggtccttgcagagcttatccagagttgtccaaaagcttgaaacctattccgttatccaactggggaagcaggaagtcaccagtctaagttaagagactcaagaacaggtaccactcaccagtccccaccctgcccttgggcacatgcctacctgggacttgtcagaaggaaggttgggatgcacacttctgtagcccttggcagcgagtgaagagggctgggcatttccattggcatcagcactggaagaaagcctccactcatctgagaaatagagaggaaaaaatctctcactcacagggaataactccctggttcccctgtaactccggggtccttggtagaaggccagaaaggtgagaatgcaagagaagccatacctgctgaagaaggctctggctccagacctacacgtggtgcagaaaggatgaaaacaagaaaaggggaaaaacattaaatggttacatttgcaggaaacaagcatgaaactgcatagaaggttgaaaatccagcgccccgttgtttgacacaaaaatgcccttagtgacgatggcctgattaccataggaacccactcgaaaccatgatgtgctgacaggcactgacctttgaaaaaacaaggctccattgacaggggtgaaaaaacnnnnnnnnnnnnnnnnnnnnnnnnnnnnnnnnnnnnnnnnnnnnnnnnnnnnnnnnnnnnnnnnnnnnnnnnnnnnnnnnnnnnnnnnnnnnnnnnnnnnaaataccacttcccaaccaactaacaggcccagtagaaagaaaagtggataaacacttttttccaggggtgctggtgttgggataaggggcagcaacatgacttaagctgggaggtatctgctgcaataaagacttttttttcctccctgcatgcttttcttctttccattaaatgaggcacataaacatttcaaaatctaatcacccttcctgagtgttcatcacatcacaaagcacccctgtctcccttcagcct

SEQ ID NO: 35943 - DNA, 1216 bp, Homo sapiens
  misc_feature (1)...(1216): n = A,T,C or G
tcttctcttgaatattacactctaaagaattttttttaaaaacgtctcagacctttttcctacatatccaaggctaaatgaattccctctttcagaacacttctacatacagaacaaacctaaataggcatcaaggcctatttccaacaccctggtacagaccaacctcattccatgcctctgctccccttgaccccaactttcccttagctaggtccttgcagagcttatccagagttgtccaaaagcttgaaacctattccgttatccaactggggaagcaggaagtcaccagtctaagttaagagactcaagaacaggtaccactcaccagtccccaccctgcccttgggcacatgcctacctgggacttgtcagaaggaaggttgggatgcacacttctgtagcccttggcagcgagtgaagagggctgggcatttccattggcatcagcactggaagaaagcctccactcatctgagaaatagagaggaaaaaatctctcactcacagggaataactccctggttcccctgtaactccggggtccttggtagaaggccagaaaggtgagaatgcaagagaagccatacctgctgaagaaggctctggctccagacctacacgtggtgcagaaaggatgaaaacaagaaaaggggaaaaacattaaatggttacatttgcaggaaacaagcatgaaactgcatagaaggttgaaaatccagcgccccgttgtttgacacaaaaatgcccttagtgacgatggcctgattaccataggaacccactcgaaaccatgatgtgctgacaggcactgacctttgaaaaaacaaggctccattgacaggggtgaaaaaacnnnnnnnnnnnnnnnnnnnnnnnnnnnnnnnnnnnnnnnnnnnnnnnnnnnnnnnnnnnnnnnnnnnnnnnnnnnnnnnnnnnnnnnnnnnnnnnnnnnnaaataccacttcccaaccaactaacaggcccagtagaaagaaaagtggataaacacttttttccaggggtgctggtgttgggataaggggcagcaacatgacttaagctgggaggtatctgctgcaataaagacttttttttcctccctgcatgcttttcttctttccattaaatgaggcacataaacatttcaaaatctaatcacccttcctgagtgttcatcacaycacaaagcacccctgtctcccttcagcct

SEQ ID NO: 35944 - DNA, 629 bp, Homo sapiens
atgaagtggatgctatgcttcagagaggtggtgggagccaaaaagagctggagcagaaggcaaggtagggtaaaggttccaagtgattggcattcacgtatagcagtggtgtagctgcatcagggcttgctgaaacacaggtggctgggcctggatcctggcacttctgatgcagtaagtatgaggtgaggcccaagaatctgcatttctaacaagtttgcaggtgatgctgagactgccagtccgtaaccgacacctggagaaccactgatgagaggtacactcaaaaacgtccttattctggaaaactagctgtatccattttattttttcccctttaaaacagttttaaaatttagctacatattcttttagcaggttgcctgttacatttctgccacttccttacagacaattcactgccatttgtcttctccaacccrcaaaaactgcgtgcggtcagccctccatatccacggattccgcatctgttaattcaaccaaccgtggatcaaatatggggggaaaaaacacaaaataggaaaccaataatatacaacatttaaaaaatacagagtaacaactatttacatagcacttatattaggtattacaagtaatctagagat

SEQ ID NO: 35945 - DNA, 299 bp, Homo sapiens
ccccccccccccaagaggtatctgatgaactcacaccctcctgagcaaaaacaccagagcctcctcccgcccttcccacgtggctttgaacagctttccctagcttccgcgcacctggtttgctttcgtgttgccgggtttcctgagggctcgcagggctactgcttggggtttccctgtaggaagacgaggcccggagagtcaccgctcccttcccagtgcagatttttgtargatccatgtctgaaaagaaaaggtccaaaattgaagactgaatccaagactcctgaaggattaaa

SEQ ID NO: 35946 - DNA, 580 bp, Homo sapiens
taaaatgcatacactttctactgagattgaaaacactgcacaacaaacttcactacttctgggctataacacctgagggagggggttgccatgtgtggtgtgcaggtctttaatgctagtgcttcacaaagcagctcttcttgtactttacttacaacrcagttaacatcccctttgcagcttgtagaaaaatggctgctaactttcttagtgacctttaccatccctttttctaagatctttaaaagaatctttagcattactttcacttttgctacaggtagaggactatggaaatatggcagggaaccttcttttaactgaaaccaagctaggttgaaatcggagggaaaatcatactgaaacacaaggtctgtcctcctgcatccagataagacttcctccaaatgtctttagggacttacggtttaaatcctgaaggagaagccttgccctccctgtagtaaatggattctatatttattcaattcagtgaaaggaggtacaatacctacaaaaacacaactactcagtagtggcaatttagacattgggagtttctagatcctaatatgatggg

SEQ ID NO: 35947 - DNA, 580 bp, Homo sapiens
taaaatgcatacactttctactgagattgaaaacactgcacaacaaacttcactacttctgggctataacacctgagggagggggttgccatgtgtggtgtgcaggtctttaatgctagtgcttcacaaagcagctcttcttgtactttacttacaacacagttaacatcccctttgcagcttgtagaaaaatggctgctaactttcttagtgacctttaccatccctttttctaagatctttaaaagaatctttagcattactttcacttttgctacaggtagaggactatggaaatatggcagggaaccttcttttaactgaaaccaagctaggttgaaatcggagggaaaatcatactgaaacacaaggtctgtcctcctgcatccagataagacttcctccaaatgtctttagggacttacggtttaaatcctgaaggagaagccttgccctccctktagtaaatggattctatatttattcaattcagtgaaaggaggtacaatacctacaaaaacacaactactcagtagtggcaatttagacattgggagtttctagatcctaatatgatggg

SEQ ID NO: 35948 - DNA, 614 bp, Homo sapiens
ttctccaggatgttacacaaaagtaacaagggaatgatgaaggacaggaggacaaatgtgacatctgaataaatcaaggagaccgatrtaacccacagacccaacaactgtggtatggcttctgaaagctactgagatggttcagaaacaggcagagataagaatagcttaggattcatgtgtttccagatcatatgaaacaacactagtaaatacaaacaggcctgtctacatgtccagcacaggtctataagcttagatagactagtgattttaaccgttacatcctaccgacaagataaatactatcttacaaatgaggacacttagacacagacagataaagtaactggccaagaccatatatacctcaatagtaaatgaagagccgggcacggtggctcacgcctgtaatcccagcactctggcaggccaaggtgggcggatcacttgaggtcagaagttcaagaccagcctggccaatatggtgaatccctatctctactaaacatacaaaaaaaattagccgggcattgtggcgtgtgcctataatcccagctaatcaggaggctgaggcggagaattgcttgaacctgggaggcggaggttgcagt

SEQ ID NO: 35949 - DNA, 614 bp, Homo sapiens
ttctccaggatgttacacaaaagtaacaagggaatgatgaaggacaggaggacaaatgtgacatctgaataaatcaaggagaccgatgtaacccacagacccaacaactgtggtatggcttctgaaagctactgagatggttcagaaacakgcagagataagaatagcttaggattcatgtgtttccagatcatatgaaacaacactagtaaatacaaacaggcctgtctacatgtccagcacaggtctataagcttagatagactagtgattttaaccgttacatcctaccgacaagataaatactatcttacaaatgaggacacttagacacagacagataaagtaactggccaagaccatatatacctcaatagtaaatgaagagccgggcacggtggctcacgcctgtaatcccagcactctggcaggccaaggtgggcggatcacttgaggtcagaagttcaagaccagcctggccaatatggtgaatccctatctctactaaacatacaaaaaaaattagccgggcattgtggcgtgtgcctataatcccagctaatcaggaggctgaggcggagaattgcttgaacctgggaggcggaggttgcagt

SEQ ID NO: 35950 - DNA, 1767 bp, Homo sapiens
gctcttcaccacccgcctactgtcatcctttgctcttttttcaatagccttgccaggtgaggtgggtttttcctgggttggtgctgagtcctgctctcccactcttctttctgagacaggatctggaaatgaaaagcaattgttagctgaagctcttttggtagctgcaaaacaaaacgctcctgaacaggctagctggggggaagcgtgtctgctaattctcaactggaattagttctgtttagagcaggggtcagcaaactttggcccatgggctgattttactggaacacaaccatgccaattcctttacatattatttatgggtgcttttgcactacgatggccgagttgagtagctgtgacagaaaccatatggcctgcaaagtctaaaatatttatcatctggtccttaaaaaaaaaaaaaagccttgccaacagtgtgatcagagctttgcagaggtatgcacatcgtgctctggtcaactgagtagttctgactgttctagaaattaaggaacaggtagaaccacaggatggggctaacattacttgaaagttttcgattcctcttgaggaagtcacttaacttttccatgcctcagttttcctatccaaaaacagggataacacttctattggcaagctcacagcaatgtggtgagaggacttatcaggataacttatgccaaagtgttcaggaagctgtacattgctaagtatacattatagattatttttgttcaagactggaagatatagagcactaacaaagataccacatatgacctaagattataaaattacttaatagaatctggcttccaagctatgacatttatttattgggcagacattgygctctgccttgtggacatgaaggtgagcattccagaatcttagccttcaaggagcttacagtctagtgggcagaaaaaccaagtgagccagcaatgagaatgcagggtgacaaaggccgattctcagaagagaagccaatcagactcacaggaagcgaagggtgctccagaggaacagcttaaataaatgcttgggggcctctggactactgagctaattatgtgccaagcaatgcaataaactcttcatttacgttctctcattttatcctcccaaagatctatgaggaagaaactattatcaccttttttttttaatagttaaaggatcaatacacagagaagttaaagtaccctgcctgcggccacacaaccagctcatagccaagctgtgatgtggcctaatgtccacctgactctagcagtcctctctgaaccacatcctgtcttgcctctttcaaagatggtaccaaggtttcaagtctggaagcctggcctaagccaaatggagaagttagaattgggttaggaatgggagggagaaatggctgcttccatatggactatggtaactttgagaagacagcaagatactcaagtaggaatgccctagagatccctagaggaactatgaaggggcccaggtgagacaccctaacaggagtgcaactttggaggcatcagcccaaaagtgatggctgacgccagggagatggcagagctcagtggtggacagaagcaaggccagagtaaagcgctaaagtcatgcatggaagggcaccacagttatagctgcaaggcaaaagaatccccaaagtgatgcaaagtaatccgagggacaggagatgaaccagaaaagtacacaaggtgccactgaaccagggaagacagaactccaagaagtggg

SEQ ID NO: 35951 - DNA, 1767 bp, Homo sapiens
gctcttcaccacccgcctactgtcatcctttgctcttttttcaatagccttgccaggtgaggtgggtttttcctgggttggtgctgagtcctgctctcccactcttctttctgagacaggatctggaaatgaaaagcaattgttagctgaagctcttttggtagctgcaaaacaaaacgctcctgaacaggctagctggggggaagcgtgtctgctaattctcaactggaattagttctgtttagagcaggggtcagcaaactttggcccatgggctgattttactggaacacaaccatgccaattcctttacatattatttatgggtgcttttgcactacgatggccgagttgagtagctgtgacagaaaccatatggcctgcaaagtctaaaatatttatcatctggtccttaaaaaaaaaaaaaagccttgccaacagtgtgatcagagctttgcagaggtatgcacatcgtgctctggtcaactgagtagttctgactgttctagaaattaaggaacaggtagaaccacaggatggggctaacattacttgaaagttttcgattcctcttgaggaagtcacttaacttttccatgcctcagttttcctatccaaaaacagggataacacttctattggcaagctcacagcaatgtggtgagaggacttatcaggataacttatgccaaagtgttcaggaagctgtacattgctaagtatacattatagattatttttgttcaagactggaagatatagagcactaacaaagataccacatatgacctaagattataaaattacttaatagaatctggcttccaagctatgacatttatttattgggcagacattgtgctctgccttgtggacatgaaggtgagyattccagaatcttagccttcaaggagcttacagtctagtgggcagaaaaaccaagtgagccagcaatgagaatgcagggtgacaaaggccgattctcagaagagaagccaatcagactcacaggaagcgaagggtgctccagaggaacagcttaaataaatgcttgggggcctctggactactgagctaattatgtgccaagcaatgcaataaactcttcatttacgttctctcattttatcctcccaaagatctatgaggaagaaactattatcaccttttttttttaatagttaaaggatcaatacacagagaagttaaagtaccctgcctgcggccacacaaccagctcatagccaagctgtgatgtggcctaatgtccacctgactctagcagtcctctctgaaccacatcctgtcttgcctctttcaaagatggtaccaaggtttcaagtctggaagcctggcctaagccaaatggagaagttagaattgggttaggaatgggagggagaaatggctgcttccatatggactatggtaactttgagaagacagcaagatactcaagtaggaatgccctagagatccctagaggaactatgaaggggcccaggtgagacaccctaacaggagtgcaactttggaggcatcagcccaaaagtgatggctgacgccagggagatggcagagctcagtggtggacagaagcaaggccagagtaaagcgctaaagtcatgcatggaagggcaccacagttatagctgcaaggcaaaagaatccccaaagtgatgcaaagtaatccgagggacaggagatgaaccagaaaagtacacaaggtgccactgaaccagggaagacagaactccaagaagtggg

SEQ ID NO: 35952 - DNA, 1767 bp, Homo sapiens
gctcttcaccacccgcctactgtcatcctttgctcttttttcaatagccttgccaggtgaggtgggtttttcctgggttggtgctgagtcctgctctcccactcttctttctgagacaggatctggaaatgaaaagcaattgttagctgaagctcttttggtagctgcaaaacaaaacgctcctgaacaggctagctggggggaagcgtgtctgctaattctcaactggaattagttctgtttagagcaggggtcagcaaactttggcccatgggctgattttactggaacacaaccatgccaattcctttacatattatttatgggtgcttttgcactacgatggccgagttgagtagctgtgacagaaaccatatggcctgcaaagtctaaaatatttatcatctggtccttaaaaaaaaaaaaaagccttgccaacagtgtgatcagagctttgcagaggtatgcacatcgtgctctggtcaactgagtagttctgactgttctagaaattaaggaacaggtagaaccacaggatggggctaacattacttgaaagttttcgattcctcttgaggaagtcacttaacttttccatgcctcagttttcctatccaaaaacagggataacacttctattggcaagctcacagcaatgtggtgagaggacttatcaggataacttatgccaaagtgttcaggaagctgtacattgctaagtatacattatagattatttttgttcaagactggaagatatagagcactaacaaagataccacatatgacctaagattataaaattacttaatagaatctggcttccaagctatgacatttatttattgggcagacattgtgctctgccttgtggacatgaaggtgagcattccagaatcttagccttcaaggagcttacagtctagtgggcagaaaaaccaagtgagccagcaatgagaatgcagggtgacaaaggccgattctcagaagagaagccaatcagactcacaggaagcgaagggtgctccagaggaacagcttaaataaatgcttgggggcctctggactactgagctaattatgtgccaagcaatgcaataaactcttcatttacgttctctcattttatcctcccaaagatctatgaggaagaaactattatcaccttttttttttaatagttaaaggatcaatacacagagaagttaaagtaccctgcctgcggccacacaaccagctcatagccaagctgtgatgtggcctaatgtccacctgactctagcagtcctctctgaaccacatcctgtcttgcctctttcaaagatggtaccaaggtttcaagtctggaagcctggcctaagccaaatggagaagttagaattgggttaggaatgggagggagaaatggctgcttccatatggactatggtaactttgagaagacagcaagatactcaagtaggaatgccctagagatccctagaggaactatgaaggggcccaggtgagacaccctaacaggagtgcaactttggaggcatcagcccaaaagtgatggctgacgccagggagatggcagagctcagtggtggacagaagcaaggccagagtaaagcgctaaagtcatgcatggaaggrcaccacagttatagctgcaaggcaaaagaatccccaaagtgatgcaaagtaatccgagggacaggagatgaaccagaaaagtacacaaggtgccactgaaccagggaagacagaactccaagaagtggg

SEQ ID NO: 35953 - DNA, 1767 bp, Homo sapiens
gctcttcaccacccgcctactgtcatcctttgctcttttttcaatagccttgccaggtgaggtgggtttttcctgggttggtgctgagtcctgctctcccactcttctttctgagacaggatctggaaatgaaaagcaattgttagctgaagctcttttggtagctgcaaaacaaaacgctcctgaacaggctagctggggggaagcgtgtctgctaattctcaactggaattagttctgtttagagcaggggtcagcaaactttggcccatgggctgattttactggaacacaaccatgccaattcctttacatattatttatgggtgcttttgcactacgatggccgagttgagtagctgtgacagaaaccatatggcctgcaaagtctaaaatatttatcatctggtccttaaaaaaaaaaaaaagccttgccaacagtgtgatcagagctttgcagaggtatgcacatcgtgctctggtcaactgagtagttctgactgttctagaaattaaggaacaggtagaaccacaggatggggctaacattacttgaaagttttcgattcctcttgaggaagtcacttaacttttccatgcctcagttttcctatccaaaaacagggataacacttctattggcaagctcacagcaatgtggtgagaggacttatcaggataacttatgccaaagtgttcaggaagctgtacattgctaagtatacattatagattatttttgttcaagactggaagatatagagcactaacaaagataccacatatgacctaagattataaaattacttaatagaatctggcttccaagctatgacatttatttattgggcagacattgtgctctgccttgtggacatgaaggtgagcattccagaatcttagccttcaaggagcttacagtctagtgggcagaaaaaccaagtgagccagcaatgagaatgcagggtgacaaaggccgattctcagaagagaagccaatcagactcacaggaagcgaagggtgctccagaggaacagcttaaataaatgcttgggggcctctggactactgagctaattatgtgccaagcaatgcaataaactcttcatttacgttctctcattttatcctcccaaagatctatgaggaagaaactattatcaccttttttttttaatagttaaaggatcaatacacagagaagttaaagtaccctgcctgcggccacacaaccagctcatagccaagctgtgatgtggcctaatgtccacctgactctagcagtcctctctgaaccacatcctgtcttgcctctttcaaagatggtaccaaggtttcaagtctggaagcctggcctaagccaaatggagaagttagaattgggttaggaatgggagggagaaatggctgcttccatatggactatggtaactttgagaagacagcaagatactcaagtaggaatgccctagagatccctagaggaactatgaaggggcccaggtgagacaccctaacaggagtgcaactttggaggcatcagcccaaaagtgatggctgacgccagggagatggcagagctcagtggtggacagaagcaaggccagagtaaagcgctaaagtcatgcatggaagggcaccacagttatagctgcaaggcaaaagaatccccaaagtgatgcaaagtmatccgagggacaggagatgaaccagaaaagtacacaaggtgccactgaaccagggaagacagaactccaagaagtggg

SEQ ID NO: 35954 - DNA, 1067 bp, Homo sapiens
ttaaaattatccaggtgtggtggcacacgcctgtggtcccarctactggcatcgagaggctgaggtgggagaatcacctgagcctgggaggttgaggatgaagtgagccatgactgcaccactgcactctagcctcaacaacagagtgagaccttgtctcaaaaaaaaaaaaaaaaaaaaaaaaaaagactatgttgtctccagttttgaggtgtgaaatagcctttctttcataggatgacatgcaacacaggtaacagtggccactttctagtggtgttattttaaagcattagaatgaaaaaccctagggtgatccctagactgcttcatgtgtccgtaagtctgggaacctctgagctctagttctcaatgtggtcggtgggccagtggcactggtatgcctagcaagcttgctgaaaatgtagaatctcgtctcctccaccccaaacctcttgaggctgaacctgcaagttaacaagactctcaggatccgacgcacatagactgagaagccctaagcaaggggacccacgcacctcttttcatcctgagagttttctgattcaaagcctccctcccagacagatggtaagcgatttgtcttcatacccatgtggtgtgaaaactcaggaaagaaggggaaagggctgtgttgttcacaaccatcagtaccaggccagaggctcagtgcccctctgtttctagtaggggtaagctggcttggagagacaggattattgccacactatgccctgggacagtctaggcaaaaaaaaaaaaaaaaaaaaaaggggggggggggcagggagggaggcattttttaggatgacaaaactagaattccagaagtggagtaaagttattccctcaggagactttgcaataattaagaaattatttttatgggtactgtttatgaagcaaagcagagctgccaggttaggcaaattccaaagcaatgccaaaaacacttgacctaaaccccatttatgattagtaatacggggctgggccagtgaggctcttctcttcttcctgatgcttcctgccccacctgcttagtg

SEQ ID NO: 35955 - DNA, 1067 bp, Homo sapiens
ttaaaattatccaggtgtggtggcacacgcctgtggtcccaactactggcatcgagaggctgaggtgggagaatcacctgagcctgggaggttgaggatgaagtgagccatgactgcaccactgcactctagcctcaacaacagagtgagaccttgtctcaaaaaaaaaaaaaaaaaaaaaaaaaaagactatgttgtctccagttttgaggtgtgaaatagcctttctttcataggatgacatgcaacacaggtaacagtggccactttctagtggtgttattttaaagcattagaatgaaaaaccctagggtgatccctagactgcttcatgtgtccgtaagtctgggaacctctgagctctagttctcaatgtggtcggtgggccagtggcactggtatgcctagcaagcttgctgaaaatgtagaatctcgtctcctccaccccaaacctcttgaggctgaacctgcaagttaacaagactctcaggatccgacgcacatagactgagaagccctaagcaaggggacccacgcacctcttttcatcctgagagttttctgattcaaagcctccctcccagacagatggtaagcgatttgtcttcatacccatgtggtgtgaaaactcaggaaagaaggggaaagggctgtgttgttcacaaccatcagtaccaggccagaggctcagtgcccctctgtttctagtaggggtaagctggcttggagagacaggattattgccacactatgccctgggacagtctaggcaaaaaaaaaaaaaaaaaaaaaargggggggggggcagggagggaggcattttttaggatgacaaaactagaattccagaagtggagtaaagttattccctcaggagactttgcaataattaagaaattatttttatgggtactgtttatgaagcaaagcagagctgccaggttaggcaaattccaaagcaatgccaaaaacacttgacctaaaccccatttatgattagtaatacggggctgggccagtgaggctcttctcttcttcctgatgcttcctgccccacctgcttagtg

SEQ ID NO: 35956 - DNA, 787 bp, Homo sapiens
cactttaatttttaatttttaatttttatttttgagacagagtctcactgtcccccaggctggagtgcagtggcgctatctcggctccctgcaacctctgcctcacggattccagggattctcttgcctcagcctcccgagtagctgggattacaggtgctcgccaccacatgcagattatttttgtatttttagtagagacggggtttcaccatgttggccaggttggtctcaaactcctgacctcaggtgatcaacctgtctcgtcctcccaaagttctgggattacaggcataagccactgtgcctggcgcaagtcatttaaaatagttgactctcaacaagtctctgcacagtggcaatatcatccacattttacagatgtggaaaccgagagattaaatgatgtgcttgaggaggagccaagattcaaacctgtgatcgcttgacatcatatcaagtactctccccagcctaccctatcactccttggcaccatggtggccatttccttactgttacttttgtccagctcactstctatgaggcagatataggaactcacttctcacaagtagcctgtgatggaagtatcagtgtgttacttctgaaaagcatgatgaccttctccttgcaccctctcttgggttacttgctctgggggaagccagctgccatgtcatgaggacactcaagcagccctgtggagaggcccacatggcaaggcactgggcctcctgccaacagccggtgagcagctgccctgtgaggaagtcatcttagaaat

SEQ ID NO: 35957 - DNA, 787 bp, Homo sapiens
cactttaatttttaatttttaatttttatttttgagacagagtctcactgtcccccaggctggagtgcagtggcgctatctcggctccctgcaacctctgcctcacggattccagggattctcttgcctcagcctcccgagtagctgggattacaggtgctcgccaccacatgcagattatttttgtatttttagtagagacggggtttcaccatgttggccaggttggtctcaaactcctgacctcaggtgatcaacctgtctcgtcctcccaaagttctgggattacaggcataagccactgtgcctggcgcaagtcatttaaaatagttgactctcaacaagtctctgcacagtggcaatatcatccacattttacagatgtggaaaccgagagattaaatgatgtgcttgaggaggagccaagattcaaacctgtgatcgcttgacatcatatcaagtactctccccagcctaccctatcactccttggcaccatggtggccatttccttactgttacttttgtccagctcactctctatgaggcagatataggaactcacttctcacaagtagcctgtgatggaagtatcagtgtgttacttctgaaaagcatgatgaccttctccttgcaccctctcttgggttacttgctctgggggaagccagctgccatgtcatgaggacactcaagcagccctgtggagaggcccacatggcaaggcactgggcctcctgccaacagccggtgagcagctgccctgtgaggragtcatcttagaaat

SEQ ID NO: 35958 - DNA, 1875 bp, Homo sapiens
  misc_feature (1)...(1875): n = A,T,C or G
tcactgtcaaataactctcagctcatctgagcctacttgttttctactctaagttgttccttctctcctccacccactctcccacctcttatcacccagagccttacattccacccaggtactaagcttcaagtaaaataagtccagacataaaagctctatttactgcattgtctccagcccccccccaaatttcatccagaatcagtcaacagagacagacaggaagcagcaatatataacaagtgacttcaagaccgagctaagaacatcaacatctcactatgtgaaatcaagtagtgtgaggccctccatgaaaactgtttttccccccaattaattttgttttttttttggacaggtggaaaagaaactggtcgtgatggggtttatttatttttaattttttttttattttttgagacggagtctcgctctgtcgcccaggctggagtgcagtggcgggatctcggctcactgcaagctccgcctcccaggttcacgccattctcctgcctcagcctcccaagtagctgggactacaggcgcccgccaccacgcccggctaattttttgtatttttagtagagacggggtttcaccgttttagccgggatggtctcgatctcctgaccttgtgatccgcccgcctcggcctcccaaagtgctgggattacaggcgtgagccacggcgcccggccagagatggggtttattatcttgtatattctttactattgattatgggtaattttcataccttgtctgcctgaaaataaagtggtagctaataagccccaatttaaggaagaaaaggaaagctgagctacccacagtcacaaacaaacccaaaagctggaaatgtgatagcaatttaaaaaaatttatttagactatcaggccagctatttcctccagaccagattattctgtctatggccttctcacccaccacaatcaaaggcctgaaccctggagcagagaggaggcagttcgggacaggcagagcttcatcctctccccacaatgtaccttcgatttcagaaatgcgcttttcagtttctttttccatcactttctgctgaaaccgaatttttgccacttgtgcaatcttctctgcttctataatcatacaacataagaagacacattcaaaaccatttctacagtacctgaggcacttcgaaccagcagcacacagtctaacatttaattacagaaagttttatgtgctaattgtttcactaagttttatctagtcagactgtaaactactcaaaggaaaaaagggaatttatttcctaatttactgttctattttgacagtgctagttttgtgggaagaaggagtaaaaaaaggttaaagtgccagtccttcatgcaactctgtagcaacggtccacaagctaatgggaaaaaaagatacttatgaannnnnnnnnnnnnnnnnnnnnnnnnnnnnnnnnnnnnnnnnnnnnnnnnnnnnnnnnnnnnnnnnnnnnnnnnnnnnnnnnnnnnnnnnnnnnnnnnnnnaggctgaggcaagaggatctcttgagcctgggaggtcaaggctacagtgagccatgatcatgccactgcactccagccagcgtgacagagtgaggccctgcctcaaaaacaaaaacaaaaacaaaaaaaagaaagacaagaaggcacaaatgaacaagtcacaatggagaggtgatatggaaccagccaacaagcgaagacaacawaaaataagaagagaaagagggctaggagacctctgtcttgagtgacaggctaaggagcttagttttactatactcaggatctactgttaagttaccattagggaaatgacaggatgaaaatggtatcagaagagga

SEQ ID NO: 35959 - DNA, 341 bp, Homo sapiens
tagcatgccaaaatgaaccatatggagaatttattttacataatacttcgtctactgaaatagcctcataatgaaccaggtggtgtgattggctcagcctttccctcyccagcagtaaaactgttgaaactgagtttggtgtgcagaaaggttacacatatccatacacttaaaattctgtgtattttgacccaaagcataattgggaggaagacaattctcataggaacaacattgaaaatagtcatacttagctatctaacatcacttgaaaatgtcacttattagcacaatagccaattaaatgttttaaattttgactaaccccaatcaccactcct

SEQ ID NO: 35960 - DNA, 526 bp, Homo sapiens
gattctattagtcattatatataccatctactcacaaaaaatgtttctgttgctttaaaatagataattgagctttaaaataaaattgtattcagtactaggtaactaacactaaagattaaataactctgagctttaaaatataattgtattcagtactaggaaactaaaacwaaagaagattaaataactcaaggattctataaactagccaagaaaacctatatgtaaacaagtcagtccaaaaaaggagaaaataagaaattatactttctttatagaggcaggctttcttgaactaagtcctgaaggctgggtatgtgtttccaagacaaatcagttgtttatggtggtaaatagcaaagccagggtacagttaataaatagtgacttttgatcaaaagtaccagtgagaaagttaatcagatagttagataggtaacttttaactagctaaatatttggtaatgttttttcagatcatctgaaaaactttaaatatttacatattttagttttatttaaa

SEQ ID NO: 35961 - DNA, 526 bp, Homo sapiens
gattctattagtcattatatataccatctactcacaaaaaatgtttctgttgctttaaaatagataattgagctttaaaataaaattgtattcagtactaggtaactaacactaaagattaaataactctgagctttaaaatataattgtattcagtactaggaaactaaaacaaaagaagattaaataactcaaggattctataaactagccaagaaaacctatatgtaaacaagtcagtccaaaaaaggagaaaataagaaattatactttctttatagaggcaggctttcttgaactaagtcctgaaggctgggtatgtgtttccaagacaaatcagttgtttatggtggtaaatagcaaagccagggtacagttaataaatagtgacttttgatcaaaagtaccagtgagaaagttaatcagatagttagataggtaacttttaactagctaaatatttgstaatgttttttcagatcatctgaaaaactttaaatatttacatattttagttttatttaaa

SEQ ID NO: 35962 - DNA, 676 bp, Homo sapiens
tggaaggggctccagcagaggcagcccacgagcagaatgcactttgaccccacttcaatggcctcctgaaagtagggggagtgttcctggcagagggtgaagagctaatttctgatcatcctgagagaaggcttgggaggtgacagaatgtccctgcctttcctacctgcccacccaccccttccaccctgtcccaaccttctcactggtgggaagttctcagtaggaaagagatgagggtttggtcaaaaattccctttcaagrgtaggtgttattggttaattttactaatcacaaattgagaatcagagaagtaaaactgtcagaggtgtgtgaaccagagcaactccatcttgaatagaagctggggaaaataaggctgaaacctactgggctgcatccccagacgcttaaggcattctaagtcacagaatgagataggaggtcagcacaagatacgagtcataaagaccttgtgataaaacaggttgcagtaaagaagccagccaaaacccaccaaaactaaaatggtcacgagagtgaccactggtcgtcctcactcctgccctcccattagtgccatgacagtttacagatgccatggcaacatcaggaacttaccctatgtggtctaaaaaggggaggcatgaataagccaccccttgtttaacatat

SEQ ID NO: 35963 - DNA, 676 bp, Homo sapiens
tggaaggggctccagcagaggcagcccacgagcagaatgcactttgaccccacttcaatggcctcctgaaagtagggggagtgttcctggcagagggtgaagagctaatttctgatcatcctgagagaaggcttgggaggtgacagaatgtccctgcctttcctacctgcccacccaccccttccaccctgtcccaaccttctcactggtgggaagttctcagtaggaaagagatgagggtttggtcaaaaattccctttcaagagtaggygttattggttaattttactaatcacaaattgagaatcagagaagtaaaactgtcagaggtgtgtgaaccagagcaactccatcttgaatagaagctggggaaaataaggctgaaacctactgggctgcatccccagacgcttaaggcattctaagtcacagaatgagataggaggtcagcacaagatacgagtcataaagaccttgtgataaaacaggttgcagtaaagaagccagccaaaacccaccaaaactaaaatggtcacgagagtgaccactggtcgtcctcactcctgccctcccattagtgccatgacagtttacagatgccatggcaacatcaggaacttaccctatgtggtctaaaaaggggaggcatgaataagccaccccttgtttaacatat

SEQ ID NO: 35964 - DNA, 676 bp, Homo sapiens
tggaaggggctccagcagaggcagcccacgagcagaatgcactttgaccccacttcaatggcctcctgaaagtagggggagtgttcctggcagagggtgaagagctaatttctgatcatcctgagagaaggcttgggaggtgacagaatgtccctgcctttcctacctgcccacccaccccttccaccctgtcccaaccttctcactggtgggaagttctcagtaggaaagagatgagggtttggtcaaaaattccctttcaagagtaggtgttattggttaattttactaatcacaaattgagaatcagagaagtaaaactgtcagaggtgtgtgaaccagagcaactccatcttgaatagaagctggggaaaataaggctgaaacctactgggctgcatycccagacgcttaaggcattctaagtcacagaatgagataggaggtcagcacaagatacgagtcataaagaccttgtgataaaacaggttgcagtaaagaagccagccaaaacccaccaaaactaaaatggtcacgagagtgaccactggtcgtcctcactcctgccctcccattagtgccatgacagtttacagatgccatggcaacatcaggaacttaccctatgtggtctaaaaaggggaggcatgaataagccaccccttgtttaacatat

SEQ ID NO: 35965 - DNA, 1046 bp, Homo sapiens
ttctaattgtgtcctggaaagaagtgtttcacacctttggaggttgacatctgcaccaggcagaagtgcaaaaaagtgtttaaggtccacatttatggatacctgataggtgcatttgagaaaatatgaacgttgctcaacggatgttttaaagaacacagaacacatgttaataactatgactgttaacattttaaagtttaacaacagattaatttggctgataagtacatatgtgactgaatcataaatttcacaagtgctggaaccatgtcttaaacatatttgcatgccccatagtgcctggcacagtgcctggtaaattgaatgctctcaataaatatttgatgataatgagtattttattttacatctacatcaaaccaaaacatcaagctgatggaaagggartttttcacttctagattcctttactcccttatactcataccgtgtgtaattgctttttaaacatcagacagtatgaaattttctaactaaaaagaaatatgcaagaatgcaaaagatgatagagagagaggtttcacatttgcaagtaaagaggatcgttttggaaatacttcatgttattacttaggatctgaaataatgattagataagttttgaccctttgggggtatgttacgtttactttgtattttgggaccatggcatccaggcagtagaaatatagacaatgatatatcaagtcacaggcatgatacagcaataaataagtgctcatcttttgcatgattactgtcgtactgctttggtattatatttgttttcctcaaataattattagctatatataaataataaactttactccctcgctactggaaaatgatgtttgacattaaggaaaggtcaggtattgtgagtgggaaaccacaatgtgcattgcctttaaggattattgaattaagaggtacatatatttgacaaagtatagaaatcaaatagctaccatgttagcagtgccattttacatgccatagatttattgatcatttaataatatttttaacagttaaaactg

SEQ ID NO: 35966 - DNA, 533 bp, Homo sapiens
taaaacagaaaacaaaaagcaatgaaaatggtttgttaacatttacacagggctgcctatgagtagtgagatttctggtaacttttactatattctttccttgtgtatgacctattaacacttttattttctcagaattggcacttgtaaaaagtagttgctcacctctgcctgaagtcattatcacacattgattatcagtcagtaccttagaggaattagttgccagtcagggacactaagaatcctcacaggatagatatttgaaggacagcagaagctgaagagcagggaaaagtgttttcaggaaaaaagaaataaaggtgtaaaggtgtctttggtgttgattaaatacagtgggctatgtcaagggcttcacatgttcctttgttgcagtatattttctattaccaaaaatgagccttccttacctgaaactaaccatcacaaattcctccttttaataatgaagttaggtaacttgcccaaggttgtatctatgaaaragccaaaatataaaaccaaatgtgttt

SEQ ID NO: 35967 - DNA, 1281 bp, Homo sapiens
  misc_feature (1)...(1281): n = A,T,C or G
actccttaactaagacttcttgttaagattattttaaactgtcttgaatttaagcttttatgtttcctgtattttcatttaatctcatctatattttatatttacaattttttcattgtgaatatataaccatactgtagatagcaagttcagggaaaattatctgttaattgcaattacagtgtgtatatttaacgttcaatgtgtgatcataaaaaaataagaatcattctgattttactgctactaatgtataaatatattacaattgttgtatacgattagtctaaattgttgaagtaaaacacattcatctaggctgagcgcagtggctcatgcctgtaatctcagcactttgggaggctaaggtgagcggatcacgaggtcaggagatggagaccatcctggccaacaaggtgaaaccccgtctctgctaaaaatacaaaaattagctgggtgtggtggcgcgcgcctgtaagcccagctacttgggaggctgaggcaggwgaattgcttgaacctgggatgcagaggttgcagtgagctgagatcacgccactgaactccagcctggtgacagagctagtctccatctaaaatatatatattcatctaatctgctcacctgtatttttgttttttattatttgtttgtgttagcctatgaagacactgtatgctgtttatttttttaggtttctgtaaattttactcaatacttatctcaacggttctctttaattaaactggcaaagcttttccttttggtttctgatgcagaagtttttccaccatgaattnnnnnnnnnnnnnnnnnnnnnnnnnnnnnnnnnnnnnnnnnnnnnnnnnnnnnnnnnnnnnnnnnnnnnnnnnnnnnnnnnnnnnnnnnnnnnnnnnnnnccattgaattcacaaatttagggaaaatatatttttcatattttattcaaagtgtctaaaactgaaaaagtacatgtcatttatattattcccagctctttttggtttgagccatagactgcaaattagtttttcatagtaaaactgtaacatagacatctcttcatgcttacctgctaactattccctgacttacatcttcagcgtgccattgaggtaaacacgatgatttattcttaaatacttatgtggatggtaacaaaaatgaaataggacattgctcaaaaaagaggggagggaagagaaagaaaaggaaacttccctacaatgctgctagccaggctttatctttatgacactaacgataatcccctgtgtaat

SEQ ID NO: 35968 - DNA, 677 bp, Homo sapiens
tctgcataagttcttactctttgtaaggcgtgtgcttttttcagtgagtgtgacccaagtatatccatgctcattttttttttctgatgagtgagttaaattgtttgatttacattttatcaaatacactttcaacatgtaccttctccaaaactctaacactgcatctcattctgctttagatttggtatattctagatcacaatatagccaaaaaaagattatgtattcattaccaaaataaactgaacaaaagacaagaatagataaatgaatgtgtaagagagaaaaataacgcattttatctttcaattttatgtcttcactgctaaggttgttttccaataaggtggatctctcacttattctatcatcctcctttctcatacactttagtcttcagttcattttctttccatattccagctcatatgcaaaaatatcratggcaagaattctatatagctatactgccatatttataattcaaaatcttgtcaattctagtcactgattcagctgcttaggctgaaaaataatgtataatattcttaaaattttctgcatggtgattgcaactttagagaaagctgcattcagcagacaaccaacagaaaaagttggcttaagatttttaaattcactaagttataaatgcacaatcataaacaggtaag

SEQ ID NO: 35969 - DNA, 1602 bp, Homo sapiens
tatttcaagagacaagtcatctttcagtgctgctaaatacataatactaaattagttaccgaaaacatactgtgttcagtgtataacacagaagggatgctaaaagtaacaactcagagaaggtgtcaacagaagcactagttgatttgtagatgtaaattggcaaatgcctcaccaggggtaaatgctggagatacagtacagccatcattgagacttctcctccctctactcttggcagtagttcctacttacaggtagacaaaattccagacgtactcatttcaacattcaagccctgcttcctcaatctgcttcctagtgagactattgaaattgaagcgctacagagaaaatagaacttgtcatttcaaaagtcttataatgaattaaactgttttttaagccaaacaaatcctaatattctagtgcaagaaaatacaaagagacttaagagcagactaaattatctaaaagagatgctaattaggaataataaatgcttgaatagcctaggcttttttgggctatcataagattataaacatgcgattctgtaaagtcaaatgatggatctttctagtagtaattccattatgaataccaattctgagtattaaatgcagcgtgctgcaggcgcttgctaagctcatgaatcagtaagatttctttcctatttggccatccagctcttgaatagtaaatacaaaagccttaaaaacctgggttccacaagacttcattgtattggagacagatgtatttcttttaatgaatcaggactacgagtattgattctatcaaagagttctgggaacattaacagaaaagagatttcttatgacatcatgtccctcaacataatatttatgtataatccatgtggaccatgtatattttatacaattattgatgagaaaagggacccctttaagcctttactcattaaatgatgtttctccaccatcctcttatcttgctgctctgaggcttctctaagtggttgctggtggtgatctactctgcctttctctgcaagcaacttctctgcttcaagaattcttcccaaagccrgttcttattgtgattgcctcgttgcttttgcccgtatagccctcggcatcctacccccacaaactatttacaaataattgttctttaagagtcagttaagcattcaccatgctcctgctttgcaggaaaattggcagtaaagtagaaaagctgatgccatcatcaaatattataacacacttctgaatggagttttcaatttcaaggccaacaatatatagctaagaataagttgttactttttgtacttcttgaaactactttatcattgctcaatatttattgagcactagtgttattggagtcaattttataacaatttatttctatccatttttctcttaatcatttttttaattttggataggaacatttacatttcaaccctgacacacaaaaattactttataaatatttggtgtgtgggtgcatgaggaaaaggtttcctttcggcatttgtggttttctcttcacaaataaaatatttaatgaaataagggtggagcagcatgaccaaattcatatgca

SEQ ID NO: 35970 - DNA, 1602 bp, Homo sapiens
tatttcaagagacaagtcatctttcagtgctgctaaatacataatactaaattagttaccgaaaacatactgtgttcagtgtataacacagaagggatgctaaaagtaacaactcagagaaggtgtcaacagaagcactagttgatttgtagatgtaaattggcaaatgcctcaccaggggtaaatgctggagatacagtacagccatcattgagacttctcctccctctactcttggcagtagttcctacttacaggtagacaaaattccagacgtactcatttcaacattcaagccctgcttcctcaatctgcttcctagtgagactattgaaattgaagcgctacagagaaaatagaacttgtcatttcaaaagtcttataatgaattaaactgttttttaagccaaacaaatcctaatattctagtgcaagaaaatacaaagagacttaagagcagactaaattatctaaaagagatgctaattaggaataataaatgcttgaatagcctaggcttttttgggctatcataagattataaacatgcgattctgtaaagtcaaatgatggatctttctagtagtaattccattatgaataccaattctgagtattaaatgcagcgtgctgcaggcgcttgctaagctcatgaatcagtaagatttctttcctatttggccatccagctcttgaatagtaaatacaaaagccttaaaaacctgggttccacaagacttcattgtattggagacagatgtatttcttttaatgaatcaggactacgagtattgattctatcaaagagttctgggaacattaacagaaaagagatttcttatgacatcatgtccctcaacataatatttatgtataatccatgtggaccatgtatattttatacaattattgatgagaaaagggacccctttaagcctttactcattaaatgatgtttctccaccatcctcttatcttgctgctctgaggcttctctaagtggttgctggtggtgatctactctgcctttctctgcaagcaacttctctgcttcaagaattcttcccaaagccagttcttattgtgattgcctcgttgcttttgcccgtatagccctcggcatcctacccccacaaactatttacaaataattgttctttaagagtcagttaagcattcaccatgctcytgctttgcaggaaaattggcagtaaagtagaaaagctgatgccatcatcaaatattataacacacttctgaatggagttttcaatttcaaggccaacaatatatagctaagaataagttgttactttttgtacttcttgaaactactttatcattgctcaatatttattgagcactagtgttattggagtcaattttataacaatttatttctatccatttttctcttaatcatttttttaattttggataggaacatttacatttcaaccctgacacacaaaaattactttataaatatttggtgtgtgggtgcatgaggaaaaggtttcctttcggcatttgtggttttctcttcacaaataaaatatttaatgaaataagggtggagcagcatgaccaaattcatatgca

SEQ ID NO: 35971 - DNA, 1602 bp, Homo sapiens
tatttcaagagacaagtcatctttcagtgctgctaaatacataatactaaattagttaccgaaaacatactgtgttcagtgtataacacagaagggatgctaaaagtaacaactcagagaaggtgtcaacagaagcactagttgatttgtagatgtaaattggcaaatgcctcaccaggggtaaatgctggagatacagtacagccatcattgagacttctcctccctctactcttggcagtagttcctacttacaggtagacaaaattccagacgtactcatttcaacattcaagccctgcttcctcaatctgcttcctagtgagactattgaaattgaagcgctacagagaaaatagaacttgtcatttcaaaagtcttataatgaattaaactgttttttaagccaaacaaatcctaatattctagtgcaagaaaatacaaagagacttaagagcagactaaattatctaaaagagatgctaattaggaataataaatgcttgaatagcctaggcttttttgggctatcataagattataaacatgcgattctgtaaagtcaaatgatggatctttctagtagtaattccattatgaataccaattctgagtattaaatgcagcgtgctgcaggcgcttgctaagctcatgaatcagtaagatttctttcctatttggccatccagctcttgaatagtaaatacaaaagccttaaaaacctgggttccacaagacttcattgtattggagacagatgtatttcttttaatgaatcaggactacgagtattgattctatcaaagagttctgggaacattaacagaaaagagatttcttatgacatcatgtccctcaacataatatttatgtataatccatgtggaccatgtatattttatacaattattgatgagaaaagggacccctttaagcctttactcattaaatgatgtttctccaccatcctcttatcttgctgctctgaggcttctctaagtggttgctggtggtgatctactctgcctttctctgcaagcaacttctctgcttcaagaattcttcccaaagccagttcttattgtgattgcctcgttgcttttgcccgtatagccctcggcatcctacccccacaaactatttacaaataattgttctttaagagtcagttaagcattcaccatgctcctgctttgcaggaaaattggcagtaaagtagaaaagctgatgccatcatcaaatattataacacacttctgaatggagttttcaatttcaaggccaacaatatatagctaagaataagttgttactttttgtacttcttgaaactactttatcattgctcaatatttattgagcactagtgttattggagtcaattttataacaatttatttctatccatttttctcttaatcatttttttaattttggataggaacatttacatttcaaccctgacacacaaaaattactttataaatatttggtgtgtgggtgcatgaggaaaaggtttcctttcggcatttgtggttttctcttcacaaataaaatatttaatgaaataaggrtggagcagcatgaccaaattcatatgca

SEQ ID NO: 35972 - DNA, 535 bp, Homo sapiens
tgtggcaccactgacatagcttttattgcagataaaacctatgacaaattttctgtatgataaaagaagaacatgatttcatattaaattctgatgatagagacatatttctctgcttgtacttctgaaatgttttgggtatagtaacaatggacaacacttcctcttcgattacatcaataaaatctcaaaatccccttcgtttttatgggtccagagcttcagtaaatayttcttaagcagaactaaaaaacagtgtgaaaaatcttcagaattcagttcactgctaaccttgctgatcaaaacagacaaaacattcagctggttcaacataatgagaagcagaaagagggagccacaaaagagcctggaaattgagtgttgccatgaaggtgtataagagctcgagcaaaattttctcaaatataagcatcaagataacagtaggtccctctgacagtcatttaaaagaaagaataatgcctattatagtaacttcaaggagttataaaagcacttgagttttcagggagtc

SEQ ID NO: 35973 - DNA, 646 bp, Homo sapiens
cacccttcactggggtcatacagaaccatatgatcatgtcatgctcttccttgcaaacctgtttcttctcctgtgtttcctttttagtgcacctcctatttttttttacctcctatgtttttttttttcaaatctgtctaatacctttctgtgccaccactccgatggaagccaccaccacatcttaatcgaattcaactaaaatagcgttctgactagttttcctgcccctaatcttgcctccatccaatgtgttctccattcaacagcgacagtgatctcttaaaagtacaaatttaatcttgttcttcttaaagcttttcactgggtgctctttgttgttagaataaaatctccaaagctctgcagcctcattgctctaagagctcagcrgcagcatatctataacagacttggtggtggggtgcagtggtcagaaaagaagtaatccctccagggctgtacttcccttggcgcattcttcttccatctccttatctggttaagtcctactaattattccatcaccattttatcaaaactttccttggtccatctagatcccactcctcctccaactactgatttctgttttttatggttaagagtcagtctgtctgggtttgaatttggctctattctttac

SEQ ID NO: 35974 - DNA, 646 bp, Homo sapiens
cacccttcactggggtcatacagaaccatatgatcatgtcatgctcttccttgcaaacctgtttcttctcctgtgtttcctttttagtgcacctcctatttttttttacctcctatgtttttttttttcaaatctgtctaatacctttctgtgccaccactccgatggaagccaccaccacatcttaatcgaattcaactaaaatagcgttctgactagttttcctgcccctaatcttgcctccatccaatgtgttctccattcaacagcgacagtgatctcttaaaagtacaaatttaatcttgttcttcttaaagcttttcactgggtgctctttgttgttagaataaaatctccaaagctctgcagcctcattgctctaagagctcagcagcagcatatctataacagacttggtggtggggtgcagtggtcagaaaagaagtaatccytccagggctgtacttcccttggcgcattcttcttccatctccttatctggttaagtcctactaattattccatcaccattttatcaaaactttccttggtccatctagatcccactcctcctccaactactgatttctgttttttatggttaagagtcagtctgtctgggtttgaatttggctctattctttac

SEQ ID NO: 35975 - DNA, 736 bp, Homo sapiens
cccactgccactgcagtcatcatctctgacctggaacacggcagcctgccgttcaaactccacttggcctttagagtcatcttcctgacatgggaatcacattctaactctccctgtctccaacttttcagtgcctccccagaaccaccaggatgaagttcacttcttgctggggcaccagagtcttgggttgtgaggcttccagaccttgattggcctcaccctgggccacaagccttcctcgcctgatgctccatcctcacatgtcacttgccactccctgaacactcatgarggctgatgtctctgggctcttccctctgcctaaagtggtcattcccctttgatccacttgtgtgtatccttcaagactcagaaagccatgattatctttctcctttcccctccctctcctagacaatttttttttttttgagactgagtctcattctgtcacccaggttggagtgcagtagcatgatcttggctcactgcaacctctgcctcccaggttcaagcgattctcctgcctcagcctccccagtagctggaactacaggctcacaccaccatgcctggctaattctttgtatttttagtagagacagggtttcacaatgttggccagggtggtctcaaactcctgacctcagatgatctgcccgtttcggcctcccaaagtgctgggattacaggcgtgagccaccatgcctggctcctctcctagatacttcta

SEQ ID NO: 35976 - DNA, 263 bp, Homo sapiens
aagtccaggcaccttggctcatgcctgtaatcctagcactttgggtggctgaggtgggagggtcacttgaagctaggagtttgaggtttgaagatgggtctcaagtgctaagttactttctagagtttatgttattttatcctcttggttggctgatacttttttggggggtaaagtgtgtaagaatttggggagcgggaagactagggatagagggcactgaatcatagatgtgatatgggyttgctgcttcagtggttgaa

SEQ ID NO: 35977 - DNA, 573 bp, Homo sapiens
gatagggctgtgctttcttcagaaattaaaaagccctgtgagttcaccatagtggcttaaagtgtacagtttgagaatcactaatgaatccacttagcattgggtcctcttattactttcctgttacttactctgaacagatatactatcttgattttataacaaacatttgctatttctttgtactaggaacatagtaacactttatcagwgtaacactttaattgtaaataaattattatttacaattgctattataagtattttccaaacttccttaaaacagtcactgtagagttcagtccacaagtggctcaggtgcatcttatttctcgtgttagaaaagatctgatatagttagggatgaaaaggagaaagcagaagaacacaacaaattctttatcttaacctctaaaggtgttgcttacattgtcttttaatattgagcaaatagtgaaaagtattaatgtaatagacacagaaaaataataatacttatctctcagtaggtgcctgctttttgccaaagtgccaagaattttacatgttatctcatttaaatcctatcagcag

SEQ ID NO: 35978 - DNA, 603 bp, Homo sapiens
cagagtggaccactatggccacctgcctgccacagtatcacctactgcagacggaacagcaaaataagtcccctgggtcatttcaccacattggacaagcccaacagggcaattgcagagatgagatgacccatgtatttagctcgatataataatataggaagcagtcaattttaaaaggcatatttatagcttttatagctatattattatagtactaataaagctatattattatagtactaataaagtactataactggaagttaaaggtagaaatactcccatatgatagaacaaataagggtacctatggcccataccttttcaggagttatgcatattttcctttacattggaagagacagaargaagttatgtcttttacatgtccaaccagttggaaaataagtaaacattgtggctcagcatctgttttagaagactactaattcttttttttaattcccacagatgaagccactcaagtgactaagaatacacccaaactaacaaccttccattccactgataagaactaacgtttacctgataaaaagtcattcctttgcaaggttctttcacacttcctgggtacactaa

SEQ ID NO: 35979 - DNA, 603 bp, Homo sapiens
cagagtggaccactatggccacctgcctgccacagtatcacctactgcagacggaacagcaaaataagtcccctgggtcatttcaccacattggacaagcccaacagggcaattgcagagatgagatgacccatgtatttagctcgatataataatataggaagcagtcaattttaaaaggcatatttatagcttttatagctatattattatagtactaataaagctatattattatagtactaataaagtactataactggaagttaaaggtagaaatactcccatatgatagaacaaataagggtacctatggcccataccttttcaggagttatgcatattttcctttacattggaagagacagaaagaagttatgtcttttacatgtccaaccagttggaaaataagtaaacattgtggctcagcatctgttttagaagactactaattcttttttttaattcccacagatgaagccactcaagtgactaagaatacacccaaactaacaacctyccattccactgataagaactaacgtttacctgataaaaagtcattcctttgcaaggttctttcacacttcctgggtacactaa

SEQ ID NO: 35980 - DNA, 747 bp, Homo sapiens
ataaataaagttgtatgggaactcaagccttgactacaaagagacttcaaattagtytggaattaagcttacaaacccagcaagataactaacaatataaggtaacatttaccaagcatcaaatgtaaacagtaaattctacatgagtccagcatgtcctgtgggcatcccttctctgttccacgacggcaccatctacaaacctgtgcagtgcctacgcaggtctgtgagcatacacagcctatatacttacatgggccttttgtttcctctagagtatataagcccttgcaggatggggaccttgatttttttcatctttgtatttctaccatatggccaggtacctggcactaatagcattaaataaatatttaattgatttaacaatgactggaatgtgagctgagcttttaatgaaggacaagacttagataagaagagaactgaaggttgggctttgcaagcatggccaagggaagcaaccaggactgacagatccaggtaggtaaagaaactttgtagtcggccgggcgtggtggctcatgcctgtaatcccagcactttgggaggccgaggcaggcggatcacaaggtcaggagttcgagaccagcctgaccaagatggtgaaaccccgcctctactaaaaatacaaaaattagccgggtatggtggcgcgctccagtaatcacagctactctggagactgaggcaggagaatcacgtgaacctgggaggcggaggttg

SEQ ID NO: 35981 - DNA, 785 bp, Homo sapiens
agtttgggggcaccatcaggtgaaataccccaaaaatgctttgctggtgggcagaatttccaaccaccaaattggaagttccttaaagcctggaaacactttccatttcagctttcacagctcctaggacataatgacgtaactgtgcactacacaaattactaacatcaacattatcatatctgttttggcaactgagtcagtcttgcaaacctttagtttaaaggcacattaagttacactccacaaccaaaacaaagtgaggaggacaggagcagatgattccttgattcccccaaaacaggaaagaaaagtgcttgcccactttatcctaagtgaaggtttttattggcakaatcctaccacctaccataactccatatttgctcactggacaagggcccattatttagaaataaagttttcaacaaccttatctttgaagcatctatagaggcccctaagtcatcatcccatttcctgtattctgcatctgaattattatgcgctatttgtctctaattaagggagataattttatatttcacatctttaggaggatgtcagactaatcaaaatccctaaaacaaaaaccatagacttttcctgagtatagtcctaaccacacacaggctttcctatttaaggatgccacgaagttaacagaacagataaatggaagaatcagatgaaaaagaatgaataaagagttcttcacatacgaagcagaatgcttaccaggtatttccatttttgctgataataaactacttgacacaggatcc

SEQ ID NO: 35982 - DNA, 947 bp, Homo sapiens
cacactgattgcaaattgtatcagctaaccaatttttgaagaggacttttcaaagcaaaaagttagttatgacttcttaaagttctttgttattttcacatstgacattaggggtacatgtcagaagtgaggcagtattagtcacaagaggcaaattaatttacccttgatacaccatttaataagacagtcaagaaagaaagtttgcagaaaagccactgtctggtagatactaaaggcagaatgaagacttctgcaagcaagcaaaggaaacagacacctcaaaaaccattctctctcctaagtgctgatctcctataagatcccacaaaagaaaaaaaatttaattactaaaaataatataatgaggaaggatcaagaagaaaaattgcctttagcatagacactgcttctttttaagtcaagtattttaagctccggttctttttttcttagagatggggtctcactctgttgcccaggtgggagtgcagtggcgagattataggtcactgtaaccctgtaacctcaaaatcctgggctcaagtgatccttccatctcagcctcccgactagctaggactagaggcacgagccactgaacccaatttgtcctttaattgttttatttatttatttatttatttttttgaaatggagtctcactctgttgcccaggctggagtgcagtagcacaatctcggctcactgcaacctctgcctcctgggttcaagcgattctcctgtctcagcctcccgagtagctggaactacaggcacacgtcgccacgcctggctattttttgttctttctttcttttttttttttttgtattttagtagagacgcaatttcactgtgttgtccagactggtctcaaactcctgagctcaggcaatccactcgcctcggcctcccaaagtgctaggattacaggcatgagccac

SEQ ID NO: 35983 - DNA, 609 bp, Homo sapiens
gctattagtcattgtctggctagaacttaactactgacctaacctaagccttttaaacaagaagctttttatcacagttcttcagatactctggcttgtgagtggcaaatcctcaacsctgacacccatgtgcatcacggctcgctgtgaaaacacccttgttaacatgtaaaacacctccagtgcattttgactattgcagcaaagaccattcgcaaaatgaaaaaaacagaccctaatatccagttctgttgcttcatagtgtgacctcagaaaagtaaaatggcctatttagttctcattatcctcactgacaggagagactagaacatggcagttaggttttcctttgcatgccaatgtgacaggctggtagcagtttcttggaatgttctgctgagaaaggatagtgggaagtggtgctgtgtttcattgctgatgggatcccatgggtaagggatcatgagtggcaagatttaccaagtgtttatcaattccaggtttgcaatatcttaggcctgtccctgtagagagatacagagtgtggttaatgttctagttggccctaaaggcaaaattgaccaggcagtagttcagtatttcagtatg

SEQ ID NO: 35984 - DNA, 520 bp, Homo sapiens
taaatttaatagtaggaagatrtttttgagcatttctctttttaaaaagagaaattaaaaaaccacactcacttccatcatgtttcccctactcattcttcacttagtgacataaaactcaaacatttttatcagcaccatgaggctttataaaagcagatcttaaaaactccactgagtttaggtaaagataacagtatggagaaataagtcagagctgaattcctaagaagagaaagagcttaatatggcaaggtaatatttgaattgtaaagtaagaataaaatcacttgcatattacacattctctgtcttcagtcatctgttatctacctacctatctctctctgtatctatctgtctatcaatcaatcacattcctaggaatgtcattttcttatataaatctgtttgcccacaggtgcatttgggaagctcttagccaaagcagggacaattctgatttccctaaggacagaaggaaatcttagaagtgaaatgaaataaaaactgcaacaca

SEQ ID NO: 35985 - DNA, 520 bp, Homo sapiens
taaatttaatagtaggaagatatttttgagcatttctctttttaaaaagagaaattaaaaaaccacastcacttccatcatgtttcccctactcattcttcacttagtgacataaaactcaaacatttttatcagcaccatgaggctttataaaagcagatcttaaaaactccactgagtttaggtaaagataacagtatggagaaataagtcagagctgaattcctaagaagagaaagagcttaatatggcaaggtaatatttgaattgtaaagtaagaataaaatcacttgcatattacacattctctgtcttcagtcatctgttatctacctacctatctctctctgtatctatctgtctatcaatcaatcacattcctaggaatgtcattttcttatataaatctgtttgcccacaggtgcatttgggaagctcttagccaaagcagggacaattctgatttccctaaggacagaaggaaatcttagaagtgaaatgaaataaaaactgcaacaca

SEQ ID NO: 35986 - DNA, 520 bp, Homo sapiens
taaatttaatagtaggaagatatttttgagcatttctctttttaaaaagagaaattaaaaaaccacactcacttccatcatgtttcccctactcattcttcacttagtgacataaaactcaaacatttttatcagcaccatgaggctttataaaagcagatcttaaaaactccactgagtttaggtaaagataacagtatggagaaataagtcagagctgaattcctaagaagagaaagagcttaatatggcaaggtaatatttgaattgtaaagtargaataaaatcacttgcatattacacattctctgtcttcagtcatctgttatctacctacctatctctctctgtatctatctgtctatcaatcaatcacattcctaggaatgtcattttcttatataaatctgtttgcccacaggtgcatttgggaagctcttagccaaagcagggacaattctgatttccctaaggacagaaggaaatcttagaagtgaaatgaaataaaaactgcaacaca

SEQ ID NO: 35987 - DNA, 520 bp, Homo sapiens
taaatttaatagtaggaagatatttttgagcatttctctttttaaaaagagaaattaaaaaaccacactcacttccatcatgtttcccctactcattcttcacttagtgacataaaactcaaacatttttatcagcaccatgaggctttataaaagcagatcttaaaaactccactgagtttaggtaaagataacagtatggagaaataagtcagagctgaattcctaagaagagaaagagcttaatatggcaaggtaatatttgaattgtaaagtaasaataaaatcacttgcatattacacattctctgtcttcagtcatctgttatctacctacctatctctctctgtatctatctgtctatcaatcaatcacattcctaggaatgtcattttcttatataaatctgtttgcccacaggtgcatttgggaagctcttagccaaagcagggacaattctgatttccctaaggacagaaggaaatcttagaagtgaaatgaaataaaaactgcaacaca

SEQ ID NO: 35988 - DNA, 807 bp, Homo sapiens
ctagcactcaacagaaatgactggcattccccgtccccggtggggaccgggcagagcaggaggcgctagggcgggattccaaccgaccctccccgcggagccctctcgtcgggtaggctccttcccgccaggcctaagctcgccgtttcccctcctcacctcgcagaggggtgaggcgggagaccggggaacggacacgcggggccaaaagacagtgcccgtcaccctcaccaccccaaggaaatgagattctccccgagagggagaggaaagctgctggctcagagagtcgtcctagtctcgaaaaatcggggtgtcaagcgtgctttaggtctgcgctggattccaccaggctttggcgcgggcagaagccgsggggaaggcgcctcgcagaaagtacccccggccctccccgggtctcgggccgcgggggctgcaccacccgagggacgagccgcgccccggagccgtccacccggagcgccgaggggggtcgacggccgcggaggaggaaggccagggggaaatttgcatttcgtaaaaccgcggttaagaaatgacgatgccacgtagacaagccagttgtgacgttcagcacaacgtgctactgaactaccgagatccgccaccaaatggcggctccggcagcctgctgcactgataaagaggactcgcccgccgtcgcccattttaggccgctttcacttctccgctgtttccccagtcccttttcccaagtcgtcccttcctctcctggttttagggcgcacggggagctcccatgtccgagaagcttctgtgttctgg

SEQ ID NO: 35989 - DNA, 1076 bp, Homo sapiens
caaagtatagctgaagattaaacatcaacagaaaatatcggggtaaattaatgtaaagtaactaaaatccagcccactaaagatcatgcctgaccagaataaggtgagctaatgggaaaaaaaaagtgggggagcatggctgctcaagcttgtcccatcactactgaaaaggaagcagggtrgaggtgaatacaatacagaatgcactccacacaggaggagaagtgcacacccttagaaaccctatatggacatgacctgtcaggggaagctggagagacacctagaaagggaggtgagtgagaggttctctcttggggtacccacgggtcccccaatttaagccccgtaaggcccagtggtgtttgccttttacacatactaccttctgtgaaaacattaaaccaagcacctggaattattctgggacacaggcttacctgctcctgaagcttgtccaggtctgcaaccacatacacgagctgagtgcgggaaatggaaaccacaggctttgtttccgaaggaccacttccttggtcttcagtgtttccttgggtgatggaaggttctttgctaccagttaccaaaggtttcttgatctccttgggactttcattagaaatgggcctgagtgaaagctgaaaaaggatttcactgattaactactttcacactagcaagatacatgagcatttatatattacatatgtgcgcgtcaataactcaccattaaatgctagctgtctacatagcatttagtaaaaacttactaataaaagtatacaatattgtatctacaggaaggagtgaagcactaagagagaaacaaggacaaactacggccccaggtacatttaccttctggaacttgtctaatttctggtgataaaaataacgtgaaaaataaagtgcccaaaccacaataaaattaattttggggacatcacaggttttaaaaaaatcaattatattaggcaaataacatagcgtaatacatttgtaattataattaacaagggtaaaatatcaaaatccaaaccttcaaatacaaaaaacaaagtgttctttgtgtcaca

SEQ ID NO: 35990 - DNA, 1076 bp, Homo sapiens
caaagtatagctgaagattaaacatcaacagaaaatatcggggtaaattaatgtaaagtaactaaaatccagcccactaaagatcatgcctgaccagaataaggtgagctaatgggaaaaaaaaagtgggggagcatggctgctcaagcttgtcccatcactactgaaaaggaagcagggtggaggtgaatacaatacagaatgcactccacacaggaggagaagtgcacacccttagaaaccctatatggacatgacctgtcaggggaagctggagaracacctagaaagggaggtgagtgagaggttctctcttggggtacccacgggtcccccaatttaagccccgtaaggcccagtggtgtttgccttttacacatactaccttctgtgaaaacattaaaccaagcacctggaattattctgggacacaggcttacctgctcctgaagcttgtccaggtctgcaaccacatacacgagctgagtgcgggaaatggaaaccacaggctttgtttccgaaggaccacttccttggtcttcagtgtttccttgggtgatggaaggttctttgctaccagttaccaaaggtttcttgatctccttgggactttcattagaaatgggcctgagtgaaagctgaaaaaggatttcactgattaactactttcacactagcaagatacatgagcatttatatattacatatgtgcgcgtcaataactcaccattaaatgctagctgtctacatagcatttagtaaaaacttactaataaaagtatacaatattgtatctacaggaaggagtgaagcactaagagagaaacaaggacaaactacggccccaggtacatttaccttctggaacttgtctaatttctggtgataaaaataacgtgaaaaataaagtgcccaaaccacaataaaattaattttggggacatcacaggttttaaaaaaatcaattatattaggcaaataacatagcgtaatacatttgtaattataattaacaagggtaaaatatcaaaatccaaaccttcaaatacaaaaaacaaagtgttctttgtgtcaca

SEQ ID NO: 35991 - DNA, 1076 bp, Homo sapiens
caaagtatagctgaagattaaacatcaacagaaaatatcggggtaaattaatgtaaagtaactaaaatccagcccactaaagatcatgcctgaccagaataaggtgagctaatgggaaaaaaaaagtgggggagcatggctgctcaagcttgtcccatcactactgaaaaggaagcagggtggaggtgaatacaatacagaatgcactccacacaggaggagaagtgcacacccttagaaaccctatatggacatgacctgtcaggggaagctggagagacacctagaaagggaggtgagtgagaggttctctcttggggtacccacgggtcccccaatttaagccccgtaaggcccagtggtgtttgccttttacacatactaccttctgtgaaaacattaaaccaagcacctggaattattctgggacacaggcttacctgctcctgaagcttgtccaggtctgcaaccacatacacgagctgagtgcgggaaatggaaaccacaggctttgtttccgaaggaccacttccttggtcttcagtgtttccttgggtgatggaaggttctttgctaccagttaccaaaggtttcttgatctccttgggactttcattagaaatgggcctgagtgaaagctgaaaaaggatttcactgattaactactttcacactagcaagatacatgagcatttatatattacatatgtgygcgtcaataactcaccattaaatgctagctgtctacatagcatttagtaaaaacttactaataaaagtatacaatattgtatctacaggaaggagtgaagcactaagagagaaacaaggacaaactacggccccaggtacatttaccttctggaacttgtctaatttctggtgataaaaataacgtgaaaaataaagtgcccaaaccacaataaaattaattttggggacatcacaggttttaaaaaaatcaattatattaggcaaataacatagcgtaatacatttgtaattataattaacaagggtaaaatatcaaaatccaaaccttcaaatacaaaaaacaaagtgttctttgtgtcaca

SEQ ID NO: 35992 - DNA, 1076 bp, Homo sapiens
caaagtatagctgaagattaaacatcaacagaaaatatcggggtaaattaatgtaaagtaactaaaatccagcccactaaagatcatgcctgaccagaataaggtgagctaatgggaaaaaaaaagtgggggagcatggctgctcaagcttgtcccatcactactgaaaaggaagcagggtggaggtgaatacaatacagaatgcactccacacaggaggagaagtgcacacccttagaaaccctatatggacatgacctgtcaggggaagctggagagacacctagaaagggaggtgagtgagaggttctctcttggggtacccacgggtcccccaatttaagccccgtaaggcccagtggtgtttgccttttacacatactaccttctgtgaaaacattaaaccaagcacctggaattattctgggacacaggcttacctgctcctgaagcttgtccaggtctgcaaccacatacacgagctgagtgcgggaaatggaaaccacaggctttgtttccgaaggaccacttccttggtcttcagtgtttccttgggtgatggaaggttctttgctaccagttaccaaaggtttcttgatctccttgggactttcattagaaatgggcctgagtgaaagctgaaaaaggatttcactgattaactactttcacactagcaagatacatgagcatttatatattacatatgtgcgcgtcaataactcaccattaaatgctagctgtctacatagcatttagtaaaaacttactaataaaagtatacaatattgtatctacaggaaggagtgaagcactaagagagaaacaaggacaaactacggccccakgtacatttaccttctggaacttgtctaatttctggtgataaaaataacgtgaaaaataaagtgcccaaaccacaataaaattaattttggggacatcacaggttttaaaaaaatcaattatattaggcaaataacatagcgtaatacatttgtaattataattaacaagggtaaaatatcaaaatccaaaccttcaaatacaaaaaacaaagtgttctttgtgtcaca

SEQ ID NO: 35993 - DNA, 541 bp, Homo sapiens
catgaagctgtaagaaatatgctactctcccaacatctagtactattygctagctgacattgacattgaccagaggctgcgttttaggcacagtccgttggtaccttcttgtcatcatcagcatatgatgatggtggtttctcaactcagggtcttgtttggcaactcgttttcaacataggcacttctctttttcaggtaggcactatcacagcctggccaatcttgtgacagacaaacaagtcccctgctaggagacacatgaacttgtgagtcagttcactaacacttagcctatggggaatgaactctggcagacacccacccagctggagtcaacattctgtttaagtggactaagctcatttgatggggctttgctgtgatggaacacgtatgttttgaatgtggtttgatttaaattgaaatctaatttgtaatgtctcagggggtaagcctttcaagactaaggagagaaacaaggtggttcattctgtgtgagggatgggattcctgctctgagtgtttcagattttggtga

SEQ ID NO: 35994 - DNA, 522 bp, Homo sapiens
ctgcgtctcctccatttcagaggccccagcatttgcccacagagcagcccacttcccaggccccgggcagaaggggtgcccatgggtggagaggaaactaacttccttccccccgcgcacacaccaggcttcggagggggcgcttaccagcccctcacaagtttcccctccaccagagcaggaatccagcagcgcccccacccccacccatgctttctgttgggggagggacactgayaatgctctgcctggggcccccagaccctcctgggaggggtttcctctcagtggaagggctacgccctggaggagcctttaacgagatcggaaagggcggccaacccagcccccagtgaggcttggagtggagacgcgcccggggccccttccttcaccgaggctcttgggacagggctcaaagctgcccctagcctcctgcgtctcaactcaccgccgccaccgccgcgcagccccgcggccgctgctccatagccctccgacgggcgcccaggggcttcccgg

SEQ ID NO: 35995 - DNA, 1169 bp, Homo sapiens
cagcctgtctttatgracatacggcaaagtctgtggtcaaactgcatcaaatgccaacattcttgatccatatgcttcatgcaaaataaattgcaaatacattgttagggctaatgaagcctcaccaggctctaaactattaaattattaaaaccttttacttttgcctaaaacgtgtaaaagtcttgtgaaaaaaagaaaaggcatcactttttttaaaggagtgcccgagacctatttcaaaagcaccacccaacataaagaaatcattctgggataatataagatacctgatgagaaggagagctagtaacaccaaagtacactcagagggcttttgctagctgagaacaccctgggttcggtgcaaggcattctaccttttcccatgctggtctttacttgcctcaggggagtagatggcaacttagaactcaaggtagatttgtttttccttaaagaaagttaaggtaacatctaaaggcctcttttacaacaaacagatcaaaggctggttgaaagcatttacaggcagtggttcacaaccttagctgcactttagaatcatctagggagctttggaaaagtaggatgcatagtgacagccccagagcaactgaattagaatctgtgggaggaggagcccaggcatgggtgattttgatgaacaatgaagaattattgccaaagggacagggagtgccggccaaagtgccggtcttggagatgggggtgggctgtgcaggaaagcctgatttatatcacatttgcctatttcatggtgtaaatactcccatcatggccagtttcaagctactgatgtgaagctgggaagagatgcgcacaatctgctctcactagcacctgagtgctagctccagcacaccacagtcaggagcttttgatgatgaagttacagcaagggatggaaaggcaacatagtacgtcctggtgctcttctgtcccctctataacatctcaaccctgacaggaggatgagagaagaatcaactggaaccagcggctcccgggtcatgtaggaaggtaagccaaaagaagatcccaagtgtctgttagtgtgaagaacaccaagacaaggtctcacttgctcctgtagaagattcacgttgagatggagttggcctcctgatgaagggagcctttctctg

SEQ ID NO: 35996 - DNA, 1169 bp, Homo sapiens
cagcctgtctttatgaacatacggcaaagtctgtggtcamactgcatcaaatgccaacattcttgatccatatgcttcatgcaaaataaattgcaaatacattgttagggctaatgaagcctcaccaggctctaaactattaaattattaaaaccttttacttttgcctaaaacgtgtaaaagtcttgtgaaaaaaagaaaaggcatcactttttttaaaggagtgcccgagacctatttcaaaagcaccacccaacataaagaaatcattctgggataatataagatacctgatgagaaggagagctagtaacaccaaagtacactcagagggcttttgctagctgagaacaccctgggttcggtgcaaggcattctaccttttcccatgctggtctttacttgcctcaggggagtagatggcaacttagaactcaaggtagatttgtttttccttaaagaaagttaaggtaacatctaaaggcctcttttacaacaaacagatcaaaggctggttgaaagcatttacaggcagtggttcacaaccttagctgcactttagaatcatctagggagctttggaaaagtaggatgcatagtgacagccccagagcaactgaattagaatctgtgggaggaggagcccaggcatgggtgattttgatgaacaatgaagaattattgccaaagggacagggagtgccggccaaagtgccggtcttggagatgggggtgggctgtgcaggaaagcctgatttatatcacatttgcctatttcatggtgtaaatactcccatcatggccagtttcaagctactgatgtgaagctgggaagagatgcgcacaatctgctctcactagcacctgagtgctagctccagcacaccacagtcaggagcttttgatgatgaagttacagcaagggatggaaaggcaacatagtacgtcctggtgctcttctgtcccctctataacatctcaaccctgacaggaggatgagagaagaatcaactggaaccagcggctcccgggtcatgtaggaaggtaagccaaaagaagatcccaagtgtctgttagtgtgaagaacaccaagacaaggtctcacttgctcctgtagaagattcacgttgagatggagttggcctcctgatgaagggagcctttctctg

SEQ ID NO: 35997 - DNA, 1169 bp, Homo sapiens
cagcctgtctttatgaacatacggcaaagtctgtggtcaaactgcatcaaatgccmacattcttgatccatatgcttcatgcaaaataaattgcaaatacattgttagggctaatgaagcctcaccaggctctaaactattaaattattaaaaccttttacttttgcctaaaacgtgtaaaagtcttgtgaaaaaaagaaaaggcatcactttttttaaaggagtgcccgagacctatttcaaaagcaccacccaacataaagaaatcattctgggataatataagatacctgatgagaaggagagctagtaacaccaaagtacactcagagggcttttgctagctgagaacaccctgggttcggtgcaaggcattctaccttttcccatgctggtctttacttgcctcaggggagtagatggcaacttagaactcaaggtagatttgtttttccttaaagaaagttaaggtaacatctaaaggcctcttttacaacaaacagatcaaaggctggttgaaagcatttacaggcagtggttcacaaccttagctgcactttagaatcatctagggagctttggaaaagtaggatgcatagtgacagccccagagcaactgaattagaatctgtgggaggaggagcccaggcatgggtgattttgatgaacaatgaagaattattgccaaagggacagggagtgccggccaaagtgccggtcttggagatgggggtgggctgtgcaggaaagcctgatttatatcacatttgcctatttcatggtgtaaatactcccatcatggccagtttcaagctactgatgtgaagctgggaagagatgcgcacaatctgctctcactagcacctgagtgctagctccagcacaccacagtcaggagcttttgatgatgaagttacagcaagggatggaaaggcaacatagtacgtcctggtgctcttctgtcccctctataacatctcaaccctgacaggaggatgagagaagaatcaactggaaccagcggctcccgggtcatgtaggaaggtaagccaaaagaagatcccaagtgtctgttagtgtgaagaacaccaagacaaggtctcacttgctcctgtagaagattcacgttgagatggagttggcctcctgatgaagggagcctttctctg

SEQ ID NO: 35998 - DNA, 1032 bp, Homo sapiens
ccccggtgggggtctcagaagcaggaggctgctgggccacggcagggacaaggctttctcyggcacccccatgcaaggttcctccatagaaagaaatcatgttgcccgttccgcagcaggcatgccatcccaggcccctgagacccccaggggacatccccgctctgccaaccgtgtgaatacactccacctcccggcctctgccatgtcacagatgacttgaggcttcagatgagtgactccccagagtcacatgggcctatgcttgggtcccagcctcttctatgacccttgaggtggttctcagcataggaggctgatttctaggcctctatgtgctgttctgtgaatgggacaggtaacagacctctatggcaggcatgaaatgccaagctcccaccacaaggcctggcaacaaactctcaggaaattcaggtcattctctgggagtggccacagatgcttctcagaaccccaacccctggcactgctccagcccatgctggacccttcatcatccaggtgtcccaggcccacaagtatctgacatctcaggtggcacttgtggcccactgtgtgaccctaagcatacctccatgttctctgggctgagtttctgagccgccacagctctgcagagcccaggctgtgggctccagcccctgacctccagcttgacttactaaatgtaatctccagggctaattttaatcctgggcaggaattggacacattcccatggctaggatgagtccctggaggctggaggtgacaccaacccacaggacccagtgccaagataatcccccaaatgacccctatgcatgtggtctcatgagagcagggactggggctgatcttgggcctgagtctcttgagcatagaaggctcaactaagccctttctcaatctgtctcaattttagttatagggacactatggctagtgcagaggtcacgtgacagggaaaccccgagaggcaggaagttgggggcctttctggactgatgtcctagagctgagacaggaagt

SEQ ID NO: 35999 - DNA, 1032 bp, Homo sapiens
ccccggtgggggtctcagaagcaggaggctgctgggccacggcagggacaaggctttctctggcacccccatgcaaggttcctccatagaaagaaatcatgttgcccgttccgcagcaggsatgccatcccaggcccctgagacccccaggggacatccccgctctgccaaccgtgtgaatacactccacctcccggcctctgccatgtcacagatgacttgaggcttcagatgagtgactccccagagtcacatgggcctatgcttgggtcccagcctcttctatgacccttgaggtggttctcagcataggaggctgatttctaggcctctatgtgctgttctgtgaatgggacaggtaacagacctctatggcaggcatgaaatgccaagctcccaccacaaggcctggcaacaaactctcaggaaattcaggtcattctctgggagtggccacagatgcttctcagaaccccaacccctggcactgctccagcccatgctggacccttcatcatccaggtgtcccaggcccacaagtatctgacatctcaggtggcacttgtggcccactgtgtgaccctaagcatacctccatgttctctgggctgagtttctgagccgccacagctctgcagagcccaggctgtgggctccagcccctgacctccagcttgacttactaaatgtaatctccagggctaattttaatcctgggcaggaattggacacattcccatggctaggatgagtccctggaggctggaggtgacaccaacccacaggacccagtgccaagataatcccccaaatgacccctatgcatgtggtctcatgagagcagggactggggctgatcttgggcctgagtctcttgagcatagaaggctcaactaagccctttctcaatctgtctcaattttagttatagggacactatggctagtgcagaggtcacgtgacagggaaaccccgagaggcaggaagttgggggcctttctggactgatgtcctagagctgagacaggaagt

SEQ ID NO: 36000 - DNA, 1032 bp, Homo sapiens
ccccggtgggggtctcagaagcaggaggctgctgggccacggcagggacaaggctttctctggcacccccatgcaaggttcctccatagaaagaaatcatgttgcccgttccgcagcaggcatgccatcccaggcccctgagacccccaggggacatccccrctctgccaaccgtgtgaatacactccacctcccggcctctgccatgtcacagatgacttgaggcttcagatgagtgactccccagagtcacatgggcctatgcttgggtcccagcctcttctatgacccttgaggtggttctcagcataggaggctgatttctaggcctctatgtgctgttctgtgaatgggacaggtaacagacctctatggcaggcatgaaatgccaagctcccaccacaaggcctggcaacaaactctcaggaaattcaggtcattctctgggagtggccacagatgcttctcagaaccccaacccctggcactgctccagcccatgctggacccttcatcatccaggtgtcccaggcccacaagtatctgacatctcaggtggcacttgtggcccactgtgtgaccctaagcatacctccatgttctctgggctgagtttctgagccgccacagctctgcagagcccaggctgtgggctccagcccctgacctccagcttgacttactaaatgtaatctccagggctaattttaatcctgggcaggaattggacacattcccatggctaggatgagtccctggaggctggaggtgacaccaacccacaggacccagtgccaagataatcccccaaatgacccctatgcatgtggtctcatgagagcagggactggggctgatcttgggcctgagtctcttgagcatagaaggctcaactaagccctttctcaatctgtctcaattttagttatagggacactatggctagtgcagaggtcacgtgacagggaaaccccgagaggcaggaagttgggggcctttctggactgatgtcctagagctgagacaggaagt

SEQ ID NO: 36001 - DNA, 1032 bp, Homo sapiens
ccccggtgggggtctcagaagcaggaggctgctgggccacggcagggacaaggctttctctggcacccccatgcaaggttcctccatagaaagaaatcatgttgcccgttccgcagcaggcatgccatcccaggcccctgagacccccaggggacatccccgctctgccaaccgtgtgaatacactccacctccyggcctctgccatgtcacagatgacttgaggcttcagatgagtgactccccagagtcacatgggcctatgcttgggtcccagcctcttctatgacccttgaggtggttctcagcataggaggctgatttctaggcctctatgtgctgttctgtgaatgggacaggtaacagacctctatggcaggcatgaaatgccaagctcccaccacaaggcctggcaacaaactctcaggaaattcaggtcattctctgggagtggccacagatgcttctcagaaccccaacccctggcactgctccagcccatgctggacccttcatcatccaggtgtcccaggcccacaagtatctgacatctcaggtggcacttgtggcccactgtgtgaccctaagcatacctccatgttctctgggctgagtttctgagccgccacagctctgcagagcccaggctgtgggctccagcccctgacctccagcttgacttactaaatgtaatctccagggctaattttaatcctgggcaggaattggacacattcccatggctaggatgagtccctggaggctggaggtgacaccaacccacaggacccagtgccaagataatcccccaaatgacccctatgcatgtggtctcatgagagcagggactggggctgatcttgggcctgagtctcttgagcatagaaggctcaactaagccctttctcaatctgtctcaattttagttatagggacactatggctagtgcagaggtcacgtgacagggaaaccccgagaggcaggaagttgggggcctttctggactgatgtcctagagctgagacaggaagt

SEQ ID NO: 36002 - DNA, 1032 bp, Homo sapiens
ccccggtgggggtctcagaagcaggaggctgctgggccacggcagggacaaggctttctctggcacccccatgcaaggttcctccatagaaagaaatcatgttgcccgttccgcagcaggcatgccatcccaggcccctgagacccccaggggacatccccgctctgccaaccgtgtgaatacactccacctcccggcctctgccatgtcacagatgacttgaggcttcagatgagtgactccccagagtcacatgggcctatgcttgggtcccagcctcttctatgacccttgaggtggttctcagcataggaggctgatttctaggcctctatgtgctgttctgtgaatgggacaggtaacagacctctatggcaggcatgaaatgccaagctcccaccacaaggcctggcaacaaactctcaggaaattcaggtcattctctgggagtggccacagatgcttctcagaaccccaacccctggcactgctccagcccatgctggacccttcatcatccaggtgtcccaggcccacaagtatctgacatctcaggtggcacttgtggcccactgtgtgaccctaagcatacctccatgttctctgggctgagtttctgagccgccacagctctgcagagcccaggctgtgggctccagcccctgacctccagcttgacttactaaatgtaatctccagggctaattttaatcctgggcaggaattggacacattcccatggctaggatgagtccctggaggctggaggtgacaccaacccacaggacccagtgccaagataatcccccaaatgacccctatgcatgtggtctcatgagagcagggactggggctgatcttgggcctgagtctcttgagcatagaaggctcaactaagccctttctcaatctgtctcaattttagttatagggacactatggctagtgcagaggtcacgtgacagggaaaccccgagagrcaggaagttgggggcctttctggactgatgtcctagagctgagacaggaagt

SEQ ID NO: 36003 - DNA, 556 bp, Homo sapiens
ggtagctccctttctatgacccatcaggtgagcaataagcaagacatgcttatttttaccttttaatgccctcagttttctctctactttctactgcagtagcctctggtttactatcagctcttgcctctcaaattctgtattaatcctcaggaagggaggtcacaaaagtggatagagtcagtgaatgtgacagaggtagcacaaggaaactagttgtctgttggctccttccatgcatcaggtaactgtactgaacctagcatgctatctagcacatactcaacactcaayagacatttttcaaggaactaaatacatctttgactcctggggcagatgcttagtccatgagagactgtgatttacatgagtgagaaaaagaggaagaaaggattttactaaaatattttaggctagtcttttatacaccttcaaaatattgtcctaaaaatataaagaaacttcatttgtcaagactttaccaataacacggtgtttagcatgcttttattctaaatgttggttcattgaacctgaagagcctttcatgccc

SEQ ID NO: 36004 - DNA, 531 bp, Homo sapiens
tatagtcttagccacactccttcactttacagggtaagaaattaagacagtgaagttaagtaacataaatagttagcaggacaatgagaaacaccacaattctatttgttctccattcattgcatcgcagccttttatctatgatatcatgcagaggaaaattaaatacattttaacttatttgaaactgaatttgtttaatgctttttttttctccagcagatttgcaagggaggttcctagttatatttttgtaggctaaaacttgaataagtttgcattcttaaaaagtacacatgaattaggtgggtggttgtgaagggaggtaaaaatagaggattcttgtctggaagtccacagacatttttggaaaaggcctcccaacaagattaaagattcatcatgagtaagtcacaggcaaatgtatrtataagtacccgaggcttctgttgaatatatcccaccttcacttctcccctgccttatacacccttacttcatacacacccaccctttccctcagaatagggc

SEQ ID NO: 36005 - DNA, 531 bp, Homo sapiens
tatagtcttagccacactccttcactttacagggtaagaaattaagacagtgaagttaagtaacataaatagttagcaggacaatgagaaacaccacaattctatttgttctccattcattgcatcgcagccttttatctatgatatcatgcagaggaaaattaaatacattttaacttatttgaaactgaatttgtttaatgctttttttttctccagcagatttgcaagggaggttcctagttatatttttgtaggctaaaacttgaataagtttgcattcttaaaaagtacacatgaattaggtgggtggttgtgaagggaggtaaaaatagaggattcttgtctggaagtccacagacatttttggaaaaggcctcccaacaagattaaagattcatcatgagtaagtcacaggcaaatgtatgtataagtacccgaggcttctgttgaatayatcccaccttcacttctcccctgccttatacacccttacttcatacacacccaccctttccctcagaatagggc

SEQ ID NO: 36006 - DNA, 742 bp, Homo sapiens
gttctcctaaaaattatgagaatgattgtaattatttcaatatgcagagtgagctggaatagaaaaaactgagtttatcatgaagctgagtatgaacctttaagttcaaagattgtaggcttcctcagaagctaacaatgagaaggggatatgaaattgtgataaacctgtctcaaaaacctcttacatgtgaccaagtagaaaattagcttctgcatgccctgcrtgatgtgacccatgagaggatgaggggacagatactgatcgcctaagctgaagtcatgtacttaggaaagatagccttagttcttaggtcagagactcaaacttgtttttagttgacatgttttgaccccatttccacttttaaaagacctatatttccaagcatagctgcccttactcccaatatatacaactgtgcttatgatcccagtagaggtgtgtaagtctttgcacaggcaagataaaaacatgttacccacagagttcacatttatctgggcccagatggggacagatggagcaacctgaaggcaggattgaaaagaaagtaatatcacactataatgagcctgtatgatcttcatccatttcttccttagtgacatcctatttccaggattccagtgtctggagagtttgtcccttccctgattgtacactggcttaaaagatccttttaattcccctgaccagatcagaagcatcccacccatagccttgcttatcccaggcctca

SEQ ID NO: 36007 - DNA, 876 bp, Homo sapiens
tggactgggacacttgctttcttcaatcacttgtgccagatgtgtgaactcctttcctcttccctgggcctcttagctggcttttcctgggcagctgtgtctggactatttaacaccggtagtcaaatttatggtcctagtctcactctagctaaaaaaaactttcctcacaatttttttaacaatgacttcaataaagtgcaatgaaaaccaaactaatcttttgttcaacagtcccaattctgaaattacacatatgttcaatattaggtctaaatatctcccctttctttaattccactctgattcccttccattctgtaaaggttgccctgattcattggaagtggcatgctaaatccatggtcaggtaaggaaggtgcaacatgggagaagataggggtccgcaagagaggaccagctggcctctaacagtctatctgcagagaggctggacctcatccttaaaagatgtgcaataatggtcagatttgctcttggcatctgccacttggactttgaagttgtgtttgggaagagaaggagactgtgattcattatacttcacaagcctgcttagtctactgcaatcagtttggggccagctgtcagagccagggagctgctgcctccattatcracagtcagaacggtcagtcttcaagaaccacttacttctggatgagctgatggtgcccacataggtggtagctgatgtggacccaggcccagtgagggtgggcttccagtctccatttgtgaagaaacagcctgctggaggccactgtgcttatttcatatttgcctcttgagttctcattctcccctcccattccctgcagaggctctatggggacagcaacccagactctccaa

SEQ ID NO: 36008 - DNA, 603 bp, Homo sapiens
ccaaggggaataagagggaggagaggagaaaaaagtaagaagaaaacaaatgacagttatttaaataaaacccacaaaatcagagcaaaatgacttttgtcagggttgaagtgttatattttgtttcaytgagagataagtaacatttacaatgccaattattcacatttaattaatcattgtccaacatctgctatgtacatgtcaatacataatcccttgtcacattgttacccttgggtggcgagtgggagggagagtttatgtttacattttttatatttgaagaatcagccctgtgtgtggcagttaactggctgctcccatctgcagcatcaatttgttagattattagcttttcttgagacgagaaatggtaaaatgtacttggctttccttatcctcaacagaacaatgagtatttttacaaaattggccagtataatctatgtctcatagctagcttttataccttttttttttttcattttttggcttggttgatactgacatcagactaaataaaacataacagagatgtttgaaaagtggtcaatctcaaaggcacaggggagtgtgatttagaaattgacaactagagca

SEQ ID NO: 36009 - DNA, 1202 bp, Homo sapiens
tgcataatcacttcccctccactcctcttttcatatgtaaaatatggatttggtgagtactaatcaaagtaaccacttgtcatactgcctaccttcctccttttctttttcttctcttcctttccctcctgtctgctcctttctctttaaatattggtcctcaaacttctttggaaaaagcacaggccacagatcgtatttgtaacttgtggctttttttgtttgttttttgttttttcgaggcgcattctcaatcttggccaaataaacctctaaatcaattaagatcratctcagacactttttgatttacaccgtctgtcaatccatccatagatccctctacccatctattgtagctagtcattgacaacatggcccaggagagtcatggccagaactgagctcagaggctaatagacctaggagaaacattgtctcggcattattagaaggtcattaattaattaattcaaatatttttgtagacttaacatgtgccaggcactattctaggatctggagatggataggctactgggctccacagagtttacattctaagctttcaaattaggcaacgtatcttcccacagtgagatctccttgttggcccaggcagtgctctaagctggtgggtgcttggaattccaatctgtgtgattgatttttgaaaatttattaatatactttatttaacttaatatatccaaaatgttatttcaacttaatatatccaaagtgttatttctcactctgtcacccatgctgtagtgcagtggcagggtctcagctcactgcaaccaccacctactgggctcaagggatcctcccactttagcctcccgagtcactgggactccaggcaggcaccaccacccctggctaatatttttcacatttatttgtagagatggggtcttcctgtgttgcccaggctggtctcaaatgcctgagctcaagtgatcctcctgccttggcctcccaaagtgctgggattatgggcatgagccactgcacctggccacataataatatttaccaacctgtcaacaacagtttgggaagatgaaggtaaagacgaagcactgattacagtgtaattaatattcaacgtgtagttcatataaaataagaattattaatgagatattttacactttttttcagactaaatctttaaaatctagtgtgtatattat

SEQ ID NO: 36010 - DNA, 1202 bp, Homo sapiens
tgcataatcacttcccctccactcctcttttcatatgtaaaatatggatttggtgagtactaatcaaagtaaccacttgtcatactgcctaccttcctccttttctttttcttctcttcctttccctcctgtctgctcctttctctttaaatattggtcctcaaacttctttggaaaaagcacaggccacagatcgtatttgtaacttgtggctttttttgtttgttttttgttttttcgaggcgcattctcaatcttggccaaataaacctctaaatcaattaagatcgatctcagacactttttgatttacaccgtctgtcaatccatccatagatccctctacccatctattgtagctagtcattgacaacatggcccaggagagtcatggccagaactgagctcagaggctaatagacctaggagaaacattgtctcggcattattagaaggtcattaattaattaattcaaatatttttgtagacttaacatgtgccaggcactattctaggatctggagatggataggctactgggctccacagagtttacattctaagctttcaaattaggcaacgtatcttcccacagtgagatctccttgttggcccaggcagtgctctaagctggtgggtgcttggaattccaatctgtgtgattgatttttgaaaatttattaatatactttatttaacttaatatatccaaaatgttatttcaacttaatrtatccaaagtgttatttctcactctgtcacccatgctgtagtgcagtggcagggtctcagctcactgcaaccaccacctactgggctcaagggatcctcccactttagcctcccgagtcactgggactccaggcaggcaccaccacccctggctaatatttttcacatttatttgtagagatggggtcttcctgtgttgcccaggctggtctcaaatgcctgagctcaagtgatcctcctgccttggcctcccaaagtgctgggattatgggcatgagccactgcacctggccacataataatatttaccaacctgtcaacaacagtttgggaagatgaaggtaaagacgaagcactgattacagtgtaattaatattcaacgtgtagttcatataaaataagaattattaatgagatattttacactttttttcagactaaatctttaaaatctagtgtgtatattat

SEQ ID NO: 36011 - DNA, 566 bp, Homo sapiens
tttaggaaacactgaatgctaaagccaaaagacatggtaatacatcaataatttcaagcatttactaaggtgcacctatgagaagtattactgtgcacaagattaaatatctataaaaatcacatcaatcacctgagcccagaagtttgaggctacagtgaactatgatcatgacacggcactgcagcctggggtgacagagtgagaacactgtctcagggagaaaaaaaaaaatcacaccaacaaaaatrtcaaacacaaggcaaacctctcaggcacgtacctgttgagtctttccaagacagagtcatcggccaatgagatctcatccaagaggaaaaagccgtcctccttcatggcctgaaccagaggcccatcatgccactcaaagagtcttgatgtgtcaatttcttcctataatttgaaaaagtggggaaaattaaagggcaggtggctccacagacaatatacatgcagctggctggtgtttccaggggtgaagtaggcattctgaggaaagtaagaatctgagaacaggagatagaacttgcacaccagaatgcttg

SEQ ID NO: 36012 - DNA, 581 bp, Homo sapiens
tgggaactatgtcttcttaatatattttaaagggaaaaatctctgaataaacattattttttcaatgcataattcccaaagtgatatcatgaaagagctttaatagatcttctagaactatctacttgctcttttgttgtagattatccaaatcagttttggactgaataaataagaaggttttactttctagtttttatatcaggcattagtcataatattattttgttctataataagccaagtaaaaaaagcttttcccatgggtcccagcttcagttagtcgcaatatttctgaaccttagtttaaaatttttgtttaaagtgcctacaatgtctcaggtgctacmttaacattaaattctgggaatacagtgataaacaggaagacaaagttcaggctcccatggaaattgaatctagtggaaattaagtaatagaaaaatgggaataacatcaacctcacagttaagttttaaggattaaagtgagataatttatatgatattgctttgcaaactctgtaacattaaattttagatattatattaacttgaatgatttttaaaagaatctaatgg

SEQ ID NO: 36013 - DNA, 1160 bp, Homo sapiens
acaaattgaaaagtacctcggaagtcaccttgcaagacagtaacttagaagtgtactggcagagagggaaaagaccagggttagtacatggcagtgacacacttacagaacaccccctagccgggaacaggcaccacaccagaagaggatgggaggggaagtwataccaggaggccattctacacccatgccaaaactttctccatctgatattagtttatttataagtctattctttgcagcaactagataccctattgttcactaataaaaatatcagataagccgtactttgttaattcaaaacgttgctttcagtttctgtactttgaattaacaagattccttcccctctgtacacaatcagctgcccaccagcaaggtcgttgggggccattttggatttgctagagtctgtagccaaatagccttttctcttcccgtaggcttctctgaaccccaaagccgtcttgtaacctgttgttccattaaaagaagatcctaatcacagcagttggtttgtggaggcagattctctgaaaccggcctaagggtagtcttgcctagggagaccacacagcctccctcgtcagaaccctgggggcctgggtaagttcctgagagtgggatcatcctttgatagcaatttctggtgattatataggattattagtatgagcacttaggaactgaaatgatcctttagttcctataggggactaaaagtcttactcaaagtacagaaaaaaatggcctgactatggaaaatgagatggcaggaccaatttgggacatccctctccagaattatggtaatgagcgtacatttacactgcttggggcatttaaagcatttattggtttggggcattgatagccatagactagttaggtgggatcacacatctgtgattgctgactgcttcttatatgtagcacttaggaattatagttctgtcatgattgggctaatggctgggagctgacaagtcaggagctcttctctctcctttgcatcttcactagggtacgagtgagaacgtaagagagagttagggaagcacaaggcatcactgagcttcctgtagcgtctggggaaacaggaggcagataggcttccttcacacactgagcgagagtatggccacaactctcaatgc

SEQ ID NO: 36014 - DNA, 668 bp, Homo sapiens
agtaaaataagaaccaacaagataatttctagatacccggtcattaacaatgactatatccttttcaaaacagaacttctatcattcattgtccatcttttaaaagcaaaagcactaaaagcaaaaacaaatagcatttccacaccagggggatggggtttctgtctagataacttttgtatggaaagaattagaagatttctccttccttaccacatcttggctctcagtggattttatttgctttaaggttttaggattccagcatgccaccagcatgatttctaccagagaagttaaaaattatatttttcatcacctagtatccaatcatcaatctgagtcacacaacaaactagtggagtcacttcttctggcatgaaatatgaaatgtgccgcaggaacttggtaacacctccattcacaaaaccactgaagccaggagttctgaccctagccatgaattgtctagtttggctgctcagagtcaygtgtcagccttctccccgatcatgaacttggaggttggccagccaagcaatactccaaagatttccaggcatgaacaggaagaaaattgtattttacattccgtttctttcaactcatgttgtaattctgggaagcccgggtgcctgctttaaatgttctagagataaacatgaagg

SEQ ID NO: 36015 - DNA, 1179 bp, Homo sapiens
tgcatggattttggccccccctagatactgagggacaactgtactctgaaacagatttgctagccaggcacagtgtatcaggcctgtaatcccagcaacttgggaggatgaggcaggayagcttaaggccaggagtctgagaccagcctggacaagagctaaaccctgtctctgaaaaaaaacggttttttaattagccgggtgtggtgacttatgcctgtagtcccagctacatgggaggctgaagcaagaggatcatcagagcccaggacgttggaggctgcagtgctctaggatcgtgcctgtgagtagccactgcacttcagcctgggcaacatagtgaaatcccacatctttattttaaaaagaaaaaaagagtcaatgtaatgaaacaaaaagactgaggacctatttcagattaatttcctgattttgttaactgtatcacagtaatgaatgggaaattctttgtttataggtaatacactcaaatatttaggggttaaagaataaactctagtctcaaagcatcttccaacaaatcattgattacgaaaagaaaattggtaactttacaatggaaaagcctggcagaaaatcaccttaaccaagtgattaagacataaaaaaaagtggggaagctaaggcaggaggatcacttaaggccacgagttcgagaccaggctgggcaacatagtgagaccctgtatctacaaaacaacaataacaataacaacaacaattcactgagcgtggtggtgcatgcctgtggtccccagctgttcaaggactgagacaagaggatcacttgagcccaggagatcaaggctgctgtgatctgtgttcataccactgaatgaacgagaccttgtttttttttttgttttttttttttaaaaaaaaaaaaaaggacgtgtgtgtgtgcgtttacatctatagaaagactatatatggaaggggaaatggtaagacaatcggggaaatgataaatgaaaaatggtgcaaatatgaactgggtaaaggatatacgagttctttgtactcttcttataatctttctgtaactttatattaaaataaaattttaaaaaataataataaatcaatgaaattcaccacattagtacactaagaaaaaataaactgttaaaaagcaggccgggcacagtggctcatgca

SEQ ID NO: 36016 - DNA, 1179 bp, Homo sapiens
tgcatggattttggccccccctagatactgagggacaactgtactctgaaacagatttgctagccaggcacagtgtatcaggcctgtaatcccagcaacttgggaggatgaggcaggatagcttaaggccaggagtctgagaccagcctggacaagagctaaaccctgtctctgaaaaaaaacggttttttaattagccgggtgtggtgacttatgcctgtagtcccagctacatgggaggctgaagcaagaggatcatcagagcccaggacgttggaggctgcagtgctctaggatcgtgcctgtgagtagccactgcacttcagcctgggcaacatagtgaaatcccacatctttattttaaaaagaaaaaaagagtcaatgtaatgaaacaaaaagactgaggacctatttcagattaatttcctgattttgttaactgtatcacagtaatgaatgggaaattctttgtttataggtaatacactcaaatatttaggggttaaagaataaactctagtctcaaagcatcttccaacaaatcattgattacgaaaagaaaattggtaactttacaatggaaaagcctggcagaaaatcaccttaaccaagtgattaagacataaaaaaaagtggggaagctaaggcaggaggatcacttaaggccacgagttcgagaccaggctgggcaacatagtgagaccctgtatctacaaaacaacaataacaataacaacaacaattcactgagcgtggtggtgcatgcctgtggtccccagctgttcaaggactgagacaagaggatcacttgagcccaggagatcaaggctgctgtgatctgtgttcataccactgaatgaacgagaccttgtttttttttttgttttttttttttwaaaaaaaaaaaaaggacgtgtgtgtgtgcgtttacatctatagaaagactatatatggaaggggaaatggtaagacaatcggggaaatgataaatgaaaaatggtgcaaatatgaactgggtaaaggatatacgagttctttgtactcttcttataatctttctgtaactttatattaaaataaaattttaaaaaataataataaatcaatgaaattcaccacattagtacactaagaaaaaataaactgttaaaaagcaggccgggcacagtggctcatgca

SEQ ID NO: 36017 - DNA, 637 bp, Homo sapiens
agatggaaaaagtattgggaagaaatgaaggctatctcagaataaactaggtcatttaggctggctttggttgccaagcaactgggatttctcactttctctttggaataatctaatcttttaagatttattaaattgttttttcccttcaaggtttatagtaacatatttaggaatcacactaatgagaaaactgcaggatttacatgaaggaaaattaaaaactctactgaaagacataaaagaaaacaaacaaaatataactttcttcttaaaagaatcagagtaatataattaatgtgcataattaattatctcaaattaacttacaacatcaacccaattccaagtgtgttttttgggggacaggagttaccaaaataattccaaaatttatctgaagaaatacgcaagatatattaatcagttaatttctgaaaaaagagtaagaaataagatcttgctctgcaatacattaagtcttaggagccgggygcagtggctcacgcccataatcctagcactttgggagacagaggcgggtggatcacctgacctcaggagttccagaccagcctggccaccatggaaaaaccctgtctctactaaaaatacaaaaattagctgggcgtggtgg

SEQ ID NO: 36018 - DNA, 563 bp, Homo sapiens
acagtggctcaggcctgtaatcccaacactttgggaggctgaggcaggtggatcacccgaggtcaggagttcaaggccagcctggccaacacagtgaaaccctgtctctactaaaactataaaaattagccaggaatgattgtcgggtgcctgtaatcccagctactcaggaggctaaggcaggagaatcacttgaacccaggaggcggaggttgcagtgagccgagatcgcgccattgcactccagcctgggtgactgagcgaaactctgtctcaaaaaaaaaaaaaaaaaaaaaattgatgctaaaaggctacaatayataaacagatacaaaatttaatgggggcaattagggggtaaaaaggctaaaaaccgtctttaggggaggagaaagaaaaaaacagaggaaaaaacattgagaaacactaataatacccagagtcttaaacagagatggggcaaaatggtttattctccttttaccctttttaaaaacagccatttatgaataaaattaatagagcattcacttttcttcagtaagagttttattatctcatac

SEQ ID NO: 36019 - DNA, 1208 bp, Homo sapiens
tgcatactgggagcacacaagggaaactgggcttgtgcaggatgcagatgcacttaccaaggaaacgagtcactcccaaacgttgtgctggagcctctgggtgcacaatgaccactgaccagtgaacaggggcgggccttgtcagcagtaaaaggaccaggatatttagaaatattcaagccatctggagcccggcaaaagttcattctgtccttcctgtcttctgctctatggcctctggacacaaccatgccacaaacaaaaccaaccaaagaaagtgcctccactgcgcggggaggggagggtcccattcacctggtgattcaatcagtcctgatgaagagggaaaaggaggctgctgcgagctggctccttctgtgactgctcctcacctcaggtgtgctcctgtcctgctaagctaaccctagatccctgaacaaatgaggctttcctctcatcacctgctccttttggaatgtccttatttccctttctttgtccacctggggaatgaatacttttaaaaaatttaaatggaktatgaggtcaagagatcaagaccatcctggccaacatggtgaaaccctgtctctactaaaaatacaaaaatattagctgggcgtgatggcatgcacctgtagtcccagctactcaggaggctgaggcaggagaatcgcttgaacgttggaggcagaggttgcagtgagccgagatcgcgctattgcactccagcctggtgcccaagcgagactccatctcaaaaaaaaaaaaaaaaaaaaaaaaaaacaaaacaacaaaaacaatttaaacactgtgttgtagcggtagttttcatataaaatgttccttgatattctatgccctgccccattccgcatacacacaggatttcccatgccttggcaatccctcttacgctctttggatgtttttcagagagccctttactacactggtttatttacatatcttttttttctcaacttttctcccttgagacagaaaattaaaatcagtgctcaataaattttggttaagtgaataataagcactaatcacaagccgggccaagtgcgtgccttacacaccttccttcatttaagccttcacgcagcctatcaggtggtgactattattattaatcctctccttacagatgaggaaataaaggctcagaaaggttaagccatttgtccaacatcatatta

SEQ ID NO: 36020 - DNA, 1140 bp, Homo sapiens
ttccaaaaaagaaagaagtaggtggagcataggatgctcaaagtagacaatgatcaaagacttttgagagtcatcagtctaggaaagttattctcaaccctggctgggtatcagaattgtctgtagtgcttctaagaattatgagttatggccagacgcggtggctcatgactgtaatcccagcactttgggaggccaaggcgggtggattacaaggagtttgagagcagcctccccaatatggtgaaaccccttccctactcaaaatacaaaaattagccaggcatggtggggtatgcctgtagtcccagctactcaggaggctgaggcagaaaaatcgcttgaacctgggaggcagaggttgcagtgagccgggatcgcaccactgcactccagcctgggcgacagagtgagactccgtctaaaaaaagaaaaaaaattatgagttgctggactgcatgatgatctactgaatgagaatccattctccccccagtaaacttttcctttatctcctttatctcattggcaggcactcattcacaggtccactcaagacagtcacggacaaaaggaaacaggattgtgaggatttagccccatggggctagagcactgctactgaaaaaaaaccaccctaactatatttgcagctttacggtgtgtaaaacttcagtttaaaaacaaaagggaaaaaaggtctctgccttcaaagattataagctattcattcaaaaagaccaaacattgtaagaaataactggataattaatccataaagggcaagagaagtagagccagcttttattgagtacctgcctacctgtgtgctgtgtgctgtgtgctgggcgagtactttatatatgtcacttcctttaatcctcattttaatcttcagaggtcagtagtgtcactggcattctacagataaaatactgtagttgagggatttaggggatttgaattgcatttcctctctagaatggggtgagacagaagtggtgtccttctttcaggcatctaggkttgtttctttggggtgggtaatgtgtgtatgtttccatgtgtgtggcagcttaccaggctatgtcccaattaataaggagatgtatcatcctcattccagtttttcaaatgtga

SEQ ID NO: 36021 - DNA, 601 bp, Homo sapiens
gaatgattgaaactatggtttgggaaagggaggtgcagtaagcatgaaactgaataaatttacttaatgcagatactgcaggaactactaagtccaccaatagtaacaataattgtaattatgattgagattattaaaacactatgaaagctatataacagtttctacaggcaaaaaaaaaacttaaaattattaataatctcagacatgttttgtttcttctgttaaacattcatttattcattcattcatatctgtattaaataaatatttatcmaaaaaactgctaaatgccaggcattatatgagtacttgtaaatatagcagtgaataaaaggaggtgaaaacctctctccttattgagcctaaacttacagttattagttgatcatattggtgtttattatgttatataaagtatcttaggtgctggagttgatttgagaaaaaataatgcaagagatgtgtggcaatggtgtgaacagggttgcattttaaaatagggtggttgaggaaaggcacaatgaaaaagtaaaattagagcagactggtggcggagcaaagaatgagccatgtagattcttaaggtaagagtatttct

SEQ ID NO: 36022 - DNA, 1392 bp, Homo sapiens
atagagaccaaaaatacaaatagctaaactggaactaaattaagaaaaacagaagttaataaactccaccgcctcactcccatctcttcgtaagttagtaggcttgtaagtcctaggctggttagttcattcatttgttcactcatgccagccattgaggattattgtgttctaagtgctgtgctaagccccagaaatacaaagacaagtgagtcatgggcctgcctgcaaggagtgaggagatttactcaaaattgagagctggaaaaagaaaggcactttccctggcctcatagccctccgtgacttcaaagtattcctctctggggtcatgccactagggataatagcattatccaaaaacatttttggaaatccttttagaattattctcagggactggagtacatttatttttaaaaagaaacttggtgktttaaaatctttttttttttttagggagaatctgctttattatttgagaagtttcaaaaaatatagaaaatacagatgataatatggcaagtatctaaaggtctccacttaacagaattaacatctgttaacattttgtcacttttgctttagttgttttttttttaattaaaaaagagaacattacagataaatgtgaagtccctgttattctgttgcccatttctgttctccctgctgctccctgagagtactaacacaaaggtgtacttctggggtgtgtgtgtatatgcatatccataaacaatatatggtatagcttctggagggatccaaagtcattagcactcaagcaagcctattaaataaaataatatcagcttgagttaaagataacatatagccgtgaaataacggagctgatttttaggtaccttgtcaaatagttctgaaagtaattgcaaagaggagttccaaaagtgagttcagaaagacagctttatcagaataaattgcatggtactgcatacaggaaactataaagaacaacggttatttagaactgttcattctgacagtgtttttcaattactccttaatattataaccacttactcatttcctgaaatcaccaggaaatttttcaaaaagatttttctcccccgatgaatatacccacgatttgcatttgacccaagataagcagttgagtcgataacatgttaatttttaaatacatggttttaaaacacagaataaaaattctacctcattgcttggagactcaattaaggagagtatgcacattagcaaaaagaagatgtgatatttgctcagaagtcttgaagtggatattttggccttcgtatggctgaatggtcaagcttgactctctcgtttgctcagggaggcccagtccctctgctgccacgggtagaaatactttttcctaaatcg

SEQ ID NO: 36023 - DNA, 1392 bp, Homo sapiens
atagagaccaaaaatacaaatagctaaactggaactaaattaagaaaaacagaagttaataaactccaccgcctcactcccatctcttcgtaagttagtaggcttgtaagtcctaggctggttagttcattcatttgttcactcatgccagccattgaggattattgtgttctaagtgctgtgctaagccccagaaatacaaagacaagtgagtcatgggcctgcctgcaaggagtgaggagatttactcaaaattgagagctggaaaaagaaaggcactttccctggcctcatagccctccgtgacttcaaagtattcctctctggggtcatgccactagggataatagcattatccaaaaacatttttggaaatccttttagaattattctcagggactggagtacatttatttttaaaaagaaacttggtgttttaaaatctttttttttttttagggagaatctgctttattatttgagaagtttcaaaaaatatagaaaatacagatgataatatggcaagtatctaaaggtctccacttaacagaattaacatctgttaacattttgtcacttttgctttagttgttttttttttaattaaaaaagagaacattacagataaatgtgaagtccctgttattctgttgcccatttctgttctccctgctgctccctgagagtactaacacaaaggtgtacttctggggtgtgtgtgtatatgcatatccataaacaatatatggtatagcttctggagggatccaaagtcattagcactcaagcaagcctattaaataaaataatatcagcttgagttaaagataacatatagccgtgaaataacggagctgatttttaggtaccttgtcaaatagttctgaaagtaattgcaaagaggagttccaaaagtgagttcagaaagacagctttatcagaataaattgcatggtactgcatacaggaaactataaagaacaacggttatttagaactgttcattctgacagtgtttttcaattactccttaatattataaccacttactcatttcctgaaatcaccaggaaatttttcaaaaagatttttctcccccgatgaatatacccacgatttgcatttgacccaagataagcagttgagtcgataacatgttaatttttaaatacatggttttaaaacacagaataaaaattctacctcattgcttggagactcaattaaggaragtatgcacattagcaaaaagaagatgtgatatttgctcagaagtcttgaagtggatattttggccttcgtatggctgaatggtcaagcttgactctctcgtttgctcagggaggcccagtccctctgctgccacgggtagaaatactttttcctaaatcg

SEQ ID NO: 36024 - DNA, 618 bp, Homo sapiens
tctttcttttaaatatggtgcccaaatttatgacaactggccagccagtcactttacctgaagcaagacagaagacacttcattcattcttattaccagcattcattcctatcaacagccagttagcaaagcaagaagctgcacatcccaatgcttttgagtttctttccaagtctgttaaatccagagaattagccctgataggaattacaagggagacaattacagataatttattcggttcagtcattcattttgtggaaggttttagtccctaacccaactttcacagagaccatatctcttttttacattgtaagcaataataaagaaaatgagttttccacttcctacgtatgtctcctgggttttgttttataaaataacttttattgctgtttttattatatacataatacatgtttattgtttaaaatagaaaatacacataagcaatgggaagaaaataaaaatcacacataatcccaccatagaaagwtaactactattaacacttgctgcatttgctgagtatctactgtcacccttttaatatgcctttatgatttgttaaataaaattgtatgctattctttatataaattttttaataaaaaa

SEQ ID NO: 36025 - DNA, 1371 bp, Homo sapiens
tgcatacgcattctcattgtgaaggtttatttgcacctccactcttcttaaccaggctattttcacagaagaaataaccccaacttcatgaaccctattcccatgacctatttgccaatctgttaaaataatggccaactcaaatgatcagtaatgattgactcaccatgacatcatccatcacctttgtcactggaagcccacttgccttaaagggtgcagcatcttccaactttgctccagcaacttcagctcctcattaaatccctccctgtaggtcatccctgcaaccagttgacactggagctcagcagccagctgataggggccttcactcctcttgtcgagctgctcctctctcctctcaaagccctctttccttctctcctgctggctgacctagaagctcagctaaagaggtgttcaaagggtccagtcgcttaaacaggtggccagtgtgctttctgctataactccttgctccttgagctcagctccaagctgtagaaggccatggaagagcacattgatgtcatcttgggaataattaacagggtccggtttttctgttcgtttccttgcaccagatgaagagtaggataaacttgggagaagccaaagtgatgtttttgtattgtggctttgaatgatttcaaggtcccttggttaacctattctcagcaaaagaaatagaagatggtcccaagatggtaagagcagagtgtttggttgataatttgatctaaaagtgaccagactccacaagttaacccccagagctgctcaattacagcagtttaaaaataagttgaggattcgttgctaaatcagtggaaagaatttggagtttccaaaatagtttgtaatcaagaaaagccatctgaggaggccctggagggaaaatcgctgatgattatcaaatgtccagttctcartgcggtggtatatgtgactgaaaaaaaccacttttgtccacatttggggaaagataagattatactaaatgcctggcacatacactggaccttcagttacctagaaaactttcaaaataactttgccataacaagtggcaaattattaaggtcatgggctgtcttctcaaaattacttagataacatgattctctggccagtatgagacccttaatttatcacgtatgaagcatatgagcctgtttatccgttcgttaatcattatttttatctggcttgggctctgggttactggccatgcaggcagatcttcccttccaaaaggaaacgttattattctcttgtattcgtttctttaaaaacatgcagatttaacaaaacatattacttagcactcttactgatttagaaatatgatgacccttaggaaatgca

SEQ ID NO: 36026 - DNA, 1371 bp, Homo sapiens
tgcatacgcattctcattgtgaaggtttatttgcacctccactcttcttaaccaggctattttcacagaagaaataaccccaacttcatgaaccctattcccatgacctatttgccaatctgttaaaataatggccaactcaaatgatcagtaatgattgactcaccatgacatcatccatcacctttgtcactggaagcccacttgccttaaagggtgcagcatcttccaactttgctccagcaacttcagctcctcattaaatccctccctgtaggtcatccctgcaaccagttgacactggagctcagcagccagctgataggggccttcactcctcttgtcgagctgctcctctctcctctcaaagccctctttccttctctcctgctggctgacctagaagctcagctaaagaggtgttcaaagggtccagtcgcttaaacaggtggccagtgtgctttctgctataactccttgctccttgagctcagctccaagctgtagaaggccatggaagagcacattgatgtcatcttgggaataattaacagggtccggtttttctgttcgtttccttgcaccagatgaagagtaggataaacttgggagaagccaaagtgatgtttttgtattgtggctttgaatgatttcaaggtcccttggttaacctattctcagcaaaagaaatagaagatggtcccaagatggtaagagcagagtgtttggttgataatttgatctaaaagtgaccagactccacaagttaacccccagagctgctcaattacagcagtttaaaaataagttgaggattcgttgctaaatcagtggaaagaatttggagtttccaaaatagtttgtaatcaagaaaagccatctgaggaggccctggagggaaaatcgctgatgattatcaaatgtccagttctcaatgcggtggtatatgtgactgaaaaaaaccacttttgtccacatttggggaaagataagattatactaaatgcctggcacatacactggaccttcagttacctagaaaactttcwaaataactttgccataacaagtggcaaattattaaggtcatgggctgtcttctcaaaattacttagataacatgattctctggccagtatgagacccttaatttatcacgtatgaagcatatgagcctgtttatccgttcgttaatcattatttttatctggcttgggctctgggttactggccatgcaggcagatcttcccttccaaaaggaaacgttattattctcttgtattcgtttctttaaaaacatgcagatttaacaaaacatattacttagcactcttactgatttagaaatatgatgacccttaggaaatgca

SEQ ID NO: 36027 - DNA, 1371 bp, Homo sapiens
tgcatacgcattctcattgtgaaggtttatttgcacctccactcttcttaaccaggctattttcacagaagaaataaccccaacttcatgaaccctattcccatgacctatttgccaatctgttaaaataatggccaactcaaatgatcagtaatgattgactcaccatgacatcatccatcacctttgtcactggaagcccacttgccttaaagggtgcagcatcttccaactttgctccagcaacttcagctcctcattaaatccctccctgtaggtcatccctgcaaccagttgacactggagctcagcagccagctgataggggccttcactcctcttgtcgagctgctcctctctcctctcaaagccctctttccttctctcctgctggctgacctagaagctcagctaaagaggtgttcaaagggtccagtcgcttaaacaggtggccagtgtgctttctgctataactccttgctccttgagctcagctccaagctgtagaaggccatggaagagcacattgatgtcatcttgggaataattaacagggtccggtttttctgttcgtttccttgcaccagatgaagagtaggataaacttgggagaagccaaagtgatgtttttgtattgtggctttgaatgatttcaaggtcccttggttaacctattctcagcaaaagaaatagaagatggtcccaagatggtaagagcagagtgtttggttgataatttgatctaaaagtgaccagactccacaagttaacccccagagctgctcaattacagcagtttaaaaataagttgaggattcgttgctaaatcagtggaaagaatttggagtttccaaaatagtttgtaatcaagaaaagccatctgaggaggccctggagggaaaatcgctgatgattatcaaatgtccagttctcaatgcggtggtatatgtgactgaaaaaaaccacttttgtccacatttggggaaagataagattatactaaatgcctggcacatacactggaccttcagttacctagaaaactttcaaaataactttgccataacaagtggcaaattattaaggtcatgggctgtcttctcaaaattacttagataacatgattctctggccagtatgagacccttaatttatcacgtatgaagcatatgagcctgtttatccgttcgttaatcattatttttatctggcttgggctctgggttactggccatgcaggcagatcttcccttccaaaaggaaacgttattattctcttgtattcgtttcttyaaaaacatgcagatttaacaaaacatattacttagcactcttactgatttagaaatatgatgacccttaggaaatgca

SEQ ID NO: 36028 - DNA, 652 bp, Homo sapiens
cggtgcccctgtattggagtgtaagagacaagtgtggtgagagcagtctggcagggctactactgttatgatttacacagtccctttcatccagctacttcaaagcaccttcacaaactctggctcattattccttcaaacacagcattcaagaaagrttgataggcgccttttaattaattcaaagatgatgaagctgagcattacagaatataaggggattcttccaaaagtatctgcactgcagaggggcatgatatataaagtgttcatcacaggtttctaactgaaacaaggaaatgacctgaacgcttatttttagaggagaccagtatatattatggcatattcagaatatgcaataccatgcacccattaaaatcatgtttattaagaatagtcacattagggaaatggtcataactgaacaacgtttagtggcataaaaaaagataaagctttgtacatacagtatgatgaaaatgtttaatgtggctgggcatagtgacttgtgcctgtaattccagcactgtgggaggccaaggcaggagtatcactgaaggccaggagttcaagaccagcctgggcaccatggtgagaccctgtctctacaaaaaatttaaaaattagccaggtggtcatgatgcatgcc

SEQ ID NO: 36029 - DNA, 652 bp, Homo sapiens
cggtgcccctgtattggagtgtaagagacaagtgtggtgagagcagtctggcagggctactactgttatgatttacacagtccctttcatccagctacttcaaagcaccttcacaaactctggctcattattccttcaaacacagcattcaagaaagattgataggcgccttttaattaattcaaagatgatgaagctgagcattacagaatataaggggattcttccaaaagtatctgcactgcagaggggcatgatatataaagtgttcatcacaggtttctaactgaaacaaggaaatgacctgaacgcttatttttagaggagaccagtatatattatggcatattcagaatatgcaataccatgcacccattaaaatcatgtttattaagaatagtcacattagggaaatggtcataactgaacaacrtttagtggcataaaaaaagataaagctttgtacatacagtatgatgaaaatgtttaatgtggctgggcatagtgacttgtgcctgtaattccagcactgtgggaggccaaggcaggagtatcactgaaggccaggagttcaagaccagcctgggcaccatggtgagaccctgtctctacaaaaaatttaaaaattagccaggtggtcatgatgcatgcc

SEQ ID NO: 36030 - DNA, 652 bp, Homo sapiens
cggtgcccctgtattggagtgtaagagacaagtgtggtgagagcagtctggcagggctactactgttatgatttacacagtccctttcatccagctacttcaaagcaccttcacaaactctggctcattattccttcaaacacagcattcaagaaagattgataggcgccttttaattaattcaaagatgatgaagctgagcattacagaatataaggggattcttccaaaagtatctgcactgcagaggggcatgatatataaagtgttcatcacaggtttctaactgaaacaaggaaatgacctgaacgcttatttttagaggagaccagtatatattatggcatattcagaatatgcaataccatgcacccattaaaatcatgtttattaagaatagtcacattagggaaatggtcataactgaacaacgtttagtggcataaaaaaagataaagctttgtacatacagtatgatgaaaatgtttaatgtggctgggcatagtgacttgtgcctgtaattccagcactgtgggaggccaaggcaggagtatcactgaaggccaggagttcaagaccagcctgggcaccatrgtgagaccctgtctctacaaaaaatttaaaaattagccaggtggtcatgatgcatgcc

SEQ ID NO: 36031 - DNA, 598 bp, Homo sapiens
gaacccataaagatgtcaaatttagaagcctcagagagatttcctttgctctgtgaataactaaatttggttagctggggtggggtctgggtacttttccttgtgaagaatttttccctcattctggtcatctcctcccctcctatagaggcaccatatatttttcttgtctcaggtacctatagtgataaaacaccctgagctgaaaggatcgctggatagggcagtctcaatacaaaagaatgtggcagaagctcaggcttcagtgcacatcagaatagaagcttcatgagggcagaggcttttgtctgctttcctcattgcagtatccccagaactttgagcaagtgcacactcgatraatacttgaaagaataaatcaatgtcagacatctgggcttatgtctcatctttctactgttctcaactaagagattctcgtcattctacaactttcctgagcctgctctccttctccaaatattcacccttccaggcactgactccacctcccacatcagagctttttcttaaagtaaataacagtcaacaattaatagcttcataactttggaacagtgcagtgtctttggtttaa

SEQ ID NO: 36032 - DNA, 598 bp, Homo sapiens
gaacccataaagatgtcaaatttagaagcctcagagagatttcctttgctctgtgaataactaaatttggttagctggggtggggtctgggtacttttccttgtgaagaatttttccctcattctggtcatctcctcccctcctatagaggcaccatatatttttcttgtctcaggtacctatagtgataaaacaccctgagctgaaaggatcgctggatagggcagtctcaatacaaaagaatgtggcagaagctcaggcttcagtgcacatcagaatagaagcttcatgagggcagaggcttttgtctgctttcctcattgcagtatccccagaactttgagcaagtgcacactcgatgaatacttgaaagaataaatcaatgtcagacatctgggcttatgtctcatctttctactgttctcaactaagagattctcgtcattctacaactttcctgagcctgctctccttctccaratattcacccttccaggcactgactccacctcccacatcagagctttttcttaaagtaaataacagtcaacaattaatagcttcataactttggaacagtgcagtgtctttggtttaa

SEQ ID NO: 36033 - DNA, 598 bp, Homo sapiens
gaacccataaagatgtcaaatttagaagcctcagagagatttcctttgctctgtgaataactaaatttggttagctggggtggggtctgggtacttttccttgtgaagaatttttccctcattctggtcatctcctcccctcctatagaggcaccatatatttttcttgtctcaggtacctatagtgataaaacaccctgagctgaaaggatcgctggatagggcagtctcaatacaaaagaatgtggcagaagctcaggcttcagtgcacatcagaatagaagcttcatgagggcagaggcttttgtctgctttcctcattgcagtatccccagaactttgagcaagtgcacactcgatgaatacttgaaagaataaatcaatgtcagacatctgggcttatgtctcatctttctactgttctcaactaagagattctcgtcattctacaactttcctgagcctgctctccttctccaartattcacccttccaggcactgactccacctcccacatcagagctttttcttaaagtaaataacagtcaacaattaatagcttcataactttggaacagtgcagtgtctttggtttaa

SEQ ID NO: 36034 - DNA, 598 bp, Homo sapiens
gaacccataaagatgtcaaatttagaagcctcagagagatttcctttgctctgtgaataactaaatttggttagctggggtggggtctgggtacttttccttgtgaagaatttttccctcattctggtcatctcctcccctcctatagaggcaccatatatttttcttgtctcaggtacctatagtgataaaacaccctgagctgaaaggatcgctggatagggcagtctcaatacaaaagaatgtggcagaagctcaggcttcagtgcacatcagaatagaagcttcatgagggcagaggcttttgtctgctttcctcattgcagtatccccagaactttgagcaagtgcacactcgatgaatacttgaaagaataaatcaatgtcagacatctgggcttatgtctcatctttctactgttctcaactaagagattctcgtcattctacaactttcctgagcctgctctccttctccaaatattcacccttccaggcactgactccacctcccacatcrgagctttttcttaaagtaaataacagtcaacaattaatagcttcataactttggaacagtgcagtgtctttggtttaa

SEQ ID NO: 36035 - DNA, 577 bp, Homo sapiens
tttttttgttgagacagagtctcgctctgtcgcccaggctggactgcagtggcacgatcttggctcactgcaagctccgcctcccgggttcacgccattctgctgcctcagcctcccargtagctgggactacaggctcccgccaccacgcccagctaatttctttttgtatttttagtagagacggggtttcaccgtgttagtcaggatggtcctgatctcctgaccttgtgatccgcccgcctcggcctcccaaagtgctgggattacaggcatgagccaccacgcctggccagttgtcattattcttataaagtaattacagtttaaaattcaagttaaagtgtacatattgtgaaatgagcttttaacactattctgtaactaattttttaaatgcctggggtcatttgaagaactccagcaaacactctaacaaatagaagacagaaagaaagcaagccttcatttgcataaaacggccaaagaacaatagccaaataaattccatgtttccaaaagttaagctctatacacctatgctcacagcagcattattcacagcagccaaaaagta

SEQ ID NO: 36036 - DNA, 577 bp, Homo sapiens
tttttttgttgagacagagtctcgctctgtcgcccaggctggactgcagtggcacgatcttggctcactgcaagctccgcctcccgggttcacgccattctgctgcctcagcctcccaggtagctgggactacaggckcccgccaccacgcccagctaatttctttttgtatttttagtagagacggggtttcaccgtgttagtcaggatggtcctgatctcctgaccttgtgatccgcccgcctcggcctcccaaagtgctgggattacaggcatgagccaccacgcctggccagttgtcattattcttataaagtaattacagtttaaaattcaagttaaagtgtacatattgtgaaatgagcttttaacactattctgtaactaattttttaaatgcctggggtcatttgaagaactccagcaaacactctaacaaatagaagacagaaagaaagcaagccttcatttgcataaaacggccaaagaacaatagccaaataaattccatgtttccaaaagttaagctctatacacctatgctcacagcagcattattcacagcagccaaaaagta

SEQ ID NO: 36037 - DNA, 577 bp, Homo sapiens
tttttttgttgagacagagtctcgctctgtcgcccaggctggactgcagtggcacgatcttggctcactgcaagctccgcctcccgggttcacgccattctgctgcctcagcctcccaggtagctgggactacaggctcccrccaccacgcccagctaatttctttttgtatttttagtagagacggggtttcaccgtgttagtcaggatggtcctgatctcctgaccttgtgatccgcccgcctcggcctcccaaagtgctgggattacaggcatgagccaccacgcctggccagttgtcattattcttataaagtaattacagtttaaaattcaagttaaagtgtacatattgtgaaatgagcttttaacactattctgtaactaattttttaaatgcctggggtcatttgaagaactccagcaaacactctaacaaatagaagacagaaagaaagcaagccttcatttgcataaaacggccaaagaacaatagccaaataaattccatgtttccaaaagttaagctctatacacctatgctcacagcagcattattcacagcagccaaaaagta

SEQ ID NO: 36038 - DNA, 577 bp, Homo sapiens
tttttttgttgagacagagtctcgctctgtcgcccaggctggactgcagtggcacgatcttggctcactgcaagctccgcctcccgggttcacgccattctgctgcctcagcctcccaggtagctgggactacaggctcccgccaccacgcccagctaatttctttttgtatttttagtagagacggggtttcaccgtgttagtcaggatggtcctgatctcctgaccttgtgatccgccygcctcggcctcccaaagtgctgggattacaggcatgagccaccacgcctggccagttgtcattattcttataaagtaattacagtttaaaattcaagttaaagtgtacatattgtgaaatgagcttttaacactattctgtaactaattttttaaatgcctggggtcatttgaagaactccagcaaacactctaacaaatagaagacagaaagaaagcaagccttcatttgcataaaacggccaaagaacaatagccaaataaattccatgtttccaaaagttaagctctatacacctatgctcacagcagcattattcacagcagccaaaaagta

SEQ ID NO: 36039 - DNA, 577 bp, Homo sapiens
tttttttgttgagacagagtctcgctctgtcgcccaggctggactgcagtggcacgatcttggctcactgcaagctccgcctcccgggttcacgccattctgctgcctcagcctcccaggtagctgggactacaggctcccgccaccacgcccagctaatttctttttgtatttttagtagagacggggtttcaccgtgttagtcaggatggtcctgatctcctgaccttgtgatccgcccgcctcggcctcccaaagtgctgggattacaggcrtgagccaccacgcctggccagttgtcattattcttataaagtaattacagtttaaaattcaagttaaagtgtacatattgtgaaatgagcttttaacactattctgtaactaattttttaaatgcctggggtcatttgaagaactccagcaaacactctaacaaatagaagacagaaagaaagcaagccttcatttgcataaaacggccaaagaacaatagccaaataaattccatgtttccaaaagttaagctctatacacctatgctcacagcagcattattcacagcagccaaaaagta

SEQ ID NO: 36040 - DNA, 639 bp, Homo sapiens
tacttaaaatagaaaatctgtttttgtttgcagccattgaaaggaataatttaatgaggctttctcagaccataccatttacaccagtccaactgtttggtgagtagcatttctaccttcttgagtttatgccaggacagaggcataaaatctgagtgaatcaaaggaaaccacattgcattattttagttgaaaattttgttttgttgatagttgtagtttagtgagattcatttcctaaaatggaaattcttgttaactgtcatggccagcattcagggacaaaagctaatactatgggaataagacctataatgagcagcagttgggaagaaagcaataatattgcacctggcattcactgactcaaggctggaagtaagtaggaaagaaaagaacaaaccaaccatttataataagcacaggagaaagcgataaatgtcaatatggtgaaagccaacaggcatctgaagagaaatgctttgtgtattgttttttgtttattttgttttgtgtacactaattgctcttayctcagactgcaaatgtcattttaaaagtctggagtagtaaagaaaaacaatctcaccctggctaaagctatcaaaatttctctgtctggcaggataagacatgagc

SEQ ID NO: 36041 - DNA, 591 bp, Homo sapiens
gacaatttgttggtcaacacacaatacttaccatttgaaagcatttagtgacctgcagcatatcaatttatagtgagaaatagaacctatgcaagttacaaaacttttatcagcctgaccatcacacggtgtccctggaggccatggaagctggattataatcaagaggttgcttgaagtgcatggaatcagaacaaagagaggtagataaatcaaatttttaatggtgtcaggctaagacatcctgtttcatctcatcttctctggagggacgggcctgccagtgggagtggaatactcgaagtttgaaatgcttcagactgattccaaaggatgcaacagaatttcaagcaactcttagaccagccttgagaaacatggaccatgatgagaaaatatttattttctcttcttctaccctctctcacctttctccctctctctcgctctttctctcttttttgtctctttctcctccttcyttctttattccttttttctttctctgatgccctctttatgttacctctttttacactacattggctacaaatgtggatcactaaacatcactgattttaagagatacca

SEQ ID NO: 36042 - DNA, 1145 bp, Homo sapiens
caaacccaaaacctaatctccatggtgatggtattgggggggtgcggcctttgggaggtgatgaggtcatgagggtgaggccctcaagaatgagattcatgtctttataaaagaaacctgagagagctagcgtccttttgccaygtgaggatgcagctaccgattggcagtctgcaacctgaaagaggttcctcaccagatgctacatccgtcagtgtcttgacctcagacttcccagcctctagaactgtgagaagtcaatttcttgattgcttaggagaccccgagtctagcgtattttgttagagcagcccgaacagactaagatatcaacctcactgatgcccacagactggtctccgtccagcttccaatttgcacactggccttaagcaatgctgcagtgcccacttcatgagctgggttttctggggccctccttattgacaatggacagcttgtcattcaagagctgctttggtaatgtatcactcattctccattcgtctgtcccattgcaaacatcctgcaaaaaaccactaccatgctggcaattcccacccatgttaatgtctccatcttctcatttattaccctctatattcaggctttatgctcaacataccccaaactcaggtcagatgcttgctatgggtggacaaccacttttttttttttgtctccttctaaagcaggacatcatcataataacatgtgttaatcatgttattaccaaacatcttgaagatattttgttttctaatccttgaacatgtaccttaaaaatcaccataatcgcaagatggccgaataggaacagctcccctctacagctcccagcgtgagcgacgcagaagacgggtgatttctgcatttccatctgaggtaccgggttcatctcactagggagtgccagacagtgggcataggtcattgggtgcacgcaccgtgcgctagccgaagcagggcaaggcattgcctcacttgggaagcgcaaggggtcaaagaaaggggtgacggacggcacctggaaaatcgagtcactcccacccaaatactgcgcttttccgatgggcttaaaaaacggcgcaccacgagactatatcccacacctggctcggagggtcctacacccacggaatctc

SEQ ID NO: 36043 - DNA, 599 bp, Homo sapiens
cttttatttaaatttaatwaaatttaaatagccacttagggttaggtgctatagtcttatacactataggcaagattatcttatggggttcaattataattctcattctgaaactctttcacagttttacatctgtttttctacctttaaaaaacattctgtttgctaactgcagaacaaaataacttgtccgtagaggttcagctaagcagataattataagtgaacagtcagaccaattgtttattttaccaatatgaggatagaaaataaattatacatttttatatccggggctatttatttaaagaaaggctaagtgacctacttttgatttgcatattgggatgggtgaacttccacataattgttttactagaactttttacatgatagttcataacataactatggaatctgaatttgtcagtactttgaatttatccagttttatcttattgagaagtaacttgaagtctggatgaatagttataattactacaatcaatagctcaaaggacttacaaataacaagtcataaatactctattactttatgtgctactagaaaaactaattttaaaaacccaaagtaacaa

SEQ ID NO: 36044 - DNA, 1156 bp, Homo sapiens
atgatattttaacaatatcattaattttccttggtgtgatcatgataatgtggttatgaaggagaatatctgtattcttagaggtgcatgctgaagtatttgggggtaaaatgtcatgatatctacatttagttttcaaatggtataacaacaatatatataaataaaggccaggtgcagtggctcatgcctgtaatccctacactttgggaggccaaggggggcggatcatctgaggtcaggagtttgagaccaacgtggccaacatggtgaaacctgtctctactaaaatacaaaaaaattagccaggcatgttggaactggcctgtaatcccagctactacggaggctgaggcaggagagctgcttgaacccagaaggcggaggttgcagtgagccgagactgtaccactgagcgagactccgactcaaaaacacaaacaaataaaacaaacaaataacaacaaaaaaatttatatatataaaacataaaaagataaaatatgaaacaatgttaattattgagtctatatggaaagcatttgaatgtttgttgtgataatctttcaattttgggggtatatttaaattttttataataaaatattgagaaggataaaggaattaaataaatcaaaaaaaggaatcaatcagagtcatctcaacaggcttaaaggaatgttcacggtgtactgctaagtgatagaattcatctgctcaacacagaagtatataatgattgcattgtttaaaaaggaatgagtaagcctaggtgcagtggctcacacctataatctcaggactttgggaggccaaggtgggcagatcacctgaggtcgggagttcaagaccagcctggccaacatggtgaaaccccatctctactaaaaatacacaaagtagccaggtgtggtggcacatgcctgtaatcccagctacttggaggctgagtcagaagaatcgtttgaaccctggaggcagaggttgcagtgagccgagacagcrccattacactctggcctgggcaacagagagagactgactcaataaataaataaaaggaatgagtaaaaaactacatacatgagtgtgtatgttcagacacatgcacaagtatttctatataataataagcatagagaaatgtatgtaagaa

SEQ ID NO: 36045 - DNA, 1890 bp, Homo sapiens
tcccgcctcagcctcccaagtgctgggactacagggcccagctaatttttgtatttttttgtagagactgggtttggccatgtcacccaggctagtctcaaactcctggactcaagccatctacccacctcggcttcctgaagtgttgggattacaggtgtgagctactgcccccagcccattcattattattattattttttatagaggccgtgtctcactatgttggtcaggctggtcttgaactcctgggcccaggtgatccttccacctcagcctcccaaagtgctgagatkacaggtgtgagccactgcacttggccccatccattatttttaagggcttgtaaaaatgacagaaatgtaagattacaatatattataaaaaagatagaaatatgattgtaatacattatgaaaaatacaaggattgaaattatataagctcccaatacaatatagaaaaggaagtcattaattctatttggggaaaatagaaattggatgatcagaaaagctttctggggctgggcgtggtagctcatgcctgtaatcccagcactttggaaggccgaggtgggcaagtcacttgaggtcaggagttcaagatcagcctgaccaacatggtgaaaccccatttctactgaaaaatacaaaaagaatcagccaggcatggtgacgtctgcttgtagtcccagctgctcgggaggctgaggcaggagaatggcttgaacccaggaggcaaaggttgcagtgagattgcaccactgcacaccagcctgggcgatagagcgagactctgtctaaaaaaataaataaataaataaaagaattacatcaaattttatcccttcttagcacaaatttttttttaacttggcatagaattcagagccaggaaattgtgttgaactaactttccaaataaaatttagcatgtcattctattatgaacgtatgccacaaaccacaatagtattagcattagtagtacctgtgacttcacaaccaaaaaaaccacaggtattttcatttcacataacagttgctgcagacaactcaaaatttcatttatagtcattagtacctctaaaattatcttaataggtatgctcattgctatatcttgttctttaattagttaataaagaagcatctacattactgtattacaaatttgcttttaaaatattttgttaggtatttcaatactcagagtttccttttaatccaaaatattttatgcatttaaaaacactgttctgaaaatgggtccctgggtttctccacactgccaaagagtcaatggcacaaaaacagaagttaggaacttcttcttaggaatctttgatgatacctgcccattcgtctccttttctctcctatccaacaaacccatcgttctgaattaggtgtccctcctttgtcttctttttgatttcccattgtaacttctgcatgcctccttgatattcttgtctggtctcaactaatccttggagctctctgagcactggaatcatgctgatcattgctgtatgcacagtgccctacagggagtgaatgcttatattaataataagcagttgttgaattaatcagtctattagaacacaaaaccccaagtatctacaaggtactaagacaactgcagactcagtaatgagatgctaaataaacttcttaaataatcccaatataactacactgaaattagctgctacactcttgaattcttacatgaagccaaagagtagatatatcatttaggactttttgtttttcatgtagaagtaacaataaattcaattgaaacagggttaaattaaaggaatgtattgacttacataccagaaaggtgcagagataagtcttcaagagtggcccctca

SEQ ID NO: 36046 - DNA, 609 bp, Homo sapiens
tctatataccaagatgcttgtcctctctcccttgtctcttttccctaacccagcatcacaaatggaggtgggaagaggcatgtaaagtacaaagaatgtgtctatctccactcttactcctcaagcccagaagctcagcctctgttggaagaagaagagatctgtgaaacagatatatgaccaaagttttaaatcagctcaaatggagttataattgttagagtgcccagagatttggggaatatcttcccctttttaagggttgaagcttcaaaatttaatacagcatggctcatagcaataatttagaaaaacayatttatatccccctccctgattgacttcttgataagctgttcatgaaaattacatgttttgagtaggattctttattacaatccccaaagtttatattgagagttcatacaaagcagtccatatagaactgacatcctgtaagaacctctagatatttcctaaaggttattaggctagtgcaaaagtagttgcggttttagaccgtgaattttaaaccattataactaggctcaaggacatctttattaatcaaaataggaactattacaatcaacatatttttgccaatga

SEQ ID NO: 36047 - DNA, 1190 bp, Homo sapiens
cctaacttcttctcaggcagcattcaggtgctgaggtgagaaagtggaggcctgggctccgcaaagaaggggatttgtttctgcccgtcctgagccttagtagagaaactgtgactcagggatatgaccccagggaccaaagattcttcctgcccccaaatggaagggcttttattttcctttggaaattttatttcaagtattgtaacatgttcaaaatagaagctttattaggggtttgatggcttaatttgkgccattaaccaagactgatgtaattctttcttctcaggactcttaaatgaatgggtgctagccaagtgggcctcgtaaaggtggagattattgcatgaaagccattttatggctcttgtctcagttcttctggagccaggcttggcacaggagaaaggctggagagagggtgttggtgatggcaagcgtcacctgtgtccttgtaaccaaagttgctgctacctcttccagtctgcataattggttttcaaacccacctcatcttttcttcttgtgcattaaatgtgtaacaagatacataatttctgttctagtcagacccttctttttcctttcctttcctttttttttttttaggagatgagagtcttgctatgttgtcctgtctggactcaaactcctgggcttgagtgatcctcccacctcagcctcctgaatagctgggaccacaggtaatttttttttcatagagacggggtctccctatgttgctcaggctggtcttgaactccctggctcaagcaatcctcttgcctcagcctttcaaagtgctgggattacaggagtgagccaccatacccaattcagaattcctattttaaagagatatattctgaaacattaaagcaatgtttcaaaaaaattcagggtggagggaggctacaggctaggaggcataactgaaacaaaatggcttataattttttttttttttttttagatggagcctcctctgtcgcccaggctggagtgcagtggcatgatcacagcttgctgcagcttccacctcccaggctcaagtgatcctcctccttagcctcccgagtagctgggactgcaggtgcacaccaccacacctggctcatttttgtaatttttgtagagaaagtgtttcactatgttgcccaggctggtcttgaactcctgagctcaag

SEQ ID NO: 36048 - DNA, 1541 bp, Homo sapiens
tgttggtgagggcctcactggtcatacacgcaaactctgaacaaccatgggtgaagagtcacgtccagggtaggggtttgggccagaacccatctaccttgtccttggagttgaggacaacagcctgtgtgtggggtacacggaccacgtggtggtcaaagccagcagtgggcagccagactcgggcagggagcttatggttgagcagggagagctctgagatcagcctctgtgttttctgctctttggtggggagcgtggccagccgcttgccgatcgccatcagggacttgatgaattctctctcaggagccagtcgaacaggctacaggggtttggggtaagacaaaagatggtgaagaaaccatagaatacaatggcacacccactcagtcactcctggccatgcaggccggggaccccactatctggagaactccaggaaagsagctgctttttagtcttagtaggagcttccacccacccttcacaacttgaattgagaatagccagcacattccttccctataggctatcccttgagggtaagggaggccatgagtccaggtaactgggatgcactcctcttctcctggacttgggttccttaaggactgtaccaaggcttcagagtgagcagggggacatctggataggttagccagggccacagagagaagagctgcttacacctgaattgtttcacccttttcaagaacagggttgtccttctccccatctggatccttgggctagatctctgccgaggggctccgtcaagtcccgcaaggctagagaagggagccccacatcatttccactttcaaagagggaagatgctcgtcattcaaattacttctgttgatttccatggtatccccctgtccgtcccacaatctcttaccaggcgtcaatgcacatgcaggggatggaaagaggatgagccgatgagcagactttgcattaatcaaggagaaagaaaaagcagatggaaggaggtaggtagatggagaaagcaacagctccttttagcccttgatgatggccctgaaggcctgtctcttttagtgactcctctttgggtcctcttcccctacctctcagtgactaggttcctcatattaattccctgctgtgagtttggctccttgtgctgggcaattcagtcatcctcagaaagagcaaagttggtcttggaattaaggtgcaggtggggaaaaagagggactcagctagacacgaagaaaggctctcttcccagtctaagcccttctaccgtaaggggcattttatcaagacagccacccaactccccatcccatctcccctcctttgtagaaacagcatttgactcaccaagcctttctctccctttccgtgtgtcttgcttagtttctggattgagagaatttctatccttgctccctcgaactctaaaagagcttcttttgaaaactggggagtatcaggcctacctctacatgtgcaacagtgccaggattcaaaggaaaagctcattccagcctctgcctcttgggaga

SEQ ID NO: 36049 - DNA, 990 bp, Homo sapiens
agtgtgagaggaggcctcgaggtagagcctcctaaatamaccattggcttctctggcaggctgaaatacatttagctgggagggcattccatatagaaatacaaattcatgccaaatcacttcagtcaccttgtgacctctatttcttaactgagactttgggtatatgatacttgagtttcattgctgggctttcaaatcccttttcatactgcagaaagcctagtgatctttccagaactgcattttgaaaagaatatagctgttgcagcattgcttctgagacatctacagtaccatacttggctgaagctccaagccatttctttgataatttcagctctactctatctcagtgtcacttgtatccagcatagtgcctggcacatagtaaatgcaaaataaatgttttactgaatgtaagtgaagacagttcaggatgtaactcttttccttacctcccacatggtgagttttatcaaaactttttgcattcggcctacctggaaatagatggtcaattgagatgaagacaagagaacccttgaatgaaattgaagctattctttaaaaattcatccttagtaatgagagtaataacatgctggctacacaggatgagttaagctcctcctcacgaataacagacatttataaagtcagtctagctcaggttctggagtcacgtgacttgggttcaaatcttgggtctgccgtttccctgggcaagttacttaactgctttgtgtctcagattctagataatatctacctcacatgggttgctgagagggtgaaaagagataaatgagattacatgccatactcaggacagtctctcatacatagaaagagtttcatagaggctgccattagcattgctcttacttctatgtgtgatggaattaaaggtaccctagagtagaagtctcagcccttgccaccagggccctgatgaagttgaggatatcagtctctatttaaagacag

SEQ ID NO: 36050 - DNA, 518 bp, Homo sapiens
aaatcaagtcatgttaatacgccacattagttataggttgtaaggaagtaagatttttaaaataagtctagaccaggcatggtgactcatgcctgtaatcccagcactttgggagggtaaggtgggaggattacttgaggccaggaattcaagaccaacctgggcagcatagtgagaccccatttccatcaaagaaaaggaaaagtctgggtctaatgcttacaaattraacaaaggagtgagtctcttgttgcagctaataatgtgatcaagatttttttcccctgggtaagactattgttatatctaataaaaatacattttaacattatattttatattttacagtcaatactttgttgttctgacaatcaagacacatattcctgattaaattagtaaatcatttatgttgatggtagacagaaaaagagaaaacagatttgtatttttgcttaaatccttccctatgagacattaactagataaggaatatttgtataaagagtttgagatta

SEQ ID NO: 36051 - DNA, 1162 bp, Homo sapiens
tgcatctctcctggtgattgccttgattataatgaccttcttcatcttaattatatacaataaaaagacccatttatgtgaagtgaaatcaaatttatggtagaataattcacagtcgttagttcccatttgggaaatgtaaagtgggtttgcatggcatcagtgcagaacacaaagggtgaacagtaggttaaatagaaaaaatgaccttagatacgcaaatatttcctaggtaaagaaacctggtatatactttagtcataatctatataaatatgtctattctctatcaatctattttgtgtgtatacacttaattccatctgttctctctgatacttggaaggataccacagaagaataagggaagtaggtcaaatctaaaacaccagaaattttcagtcaccttcttcttaactatttgtgcctaactttccaataaacgtgtgatttcagaggacgtgtaaatatagacttttttttcccagtggttgmatacactttataaatactcaaaaaagagatgagagtctagagattttaaatgctagtttcatattactaatttcatatccctagtcagttatcataaataagatataatgtagaatattaggagctttaaatacttgcacaaggacaagatagccttgaaaagaattcactctttttaatttaagtttaaatttcacttatctgactttgcagactcaatgttcatgttaaggaagaatgtgaaaattttgaatataagaattttgaatattaaaaataggttctatacacttaaatatacagcaagtcctctaataaagacatttcattcaatgttatttagttattatgatgacaaaaaaatgttgattcccagttggggccgctgcctgtgttgtttgcacttctcctcatgtctgcatgggttttctacatgtactctagtttcctcccacattccaaagatgtgcactttaagttaattggtgtgtctacattgtcccagtcgtagcgagtgcacggagtgtgtgactgtgccctccgatggatggcatcctctctggggttggtttttgccttgtgttctcagctgctgggacacccatgcccctgaactggatggaattagcaggtaaataattatcttgtttttattattctttcttaa

SEQ ID NO: 36052 - DNA, 600 bp, Homo sapiens
gcctccccatttattagagacttgtttgctaggggcccagctgagcctccctcctccctttgtaacatgcctgctggtgtaacctcagtgacaggcacccaaggccaggagacaatgtttgtttagcaaaactcacakggtacttcctcattctggccactgttctgagaaccttgccagtgttaactggctgactcctaacaaagctcagacaggtgcccctttcttcccttattacacaggaggagcctgatgcaaaaggaggtgacacagccacagccacagctgtggtcggcagatgccctgatctccagaacctgtgccctcatcacatgggtgagggacgctgagcctgccagtcaaccaccctgaaaacaagggccaggatggatcccacaaaatcacaggggtcctttaaacccttagaagagggaagcagaggggctggttcagagggatgctgtgtaggacagacctgacctgactgccttttcggagagaggataaaaccaggaaatcaggcaggctccagaagctaggaaagtctaagaaacaggttcctcccttcagcctccagaaaggaatgcaatcctgcaagct

SEQ ID NO: 36053 - DNA, 476 bp, Homo sapiens
gagtgacgtgcagttctggtggtgaacacgaggtggcaggcagtagcatccaccggcccttggctggaggcacagatttgcaagcggcagtgatgtcaaagattttgagattgttttgggttacaatgactcatctcagtgggagagagggcagctccctcatttgtcacggggagctcacctcccatggggaaagtcctgactgcagagttccaaagatgtcgaaagagcacatcgaattccattttcctttctacagggtggtggaacaaactcartcactgattggttggacaattcccttccctttgacttgcttaaaggaaagtgttccaaatttgtgtattggcggacctgttaggcccagcccattgcagagggtccacaagagagtgtttcaggttattagctttgacccctggttgggactaagctagaacagcagctgacatttttactctagactgttcactgtt

SEQ ID NO: 36054 - DNA, 1606 bp, Homo sapiens
ttatccagaggaaaaaggttttcttaaaaaaaaaaaggacattttttaaaaagacctcttcttcataattcttattttcacttaatttcataacctttttgtattggatatcttttctgtttttttcttacccagaggatcttcccctcttttttaagagccatttgtttcatgcttttcatctatctttttctcatgccatattactttgaactatattttgttacctattgtttttaaggattcttatgttgctcttctctctctgtagctaatatttctctacccttttttattgtttgtttttttaagaattctacagtattcacttactttttaaaagtactgtgagatgggaactgttagtatccacccaccttttatggatgaggaaactaggtcccaggatctcagttagtaagtgatgaagcaacattctacctcatttagaatgaggtagaatctcacttagtgagagactcacttagttaaaattttttgttggagttctctcacctttttcagatgcacatattaggtacaaaacttgtatagaactatttagagcatttgatgtaaatagatgaatatataaattaggaaaacagagattaatgtagaccataaaaccttgtttcctaatttaaatacatatgtttgtgtatttcacatagtaatgttaaaaaagcaggtactctgattttttacatttggtatggtccagcatacattcatcatgcacaaaattatgaacacattgttcatcagatatgtatagctgatttatataaatgattgtctttctcctttccttagctgtttgaattgggtcctgatggaggagatcatgaaactgatggtgaccttcttgcagagactgatgtattggcttatgactgtgctgctaggtaaataatttgtgcattattcattgtaactcttgcatacttaatattaaaaatttattataaatgaataaacatactttaaaaggaagttttaaatctgctatgaatatcaaatacttgagaaattaaattatatattaagcaatataagtattgctttcaaaaatgctgaattaaaactaatatacttcataaatttatttcataagtcaactgtttcaatattgaagataaaaatggaaatatgcatatattttatacacctttactttcatgcatctcttacggaatacctagtytgctggtgttctagtaataatacagttatttattactcctagcattacaggtaataaataattagcgtcaagtggtcatgtttgaccataattcagattacccatgtactctgacatcatgctgctagaatatatttgataataacacacttggggaggtgactagctttactgaaaccttttgggagtttataaaaattagtatgtttatttatgaaggttcattaagtaagaggatacttacactttatcagtcctctctacgtaatcctaagaattatctcaatattgtgttatgatcagtgttccctggtttgaagcagggaatattattataagaaaaattataaactgagcttcatagtagtaatagtgtgctatgtttcccaacaataacta

SEQ ID NO: 36055 - DNA, 522 bp, Homo sapiens
caaactggaaataaagtaacagggaacagaggagatacaaatcttcctatccctagaggtgcatttcctctcccttttgataatttagcagagctggctcaggagacttgagttgccccaagggaagaacaggctgataccagctactgtgtctctagrgttccccctttctaaaaaggctccttccagaccagggagcttccactcttaaatacacacttagatgttcctggccctctgcataaatgcagagggcaagacgcttccctttgacacatgagcctctgtgcattatgagccagccatgctccctaagttgtgggtctataagatttggggcaatatgcctgtgctctacttttttctgctagcaaatttcctccccaaaaccctgttaaatctagtctgctttgctagtgacgttgtccatgattgctttgcacaacaggaatagaagccaacaatttattatgccacatattcatctgaggaatgaaaagtggattacatttataaaattga

SEQ ID NO: 36056 - DNA, 562 bp, Homo sapiens
gctggtaaggttctaatacagggaaagcctagccaaggtgagaccttgagaggcatagagagatttagcagttgtgtgtgtgtgtattrtcatgtgcattttactggtacaaactgagatgcaaataaatcagaaaataatcctggaggagagggcaagagaaaacagcaaaatacgtagagggaaatagcagagttcctcagagacaggtggccttttgcaattgcagcgtttgtataaaatccaggtgtaagcagcaaaattagtgcatttttaaatttaaatatatctttcttaaacagagttaatttatttcccagctttctggttattggactcatgtttctcctaaaaaataacttagaacctgtagtgggcagaaggaattagtgattctttctagctataaattatttatcaccttattccactctctttaccttcattgggatgcttccaaattgacaaagaaacctatttactgttaattgattaccactctaaattcattgagattgcagcagtaacaagcatctcaagtagttcagctgagattagctgt

SEQ ID NO: 36057 - DNA, 562 bp, Homo sapiens
gctggtaaggttctaatacagggaaagcctagccaaggtgagaccttgagaggcatagagagatttagcagttgtgtgtgtgtgtattgtcatgtgcattttactggtacaaactgagatgcaaataaatcagaaaataatcctggaggagagggcaagagaaaacagcaaaatacgtagagggaaatagcagagttcctcagagacaggtggccttttgcaattgcagcgtttgtataaaatccaggtgtaagcagcaaaattagtgcatttttaaatttaaatatatctttcttaaacagagttaatttatttcccagctttctggttattggactcatgtttctcctaaaaaataacttagaacctgtagtgggcagaaggaattagtgattctttctagctataaattatttatcaccttattccactctctttaccttcattgggatgcttccaaattgayaaagaaacctatttactgttaattgattaccactctaaattcattgagattgcagcagtaacaagcatctcaagtagttcagctgagattagctgt

SEQ ID NO: 36058 - DNA, 1125 bp, Homo sapiens
aggcagagataagaagagcccctgcaagcatgtagaaaggtcctgactggaggttgaaagaactatgtgtgtttgagaaactgaaagaaaaacattctaaaagatagcctttgtgtctccctgcaagattgtaaacttcttgaaggcagggccatatctgtctcattcaccaattcacttagcctaatacatacaaagcctgatatgtaagagtcacgaagtacatatgtaaatcatgccttaattcctgtgaaatgaggtgtgacagccactttgaatattacacattagtacttagtttactcatgctttctcaatagaatagaatatagctgatagtttttacagaaacttgtgtctaaccacctcatatacacatagtttatttgtagtcattgatgcttatctatgcataattttgttgtcttggttcagatttaactttcatttaatgaatccatgacccatttcttctctgtactgtccttccctcccagctttgttttccataggtgttgggtgttctgaaataatatgtggccttaccttgactgacaggtaactcacaaaaataagtrtcttggcacttctctgtctgacctccagggtgcatgtcaaattcaggtctgttcattccctcatcgttctgaggcagaaagtacttggggcagatggcagaagcacaattggctgagacaaacggcaacaagtggcaacacatttacagattctgctccctttcatgttgtgttgaccaaggcaagtcacatagccaggtccaatttcaaagaggcaaagaaatacacttcacgtaggtcagcagtccttaccctttttgtcaccagggactggtttcctggaagataatccacgaggggtggggggggggggcgtggtttcgggatgaaactgttccacctcagatcttcaggcattagttagattctcataggagtgcacaatctagattccccctcatgcagagttcacaatggggttcatgccctgatctgacagaggtggagatcaggtggtaatgctggctagcctgccgctcacctcctgccttgcagcctgcttcctaagaggccacagaccactaccagtccattgtccgggggttgg

SEQ ID NO: 36059 - DNA, 1125 bp, Homo sapiens
aggcagagataagaagagcccctgcaagcatgtagaaaggtcctgactggaggttgaaagaactatgtgtgtttgagaaactgaaagaaaaacattctaaaagatagcctttgtgtctccctgcaagattgtaaacttcttgaaggcagggccatatctgtctcattcaccaattcacttagcctaatacatacaaagcctgatatgtaagagtcacgaagtacatatgtaaatcatgccttaattcctgtgaaatgaggtgtgacagccactttgaatattacacattagtacttagtttactcatgctttctcaatagaatagaatatagctgatagtttttacagaaacttgtgtctaaccacctcatatacacatagtttatttgtagtcattgatgcttatctatgcataattttgttgtcttggttcagatttaactttcatttaatgaatccatgacccatttcttctctgtactgtccttccctcccagctttgttttccataggtgttgggtgttctgaaataatatgtggccttaccttgactgacaggtaactcacaaaaataagtatcttggcacttctctgtctgacctccagggtgcatgtcaaattcagrtctgttcattccctcatcgttctgaggcagaaagtacttggggcagatggcagaagcacaattggctgagacaaacggcaacaagtggcaacacatttacagattctgctccctttcatgttgtgttgaccaaggcaagtcacatagccaggtccaatttcaaagaggcaaagaaatacacttcacgtaggtcagcagtccttaccctttttgtcaccagggactggtttcctggaagataatccacgaggggtggggggggggggcgtggtttcgggatgaaactgttccacctcagatcttcaggcattagttagattctcataggagtgcacaatctagattccccctcatgcagagttcacaatggggttcatgccctgatctgacagaggtggagatcaggtggtaatgctggctagcctgccgctcacctcctgccttgcagcctgcttcctaagaggccacagaccactaccagtccattgtccgggggttgg

SEQ ID NO: 36060 - DNA, 1125 bp, Homo sapiens
aggcagagataagaagagcccctgcaagcatgtagaaaggtcctgactggaggttgaaagaactatgtgtgtttgagaaactgaaagaaaaacattctaaaagatagcctttgtgtctccctgcaagattgtaaacttcttgaaggcagggccatatctgtctcattcaccaattcacttagcctaatacatacaaagcctgatatgtaagagtcacgaagtacatatgtaaatcatgccttaattcctgtgaaatgaggtgtgacagccactttgaatattacacattagtacttagtttactcatgctttctcaatagaatagaatatagctgatagtttttacagaaacttgtgtctaaccacctcatatacacatagtttatttgtagtcattgatgcttatctatgcataattttgttgtcttggttcagatttaactttcatttaatgaatccatgacccatttcttctctgtactgtccttccctcccagctttgttttccataggtgttgggtgttctgaaataatatgtggccttaccttgactgacaggtaactcacaaaaataagtatcttggcacttctctgtctgacctccagggtgcatgtcaaattcaggtctgttcattccctcatcgttctgaggcagaaagtacttggggcagatggcagaagcacaattggctgagacaaacggcaacaagtggcaacacatttacagattctgctccctttcatgttgtgttgaccaaggcaagtcacatagccaggtccaatttcaaagaggcaaagaaatacacttcacgtaggtcagcagtccttaccctttttgtcaccagggactggtttcctggaagataatccacgaggggtggggggggggggcgtggtttcgggatgaaactgttccacctcagatcwtcaggcattagttagattctcataggagtgcacaatctagattccccctcatgcagagttcacaatggggttcatgccctgatctgacagaggtggagatcaggtggtaatgctggctagcctgccgctcacctcctgccttgcagcctgcttcctaagaggccacagaccactaccagtccattgtccgggggttgg

SEQ ID NO: 36061 - DNA, 1125 bp, Homo sapiens
aggcagagataagaagagcccctgcaagcatgtagaaaggtcctgactggaggttgaaagaactatgtgtgtttgagaaactgaaagaaaaacattctaaaagatagcctttgtgtctccctgcaagattgtaaacttcttgaaggcagggccatatctgtctcattcaccaattcacttagcctaatacatacaaagcctgatatgtaagagtcacgaagtacatatgtaaatcatgccttaattcctgtgaaatgaggtgtgacagccactttgaatattacacattagtacttagtttactcatgctttctcaatagaatagaatatagctgatagtttttacagaaacttgtgtctaaccacctcatatacacatagtttatttgtagtcattgatgcttatctatgcataattttgttgtcttggttcagatttaactttcatttaatgaatccatgacccatttcttctctgtactgtccttccctcccagctttgttttccataggtgttgggtgttctgaaataatatgtggccttaccttgactgacaggtaactcacaaaaataagtatcttggcacttctctgtctgacctccagggtgcatgtcaaattcaggtctgttcattccctcatcgttctgaggcagaaagtacttggggcagatggcagaagcacaattggctgagacaaacggcaacaagtggcaacacatttacagattctgctccctttcatgttgtgttgaccaaggcaagtcacatagccaggtccaatttcaaagaggcaaagaaatacacttcacgtaggtcagcagtccttaccctttttgtcaccagggactggtttcctggaagataatccacgaggggtggggggggggggcgtggtttcgggatgaaactgttccacctcagatcttcaggcattagttagattctcataggagtgcacaatctagattccccctcatgcagagttcacaatggggttcatgcmctgatctgacagaggtggagatcaggtggtaatgctggctagcctgccgctcacctcctgccttgcagcctgcttcctaagaggccacagaccactaccagtccattgtccgggggttgg

SEQ ID NO: 36062 - DNA, 554 bp, Homo sapiens
tatgctgaaaaacatcgagcagcgtatttattgctatttctgtgcatcattgcagtgcagacaaatgtgatactaagcaaaggttctcatggttgccttgcccatggagtccaataggactaacttttcactattattaataatgcacatcattgaatctaggtctttctccaagctttttatgccttaggataaactctaaagatcgaaaaacctggtcacagttataagccttttaaagacttacgatctgaatctctagtttgctttccataaatatcgtgctaagttctacttatactagctgtttgcaactgttcatttaaataccacaatcctcaatactaatcattagaatttaaaatattttataaatataatkggaaaacatttaatttgtaatttctttgataacatattttttcattttaattagacatttgtatttttctttaacttgttttgtcatagcattgtcaatttttctataacagtttcaacattttcttaatgatgaatgttgaatgactaccaaccaggttatattttattgc

SEQ ID NO: 36063 - DNA, 466 bp, Homo sapiens
ttgtatgaagaatgtattcttatcctgaggaaacaactggaagatacaatatagccaagagtgtcaaatgaagaagtttatagtaaggtagaactggaaacgatttaaatrtcaggagtgtaggataaacagatcatgctataacaaatgtcatgaagccatttgaattggagatgcacattaatatttaatgtctatagcatatcactgtgtcaaaaagcaggcttctaagcagcatatgtactatgttttgaagtatatatatatatacacactttatatatatatttatatatatatatgaagtatttaaaatatatatatatatatttttttccataggtatgtggaaaaagtctaggacagtccttagttttgttcttaaaatattcaagcttgcttgagtaaagagatctcattgatgggctacgtaagaaattgtaagagaaatctcctgggaatccag

SEQ ID NO: 36064 - DNA, 466 bp, Homo sapiens
ttgtatgaagaatgtattcttatcctgaggaaacaactggaagatacaatatagccaagagtgtcaaatgaagaagtttatagtaaggtagaactggaaacgatttaaatgtcaggagtgtaggataaacagatcatgctataacaaatgtcatgaagccatttgaattggagatgcacattaatatttaatgtctatagcatatcactgtgtcaaaaagcaggcttctaagcagcatatgtactatgttttgaagtatatatatatatacacactttatatatatatttatatatatatatgaagtatttaaaatatatatatatatatttttttccataggtatgtggaaaaagtctrggacagtccttagttttgttcttaaaatattcaagcttgcttgagtaaagagatctcattgatgggctacgtaagaaattgtaagagaaatctcctgggaatccag

SEQ ID NO: 36065 - DNA, 980 bp, Homo sapiens
tccacccccatgacccaaacacctcctactaggccccacctccaatactggggatgaaattttaacataakatttggaaggggcaaatatccaaactatatcaaatggcaagtagagatgagatctgatggaaagcattcctaatatgcattcataaaatgcttcataaaactttttttttaatgtttcagtttcaactgtgtgttagtctgttttgtgttgctgtaatggaatacctgagacttgataatttacaaagaaaagagttttatttggctcatggttctgcaggctgtacaagaagcatggtgccagcatcttcctgaggtcaggacctcaggaggcttttcctcattgtgaaaggtgaacaggaagcagagcaagagagagagaaggaaggtcccagatacattttaacaaccagaactttcatgaacttagagtgggagctcacccattactgtcaggagggcaccaagacattcatgatcgatctgtccacgtgacccaaacacctcccactagtccctacctccaacactggcaatcacagttcaacatgagatttgtaggggacacagagccaaaccatctcacgatgtaagctttcttgggctgaaaagctaggctgtgtgtgataaggagatagtaatctgttgtgttatacttgcctctcacttctcactcacccatgaaccccattttaagaggtacttagaatcctctgtaatgaatgagagccaaaagaccctcttcacatcacactggctttcttatgttgtcctgggattttgatctagaactttgaatctggctttgccactccggctattttccacgctgtttactactctcttcactttgatggatgccttaattcaggttatcggtcttggcctagggcattatacaccatgattctaatttttgattctcaattccaaggtcttccttagatcccaatctatagtactcagtta

SEQ ID NO: 36066 - DNA, 980 bp, Homo sapiens
tccacccccatgacccaaacacctcctactaggccccacctccaatactggggatgaaattttaacataatatttggaaggggcaaatatccaaactatatcaaatggcaagtagagatgagatctgatggaaagcattcctaatatgcattcataaaatgcttcataaaactttttttttaatgtttcagtttcaactgtgtgttagtctgttttgtgttgctrtaatggaatacctgagacttgataatttacaaagaaaagagttttatttggctcatggttctgcaggctgtacaagaagcatggtgccagcatcttcctgaggtcaggacctcaggaggcttttcctcattgtgaaaggtgaacaggaagcagagcaagagagagagaaggaaggtcccagatacattttaacaaccagaactttcatgaacttagagtgggagctcacccattactgtcaggagggcaccaagacattcatgatcgatctgtccacgtgacccaaacacctcccactagtccctacctccaacactggcaatcacagttcaacatgagatttgtaggggacacagagccaaaccatctcacgatgtaagctttcttgggctgaaaagctaggctgtgtgtgataaggagatagtaatctgttgtgttatacttgcctctcacttctcactcacccatgaaccccattttaagaggtacttagaatcctctgtaatgaatgagagccaaaagaccctcttcacatcacactggctttcttatgttgtcctgggattttgatctagaactttgaatctggctttgccactccggctattttccacgctgtttactactctcttcactttgatggatgccttaattcaggttatcggtcttggcctagggcattatacaccatgattctaatttttgattctcaattccaaggtcttccttagatcccaatctatagtactcagtta

SEQ ID NO: 36067 - DNA, 980 bp, Homo sapiens
tccacccccatgacccaaacacctcctactaggccccacctccaatactggggatgaaattttaacataatatttggaaggggcaaatatccaaactatatcaaatggcaagtagagatgagatctgatggaaagcattcctaatatgcattcataaaatgcttcataaaactttttttttaatgtttcagtttcaactgtgtgttagtctgttttgtgttgctgtaatggaatacctgagacttgataatttacaaagaaaagagttttatttggctcatggttctgcaggctgtacaagaagcatggtgccagcatcttcctgaggtcaggacctcaggargcttttcctcattgtgaaaggtgaacaggaagcagagcaagagagagagaaggaaggtcccagatacattttaacaaccagaactttcatgaacttagagtgggagctcacccattactgtcaggagggcaccaagacattcatgatcgatctgtccacgtgacccaaacacctcccactagtccctacctccaacactggcaatcacagttcaacatgagatttgtaggggacacagagccaaaccatctcacgatgtaagctttcttgggctgaaaagctaggctgtgtgtgataaggagatagtaatctgttgtgttatacttgcctctcacttctcactcacccatgaaccccattttaagaggtacttagaatcctctgtaatgaatgagagccaaaagaccctcttcacatcacactggctttcttatgttgtcctgggattttgatctagaactttgaatctggctttgccactccggctattttccacgctgtttactactctcttcactttgatggatgccttaattcaggttatcggtcttggcctagggcattatacaccatgattctaatttttgattctcaattccaaggtcttccttagatcccaatctatagtactcagtta

SEQ ID NO: 36068 - DNA, 980 bp, Homo sapiens
tccacccccatgacccaaacacctcctactaggccccacctccaatactggggatgaaattttaacataatatttggaaggggcaaatatccaaactatatcaaatggcaagtagagatgagatctgatggaaagcattcctaatatgcattcataaaatgcttcataaaactttttttttaatgtttcagtttcaactgtgtgttagtctgttttgtgttgctgtaatggaatacctgagacttgataatttacaaagaaaagagttttatttggctcatggttctgcaggctgtacaagaagcatggtgccagcatcttcctgaggtcaggacctcaggaggcttttcctcattgtgaaaggtgaacaggaagcagagcaagagagagagaaggaaggtcccagatacattttaacaaccagaactttcatgaacttagagtgggagctcacccattactgtcaggagggcaccaagacattcatgatcgatctgtccacgtgacccaaacacctcccactagtccctacctccaacactggcaatcacagttcaacatgagatttktaggggacacagagccaaaccatctcacgatgtaagctttcttgggctgaaaagctaggctgtgtgtgataaggagatagtaatctgttgtgttatacttgcctctcacttctcactcacccatgaaccccattttaagaggtacttagaatcctctgtaatgaatgagagccaaaagaccctcttcacatcacactggctttcttatgttgtcctgggattttgatctagaactttgaatctggctttgccactccggctattttccacgctgtttactactctcttcactttgatggatgccttaattcaggttatcggtcttggcctagggcattatacaccatgattctaatttttgattctcaattccaaggtcttccttagatcccaatctatagtactcagtta

SEQ ID NO: 36069 - DNA, 746 bp, Homo sapiens
taagaaaacttttgttgaacacaattattttttataaaaatgcgttatgatccaattatcagtaattttctaaatttccattaaaattcacacaaaacagctatttcactggtatttagtgatatgagtttcatccagtatgccatggttgcacacaccacatgtactatcacagtagcatagatatgcagatattatcttgttcatcatcaggaaattacattaaatgatatctgctcttacagcatttggaaaacataactgtgaaatagaaaaaaaaagaamtacaatctgagtaagaaccaaaatctgtaattgcaagcaccaaaccaaattaattaatatatttagaaaacactttattgatgactattttatctgtttattatatgaagctttgcattttacaactaaactgcatattgctttaaatgtataaactggtgtgggtatgtaatataggtgtgggtatgtaatataggtgtgggtaatggcagcagaatgttgcttccactttgcatttactgggatgaggttacagctaggttagggcttcccctgtgttgcctcaccacagttctcatacagacctctattacacctgatatacattgctgtttacttctctgcctctccaccagtctgtaaactcataaatgtcagggctgggttgtttgtttgtttgttttaatctctgtgtgttggcatatgccatctgcccaataaatgtttgttgatggaatgga

SEQ ID NO: 36070 - DNA, 746 bp, Homo sapiens
taagaaaacttttgttgaacacaattattttttataaaaatgcgttatgatccaattatcagtaattttctaaatttccattaaaattcacacaaaacagctatttcactggtatttagtgatatgagtttcatccagtatgccatggttgcacacaccacatgtactatcacagtagcatagatatgcagatattatcttgttcatcatcaggaaattacattaaatgatatctgctcttacagcatttggaaaacataactgtgaaatagaaaaaaaaagaactacaatctgagtaagaaccaaaatctgtaattgcaagcaycaaaccaaattaattaatatatttagaaaacactttattgatgactattttatctgtttattatatgaagctttgcattttacaactaaactgcatattgctttaaatgtataaactggtgtgggtatgtaatataggtgtgggtatgtaatataggtgtgggtaatggcagcagaatgttgcttccactttgcatttactgggatgaggttacagctaggttagggcttcccctgtgttgcctcaccacagttctcatacagacctctattacacctgatatacattgctgtttacttctctgcctctccaccagtctgtaaactcataaatgtcagggctgggttgtttgtttgtttgttttaatctctgtgtgttggcatatgccatctgcccaataaatgtttgttgatggaatgga

SEQ ID NO: 36071 - DNA, 626 bp, Homo sapiens
atggtcgttttctttttctatctttccaatcacaggcagacagcagacctgttagccagtgaaatacattgaactaaaacrgaaattctgaagggaatttgtcacattacccatataaatctgtgcatcacaaatcatgtttttcacaaagctgatactgtctttgaatcaaaaccacttacagcactcctgtgttaaggccacgctgttagcatttccatgcactgtgccaaatatggtcgcccatccactagtgtcacctgtgaaatagtgattgagatgtgtcacttattctagaaactaaataccatctgacaaaatttaacaatttggtaatgattttaaactaaaatatgtttaagtaatagaattattgatattttaaatacatagtaagagagaaaaagttaggcaaacatctgcaaggtgtcccttttttacatgaaaaatactccaaatgtatgtatcataaaatttgcaatgcaagtatataattattttacataaatataaatgtcttggaaaatatcatctatttctaatacagacattgtccatgtttgactttaattgtgaggacctctgaagaaaatatctgaattttgtttttgtcacgtgcatactgc

SEQ ID NO: 36072 - DNA, 567 bp, Homo sapiens
  misc_feature (1)...(567): n = A,T,C or G
tcaccaaatactggccaccactgctgcgtttctcctcggaccccagatggtgccaccatacagctctcactgctgagctgctatacctgccccaggatgggctcccagagttcctcttcattggatcacaagctcccaattttcagtccagggaggagtttctgattagaagtgccttaggtgtaggcattctacttagcagcaagagtcaggaacctgacagcaggaagcaggctctgcctcccagtaatgggcatttctggacatttctcaaacgtgggaagggacygcagacattcaaaaaagatgggtgctaaatacccatgtagcactccctttagatgcccaatataacatacagattaatgcttgggagaggaggaggtaagaagtggctctatttcaatcatgtaaccatcttcncctaccacccaaaatgtgcttacctcttctccaaataagacaannnnnnnnnnnnnnnnnnnnnnnnnnnnnnnnnnnnnnnnnnnnnnnnnnnnnnnnnnnnnnnnnnnnnnnnnnnnnnnnnnnnnnnnnnnnnnnnnnnna

SEQ ID NO: 36073 - DNA, 567 bp, Homo sapiens
  misc_feature (1)...(567): n = A,T,C or G
tcaccaaatactggccaccactgctgcgtttctcctcggaccccagatggtgccaccatacagctctcactgctgagctgctatacctgccccaggatgggctcccagagttcctcttcattggatcacaagctcccaattttcagtccagggaggagtttctgattagaagtgccttaggtgtaggcattctacttagcagcaagagtcaggaacctgacagcaggaagcaggctctgcctcccagtaatgggcatttctggacatttctcaaacgtgggaagggaccgcagacattcaaaaaagatgggtgctaaatacccatgtagcactccctttagatgcccaatataacatacagattaatgcttgggagaggaggargtaagaagtggctctatttcaatcatgtaaccatcttcncctaccacccaaaatgtgcttacctcttctccaaataagacaannnnnnnnnnnnnnnnnnnnnnnnnnnnnnnnnnnnnnnnnnnnnnnnnnnnnnnnnnnnnnnnnnnnnnnnnnnnnnnnnnnnnnnnnnnnnnnnnnnna

SEQ ID NO: 36074 - DNA, 749 bp, Homo sapiens
tttgtcaaggttaagtctgtcccaggcactcttwaaggcactagggatataaagatataagacactcaaggagttaatagtataatgaagtagaagtaatgattaaacagtatatgaagtatcacaagatggatcatgaggaatactctaggagaatgtaggagagatacctaacccaagtttgaggttcaagaaggacaaagaatgagcaggaataacacaggtaaagatggggaggggaagagcgttctagcagtaggagcaacatgagcaagggcctaggtgtgcatcccataaggcttggtctggctgggcttgaatctgagtaggagtagaaggagacaagcctaggaggtgagtagtggtgggtcctgaagagtcatacatgtcccttgaggaatttggactttatgctgaggtcaaaaaaaaaacaaacccatcaagggtttaggtagagaataacacaatcaaattgatatttcagaaagtggactggcagcaatgaagggaataaattctcaagggtccaggatgtcggaagttgctatggtttggatgtggtttgttcctccccaagaactcgtgttaaaatttggtctgcaatgtggtattgagatgtgatgggacctctaagacatgtttgggtcacaggggctctgcctttataaaggaattaatgttgttcttacaggagtgagttagatctcatgggaggggtgtagttatcatgacagtgggttgttacaaaa

SEQ ID NO: 36075 - DNA, 749 bp, Homo sapiens
tttgtcaaggttaagtctgtcccaggcactcttaaaggcactagggatataaagatataagacactcaaggagttaatagtataatgaagtagaagtaatgattaaacagtatatgaagtatcacaagatggatcatgaggaatactctaggagaatgtaggagagatacctaacccaagtttgaggttcaagaaggacaaagaatgagcaggaataacacaggtaaagatggggaggggaagagcgttctagcagtaggagcaacatgagcaagggcctaggtgtgcatcccataaggcttggtctggctgggcttgaatctgagtaggagtagarggagacaagcctaggaggtgagtagtggtgggtcctgaagagtcatacatgtcccttgaggaatttggactttatgctgaggtcaaaaaaaaaacaaacccatcaagggtttaggtagagaataacacaatcaaattgatatttcagaaagtggactggcagcaatgaagggaataaattctcaagggtccaggatgtcggaagttgctatggtttggatgtggtttgttcctccccaagaactcgtgttaaaatttggtctgcaatgtggtattgagatgtgatgggacctctaagacatgtttgggtcacaggggctctgcctttataaaggaattaatgttgttcttacaggagtgagttagatctcatgggaggggtgtagttatcatgacagtgggttgttacaaaa

SEQ ID NO: 36076 - DNA, 749 bp, Homo sapiens
tttgtcaaggttaagtctgtcccaggcactcttaaaggcactagggatataaagatataagacactcaaggagttaatagtataatgaagtagaagtaatgattaaacagtatatgaagtatcacaagatggatcatgaggaatactctaggagaatgtaggagagatacctaacccaagtttgaggttcaagaaggacaaagaatgagcaggaataacacaggtaaagatggggaggggaagagcgttctagcagtaggagcaacatgagcaagggcctaggtgtgcatcccataaggcttggtctggctgggcttgaatctgagtaggagtagaaggagacaagcctaggaggtgagtagtggtgggtcctgaagagtcatacatgtcccttgargaatttggactttatgctgaggtcaaaaaaaaaacaaacccatcaagggtttaggtagagaataacacaatcaaattgatatttcagaaagtggactggcagcaatgaagggaataaattctcaagggtccaggatgtcggaagttgctatggtttggatgtggtttgttcctccccaagaactcgtgttaaaatttggtctgcaatgtggtattgagatgtgatgggacctctaagacatgtttgggtcacaggggctctgcctttataaaggaattaatgttgttcttacaggagtgagttagatctcatgggaggggtgtagttatcatgacagtgggttgttacaaaa

SEQ ID NO: 36077 - DNA, 749 bp, Homo sapiens
tttgtcaaggttaagtctgtcccaggcactcttaaaggcactagggatataaagatataagacactcaaggagttaatagtataatgaagtagaagtaatgattaaacagtatatgaagtatcacaagatggatcatgaggaatactctaggagaatgtaggagagatacctaacccaagtttgaggttcaagaaggacaaagaatgagcaggaataacacaggtaaagatggggaggggaagagcgttctagcagtaggagcaacatgagcaagggcctaggtgtgcatcccataaggcttggtctggctgggcttgaatctgagtaggagtagaaggagacaagcctaggaggtgagtagtggtgggtcctgaagagtcatacatgtcccttgaggaatttggactttatgctgaggtcaaaaaaaaaamaaacccatcaagggtttaggtagagaataacacaatcaaattgatatttcagaaagtggactggcagcaatgaagggaataaattctcaagggtccaggatgtcggaagttgctatggtttggatgtggtttgttcctccccaagaactcgtgttaaaatttggtctgcaatgtggtattgagatgtgatgggacctctaagacatgtttgggtcacaggggctctgcctttataaaggaattaatgttgttcttacaggagtgagttagatctcatgggaggggtgtagttatcatgacagtgggttgttacaaaa

SEQ ID NO: 36078 - DNA, 556 bp, Homo sapiens
gacccattttcagcaaggctgcttcaacagttcttcttagaaattgatgctttggaggtgaatatctcagaaatagctttttcaggtggtgttctgttgaaagtgttgttcaggccgggccgaatgactcaagcctgtaatcccagcactctgggaggccgaagccggcagattgcctgagttcaagagtttgagaccagccggggcaacatggcaaaaccctgtctctacagaaaacacacrcacacacaaaaatgagtggtgtggtggtatgcgcctgtggtcctagctacttgggaggctagggtggatctcttgagcccaggaagtcgagaaggcagtaagctgagatcgtgccactacactacagtctgggtgacaaagtgacaccctgtctcaaaaaaaagaaagaaagaaaaagattgttcaagttttcttgggatttatttgaacattttaattccaacgcatctaatttcctgggttctttatttgaatctttatcttcgtaggtatttaaatgtaatcattatttcctttcagaaaaattattcct

SEQ ID NO: 36079 - DNA, 808 bp, Homo sapiens
caatcaccttttcctacccgcttttaacactgagaaaagtctgcagagtgacagtggcccatttttaccagcaaagacattgaacctggcgtgtacagctttggtggttggtacctgtcaccatctgctcttctgtcttgatgaccatatgtcttggactgcaccctgagatgtgggctgctcgtgctgccccagtactgaacacagctacttgagcatagtaggtgttttgaaaatatttaacctgaattgagaaaagatagtcagcagtggcccaaagataacaacatacatcaaaagtcatgtacaagattcagccagtcaccaagatgctcccaatattcaggggcttggtacctcactaatcaaaactgaaatgtcacccgattggtttttctctgaatgttttagagcagaatagactcagccatgggaagagacatttgagtggactctattcaggttgattggagtctcctccaggttaatcattccacttaagtcaatgagtgaaattttatacacctgagactctagcctatggcaattcctggaaatcaagtggtttttttgatggggagccgggggatggtcagtgggatgcaacttgctgatgatgagagatgaggtgtaagatattatcaggcaaacaccaacgaaacaggctttactataactcagatcaccgcgctttttgagtgtgtcagtgagtaatccataatcacatttatagatacttctttcacatttataataatgtccccaacataaacatgtaawcatgatcaacatatatgcttagcagtta

SEQ ID NO: 36080 - DNA, 479 bp, Homo sapiens
cagatgccttttgccccttgcctcagacactgtccactccttccacgaagctctcctgtgggcctcctgagcacctgctccactgaccgcctggctgccggctgccattcctgccccmtctccttggcctccttcttctccttcacttatggcgagttttcactgccttccattggaagctatcttttccaccccatggcttccctcccatccagacctctcttcctggactctgcagagagctccaattcgaactgtccatgcagggtctgatcatcctcccctcttgccaagcttctgacaccagcaaatgtcactcctatggaggcctgaggcaggacctctgcctctcccatccccctgtcccaaacggccaagtccaagctccccacactatcccttcctctccagctgcatagccataggcccagattcccccagcatgtgacctactcggagggtctctgtgcctagcctct

SEQ ID NO: 36081 - DNA, 361 bp, Homo sapiens
gtgtgaccactcccatgagaacggaaccaaatcacagtcccaagtgagtgctgggagaatggattctagcagagaaatgaggcccagcccataaaacrtaaagcaagtgtttctgtggttggcacaaggtttaagtggaaccatctgggtctgagtctttggtttctacttaacaacttggagccacctgcttaacctgggcctcggagacatggcagtgcttctgcctagagatgtggggagagctccacggaagaacaccagccagccatcagcaccggctgccatgcagcagacacgggagagctccacggaagaacaccagccagccatcagcaccggctgccatgcagcagacacg

SEQ ID NO: 36082 - DNA, 361 bp, Homo sapiens
gtgtgaccactcccatgagaacggaaccaaatcacagtcccaagtgagtgctgggagaatggattctagcagagaaatgaggcccagcccataaaacgtaaagcaagtgtttctgtggttggcacaaggtttaagyggaaccatctgggtctgagtctttggtttctacttaacaacttggagccacctgcttaacctgggcctcggagacatggcagtgcttctgcctagagatgtggggagagctccacggaagaacaccagccagccatcagcaccggctgccatgcagcagacacgggagagctccacggaagaacaccagccagccatcagcaccggctgccatgcagcagacacg

SEQ ID NO: 36083 - DNA, 1244 bp, Homo sapiens
gcattaaatttgcaaagatttaaagaatatttgaccagagatagtactcaggggcttctgctcctcatgtgtcatttaaagcagtataacctttctaccctttggtttagtaattctgcttttatgactctgttttttaggaagtgtgatttgataaaggttcaataagagaatgaggctgggtgtggtggctcatgcctgtaatcccagcactttgggaggccaaggcaggtggatcacctgaggtcaggaattgaagaccagcctgaccaacatggagaagccccatctctactaaaaatacaaaattagctgggcgtggtggtacatgcctgtaatccaggctacttgggaggctgaggcaggagaatcgcttgaacctgggaggcagagattgcggtgagccaagatcgcacattgcatccagcctgggcaacaagagcaaaactccgtctcaaaaaaaaaaaaaagagaatgaacaattatatctataygatgatcatcatgtcactaattaaaattatctttatgaagaattaatgagttgcgtgcagtggctcatacctgtaatcccagcactttgggaggctgtggtgggagaatcacttgaggtcaggagttagagaccagcctgatccgcgcagggagaccccatctctacagataattttttagaattagccaggtatggtggcacctgcctgtggttccagctacttggaaggctgaggtgggaggattgcttgagctggggaggttgaggctgcagtgagctgtgatcatgccactgcactccagcgtaggcaacagagtaagaccctatctctaaaaaattttaaaaaattttttaaaaagaaaaattagcagtaaaatgggaaataatcataaaagagtaacaatacaaagtgaaaagaataacaatacaaattatgcagtttttctgttttaaactatatagaaacattgaaggaaatacacagaattgtgtattggccattagttaacttctaggtaatatgattttgagtaattttgtattttataattatctgttgaaaaaatagtttcgtaaaagtgacagtgtgacctcatggtaaaaagccaggatgtagttaattagtgaattcagaattctgagaatagcgtaatcagtgagagtatggtattggagaaagctctggagattgttggaattgaactctaggccctgttgaatttatgtttgtgatagtgagggtgctgtg

SEQ ID NO: 36084 - DNA, 1244 bp, Homo sapiens
gcattaaatttgcaaagatttaaagaatatttgaccagagatagtactcaggggcttctgctcctcatgtgtcatttaaagcagtataacctttctaccctttggtttagtaattctgcttttatgactctgttttttaggaagtgtgatttgataaaggttcaataagagaatgaggctgggtgtggtggctcatgcctgtaatcccagcactttgggaggccaaggcaggtggatcacctgaggtcaggaattgaagaccagcctgaccaacatggagaagccccatctctactaaaaatacaaaattagctgggcgtggtggtacatgcctgtaatccaggctacttgggaggctgaggcaggagaatcgcttgaacctgggaggcagagattgcggtgagccaagatcgcacattgcatccagcctgggcaacaagagcaaaactccgtctcaaaaaaaaaaaaaagagaatgaacaattatatctatatgatgatcatcatgtcactaattaaaattatctttatgaagaattaatgagttgcgtgcagtggctcatacctgtaatcccagcactttgggaggctgtggtgggagaatcacttgaggtcaggagttagagaccagcctgatccgcgcagggagaccccatctctacagataattttttagaattagccaggtatggtggcacctgcctgtggttccagctacttggaaggctgaggtgggaggattgcttgagctggggaggttgaggctgcagtgagctgtgatcatgccactgcactccagcgtaggcaacagagtaagaccctatctctaaaaaattttaaaaaattttttaaaaagaaaaattagcagtaaaatgggaaataatcataaaagagtaacaatacaaagtgaaaagaataacaatacaaattatgcagtttttctgttttaaactatatagaaacattgaaggaaatacacagaattgtgtattggccattagttaacttctaggtaatatgattttgagtaattttgtattttataattatctgttgaaaaaatagtttcgtaaaagtgacagtgtgacctcrtggtaaaaagccaggatgtagttaattagtgaattcagaattctgagaatagcgtaatcagtgagagtatggtattggagaaagctctggagattgttggaattgaactctaggccctgttgaatttatgtttgtgatagtgagggtgctgtg

SEQ ID NO: 36085 - DNA, 566 bp, Homo sapiens
gagatatatgcagtttctaccttcctggagacttgaactccactaagttgagcttccactgtacttgtggcctcaatcctgaggccagggaccagccaagcatccccacctcgtggcttttctccctgcttggcttctttctccacaggccaaggagacttgggtaatttggcctgaatttacgcatgtaattcatttgagttctatatacctcttctgcccattcaatagatcctccctctgagtaacacagacccctcagcataagagatacgatttatgtagagaagtgagaatgtgttttaattgacatcaagttgaaagggtaggamataaaactgtataaaatctgattacagttatgtgtaatatatgcatgcattctaaaaagattgagagggaaattgttatattactatatatattataaatatgttaacagttccgtgcttgttagttttccccattgaacttgaacatagttaaaatgtaattaaataactgaatttagttgacatgacatgtttgggtgaacataggatgccttcaagttttcacaacttttt

SEQ ID NO: 36086 - DNA, 560 bp, Homo sapiens
caactaacctagtcttgtattgagcaactctacacttctgttttcacttccttattcaagttggcctggcctagttccagttaatacctttttgaaacttttgagttttcctattgattccctctttttcctgcctcatagacactggtaccttccacagcttgagtttgtcatttacccgtaccagtttatgttttgacatttaaggggatagatagtctgccacttacttttgttagaatagttgttctttttttttttttttttggcttttcaatttagctgctatatattttaatattggaagtcaaggatatcaaaaactatcctgctacgcccactgcccactcagaactctgtcccttggattgcrtttgttaatttctaagtagttaagcttgttttggccatatgtgaaattatagttttaattttattttattggaatatgttaatgtaccttataaaagctaccatttagatttttaaaatactttctctgtacaatgtttattgtcttctttttaaaatgttctatggattaaaaatatattttaaat

SEQ ID NO: 36087 - DNA, 560 bp, Homo sapiens
agcatcacctgtttaatatctgcatagactgactggcttgcctctactccttggccccagcacccaaaggcaggctgctgggcttctcactcattgaaacagatgtgggggctgggtgcagtggatcacacctgtaatcccagcattttgggaggctaaggcaggcagatgacttgaggccaagagttcgagagcagcctggccaacatggtgaaaccctgtctctactaaaaatacacaaattagccgggcatggtggtgcacgcctgtaatcccagctacctgagaggctgaagcaggagaatcgcttgaacccgagatggggagattgcagtgagctgagatcgcaccactgccctccagcctgggtgacagagagagactccgtctaaaaacaaaacaaaacaaaacaaaacacagtgtggggatgtaaccggacagaatgaagaccaacccttgagaacagccagaagtrccaggaccctagttaggagaagttaggagacgtgggagccttcttctcaaagaagtcagcagtttgtgcatttccaatatggaca

SEQ ID NO: 36088 - DNA, 560 bp, Homo sapiens
agcatcacctgtttaatatctgcatagactgactggcttgcctctactccttggccccagcacccaaaggcaggctgctgggcttctcactcattgaaacagatgtgggggctgggtgcagtggatcacacctgtaatcccagcattttgggaggctaaggcaggcagatgacttgaggccaagagttcgagagcagcctggccaacatggtgaaaccctgtctctactaaaaatacacaaattagccgggcatggtggtgcacgcctgtaatcccagctacctgagaggctgaagcaggagaatcgcttgaacccgagatggggagattgcagtgagctgagatcgcaccactgccctccagcctgggtgacagagagagactccgtctaaaaacaaaacaaaacaaaacaaaacacagtgtggggatgtaaccggacagaatgaagaccaacccttgagaacagccagaagtgccaggaccctagttaggagaagttaggagacktgggagccttcttctcaaagaagtcagcagtttgtgcatttccaatatggaca

SEQ ID NO: 36089 - DNA, 560 bp, Homo sapiens
agcatcacctgtttaatatctgcatagactgactggcttgcctctactccttggccccagcacccaaaggcaggctgctgggcttctcactcattgaaacagatgtgggggctgggtgcagtggatcacacctgtaatcccagcattttgggaggctaaggcaggcagatgacttgaggccaagagttcgagagcagcctggccaacatggtgaaaccctgtctctactaaaaatacacaaattagccgggcatggtggtgcacgcctgtaatcccagctacctgagaggctgaagcaggagaatcgcttgaacccgagatggggagattgcagtgagctgagatcgcaccactgccctccagcctgggtgacagagagagactccgtctaaaaacaaaacaaaacaaaacaaaacacagtgtggggatgtaaccggacagaatgaagaccaacccttgagaacagccagaagtgccaggaccctagttaggagaagttaggagacgtgggagccttcttctcaaagaagtcagcagtttgtgcatttccaatrtggaca

SEQ ID NO: 36090 - DNA, 527 bp, Homo sapiens
tgagagtagccaatgaaagggagatggtatcacctgaattatataaggtacaacagaatcttcctaytgggtcttctgcagaatctgtaaatgtgtcctaagagagaaatagttagctttgaatatctgccaatcccagaaagcttgaaactatttaacaaagcttagagagccagtatgtgaaaatggagactaaattcaactgcctcttttttttcttttaccataacttgttttctcaactttcccactcccctcctgctataccctccagtagaagaaattgatgctctatgccatgtccatgttttgctgaatttgctccctttttttcctctgcctaggatgtttgtaccccacctcttctggttcactcagtcctctagaaaaccatcagcaccgaggtcaatgaataacataggggcctttaatctgtgttgagagaccttagaatgactatcacaaaggccatttatccaatgtgatcagtctagaaatggaaccattccattaaagtagggaatcat

SEQ ID NO: 36091 - DNA, 1071 bp, Homo sapiens
aaatttattttacagtggcatttcttcttacttaaaatttccacttggggagatttaaaagccgtgttatttggcaactggcaaaattatctgtcaatatatgaatcacattctcaagggataatttaaaaaataataatatattgattgggaaaaaaataaaattaaactaatgataaaacagaagcagagaagttagtatgttgcttcttgtttattgtattatccattgaattttggaaaacttaagttgtgagtatcaaacctgaatcttagaagaaaataattagaaaaggttagggagatgatataaaagagaagactcatatatagcaatttacccattgttctgtactatttaagaaaaagtaattttgttaaagtactggtcgtggtccttctttatactaatcaactggaggggacaaatctttccagtgttcagaacaatgtagaaaaataaaatatctgaaaacatcactcttcataaaacattccgtatgtcagttacacagtgtagttctgagattgtctcacacttgtttttctgccacaaaaatacattatgtttaatctttgttttcttttttgtttgaactcagatattgtgatcacccagttattttcttttcacttaaattagaagcatagatgcaggggcttccatgacagttaaatggatgagttacaatatcagttagaaaaatatctggacattatgataaatgattttataattcctcagttaaaggaaataatttactctctgaacaatatctttattaccttagggcatttaaatttaggtgggaactaaggtaaatttccttactttccatggaaaagtaagcccactggtagttgtaaatttctatataaatgttaaacaataagagtcggctaaatggctagcaagtgttggaactttataatgcaatgaatttggcatatgaaaaaaaattctacaccccttggaagtgtgttttatgcttgttatagctgcataaaatacagattgaaaataaactgaacattttaactttggcaacaggggagaacrtatccattcct

SEQ ID NO: 36092 - DNA, 539 bp, Homo sapiens
gggkacaactacaccgtcttaatcatcactgcacctctagcactggcccagtgccagacacttagcaggtgctcagtcatcacttactgagtcaataaaacctgtgcctatggtctggagctccatgtccatgttctaatgcctgtgtgggctgggtgcagtggctcctgcctgaaatctcagcactttgggaggccgaggtgggcagatcacctgaggtcaggagttcgagaccagcctggccaacatggtgaaaccccgtctctactaaaaatgcaaaaactagctgggcatggtggtacacccctgcaatcccagctatttgggagactgaggtgggagaattgcttgaacctgggaggcagagactgcagtaagccaggatcatgccactgcactccaacctgggtgacagagcaagactccgtctcaaaataaaaaataaaaaataaaaataaataaacgcctgtgtagtaatttatttattcaataagcaactgatgagcaaccactgcatttcaggctctgtgctagacata

SEQ ID NO: 36093 - DNA, 1224 bp, Homo sapiens
tcaagcaatataaaagatcatttcaacaaaagattgtctcctgactactgaaccctctcatcccacaccaccagtgccccaattttcctttgtggcagtttggattagctacacctgaagcaaaacattattccatagttttctactttttttgtcttgccatttttaaaatcgttttcgcaatgctccagagctctgtttgatgagctgaagcaaaatgctttgagcttctccttgaggtaggtcctccctgagtgactttcctgccattaaatcctaaaggcttatttaattgctccaaatcaactcttcaagcagaagcctaatggtctagctgctgagcatttctaagggccaagtgtattgataaatattatagaataaaaattggggctgtcactaattgagtgtaatgagtactgctcacttcctgagtccatagattcctagctgaaataccttgtgctctcattcttccgacacttacactgcaatgtcataggaacctccagtctccattagcctcatttcttctctgctcagctcaaacctattcctaaaagtcctttcagaagcatcctaacgtcctcatcccttacttattgcaccaaatgaaccctacatcaagcctatcatctatgtttcctactaatacagatggctgagcccagtgaaacagcatcacataactgcagattgccattacaaattcctggtttccagtaggccaagtccttaatgccacttgtcaatccttttccctatagtattatttagaaaacagatttggctggctgtcacaataacaacaaccgtggttataccatcatcataactggtagaaacaatacactccatttctttttcccatagtagttgaaagggcatcccatgctagtgtggtggctcagttccttgaggacatccagggacacagattccttctattttgttactccgccttccccagtgaatgaccctcatttggcccatagatgctccattgctttgtccacattccaggcagcaggatggaggaagagaggaaatrggctgcttgccccgggctgccatctggaagttgcacttatcacctgtgcttacatcccactggccagaatttactcatatggccacactcaactgcaggggtaggtgagaaagtcttaaaaaaataaaatcaactattaaaaaaattgaagtgtaaaatatatactgaaaagt

SEQ ID NO: 36094 - DNA, 1182 bp, Homo sapiens
tatctgatcctaccattctcctgttaaaaagcaccagaattccctgtagcatgcttgtaaatgctaagaatttttttcttctcttcccttctcgggaaattgtgtgaatgaaaaacaagccaaaaaaaatagaaaaatatggaaaagttcctaaaaaaggcggctcaaataaccactgtttatccacccagagaaaccaatcactaccaacatttttgtgtatttcttttttctaaataaacttttttaaataattcatttataaatatatcttatattctgcctatttcaatgaatggtatactccaagcattttcatgttattaagtacttaatgtttttaaagttttgaggtagcaagagtaatatccaacttttatttgaatcctaagttgcatttgaactttacttgcaatactttcttatgccataatttgaaaaaaaaaaaacagatttagaacactctatgtgtagattttatgagctggttttcaacagcttcaaagtaactgctaaaacaaaaacaaaaacaaaatctggaggcattttccctctagtcatcagtaaatctgctacagsccttcacagttctaattacataagttctatggtaatgtgctattattatgaaaattcaaacttctataatcaggttaaatctcatctgaccatcacccacagttcccaaacccttatgcactctttgatgtgactactcaaattagcttggacttatttatagatattttactctgcatatctttacatattaaagtccttacaaaaaatatagcattagtttgaatttttaaagagattcaagcattctgcaacttgcttgaggatattttctgttaccaggacataaatctacttcattcttggtacctgcttcatagtgttccatactgtggcaaagccctttctgcttaagctcaacctgctatacaagagactctcccacagtacatgaaatctacaatatattcatgactgtctatttgaaaactggcatcaactgacaaaatgtgggatatcttcagaagaaagttaacatcttcctaaataaaaaataataatgcagaatttgataacctgcttttcataaaaacaaaatgtagaaaaattcctattttttttgaaaactgctaatgaaaactcttacttgattgggtaaaaaag

SEQ ID NO: 36095 - DNA, 1083 bp, Homo sapiens
tatccacaaagcagaatgtgagcccctctatgtggaagctttttttttccttaaataatttaatgtcctattcagcattattgatttgctttttatcatagtcaaactattgttttccatctctagtttgttagaaaatgatactttttgccacaaggattcaagtgggcacagtaacagcaacatgccatctttcacatgtttctgaaagaagaggtgacctgccagcttcctttgagctgtgcttgctttagggccgacagtttttttatgttcatctgttcatgtcatgttttccctggccccttcatgaccaatacacrtttataaatgctctagccatggaagatgaacaaggaccatgggctctacatctcaggtgtgctagtgaaatgagccagccccaagcagctcccatgagagctacaggttctaaaagattgcagagcggcatgcttggtcttgcagccgactttctggtgaaaagcattaactaagtttcctggtggaatcatgaactacacagcccaggtatgacagtagccatgtgttctctggtttgttttcttccagactttcgaccagtttgttacgaggagccccagcactggtgctcggtcgcctactatgaactgaacaaccgagttggggagacattccaggcttcctcccgaagtgtgctcatagatgggttcaccgacccttcaaataacaggaacagattctgtcttggacttctttctaatgtaaacagaaactcaacgatagaaaataccaggagacatataggaaagggtaagagcaaagatgttattcctttagtcatctagccgaaatgtagatggtcatgtgtgtagaagtgcacgtgaccaccctcacatgttggtcatgtgcccctgtggaaggaccccagggctggtgagctctgagatagctctgacattaccactggggaaagcacataggttgtcaggatcttagtccctcttcctctaatgtcatcatgccactttctaggggtggcatggagtggggattgtgaagacaagcaagatgataaatatgaagaaagccggatgaaat

SEQ ID NO: 36096 - DNA, 1083 bp, Homo sapiens
tatccacaaagcagaatgtgagcccctctatgtggaagctttttttttccttaaataatttaatgtcctattcagcattattgatttgctttttatcatagtcaaactattgttttccatctctagtttgttagaaaatgatactttttgccacaaggattcaagtgggcacagtaacagcaacatgccatctttcacatgtttctgaaagaagaggtgacctgccagcttcctttgagctgtgcttgctttagggccgacagtttttttatgttcatctgttcatgtcatgttttccctggccccttcatgaccaatacacatttataaatgctctagccatggaagatgaacaaggaccatgggctctacatctcaggtgtgctagtgaaatgagccrgccccaagcagctcccatgagagctacaggttctaaaagattgcagagcggcatgcttggtcttgcagccgactttctggtgaaaagcattaactaagtttcctggtggaatcatgaactacacagcccaggtatgacagtagccatgtgttctctggtttgttttcttccagactttcgaccagtttgttacgaggagccccagcactggtgctcggtcgcctactatgaactgaacaaccgagttggggagacattccaggcttcctcccgaagtgtgctcatagatgggttcaccgacccttcaaataacaggaacagattctgtcttggacttctttctaatgtaaacagaaactcaacgatagaaaataccaggagacatataggaaagggtaagagcaaagatgttattcctttagtcatctagccgaaatgtagatggtcatgtgtgtagaagtgcacgtgaccaccctcacatgttggtcatgtgcccctgtggaaggaccccagggctggtgagctctgagatagctctgacattaccactggggaaagcacataggttgtcaggatcttagtccctcttcctctaatgtcatcatgccactttctaggggtggcatggagtggggattgtgaagacaagcaagatgataaatatgaagaaagccggatgaaat

SEQ ID NO: 36097 - DNA, 1228 bp, Homo sapiens
  misc_feature (1)...(1228): n = A,T,C or G
tgaataaagcacactataaatgaatgtcctttatttggaagccacaaattttcaaatccaaaattccatttggtgaaatattcaggggatccagttcctatgtcaataatcaataacccaaatcctcagaatcaaacaacctgtcggtcccttgtttaatcagaattgttggaaggattaaatctgtaatgagtccttgcacatttgctttcaattcttntnccatgttnnnnnnnnnnnnnnnnnnnnnnnnnnnnnnnnnnnnnnnnnnnnnnnnnnnnnnnnnnnnnnnnnnnnnnnnnnnnnnnnnnnnnnnnnnnnnnnnnnnngcgnttaaatctgtaatgagtccttgcacatttgctttcaatcttctccatgttgatgacatccttgcatatgtatatccacatttgcctctcagtgggagtgcatatctgacatttcaaagactacaaaatgtgatctggaaaaataaacactgctgtagtaattttgatggttgatcatctgtttaatataatgtcacctaacttcgagactgtaaattaggctgacttggtttgttatcaattttcagtactatttagcaccctgaacaaaaaaccaaaccaaaacaaccccctcacctgtagcttttttattcarttttcccaaatttcatgttctccaataagctttcttgagaaattgggaggggtggtcatttgacttcacataatagagatatgttatttaggcttttcactgattgcccctttttcagccctgtttttcacctccacttgataagtatttcatacctccaattacggagtctttctggggctctgtgactgaagacatcttgcttcttattattagaagatatgcaggttttaactcctatatgtcagattaaacacgtggaaaaacttttacatttcaaaatttgatgtgatctggtatgctcttttcttctctcctattatctttgtccctgcgtatttctgattttttttattctttactgttgctttagtgtgatttttggagagagtgaagataaatgcatatgtttgagctgacacgtttaaagagaggtccaaacacttaacttagtaattttacttgtactctgtaagatactttatcgttatctctcattatcacagcaatcttcaaaaggagatattaacatctttactttgtaaataagggacctgaatttcagaaaaaaacaagtaat

SEQ ID NO: 36098 - DNA, 1228 bp, Homo sapiens
  misc_feature (1)...(1228): n = A,T,C or G
tgaataaagcacactataaatgaatgtcctttatttggaagccacaaattttcaaatccaaaattccatttggtgaaatattcaggggatccagttcctatgtcaataatcaataacccaaatcctcagaatcaaacaacctgtcggtcccttgtttaatcagaattgttggaaggattaaatctgtaatgagtccttgcacatttgctttcaattcttntnccatgttnnnnnnnnnnnnnnnnnnnnnnnnnnnnnnnnnnnnnnnnnnnnnnnnnnnnnnnnnnnnnnnnnnnnnnnnnnnnnnnnnnnnnnnnnnnnnnnnnnnngcgnttaaatctgtaatgagtccttgcacatttgctttcaatcttctccatgttgatgacatccttgcatatgtatatccacatttgcctctcagtgggagtgcatatctgacatttcaaagactacaaaatgtgatctggaaaaataaacactgctgtagtaattttgatggttgatcatctgtttaatataatgtcacctaacttcgagactgtaaattaggctgacttggtttgttatcaattttcagtactatttagcaccctgaacaaaaaaccaaaccaaaacaaccccctcacctgtagcttttttattcaattttcccaaatttcatgttctccaataagctttcttgagaaattgggaggggtggtcatttgacttcacataatagagatatgttatttaggcttttcactgattgcccctttttcagccctgtttttcacctccacttgataagtatttcatacctccaattacggagtctttctggggctctgtgactgaagacatcttgcttcttattattagaagatatgcaggttttaactcctatatgtcagattaaacacgtggaaaaacttttacatttcaaaatttgaygtgatctggtatgctcttttcttctctcctattatctttgtccctgcgtatttctgattttttttattctttactgttgctttagtgtgatttttggagagagtgaagataaatgcatatgtttgagctgacacgtttaaagagaggtccaaacacttaacttagtaattttacttgtactctgtaagatactttatcgttatctctcattatcacagcaatcttcaaaaggagatattaacatctttactttgtaaataagggacctgaatttcagaaaaaaacaagtaat

SEQ ID NO: 36099 - DNA, 1000 bp, Homo sapiens
gatttgaagacttttgtaaattattacagtcatttgagattgtttaaaacttccttgttgggacagagggaaatggatgatgagctctcatgcctccaaaggtgttttacaagttacagtatcactgtgatgctgttctaagmacggccacttctaaattcttctttctaagctcaaatagaagaaagttctcccttcacttctcttgtccacatgtgaaatgaataatgcctgtttcctgtcattctgttattaacttcattctcagtaaagggaagcaggcccagtggccactggaaaagaagaaaacccaagaaatacttgaaagcttacgtttctaccctattaacaaggccaactctagggtgggggaagtggttttatttttatggtaatttagctagcaactatgtgaggttggcttgcgtttttattgttggttttattttagtctgcacgaccagttggatcatttaagaacctcaaaagttgccaaacgttgcattttcatatctaccagcatagatggatttaataattgaatgctgaaactcaattgtagagataatttgtgaactcttaatttgtttatcaaaaatataggtagagtgcaatgacagaattttttttgagggggagggtgggatcaagcttgaagatgcagttacattactctgcagctctaccctgagcacaagtacacgaatatgagatctgttatattagtactgtgttaatagtgtcattggcattttaaacaccagaaatatcaaagcaaaactaaattcctgaaagtaaagagtaattgaggccaggtgcagtggctcacacctgtaatcccagcactttgggaggccgaggcgggcggatcatgaggtcaagagatcgagaccatccttgccaacatggtgaaacctgtctttactaaaaatacaaaaaattagttgggcgtggtgtcgggcgcctgtaatcccagctactcgagaggctgaggctggag

SEQ ID NO: 36100 - DNA, 1131 bp, Homo sapiens
ctaagcctgttattcaattttacacttcataaagactggattcaaaactacctaagggactattcatattcatattacaagggtgtgtttccataaagcatatctttctctagctagttcagtaatatgaaatccaattacaatgtaccatatttattagagatagkttttttttgccacagttgacatcaccaaacaaacgaattccaaaagcatggaatatttccaatcaaaatgaagatgtcttcattcatattcacttttattttaatgaaacttaagaaagccaattcctattgaatcattatacctgtaaatgatttcaatgaatcagtttccaaacacaaaacacaattacataaatttaaaatataaagcctgatgtcatttgctagtatttcatttagaaatattatacacattaaatgggcacacgatttgtttttgacaaacatccttttacataatgaatttacaataaaccctgaagtgacatcttagtccctttgagttgctgtaacaaaataccatcaactagatagcatacaaatgatagaaatttatttctcacagtttgggaggctgggaagtccaagatgaaggtgctgataggttcaatgtctgctaacagcccacttcctggttcgtagatggtgactttttctgggtccttagacggcaaaaggggtgagggagttttctccagcctcttttataagggcaccggtcccattcatgagggatctgccctcgtgacctgattatcttcaaataccattacactgcacattaggaattaatgtatgaatttggaggggacataaacattcaatccattgatcacataataaaataaacataattcatgctggtatataagattggtggccctcatttttttccattgagcaatattcaagataggtgccactaacctactatacacatcaaaataatgtacaaaatgggatgtgtaattctggaatattattgtggatgaatattgtagcagatttttggggggataaagagggagaagttgtggtttgctgatatgatctatctgtcaggagaggggtaagtatgactaccggccctagtgagagactacctacctgggtgagagcccac

SEQ ID NO: 36101 - DNA, 533 bp, Homo sapiens
ggccaggcatggkggctcacgcctgtaatcctagcactttgggaggccgaggtgggcggatcacctgaggtcaggagtttgagaccaccctggccaacatggtgaaaccctgtctctgctaaaaatataagaattagccaggcatggtagcagccacttgttatcccagctactggggaggctgaggcaggagaatcacttgagcccaggaggcaaaggttgcagtgagcagggatcgagccactacactccagcctaggcaacagagccagacttctcaaaaaaaaaaaaaaaaatgtgtgaacaatctttccagtttaattccctttgtcacgaatgttgcatactgacctgaatgatagaaaattcataagaatctgaaagatgagaaatcttatttaacatattctgttgtacctggatgactcagtcttttcttagtgcaactcaatattcccaataacaaggtaggagaagtatgacagggaaaagatttaattcagctcaaaccaaacaaaccaaataagaacggg

SEQ ID NO: 36102 - DNA, 533 bp, Homo sapiens
ggccaggcatggtggctcacgcctgtaatcctagcactttgggaggccgaggtgggcggatcacctgaggtcaggagtttgagaccaccctggccaacatggtgaaaccctgtctctgctaaaaatataagaattagccaggcatggtagcagccacttgttatcccagctactggggaggctgaggcaggagaatcacttgagcccaggaggcaaaggttgcagtgagcagggatcgagccactacactccagcctrggcaacagagccagacttctcaaaaaaaaaaaaaaaaatgtgtgaacaatctttccagtttaattccctttgtcacgaatgttgcatactgacctgaatgatagaaaattcataagaatctgaaagatgagaaatcttatttaacatattctgttgtacctggatgactcagtcttttcttagtgcaactcaatattcccaataacaaggtaggagaagtatgacagggaaaagatttaattcagctcaaaccaaacaaaccaaataagaacggg

SEQ ID NO: 36103 - DNA, 554 bp, Homo sapiens
gggtgaaatcagggtcaggaaaaataaaatcaacaaacatatattgagcgtaagactctggaagatacaaagagtatgtatayagttgagatggggggaagggacatttatataagagagtaacagaaggttcaaggtagcacatgactcctaaatacaggtgtgcagggggcaaaaagatcagcgaagtctagaaagtctctttggagaggagagatttgaaatgagaatgaaaagctaggggagtagactcaggcagagaggaagcatgaggcataggttcaggcatggttttggaaaagggcctaagttgaaagatcaaagagatcaacttggctggaacacagaatttgcaaactcatgtagaggatgataaagttggatggaccttgaataacaaggaaaactgcttttcaagagaaaggttagggcaagagttttagattgaaggctgtctgtgcttaagtgagggtaaggccatggaggagaaggtctctgaagaaatgagcttcaaaataactttgtaggaagaatataatcatttaaacccatca

SEQ ID NO: 36104 - DNA, 563 bp, Homo sapiens
ggcacccctgtattcccacgccyggctaattatttgtatttttagtagagacagggtttcaccacgttagccagaatggtctcaatctcctgaccttgtgatccgcccgcctcggcctcccaaagtgctgggattacaggtgtgagccactgctgcccggccagggtagggtaacttttaatatgtctatttaatgtatcaagaattagaaaaataacatatcaatctcatttcacggatattacttcttaggatgacgctagattttttttttaatgagttcgtttttggctgggagcattggctcatgcctataatcccaacattttaggaggccaaggcaggagatcacttgagaccaggagtttgagaccaggctgggcaacatagtgagaccctgtctctactaaaaagcaattaattcaaataagtcaatttaataaaaatgttaagtgaataaaagtgcagatattttgaggatatgcaaaattcaagaaagtttttatatatgactaagggttttgaaactctgcttttatctacagaagcaaaaggagtcttca

SEQ ID NO: 36105 - DNA, 563 bp, Homo sapiens
ggcacccctgtattcccacgcctggctaattatttgtatttttagtagagacagggtttcaccrcgttagccagaatggtctcaatctcctgaccttgtgatccgcccgcctcggcctcccaaagtgctgggattacaggtgtgagccactgctgcccggccagggtagggtaacttttaatatgtctatttaatgtatcaagaattagaaaaataacatatcaatctcatttcacggatattacttcttaggatgacgctagattttttttttaatgagttcgtttttggctgggagcattggctcatgcctataatcccaacattttaggaggccaaggcaggagatcacttgagaccaggagtttgagaccaggctgggcaacatagtgagaccctgtctctactaaaaagcaattaattcaaataagtcaatttaataaaaatgttaagtgaataaaagtgcagatattttgaggatatgcaaaattcaagaaagtttttatatatgactaagggttttgaaactctgcttttatctacagaagcaaaaggagtcttca

SEQ ID NO: 36106 - DNA, 563 bp, Homo sapiens
ggcacccctgtattcccacgcctggctaattatttgtatttttagtagagacagggtttcaccacgttagccagaatggtctcaatctcctgaccttgtgatccgcccgcctcggcctcccaaagtgctgggattacaggtgtgagccactgctgcccggccagggtagggtaacttttaatatgtctatttaatgtatcaagaattagaaaaataacatatcaatctcatttcacggatattacttcttaggatgacgctagattttttttttaatgagttcgtttttggctgggagcattggctcatgcctataatcccaacattttaggaggccaaggcaggagatcacttgagaccaggagtttgagaccaggctgggcaacayagtgagaccctgtctctactaaaaagcaattaattcaaataagtcaatttaataaaaatgttaagtgaataaaagtgcagatattttgaggatatgcaaaattcaagaaagtttttatatatgactaagggttttgaaactctgcttttatctacagaagcaaaaggagtcttca

SEQ ID NO: 36107 - DNA, 2034 bp, Homo sapiens
aggcatctccatctgtgagcctccagggtctctgcagaagaggaaggctccacccacacttccttggctagagtcagtcatgcggccacagcctagtgcaagggaggctgggaggtgtggtttcaggataccagtgaagcaggaaatgagaagaaaaggggacctgtttctgacattattaaaataaaaaatgcatctctgcatacctctcaggccacatctgggaaaggctgacttttctgagaggccagcatgcagtgctgggtgaccttgagcaggtgacttacccactctgagctcaagtctttgccacacatatggagaggctcactggagttttctagctgggaagattcgacgcacagcccacctagcacttggcccagggcagagcccgctgcggctcgttccgcccccacccccacaaaccgtgttgcagacaccaagggcgtggccctgccaggtgccctctcttaaatcttctataaaaggagagggctggctggrtgactgtttccaacccaacatccacaaagtggataaacgggcagacgcgagtgactttcttaagtacacagccagcttgttgtgggccctgtctagggtgatggcatccctgggggccacaggctgtgggccccattgccttcaagcctgcgagctggctgccacagctcacccactgcagggggcacactgacgggcttcaggtccctcctccaggacacagggaggacagggatggagtgtttttcagaagacaggtcaaggctgatgacaggtccgggctgatggggagcagccgtgaagcaggctgtttgcatcatcactgtagtctccactctggaaaaccaaaatcaggtgactcgctgaattcaaaccggggaaggctgagccagagccagaactggggtctcccctctaggccaagtctgactgagaagctgggaggcctgtggctggtgcccaacagttcacttggtggctgggggctctcagcagcagccaggccaggcccaagccacacagactcccacctctgtttctgcggaaaaatagcaaacacgattcctcaggagaccagggagaggtggggacgggggtgcagctcagaccaggaccggggccctgacagaggaccccaagcagagagcagggcagtggtgccagggaggcagtctggctagccacacctctgatacaggccgcagagcttggctgctcttgcctttgggagggcctccaccacggttttggcagtgctgatactgaaacctgtcggctgtttctgagcatctggacatatgatgtagtgcttattgatggcaggagaagcagggagtgaccatgcatgttagcatgtaatttattccacacccataattctgttctgcagccagtgatgacagggagactcgctgcctcttatcaggcaggggcaccttcatgacatcggcccctccttggagctgaggccgggtgggctttattcaaggaccgcccccccgtgctgttctcaggctgagatgaagctaggatgatgggatctagccgggtgagtactggcagaagcccctgtgactgtggcagacagaaagatgccatatcctcttccccagaacctgtgaatgttcctatctaaagaggctttgcagatgagcttaagttaaggatttcatggaaaagggagattattctggatcatctgcacaggccctatggaagctcaagggtccttataaaagggagttaggaggctcagcgtcagagggaagacatgaggaccggccagggggttggaggcgagaagatgctgccggccttaaggagagggaggaaacgaggggagggagcccatggcctctgacctctgcctcgaggcaagttagtcagagacccctgccattcacagaagacaagaggcagccccctgggctccagctgctctttggtgaagcctggaaggggtaagagaggcggtgccctggacaccctggagaacccacgcttttcaggcttgagcctggggtggat

SEQ ID NO: 36108 - DNA, 1062 bp, Homo sapiens
gatccctggcaagggggtgggggagatgggtgctggggctggcagaggagccacccggagcctgctcagagcaccctcggctacggccattccaagccatacgctcagcacagcctccaactcccagtgtgctaagtgacatgtccccaggtcctgtcattgatctaggccagccgtggtttgtttgttttgatcttttccaatctcccattcagttttgatcacacacacaggagcccaataactcgctccaaaaaaaaaagaaaaagaaatcaatgtcggcttcagtgcaggctgccacggagggcattgtaaggcrggtgtggccaagggcagaggggagaggttcaatggggctgcctagtagagagcccggctcagggggacctgcagaatctctgtgttcgtgtgaccacaggagggacggtcctgagccagcttcagggccttgctaagctgtcagaacaaggttagcttgggacgcctttgcagcaggtctttctggattcatttattaagcactgactgtatgtccggcctgtgctgagcactgagagcccccaagttcttctcagcaggaagccacccctgcgcttcccagggcaccgggccccacagcccctcctttccttcccgcccgtcccattgcctcagtgttggaggagggaagggctgtgtggaggttggccagctctcaacctgatgcgtgaatgccctgccaggctgtgttcccacccactgggagaccacatgagttctgggaccccttccccagctcggaggcttctggcctgctctgaccatggcctgccttccagagcccaacatctgcctcctcctttctgacccgcttcctataaaagtctcaggtcagctcacatcagacaccagacaccaaaaagggggccagcgctactcccaccaccccaggaagttcatgtttgaaggggtgatataattaggaaaacactgtcatttacaaacagcagcaagcttagcttagcgtttcaaagtcctttcccatcatctaaacagcgtcaaggccatctagatattttataa

SEQ ID NO: 36109 - DNA, 1062 bp, Homo sapiens
gatccctggcaagggggtgggggagatgggtgctggggctggcagaggagccacccggagcctgctcagagcaccctcggctacggccattccaagccatacgctcagcacagcctccaactcccagtgtgctaagtgacatgtccccaggtcctgtcattgatctaggccagccgtggtttgtttgttttgatcttttccaatctcccattcagttttgatcacacacacaggagcccaataactcgctccaaaaaaaaaagaaaaagaaatcaatgtcggcttcagtgcaggctgccacggagggcattgtaaggcaggtgtggccaagggcagaggggagaggttcaatggggctgcctagtagagagcccggctcagggggacctgcagaatctctgtgttcgtgtgaccacaggagggacggtcctgagccagcttcagggccttgctaagctgtcagaacaaggttagcttgggacgcctttgcagcaggtctttctggattcatttattaagcactgactgtatgtccggcctgtgctgagcactgagagcccccaagttcttctcagcaggaagccacccctgcgcttcccagggcaccgggccccacagcccctcctttccttcccgcccgtcccattgcctcagtgttggaggagggaagggctgtgtggaggttggccagctctcaacctgatgcgtgaatgccctgccaggctgtgttcccacccactgggagaccacatgagttctgggaccccttccccagctcggaggctyctggcctgctctgaccatggcctgccttccagagcccaacatctgcctcctcctttctgacccgcttcctataaaagtctcaggtcagctcacatcagacaccagacaccaaaaagggggccagcgctactcccaccaccccaggaagttcatgtttgaaggggtgatataattaggaaaacactgtcatttacaaacagcagcaagcttagcttagcgtttcaaagtcctttcccatcatctaaacagcgtcaaggccatctagatattttataa

SEQ ID NO: 36110 - DNA, 1122 bp, Homo sapiens
ttggaaaattaatttataagtacatttagggaagatggaaagtttatggggacatacatggcatgactagaaatcaaaactagctagtggacagaaggtgagagtacataaaggtgttaccaatttgtctttttatgaaaactcaaaattcaatttatattttcactttcttgggagttaggtgtattacgattgtgatataattatatgccacarttataccattgtatagcataataatgatgtggtaaaccaaaataagagagttgagaaacgtatttttcttaacgacttgggtgttgaacctgtcataagtggtgcttatttatctgaacatcagcatttctttcattttaggattctggatggagaacagccatttgcccagattattgtcctaacatgtatgaagaaatggaaacattagccagtgtacttcagtcagatattggtcaagacatgcgtgttcataacagcacatttctatggttcatcccttttgtccagtccctcatggatcttaaggatttgggtgtggcttacatagcacaggttgttaatcatctgtactctgaagtcaaagaagtcctcaaccaaacagatgctgtgtgtgacaaagtcactgaattttttcttctaattttggtatcagtgattgaactgcatagaaataaaaaatgtttgcatttgctgtgggtaagttcccagcaatgggtggaagccgtcgtcaaatgtgccaagcttcctaccactgcgtttacacggagttctgagaaatcatctggaaattgctccaaaggaacagcaatgatatcttcactgtcattgcattccatgccatctaactctgtacaacttgcttatgtgcagctgattagaagtctccttaaagaaggttatcagcttgggcagcagtctctttgcaagcgattctgggataagctcaacttattccttagaggaaatttatctctaggttggcagttgactagtcaggaaacccatgagctacaaagttgcttaaagcaaattattagaaacataaaattcaaagcacctccatgtaacacttttgtggatctgacttctgcatgtaaaatctctcctgcatcttataataaa

SEQ ID NO: 36111 - DNA, 616 bp, Homo sapiens
tgctgtgaatgctattacttttgcccttgtttctttctccacgaaacagaaactggtaggaaccattattacaaggcatccatgtggcaagggcaatagaaaacagaaaaagtgcatccttgcttcagaccacctgaaaatttagatttaacactttttcagcaaaggcaggcagagactacgacagatcccaaatccatctattttcattatctgcgttgctcctaatggtccaagccactaacaccccttacctggtctactgtaatcctgctaattacaaaccttgccctttccttcttgcccctgcttgcaatccattgtccacacagtagccagagttattttttaatttaaactcctayatcatggcacgcctctgctcaaggcccagggaacttggaatagaatccatgtctctaggccaggcgcggtggctcacacctgtaatcccagcactttgggaggctgaggtgggcagttcacgaggtcaagagatcaagaacatcctggccaacatggtgaaaccctgtctttactaaaatacaataaattagctgggcatggtggtgcacacctgtagttccagctactcaggaggctgaggcaggggaat

SEQ ID NO: 36112 - DNA, 616 bp, Homo sapiens
tgctgtgaatgctattacttttgcccttgtttctttctccacgaaacagaaactggtaggaaccattattacaaggcatccatgtggcaagggcaatagaaaacagaaaaagtgcatccttgcttcagaccacctgaaaatttagatttaacactttttcagcaaaggcaggcagagactacgacagatcccaaatccatctattttcattatctgcgttgctcctaatggtccaagccactaacaccccttacctggtctactgtaatcctgctaattacaaaccttgccctttccttcttgcccctgcttgcaatccattgtccacacagtagccagagttattttttaatttaaactcctatatcatggcacgcctctgctcaaggcccagkgaacttggaatagaatccatgtctctaggccaggcgcggtggctcacacctgtaatcccagcactttgggaggctgaggtgggcagttcacgaggtcaagagatcaagaacatcctggccaacatggtgaaaccctgtctttactaaaatacaataaattagctgggcatggtggtgcacacctgtagttccagctactcaggaggctgaggcaggggaat

SEQ ID NO: 36113 - DNA, 595 bp, Homo sapiens
tctgcttcacattctttatttaactggtcctctgtttcttcatcttgaattgctgtttgagtttggaataaatcaaactatgatctgcaagccaaatccagcctgcttcctgtttacaatggcctatgaactaagaatggtttttaccttttttaaatgattgaaacaaaatcaaaagaagaatatttcttggcacatgaaaattacatgaaattcaaatttcagcatccataaaaaaagttttaccggaacacagctacactctttcatttaagcgttgtctatggcagtacaatagcagggttgagtagctgtgacagagactgtatggcctacagagcctaaaattgttgccatctggcccattacagaaagaatttgctgacccctggaataaattatcaaagcttctgtctccatctgcaaagtaaaagtgacaaaatcctataaaatgccatttgattaacaataaatattcactartaactggtgtgctacttaacaggtatttgagttggtggaattatcctctttaaatctcagttttgtcatctataaaataaggaaaataatcttctcctgtggaatgagataa

SEQ ID NO: 36114 - DNA, 547 bp, Homo sapiens
aagtgctgggattacaggtgtgagccactgcttctggttgacactagtagcttctaaaaataaaatttacaacatatgagagcaacaaaatataaggatggggcacccttaccacttggaggctgamagtatcattaacaaaacctaggaagtgtaatggatagtaattattattttctagatatctccaactattaaaaaatatatttaggatttagtatagtcatgatgtcataataactaatatatactgagtatttactatatgtgctttgtactgtacatgttttgttttatttcttcaacatttatataagaaaagtggtggtgactgttgttattttttatgggtgaagaaacaaagaaacagagcatgcaactagtgagtggtaaagccagaattccaagttatgccatctgtacattgctatactgcccccaaaatgcagaatgtgaacacattactcatttctatttgttttcctgaattttgtgtttgacttctcttaaaaagactgaatctatttttaatttattggtattaaaa

SEQ ID NO: 36115 - DNA, 547 bp, Homo sapiens
aagtgctgggattacaggtgtgagccactgcttctggttgacactagtagcttctaaaaataaaatttacaacatatgagagcaacaaaatataaggatggggcacccttaccacttggaggctgaaagtatcattaacaaaacctaggaagtgtaatggatagtaattattattttctagatatctccaactattaaaaaatatrtttaggatttagtatagtcatgatgtcataataactaatatatactgagtatttactatatgtgctttgtactgtacatgttttgttttatttcttcaacatttatataagaaaagtggtggtgactgttgttattttttatgggtgaagaaacaaagaaacagagcatgcaactagtgagtggtaaagccagaattccaagttatgccatctgtacattgctatactgcccccaaaatgcagaatgtgaacacattactcatttctatttgttttcctgaattttgtgtttgacttctcttaaaaagactgaatctatttttaatttattggtattaaaa

SEQ ID NO: 36116 - DNA, 547 bp, Homo sapiens
aagtgctgggattacaggtgtgagccactgcttctggttgacactagtagcttctaaaaataaaatttacaacatatgagagcaacaaaatataaggatggggcacccttaccacttggaggctgaaagtatcattaacaaaacctaggaagtgtaatggatagtaattattattttctagatatctccaactattaaaaaatatatttaggatttagtatagtcatgatgtcataataactaatatatactgagtatttactatatrtgctttgtactgtacatgttttgttttatttcttcaacatttatataagaaaagtggtggtgactgttgttattttttatgggtgaagaaacaaagaaacagagcatgcaactagtgagtggtaaagccagaattccaagttatgccatctgtacattgctatactgcccccaaaatgcagaatgtgaacacattactcatttctatttgttttcctgaattttgtgtttgacttctcttaaaaagactgaatctatttttaatttattggtattaaaa

SEQ ID NO: 36117 - DNA, 547 bp, Homo sapiens
aagtgctgggattacaggtgtgagccactgcttctggttgacactagtagcttctaaaaataaaatttacaacatatgagagcaacaaaatataaggatggggcacccttaccacttggaggctgaaagtatcattaacaaaacctaggaagtgtaatggatagtaattattattttctagatatctccaactattaaaaaatatatttaggatttagtatagtcatgatgtcataataactaatatatactgagtatttactatatgtgctttgtactgtacatgttttgttttatttcttcaacatttatataagaaaagtggtggtgactgttgttattttttatgggtgaagaaacaaagaaacagagcatgcaactagtgagtggtaaagccagaattccaagttatgccatctgtacattgctatactgcccccaaaatgcagaatgtgaacacattactcatttctatttgttttcctgaattttgtrtttgacttctcttaaaaagactgaatctatttttaatttattggtattaaaa

SEQ ID NO: 36118 - DNA, 509 bp, Homo sapiens
gtctcctctatccaaaagctttatattcaggtaaatgctagagttcttgtcttagctaataaacagtataattgagaggtttttcctccctaagggaagaagtatataaactatgtatgctagtaataatagaacttccaaataggcagaataataaattggtaagcatgaaacacagttctcaggtacattttgttagatgatgtttacatagattacttgaagtcataatggtcactgtgacagcaatattaatataatataaattaaaaaatgtatttgaatgagacagctatttttctttcttgatggaaaactgaacttgttgatttgctcatcaaaattcagaggtgaactattttattatttttgacaactaatattcagagctttctgatttctatttatctttgcmttttaacaaactgtgagttcaggtccaaaaataatatatatcatacagataaaaaagtaatgacactttttaaaatggtgtgtgactaaataaa

SEQ ID NO: 36119 - DNA, 699 bp, Homo sapiens
tcaaatggcacaaatgaataattaaacagaaaagaaaggatctactcgtccagcagaccagaattctctttccagtaggacaagtttgggcggatccattcacaatcctgctgatgaccacaggccaggctcctgcgacagatggaggagcttagaggcttgggctgggcaggggatcagaggatcatatacaatcatacacgtgaatgacacatgggatcataggtgatgcaaggcggcacctgctggaaggagctcaagttgctgctttcattgacctgccccgtccaccagagcaattctggatgcacttagcagacatcggtggaaagagaayatatggaattcaggagactgagttctattcccagctctgcctagcacattaggtttcccctgccaataccattctgccatggaagagggaggagcggcttttctgcaggatgagggagcaagctaggagaagggggagagtcacatttttccaaggacacgttccttgagagcttcagaaaaggttccactgtattctttctccttccaaagctacagagctcaagattctcccccactttcttccctccctttagttttgtccattcatcaacacatatttatggagtatcgctaccattgcaggaacggagacgtgcgatatggaatatagttatatggaataacttaaccctacttgaa

SEQ ID NO: 36120 - DNA, 1552 bp, Homo sapiens
tggagcaagaactctaggacaggcaagagagtgacattacttgtataaatggctctttagcacccactgtccactcaaggtgtgctgccctataggcatattcaggctcaaatagtactgctatgtgtggcacatcagtctgttgtgtttattaatagtttattaatgaaagaggccttgctggatgctctgtcagtgcatcactcctgatcactctgttctcgtactgtgctgcagctaaagtcatccaccatggttctaggattgctcagagtatgagcaggagaggaagatgtcagtgaggctctggctgcatcccttcctgtacagcccttccagacccctccgtcctaattacatcaccttctccaaatcatgcataccccacwtatgaagtatctaccgtatgccaggcactgagccaatgactggtccagtagtaagtcctaattctccttggccatgcatctgcccacataccacttaaaattccttggaattgcagaactccatgaagtcagattcctttctatttatttatataaaagtctgtctcctgtaccaggtcataagattcttgaaatcacgaaccgtgttttagacatctctgcatctattgagttccttgcacaatgtctggcacatcataggtgttcaacaaatgtttgctgagtttaaaataattgtgcaagcatgttcaaccagaggagccattgagaaattacttcattgcaacccttcgatgttatatgtgagcctgctacctgagctggactgtgatttcaaaatggagcactgaatccaaaggaaattaggattcccagacttccaatagagggcagtaccattgtaatatcaagatataatctgatgtctaatcaccattctgtgatggtagaaaatgtgacccagcccaatagacagaaggaaagctgcaaagaaagcatttatggctataaacaatttttctttattcctcatctgggtcctgaggcctgtgatttggctccaatttttcatttgtggttgtttgtttcagataataaaactgttcctttaaaataatggtgactatattgtatctaaaaataaatatcaaaagatcaaagtcccttagtgggagcaattattgcaaaaagaccagccaagctcaaaacagctgttaagtgatcctggcccaagcaagaggagcctggcctccttggctgatctggaatcacatgggcaggctgacaaaccaaaattgagaaacttctaaaatatggaaaacacacatggcaatattaatggccctatgaaaattgctcttatttgattattattggtcactaactacttgcagtattgttaagacacttcacaaaatggacagaaaatgagtattcaatgtgtgagacaaaaaaaaaaaaaaaaaaaacagaaggaagagctcctcgtgaatttccaagagaaataacactagggttcagttttgctgttagatataataagtcccagtaaggaagcaaatgagaagccaagatgatgtggctttatttcaatactctctttg

SEQ ID NO: 36121 - DNA, 1552 bp, Homo sapiens
tggagcaagaactctaggacaggcaagagagtgacattacttgtataaatggctctttagcacccactgtccactcaaggtgtgctgccctataggcatattcaggctcaaatagtactgctatgtgtggcacatcagtctgttgtgtttattaatagtttattaatgaaagaggccttgctggatgctctgtcagtgcatcactcctgatcactctgttctcgtactgtgctgcagctaaagtcatccaccatggttctaggattgctcagagtatgagcaggagaggaagatgtcagtgaggctctggctgcatcccttcctgtacagcccttccagacccctccgtcctaattacatcaccttctccaaatcatgcataccccacttatgaagtatctaccgtatgccaggcactgagccaatgactggtccagtagtaagtcctaattctccttggccatgcatctgcccacataccacttaaaattccttggaattgcagaactccatgaagtcagattcctttctatttatttatataaaagtctgtctcctgtaccaggtcataagattcttgaaatcacgaaccgtgttttagacatctctgcatctattgagttccttgcacaatgtctggcacatcataggtgttcaacaaatgtttgctgagtttaaaataattgtgcaagcatgttcaaccagaggagccattgagaaattacttcattgcaacccttcgatgttatatgtgagcctgctacctgagctggactgtgatttcaaaatggagcactgaatccaaaggaaattaggattcccagacttccaatagagggcagtaccattgtaatatcaagatataatctgatgtctaatcaccattctgtgatggtagaaaatgtgacccagcccaatagacagaaggaaagctgcaaagaaagcatttatggctataaacaatttttctttattcctcatctgggtcctgaggcctgtgatttggctccaatttttcatttgtggttgtttgtttcagataataaaactgttcctttaaaataatggtgactatattgtatctaaaaataaatatcaaaagatcaaagtcccttagtgggagcaattattgcaaaaagaccagccaagctcaaaacagctgttaagtgatcctggcccaagcaagaggagcctggcctccttggctgatctggaatcacatgggcaggctgacaaaccaaaattgagaaacttctaaaatatggaaaacacacatggcaatattaatggccctatgaaaattgctcttatttgattattattggtcactaactacttgcagtattgttaagacacttcacaaaatggacagaaaatgagyattcaatgtgtgagacaaaaaaaaaaaaaaaaaaaacagaaggaagagctcctcgtgaatttccaagagaaataacactagggttcagttttgctgttagatataataagtcccagtaaggaagcaaatgagaagccaagatgatgtggctttatttcaatactctctttg

SEQ ID NO: 36122 - DNA, 657 bp, Homo sapiens
cactgtgggtacccaacaggtagtttttcaacccttgtccttgtcctgctcctccctcctccctctagtagtccccagtgtctgttgttgccatatttatgtccctatgcacccattgtttagctcccacttacaaatgagagcatgccgtacttggttttctgttcctgcattaawttgcttaggataatggcctccagctgaatccacgttgctgcaaaggacaggatttcacttttttatggcttcatagtattctatggggtatatgtaccacattttctttatccaatcccccactgataggcacctaggttgattccgtgtctttgctttgtgaatagtgctgtgatgaacatatgttgtttttggtagaacataggtgcatcatatgttctgtatcatatgtgcatgtgtctttttggtagaataatttattttctttaggatatatatacccaggaatgagatttctgggttgaatagtagttctgttctaagtgctttgagtaatctccaaactgatttccatggtggaaatctaatttatattcccactaacagtgtataagcattcccttttctccagagccttgtcagcatctgtttgttttgttttgttttgtttttactttttaatactagccatttgactgg

SEQ ID NO: 36123 - DNA, 801 bp, Homo sapiens
tggatccctggactaatatttcactgttccgaagttgtagggctgggatttcctcattgatgaaatatttagaagctaagcagatttgtaatggatttagagtaatatgaaactgaaagtacttcgttcaaatcactgactccactaccataaatggaattagtggagtgtgccagtgggagggtttaaagatttctcaaccagaagcttcaaattttttttgttgttgttggaaatcttagagaccatttgttgtctaacaaaatgcccattaggttttgaatacaatgatacatgtctcatggattgagtcaatttgagaaacctagaatgaggaggcatcatgttaattttcagctacaatttcctaaaataatagacacactctcaatggagctgcctattctttgagaggtgcagtacataaggaaaggacatgtttaacacactcatgaacacctaacccctggcacttaatgcccagcacacagycaggagggggctccatgtgttgtactcatgttctaggctcagtactgatggctttacatgaatcgcacaactgaaaactcataatatttcctcatggttttatagaaactgagcacagaaagactttattagttgtctaaaatcataacactgtaactaatctgaacccaagcactcatgatcccataccctcttcttgaaccacttcactatgctgcttatttactaagtgaaaaattgtagaaatattttatttataggttttttatttttaaatttattatagtgtgattttatttttatagattg

SEQ ID NO: 36124 - DNA, 801 bp, Homo sapiens
tggatccctggactaatatttcactgttccgaagttgtagggctgggatttcctcattgatgaaatatttagaagctaagcagatttgtaatggatttagagtaatatgaaactgaaagtacttcgttcaaatcactgactccactaccataaatggaattagtggagtgtgccagtgggagggtttaaagatttctcaaccagaagcttcaaattttttttgttgttgttggaaatcttagagaccatttgttgtctaacaaaatgcccattaggttttgaatacaatgatacatgtctcatggattgagtcaatttgagaaacctagaatgaggaggcatcatgttaattttcagctacaatttcctaaaataatagacacactctcaatggagctgcctattctttgagaggtgcagtacataaggaaaggacatgtttaacacactcatgaacacctaacccctggcacttaatgcccagcacacagccaggagggggctccatgtgttgtactcatgttctaggctcagtactgatggctttacatgaatcgcacaactgaaaactcataatatttcctcatggttttatagaaactgagcacagaaagactttattagttgtctaaaatcataacactgtaactaatctgaacccaagcactcatgatcccataccctyttcttgaaccacttcactatgctgcttatttactaagtgaaaaattgtagaaatattttatttataggttttttatttttaaatttattatagtgtgattttatttttatagattg

SEQ ID NO: 36125 - DNA, 642 bp, Homo sapiens
gcccaggctggagtgcagtggcacgatctcggctcactgcaacctccgcctcctgggttcaatcaattctcctgcctcagcctcccaagtagctgggactacaggcatgtaccactatcctggctaattttgtatttttagtagagatggggtttctccatggtggtcaggctggtctcgaactcccgacctcagatgatccacccaccttggcctcccaaagtgctgggattacaagtgtgagccaccaggcctggccaagcatttctcacttacacattaaaattatatattagatgtatataaattgcagatacagtgtcttttctcattcatactttgtaaaataattttatctaaactctttctatcatccttccttaacactgtagctcctttattattaaaactactttaaagtcttttactttttagagcataacattcttacatctgtcaaaattatttgaaccatttaaaatctctgcagattgtcctggaagtgtaggggtgggttgcccctccacacctgtgggtgtttctcgtaaggtggaacgagagacttaggaaagaaaaagacacagagacaaagtagagagaaagaaataaggggasccggggaaccagcgttcagcatatgga

SEQ ID NO: 36126 - DNA, 579 bp, Homo sapiens
ttctttaggcttttttcagctaactgtgtcagcttctttaattgtgcccaagtcggcggctccgctttcttggtggatgacaactttatctgtaagttgtaggtacctaaactggaaggtgtttttttcctggggaaatacaagcaaaacctctcccacatgtcatcactttccgtgtttcccatgttttatttttattatctttctaccaaatcagttttccttcatgtgggctgttccttttaccagttagatgttctgcaggggtaatggtctgatttctataaatgttcaaaaaatttaaagtatagagtattagattaagttgcatctggggagtgttaatactccttactgtttyttccttttttttttttgtttaaccaattgagctttcagtgttctattagttctttaaattatggcctgtctttgggaattatagggaattcctgttttatgtgtaatttttcactgatttaagaatttttgaaaagctttactacagtatcctggcccattgtccattttaatttttttttttaactctcatgacagcaaaacaagataataaatgtc

SEQ ID NO: 36127 - DNA, 2499 bp, Homo sapiens
aattacactctttttgagttatcaaaggggaaagaaatcaataatggctaagctggatcaaggtgctccagaggagagttgaaagggtgatagaaatacatatgcacgcacacaccacacacactcacacactaacawgtgaagtcaacagacaaaagtaatctggtctagacaaacatacttgacgaaatgaaaaaatggtagaaacagtggactaatttggggtacaagaaagcatccagaaagcagttagtggatttttgcctctgaaaagtatttaatccctaaatgccctttatattttgtagcagcccacacataatttaatgtcatgtttatttatgtaaaatcctctgcatggcactgaaattgagtgaaacagccactgcataccccttgaggaaattaaaaggcaagccaaccaacagtgttgcagacagagctagggacatacagataaccgaatcaacattagacacagcaaattgtagcacatggagagccctcgtgaagagcaaaaaactttttgtaaatttgctataccctcctgactctgtttctccacagagccagaggtcatttgtagctaagacataaaatctgcacctgagttgcaggactcttcctgtgccaggagctgccatgtgagaaatactgcagctctcactcaagggaactcatgggttttctccctttgctgaaagctaagttccttcctgctagtaacaaacccaaaaaataaaaataaaaataaaaaataagcttataataaggttaaaccaaactatcagactctagtcatagagtcaggtctttatattcagtaaataaaactaaacttgtcaaatccactagacttaagttgctttttgatgcaaatcttgaaaataggggacacatttaacctttgacaggttcttctatttcccaagttcagagatgctatccactcaaaaaaaaaaaaaatgcactccctccaaaatctattaatttcacattgccaaaccagagagtctgaggacacttgtcttgtttcctcccctgccacctccttctcccgttctttattttgaataataaaaagagcataattctcaaaatatatatccatatataatacatagctgaccactgcatattcttcttcctcttggtaaattattctgccttaaatgattttgactttttttttacattaaaccaggaaaataagggagatgctaaattaaatattttttctagaaaaaaaccaaatagctgcaccaatgtaatcccaaaagagtagcaagatgagataattatacaaaatgtgaggaaaatgcatattcaagacaagatctttctacatatggatagtaaaatagaaaaatgaaacaggcctacagacccaaagccaaggcttcaagacctgaaattaactggggccagggaatagggggagaagctggcaacttagcatggttgtctccagagctgcagttggaggaaaccacgtagcatatcttgcgcaagcccattgttttatagttaaagaaacaagcgataaatcctgttctcattcccctccagtgcttagaaggggagagagattatattcaaccttctttaagctagtacctactcaaattagctcacctgatacacagctgctcaaacacagaaaatgcacagaattctcagtttagagctgtaaaacaataaggaaatatttattgtattatcttctctctgaaagtctattaaaaaaaaaaagacaaaaaatgccgggtgtggtggctcacgcctgtaatcccagcgctttgggaggccgaggcaggcggatcatgaggtcaggaaatcgagaccatcctggctaacacggtgaaaccccgtctctactaaagaaaaaaaaaaaaaaagttagctgggcgtggtggcgggtgcctgtagtcccagttactcgggaggctgaggcaggagaatggcgtgaacccaggaggcggagcttgcagtgagccgagatcgcgccactgcactccagcctgggcgacagcgagacttcgtctcaaaaaaaaaaagagaaaagatgtaccaatacttaagagggatacaacccaggttttgtaggagcgagatggaagggaagtaagagctggagaaattctcttccaacttccctgatgtgatgatctgagaaagacagatttccatgctctcaaatcagtatctgtctgaattatagacactatctaaatattaatattctttctatgtgagaacccacacacaaagtgaacacactattaagcagcaaactgtgtgttaacgatgaggggcccttctgttcctatgcctttatatatttagcttcaacaggaagaaatgaagcaagtctttccatttccacttcgccatcttgtttttttatgctgtttattcacaggtctgaagaagtcaactcaattctaaaaagtattatttttcaaggttaacacaagacacttgcaggaagccaataaa

SEQ ID NO: 36128 - DNA, 537 bp, Homo sapiens
caagaggagactgttactctcctaacatatctcatccagtcaagctctgactaaagcaaacatttgccctattctaaaaacaaggccttctaacagatttggaagtctactgctatttcaaatttttctttttttgagatggagttgctctgttgcccaggttggagtgcagtgacgtgatcttggctcactgcaaccttcacctcctgggttcaagtgattctcctgcctcagcctcctgagtacctgggattacaggtgtgaggcaccacacctggctattttttgtatttttagtagagatgggttttcaccatgttggccaggctggtctcsaactcctgacctcaagtgatctgcctgcctcagcctcccaaagtgctgggattacaggcatgagccaccacacccagccaactttttctttcttcagaacgaatgctggtccttttgtcatgacgtgtgatagtacaaatcacaagggcaaatggggaccaaacgtttgtaattaagaatgacaggacttaaggagatcgg

SEQ ID NO: 36129 - DNA, 542 bp, Homo sapiens
attttctctgaacagatcttctccatgtgagtcctctacttatgcctgtcagcttcactgacaaaagtagttatgccttttgaaacagagtcaacagaaccaagaatgggtaaatccatgatttttggctttgaatatcactaataattatctgtttttgattaaaaaattattactcctggagcagagctggattttaactccccggtacattacaaaaatcactagaagggggaaagggaaaagaatagggagaaagacagtaaagagraaaagacagacaaggaaagaggagagacaagaagagggaggatgaagttgaggttgtataaagtcatttttgcattttccttttgcagcttccttttacaactatgtaaacgtctcattaatttctacatttagaatctgattctgagcgtaaaagtaaattactcttttggatcttttttatctccacttccaccagtgacagatctgaaaaagacgaaatattttatgcaattaaactttgcatgttataatgtgactcgttgtgaata

SEQ ID NO: 36130 - DNA, 552 bp, Homo sapiens
ctttggtgtgtttggctgcgtgcgagcaaacctttgacttttccttggccgggctctataaggacaggggagcaggaccaggaccaaagataaaggtaggcccaacttgactttccaactcctgccagctcctccgtgtttagtgccgcgttgcctccatgtgtctgaagacgagttcatckgcagactccaagactgtcgagagggtggagatcacctgcccacagaacatgactctgtcttgtttccgtagactgaagaactgggcagcagaatggcataatgcccacctctactgctgctcacaccttcttcgccagcggtataacttttaagtacggacaagttctgaaaaatttcctatgcggtatctttcagaaaactcccgtacccgttaagttttttaattgcaccttgaaatgaccgtggcagaaatagccacattctcatattttaaaatgctgcaatgttttgagtgaagcagtgaacatcttcaagattctggctaaattccatagccgtatctcagacagtgtttctcaaatctgtgtc

SEQ ID NO: 36131 - DNA, 552 bp, Homo sapiens
ctttggtgtgtttggctgcgtgcgagcaaacctttgacttttccttggccgggctctataaggacaggggagcaggaccaggaccaaagataaaggtaggcccaacttgactttccaactcctgccagctcctccgtgtttagtgccgcgttgcctccatgtgtctgaagacgagttcatcggcagactccaagactgtcgagagggtggagatcacctgcccacagaacatgactctgtcttgtttccgtagactgaagaactgggcagcagaatggcataatgcccacctctactgctgctcacaccttcttcgccagcggtataacttttaagtacggacaagttctgaaaaatttcctatgcggtatctttcagaaaactcccgtacccgttaagttttttaattgcaccttgaaatgaccgtggcagaaatagccacattctcatattttaaaatkctgcaatgttttgagtgaagcagtgaacatcttcaagattctggctaaattccatagccgtatctcagacagtgtttctcaaatctgtgtc

SEQ ID NO: 36132 - DNA, 863 bp, Homo sapiens
aaattacttggccttaaaaagaaataaaattctgacacatagtaaaacagtgatgacccttgcagatattatgctaagtgaaataaatcaatcacagaaggacaaatactgtgtgattccacttatatgaygcacctgagtagtccaattcagactattaaaaaaatagtgagtactggggaggatgtagagaaattggaattcttgtgcactgttgatgggaatgtaaaatggtgcagccactgcagaagacagtatggtggtgcctcaaaaaataaaaaatagaattactgtatgacccagcaattacacttctgggtatacacccaaaataactgaaagcagggttttgaagaggcatttatacccctgtgttcatagcattattcacaatagcaaaaacatagaagcaatccagtgtccactgacgaatacatggataagcaaaatgttgtccgtccatttctttatttttaaccactcaacatcacttaagtatacagcatatacttggatcttactttctcaggaaaactgaaaaaaataattaatggatgagttaagctcatttacattatcaatgtgactggtaattcatcacaaccctgtcaaaatatcataaaattatgtagattgtgttacatttgctatgttttttttaggaagtaaatattcctgttctttaaattataaaaaaaaaaattggggtatttaagaaagtttatatttttgttctactaaacacctttgtacttacaactttttaaatgtccctaattccctttttttcttattacaccacttactatctggtttttcagtttttaattcatatataatagttgcacatatttacaggacac

SEQ ID NO: 36133 - DNA, 863 bp, Homo sapiens
aaattacttggccttaaaaagaaataaaattctgacacatagtaaaacagtgatgacccttgcagatattatgctaagtgaaataaatcaatcacagaaggacaaatactgtgtgattccacttatatgacgcacctgagtagtccaattcagactattaaaaaaatagtgagtactggggaggatgyagagaaattggaattcttgtgcactgttgatgggaatgtaaaatggtgcagccactgcagaagacagtatggtggtgcctcaaaaaataaaaaatagaattactgtatgacccagcaattacacttctgggtatacacccaaaataactgaaagcagggttttgaagaggcatttatacccctgtgttcatagcattattcacaatagcaaaaacatagaagcaatccagtgtccactgacgaatacatggataagcaaaatgttgtccgtccatttctttatttttaaccactcaacatcacttaagtatacagcatatacttggatcttactttctcaggaaaactgaaaaaaataattaatggatgagttaagctcatttacattatcaatgtgactggtaattcatcacaaccctgtcaaaatatcataaaattatgtagattgtgttacatttgctatgttttttttaggaagtaaatattcctgttctttaaattataaaaaaaaaaattggggtatttaagaaagtttatatttttgttctactaaacacctttgtacttacaactttttaaatgtccctaattccctttttttcttattacaccacttactatctggtttttcagtttttaattcatatataatagttgcacatatttacaggacac

SEQ ID NO: 36134 - DNA, 1234 bp, Homo sapiens
agccactgtctgcggctttcctacagagaagagggacggaccgccacgaccccccccgtccccaacttgcctgtgtcttcactgctgaatcagctgagcccaagtcctcggcggctggaacagacccttccaaaaccgcgcaggcccaagccccacgccccagtgccagcgtccttgcgtggctttggctccaaggacttctgctatcgatgtttggcgccctcctcacctttattccaagtgtgagtttcccttttctggagtttatgctgtttggtgaactgcrctttctagacacagctctccagagatgaacctgatttccattggaaagcatggcctctttcccctgaggaccgtgggccaggaggcctctgctattcctggtctctctgaaaacagcctgtggtccttttccttgggcattgggatggtttctgctctggcatggtcctccgtctccttgtgccccagccaaaggaaatggtcccaggcagtcccatggcctgacgcacctctgcccaaggagacgctgctcacacgctggctggacacaccccatgggaaacatgcacgttcaggcacacttgaggtcatctgtgccgaggccgctccctgcccgaacccccccacccgttgtgctctccacgactggcgcctttgctgctgtgcacagaagccctaccgtgtgcactgccgtagcacagcccagacctgccactcacaacatggcaaggccagcaccccagcgccccacataaccacctacagtgggcctcaggtgtgatgcagccacactgccgtgcaggcagacccagctggatttcacagctgtgcttgagggcagaggtcggcaaagattctccatcaagggcgggatgaaaagcatttgaggcttcacaggctctctggtccctgtggcaactcaacctccggattatagcacaaaagcactagaggccgggtgcggtggttcacctgaggccaggagttcaagaccagcctggccaacatggtgaaaccctgtctctattaaaaatattttttaaaaaaaaattagccaggcgtggtggcgggaacctgtaatcccagctactcgggaggctgaggcaggagaaccactggagcctgggaggccgaggttgcaatgagctgagatcacgccactgcactccagcctgggtgacagaggaagactctatctcaaaaaaaaaaaaaaaaagccagcagaggg

SEQ ID NO: 36135 - DNA, 674 bp, Homo sapiens
tgcatcatacacgctctcttacaatacttagggctaaatgatccccagygaaaacagtatttgcagaaagcaaatctctaactggaaacaggataacctcaggagtgggattcttccctgaagcagatctgttactgttttcactttagtgcggggctgtacaggtgggactatgaacaggtccccatcattttagtcgggttggtaaccttggtgtgatgagggtgtgtattagtccgttttcacactactgataaagacatacccgagactgggcaatttacaaaagaaagagttttaatggagtcacagttccacatggctggagaggcctcacagtcatggtggaaagcaaggagaagcaagtcatgtcttacatggaggtcagcaggcaaagagagagattgtgcatggatacttataaaaccaacaggtttcgtgagactcattcactatcactgtaaggtcctctgaacaggctgcactatggttgagccattgtgacccctgtgactcacatgtacaggcctcctggagtcacaaagcctggagcagcaggaaccactcaagaagaagaaacagctagttcctgccttaactgattaaccgactttgcaacattccaccattctggtgtgttcctgccctgccccaactaatcaattgacctcgtg

SEQ ID NO: 36136 - DNA, 1118 bp, Homo sapiens
caatttccttagcctggcagtcaagaccctccacaagcctgcctctgtcttcctttctcagtactgtgctacacaaaccccttattccagctagactggtctcctaactgtcccttcgcagatgctcattcctgcctctgtcactgggcacgctctcctctcccaatcactggccatgagccgactctggctcatattccgagaccctacccaacagttattctgtctattgtttcctccttgagcattccaactcatggcaactttgtccatctgtggaatgatggaacggacagcatctgctagtcatcagacactgctgttttgggtgtcatgtgtcttgttgccatggatgatttaactccatgtgtgtaactcctgcccaccttaactagactgtatgtcctcatgccctacttctctgtaccccatgtttctacaagagtgcacacagtagctcctccaggaagctggtggaataaatgattaaaaggctgagatctctttgcctcttcctttggaccagccaagtgggctgaccaaagcccccagaggctgctagaagggagaaggtagaaagacatcttctgtctgtgtacctggagcagcccaggatggtggatgactgggatgtgtttcaggctgaagaaggtggaggtagctcacaggtgagctggggcagccctgactgttgttctacctgggctcagcctcctgtgaatgctcagggtgcacaggctggggacatgcctgggtatctgagaaagggactagttgtccccaaggaaggttttggagctgagccagtcagcatgcacactgcaactgtgacagccgctggggctcttctccrtaagcagtggtgaatcacattgaagagcggcttgttaaaggcagacttatccctctactccgaaaatacaatctgtcactcctgtatcaaaccagctggttccctaatagctacggacaacatattttctaggaatgtgtcttgaaatttcctttggcaaatgtctctaactggcatttcctcattgaatgtgctgtattcttacacagcaaaattgaatttcccttagaagttggaatgtaagttactatcatgtggctaaaag

SEQ ID NO: 36137 - DNA, 1259 bp, Homo sapiens
tgcatttaggtgcaaacatctcctgctggcaggtgtgcccgggccgtgcaaatgagccatggtcctgtgtgttctcctgctgtctgaacacgctgctgtctccaaggctgtaactattacactatcaggattctggggctgttggtctcatggcagcatcagcagcctataggagagggcaagaagacacgctgagccctgcattgttttatggagggaaactgttcctgcatccttctgcttcattccgtggatactgcctgccctgcttctatggtccatgtccgggaatgggttagcactgggcatttgcccatttgactatagcagtaacagccaatatttatagagctcttattactgttagtggctttattaattcatttaaccctcaacaccatttttgtctttgtttttagatatgggatctcactctatcacccaggctggccaccacactcggctattttttttttttttttttttttttagagacaggatctcactatgttgcccagactagtcttgaactcctgggctcaagcaatcatcctgcctcagccttgcaaagtgctgggattacaggtgtggaccactgtgcttggccccctcaacattatttcacagctgtaatcatcacctccatttttcagacaaggaaactgaggtttaacgaggtcaggcgacttgtccaagggcaccgtgataaaaaggggtggagctggatagggccaaggctgtctgaccccaaagcccaccacatcaccactgcaccctggctttctggagttggtgcagagaagagcaggaagtgcttcttgctaatgtataggaaagatgctcatgaagccgtaaacccttacctggcccatggcctccttcaaggaatgtgaccacaggtggtttttctactccaagctgttatgrcatgcgccgtgtgtcaatcaaaatgagttctgctcccctgactgcaacgaatgggccaccaagctctgtgagggcaggacagtgcctcttacctgttggtgaagctccagtacttagcacatagtaggtactcaataaatatctgttgaattaataaatgaatcagaaattggtgcccatgcctaaggcagccaagtctggattataaaaatgtaatgtgaacagtctctgttgtggcccaatgcaaagctttacctaacagatgctttgaatagggtggcaacaaactggcctcatcagatctttggaaagtatggaggccatgaaagcac

SEQ ID NO: 36138 - DNA, 1259 bp, Homo sapiens
tgcatttaggtgcaaacatctcctgctggcaggtgtgcccgggccgtgcaaatgagccatggtcctgtgtgttctcctgctgtctgaacacgctgctgtctccaaggctgtaactattacactatcaggattctggggctgttggtctcatggcagcatcagcagcctataggagagggcaagaagacacgctgagccctgcattgttttatggagggaaactgttcctgcatccttctgcttcattccgtggatactgcctgccctgcttctatggtccatgtccgggaatgggttagcactgggcatttgcccatttgactatagcagtaacagccaatatttatagagctcttattactgttagtggctttattaattcatttaaccctcaacaccatttttgtctttgtttttagatatgggatctcactctatcacccaggctggccaccacactcggctattttttttttttttttttttttttagagacaggatctcactatgttgcccagactagtcttgaactcctgggctcaagcaatcatcctgcctcagccttgcaaagtgctgggattacaggtgtggaccactgtgcttggccccctcaacattatttcacagctgtaatcatcacctccatttttcagacaaggaaactgaggtttaacgaggtcaggcgacttgtccaagggcaccgtgataaaaaggggtggagctggatagggccaaggctgtctgaccccaaagcccaccacatcaccactgcaccctggctttctggagttggtgcagagaagagcaggaagtgcttcttgctaatgtataggaaagatgctcatgaagccgtaaacccttacctggcccatggcctccttcaaggaatgtgaccacaggtggtttttctactccaagctgttatggcatgygccgtgtgtcaatcaaaatgagttctgctcccctgactgcaacgaatgggccaccaagctctgtgagggcaggacagtgcctcttacctgttggtgaagctccagtacttagcacatagtaggtactcaataaatatctgttgaattaataaatgaatcagaaattggtgcccatgcctaaggcagccaagtctggattataaaaatgtaatgtgaacagtctctgttgtggcccaatgcaaagctttacctaacagatgctttgaatagggtggcaacaaactggcctcatcagatctttggaaagtatggaggccatgaaagcac

SEQ ID NO: 36139 - DNA, 1259 bp, Homo sapiens
tgcatttaggtgcaaacatctcctgctggcaggtgtgcccgggccgtgcaaatgagccatggtcctgtgtgttctcctgctgtctgaacacgctgctgtctccaaggctgtaactattacactatcaggattctggggctgttggtctcatggcagcatcagcagcctataggagagggcaagaagacacgctgagccctgcattgttttatggagggaaactgttcctgcatccttctgcttcattccgtggatactgcctgccctgcttctatggtccatgtccgggaatgggttagcactgggcatttgcccatttgactatagcagtaacagccaatatttatagagctcttattactgttagtggctttattaattcatttaaccctcaacaccatttttgtctttgtttttagatatgggatctcactctatcacccaggctggccaccacactcggctattttttttttttttttttttttttagagacaggatctcactatgttgcccagactagtcttgaactcctgggctcaagcaatcatcctgcctcagccttgcaaagtgctgggattacaggtgtggaccactgtgcttggccccctcaacattatttcacagctgtaatcatcacctccatttttcagacaaggaaactgaggtttaacgaggtcaggcgacttgtccaagggcaccgtgataaaaaggggtggagctggatagggccaaggctgtctgaccccaaagcccaccacatcaccactgcaccctggctttctggagttggtgcagagaagagcaggaagtgcttcttgctaatgtataggaaagatgctcatgaagccgtaaacccttacctggcccatggcctccttcaaggaatgtgaccacaggtggtttttctactccaagctgttatggcatgcgccgtgtgtcaatcaaaatgagttctgctcccctgactgcaacgaatgggccaccaagctctgtgagggcaggacagtgcctcttacctgttggtgaagctccagtacttagcacatagtaggtrctcaataaatatctgttgaattaataaatgaatcagaaattggtgcccatgcctaaggcagccaagtctggattataaaaatgtaatgtgaacagtctctgttgtggcccaatgcaaagctttacctaacagatgctttgaatagggtggcaacaaactggcctcatcagatctttggaaagtatggaggccatgaaagcac

SEQ ID NO: 36140 - DNA, 1259 bp, Homo sapiens
tgcatttaggtgcaaacatctcctgctggcaggtgtgcccgggccgtgcaaatgagccatggtcctgtgtgttctcctgctgtctgaacacgctgctgtctccaaggctgtaactattacactatcaggattctggggctgttggtctcatggcagcatcagcagcctataggagagggcaagaagacacgctgagccctgcattgttttatggagggaaactgttcctgcatccttctgcttcattccgtggatactgcctgccctgcttctatggtccatgtccgggaatgggttagcactgggcatttgcccatttgactatagcagtaacagccaatatttatagagctcttattactgttagtggctttattaattcatttaaccctcaacaccatttttgtctttgtttttagatatgggatctcactctatcacccaggctggccaccacactcggctattttttttttttttttttttttttagagacaggatctcactatgttgcccagactagtcttgaactcctgggctcaagcaatcatcctgcctcagccttgcaaagtgctgggattacaggtgtggaccactgtgcttggccccctcaacattatttcacagctgtaatcatcacctccatttttcagacaaggaaactgaggtttaacgaggtcaggcgacttgtccaagggcaccgtgataaaaaggggtggagctggatagggccaaggctgtctgaccccaaagcccaccacatcaccactgcaccctggctttctggagttggtgcagagaagagcaggaagtgcttcttgctaatgtataggaaagatgctcatgaagccgtaaacccttacctggcccatggcctccttcaaggaatgtgaccacaggtggtttttctactccaagctgttatggcatgcgccgtgtgtcaatcaaaatgagttctgctcccctgactgcaacgaatgggccaccaagctctgtgagggcaggacagtgcctcttacctgttggtgaagctccagtacttagcacatagtaggtactcaataaatatctgttgaattaataaatgaatcagaaattggtgcccatgcctaaggcagccaagtctggattataaaaatgtaatgygaacagtctctgttgtggcccaatgcaaagctttacctaacagatgctttgaatagggtggcaacaaactggcctcatcagatctttggaaagtatggaggccatgaaagcac

SEQ ID NO: 36141 - DNA, 1259 bp, Homo sapiens
tgcatttaggtgcaaacatctcctgctggcaggtgtgcccgggccgtgcaaatgagccatggtcctgtgtgttctcctgctgtctgaacacgctgctgtctccaaggctgtaactattacactatcaggattctggggctgttggtctcatggcagcatcagcagcctataggagagggcaagaagacacgctgagccctgcattgttttatggagggaaactgttcctgcatccttctgcttcattccgtggatactgcctgccctgcttctatggtccatgtccgggaatgggttagcactgggcatttgcccatttgactatagcagtaacagccaatatttatagagctcttattactgttagtggctttattaattcatttaaccctcaacaccatttttgtctttgtttttagatatgggatctcactctatcacccaggctggccaccacactcggctattttttttttttttttttttttttagagacaggatctcactatgttgcccagactagtcttgaactcctgggctcaagcaatcatcctgcctcagccttgcaaagtgctgggattacaggtgtggaccactgtgcttggccccctcaacattatttcacagctgtaatcatcacctccatttttcagacaaggaaactgaggtttaacgaggtcaggcgacttgtccaagggcaccgtgataaaaaggggtggagctggatagggccaaggctgtctgaccccaaagcccaccacatcaccactgcaccctggctttctggagttggtgcagagaagagcaggaagtgcttcttgctaatgtataggaaagatgctcatgaagccgtaaacccttacctggcccatggcctccttcaaggaatgtgaccacaggtggtttttctactccaagctgttatggcatgcgccgtgtgtcaatcaaaatgagttctgctcccctgactgcaacgaatgggccaccaagctctgtgagggcaggacagtgcctcttacctgttggtgaagctccagtacttagcacatagtaggtactcaataaatatctgttgaattaataaatgaatcagaaattggtgcccatgcctaaggcagccaagtctggattataaaaatgtaatgtgaacagtctctgttgtggcccaatgcaaagctttacctaacagatgctttgaatwgggtggcaacaaactggcctcatcagatctttggaaagtatggaggccatgaaagcac

SEQ ID NO: 36142 - DNA, 471 bp, Homo sapiens
ctgttgttattgctattgttgttactggatctcatacacagtctggagctaaacgtaaagcctcatcctgcaggcatcatttcacgcgactgccacagtcttctcccaaggataagctgtgatgtcacttcccgtggccggctggcctacaaaagcctgctgtcattctgtcatgtggttttgcccagggttggcacaggggcgtgcccagacatgcagcagctttacattgtttctccctcacagagcttgggcatatcccatcaagaatatggctgtggctgtgcatcctaataaaaggctggagaaataactttgtgttgtgactgtagcattagccgcaaatgaaataactaccctgtgcacrctctcattctgtttctcaagatgttgaagatataagtataaaagtgttgttgtgtccatagctgggaaggcagacgggtttagtcttcaagtcagctttgagac

SEQ ID NO: 36143 - DNA, 470 bp, Homo sapiens
aaccacagatgacacttcaaatcttagaatccaggtgctatgttccttaagcctcttttaatgtaaaagaggtttttttagacttttttttttttttttttgagacggagtctcactctgtcactaggctggagtgcagtggcgcgatcttggcttactrcaagtgattctcctgcttcagcctcccaagtagctgggactacaggtgcacgccaccacacccagctaatttttgtatttttagtagagacggggtttcaccatgttggccaggatggtctcgatctcttgaccttgtgatctgcccgccttggccccccaaagtgctgggattacaagtgtgagccaccgtgcctggcttttttttctttttgagatggagtctcattcttttgcccaggctggagtgcagtaccacaatattagctcactgcaaactcagcctcctgagttcaagtgattctcctgcc

SEQ ID NO: 36144 - DNA, 568 bp, Homo sapiens
agcaagaagaaatatgaaaaaggctagaataaattccaaatactcsaaaattttaaaaagtttcctcttcattttaatttctcttggtggaggtcaaatttactaatctctcattaagaaattaacaaagtcattttaaaaactgaactcacaactctggtcccaaataactgtctttttacatttattggatagattactcgtacttttcactcaataaatatttattgagcacctactataagccagactgctcttagaactggaaagtcttaacagcaatgaagcaaacactgaaaactgcctttctttatggaacctacattctactgaggaaggagcaaacaaacaataagcaaataaataaaatgcaccatatgtcagtttgacgataactgctagaggggaaaaaaataagaaaggtggaaggtagacaggaaatatggggcaaaagagagacagtttttcagggggcagggagagttgatggttgtgattttgaataccctggttacaaaggatttatttggacgctggcacttgagccaagactagaaggtgaggaatc

SEQ ID NO: 36145 - DNA, 1277 bp, Homo sapiens
atacataatacaatgaaaaaattaattgcttttcttctttcaaatttttctccacacaaataattttatgtcacttgattgatcatttaccctaaattatatatattggcaaatgatcttatgaacattaaaaacataaatgtaaatgtaacccaagattcaaaaagttataaaaatattgttagacaaggacttactgattgtaaacttgcattttcacgtaaacaagctgtgtgaagttctgatttcaaggctgcaatgtgacttcgatgagatgtcatttccttctctaatgtcatgattctagtgcttgcaagctggtagacatccatgaaacttttaatcatagccttaagaaataaaaataatgtcacatataattcaaataaatatgtccccaaaggagaatttccataatttgaaagcaaaaccattaaaattttaaaataaacaacttttcatctttctwtaaaataataaagctaaacctaacattttatattgagaacagtgactattttaagaaagtttgtgagaaaataattgagacttcattccagagtatttatttaaataagatgtactttgatctattgtgcttaaaatttagaatgcggttttaaaagatggcacagttattttctgtagtaaagttaaattcaagttgtaatttgacctaaatttccatcttaagagaggtgcaatcttaatgggtatacaaacaaggtatttcaaaataagctgagttagtaaaatttttaaaccacctaaaaaacaaatgttttgaaacaaaaggagctaaaataatcttgtgatttttaagagtaaatgtgattcttattttgtaagaaaagtataattatgttgattcatgtaacacagaaatgcccttacattggactatacataataaaacaattaacgtaagcaagttctggtaacctattatctcctctaaacagtaccatatttagggaattattgtatcacagtttaatcatattttatagaatttttcttctaaagcaatttgtaataaattttaagtccaggatactattatgcctttttaaaggagactttcaaaataactcaaatatagcaaaataaatcccatatttcaaagacattttcaaaaataatactatattgtttacaagaaaaatgttcctacaacagccacaacttagtataaaggtagacagtctgagaatttgcaaattacattctatcttaaggttgtaaattaggaaagctttgagaaattatgtatttga

SEQ ID NO: 36146 - DNA, 1277 bp, Homo sapiens
atacataatacaatgaaaaaattaattgcttttcttctttcaaatttttctccacacaaataattttatgtcacttgattgatcatttaccctaaattatatatattggcaaatgatcttatgaacattaaaaacataaatgtaaatgtaacccaagattcaaaaagttataaaaatattgttagacaaggacttactgattgtaaacttgcattttcacgtaaacaagctgtgtgaagttctgatttcaaggctgcaatgtgacttcgatgagatgtcatttccttctctaatgtcatgattctagtgcttgcaagctggtagacatccatgaaacttttaatcatagccttaagaaataaaaataatgtcacatataattcaaataaatatgtccccaaaggagaatttccataatttgaaagcaaaaccattaaaattttaaaataaacaacttttcatctttctataaaataataaagctaaacctaacattttatattgagaacagtgactattttaagaaagtttgtgagaaaataattgagacttcattccagagtatttatttaaataagatgtactttgatctattgtgcttaaaatttagaatgcggttttaaaagatggcacagttattttctgtagtaaagttaaattcaagttgtaatttgacctaaatttccatcttaagagaggtgcaatcttaatgggtatacaaacaaggtatttcaaaataagctgagttagtaaaatttttaaaccacctaaaaaacaaatgttttgaaacaaaaggagctaaaataatcttgtgatttttaagagtaaatgtgattcttattttgtaagaaaagtataattatgttgattcatgtaacacagaaatgcccttacattggactatacataataaaacaattaacrtaagcaagttctggtaacctattatctcctctaaacagtaccatatttagggaattattgtatcacagtttaatcatattttatagaatttttcttctaaagcaatttgtaataaattttaagtccaggatactattatgcctttttaaaggagactttcaaaataactcaaatatagcaaaataaatcccatatttcaaagacattttcaaaaataatactatattgtttacaagaaaaatgttcctacaacagccacaacttagtataaaggtagacagtctgagaatttgcaaattacattctatcttaaggttgtaaattaggaaagctttgagaaattatgtatttga

SEQ ID NO: 36147 - DNA, 592 bp, Homo sapiens
cataacttttctcttcctcttccttttcataattcttactcactggaaatgtccattgaggtctccaagatgcagactctgaggcagagttcaagatgttattagggagggctttggggatcaacccctccggaagggtgggccagggacaggactgggcagagggagaagtggggcattgaaccagggcaaggccagcctgctggcactaaaagggcccttcagcccgccgtaacttgggcccaaatggtcatgtcttctgtgatgaactgaactggtttgagggatttttaatgctaaaactagaagcatctcaggccgagggaatggttgtcacctttacacttctgcatcagtcagtcacagagggtggatagaggctccgtattcaatagccataacagcagatataatcagagcacttccttcctaacagtgaagacagaacacacctgaaaacagatttaatagcctctagtggctttccatccgraaaatttgaagaggaaattgacaaaatattcatcctcagggtcctctctcaaaagcccttgttgtgtgaaggccacatctgcctgagcagctccacatg

SEQ ID NO: 36148 - DNA, 592 bp, Homo sapiens
cataacttttctcttcctcttccttttcataattcttactcactggaaatgtccattgaggtctccaagatgcagactctgaggcagagttcaagatgttattagggagggctttggggatcaacccctccggaagggtgggccagggacaggactgggcagagggagaagtggggcattgaaccagggcaaggccagcctgctggcactaaaagggcccttcagcccgccgtaacttgggcccaaatggtcatgtcttctgtgatgaactgaactggtttgagggatttttaatgctaaaactagaagcatctcaggccgagggaatggttgtcacctttacacttctgcatcagtcagtcacagagggtggatagaggctccgtattcaatagccataacagcagatataatcagagcacttccttcctaacagtgaagacagaacacacctgaaaacagatttaatagcctctagtggctttccatccgaaaaatttgaagaggaaattgacaaaatattcatcctcagggtcctctctcaaaagcccttgttgtgtgaaggccacrtctgcctgagcagctccacatg

SEQ ID NO: 36149 - DNA, 629 bp, Homo sapiens
agactctgtctcaaaaaaaataaaaataaaaataaaaaaccaggggcagggacttagtctcaaaggacaggtactgttttgaagatcatgccaaccacatgagcccaagaatggagaaatcctgaatgtgctcgagaaaggaagccaagtgaggagtgaggctccctgatggaggaaggagatggaatgccaggggtgccctgtcctggggggaggcacacagtgtggaaggcaggcagtgccatgcagcctttaccagtggcctaggaggcctgaagaagaacttcctcctagcacctcaaagatagcccctccttccttacctgctgagctcctcactgccctgcaccctcgcttgcccagggcttcccactcacctggacaaaggtccagaagatgttcgttctcctctctccaargttcgtcgccttgctccagctgttcgatgagttttggtttggaaaatgcaattcctactcacaggaaaaaaaaaccaaggtgatcttgagttagtggcttaagaggctatctcagaactcagagccaacccaggaatgcaataaacccagaaggtggtagggaggtgcaggggtggagtaaactatgtctgaatgctaagaaaggatgca

SEQ ID NO: 36150 - DNA, 1062 bp, Homo sapiens
  misc_feature (1)...(1062): n = A,T,C or G
aacggagaaagaactggggaataaactgagtctaggtttctttgagtaaacatccctcrcaagtttctgctcttaagcacacaaatttagcaactttaatttctaggttggggtctagttcctgtcaacactaggaaatgggagacaactacttttatcacggtcagatcacctatagattgtgatcattcaatcatacatgcaaagaatattacaaaatactaacaacattagtatgtattaaggggcttactagatgccaagttgcagcaaccctcacaaccctctgaggtaaatgccattattaatcaggagttacgttaacttatcgaactgtggaaactgggatttcaagcatgctcgtctaatcactatactaataatgcttcaacctgccaatttatttttttattctgtaagccataaggagccaatgaaaaaaattaaggacagcagtaatgatcatctttacatgctagaacacactactcagccacgtgcaaggtggactgacgctggggtgagcaagggtcttgaaagagatagtcaaagtctgggtcaaaaatgctgaggaaattctgagcataagaatgcataggagaggataaaaacctaaaatctgtatctaataaacttagctagacttctgattgttttaagtctgggaagggatgaaggaagctacctcgcaggttactagctgggccactggattagtaattactgnnnnnnnnnnnnnnnnnnnnnnnnnnnnnnnnnnnnnnnnnnnnnnnnnnnnnnnnnnnnnnnnnnnnnnnnnnnnnnnnnnnnnnnnnnnnnnnnnnnntcaaaatgagagcaagcaattatacagaatttctctccctcgacaaaataagcttctcatattacagagatcttaactttgaaatgcttttcaaaatagggagtcacttgggctgggaggggacttcaactaagtcctcattttacagaggaggcactgaggggcaaggctgtttcaataccctgtccagagtgcgcactgttcaggcaaaaccaggactaaaaaccagctctgcc

SEQ ID NO: 36151 - DNA, 1062 bp, Homo sapiens
  misc_feature (1)...(1062): n = A,T,C or G
aacggagaaagaactggggaataaactgagtctaggtttctttgagtaaacatccctcgcaagtttctgctcttaagcacacaaatttagcaactttaatttctaggttggggtctagttcctgtcaacactaggaaatgggagacaactacttttatcacggtcagatcacctatagattgtgatcattcaatcatacatgcaaagaatattacaaaatactaacaacattagtatgtattaaggggcttactagatgccaagttgcagcaaccctcacaaccctctgaggtaaatgccattattaatcaggagttacgttaacttatcgaactgtggaaactgggatttcaagcatgctcgtctaatcactatactaataatgcttcaacctgccaatttatttttttattctgtaagccataaggagccaatgaaaaaaattaaggacagcagtaatgatcatctttacatgctagaacacactactcagccacgtgcaaggtggactgacgctggggtgagcaagggtcttgaaagagatagtcaaagtctgggtcaaaaatgctgaggaaattctgagcataagaatgcataggagaggataaaaacctaaaatctgtatctaataaacttagctagacttctgattgttttaagtctgggaagggatgaaggaagctacctcgcaggttactagctgggccactggattagtaattactgnnnnnnnnnnnnnnnnnnnnnnnnnnnnnnnnnnnnnnnnnnnnnnnnnnnnnnnnnnnnnnnnnnnnnnnnnnnnnnnnnnnnnnnnnnnnnnnnnnnntcaaaatgagagcaagcaattatacagaatttctctccctcgacaarataagcttctcatattacagagatcttaactttgaaatgcttttcaaaatagggagtcacttgggctgggaggggacttcaactaagtcctcattttacagaggaggcactgaggggcaaggctgtttcaataccctgtccagagtgcgcactgttcaggcaaaaccaggactaaaaaccagctctgcc

SEQ ID NO: 36152 - DNA, 985 bp, Homo sapiens
ccctatttagaagacaacgtaagtatatttagctataagacagaggttataaattacagccagatggtttatgtggcccttagccatgtttaatttgacccacccaacatggttttgaaaattttaatttgatgatcacatttgaaaattgagagatttcacataggatctgaatctttagcttctctttaaaaaaatccaaatatgtataaacataacctatattctcagttggcaaaaattgcataagcaaatagaaagtttccactgtggtagtggtgtgtattctcaagtcttccagattccctgctctactttttctcccactctgaagttcagtgtcaacttccattgtttttcttatgccaattaatactatataccttaccatcctggccctaatagacttttgagattgtgacttttgctgcaaagacaccaaaattatttgagatacagattattaatagataagaataaaaagaccatcatttagatagtctgtgaatatactgaaacagctaaagaagagattcggaatgggaattaaaattgccactactactgagttttttaggggtatgatttattgcacagcaattttgattaayctggaagtggagaggatgttaggtcagtgagatgctcaggtgtgatatgtaaacatttctaagcaggcataatttatgtgcaaagaatattccatttggggagtaagagataagtggagagaaataacctggagctgagggctagaatgacggactgagggaaggagatagggaagaagggagagactttaagagttgtgagtttatagctcctcaaattcttgaacactgctgagggcctttggcttttctagccattcatccagtagctactgatgaaatcgactacagaacttcaggtcttgcacttgcttttatctctgcctaaatgacaccttctttttttttccccaaaccttaaatcatctgatttt

SEQ ID NO: 36153 - DNA, 985 bp, Homo sapiens
ccctatttagaagacaacgtaagtatatttagctataagacagaggttataaattacagccagatggtttatgtggcccttagccatgtttaatttgacccacccaacatggttttgaaaattttaatttgatgatcacatttgaaaattgagagatttcacataggatctgaatctttagcttctctttaaaaaaatccaaatatgtataaacataacctatattctcagttggcaaaaattgcataagcaaatagaaagtttccactgtggtagtggtgtgtattctcaagtcttccagattccctgctctactttttctcccactctgaagttcagtgtcaacttccattgtttttcttatgccaattaatactatataccttaccatcctggccctaatagacttttgagattgtgacttttgctgcaaagacaccaaaattatttgagatacagattattaatagataagaataaaaagaccatcatttagatagtctgtgaatatactgaaacagctaaagaagagattcggaatgggaattaaaattgccactactactgagttttttaggggtatgatttattgcacagcaattttgattaacctggaagtggagaggatgttaggtcagtgagatgctcaggtgtgatatgtaaacatttctaagcaggcataatttatgtgcaaagaatattccatttggggagtaagagataagtggagagaaataacctggagctgagggctagaatgacggactgagggaargagatagggaagaagggagagactttaagagttgtgagtttatagctcctcaaattcttgaacactgctgagggcctttggcttttctagccattcatccagtagctactgatgaaatcgactacagaacttcaggtcttgcacttgcttttatctctgcctaaatgacaccttctttttttttccccaaaccttaaatcatctgatttt

SEQ ID NO: 36154 - DNA, 572 bp, Homo sapiens
ttattaattctactttgactgtatgagaaattgttctctaaaagcctaaagctatattaaaaagaacaacaaattgataacaaaatcatttatgtatttttcaatctaatttatttgaaaacctttaatccaggagtgctgctaaatataaagcatgtttctaatgcagcactgtagttttattttctctaagactggattttcatgtcaatgkcatgataataaaaacagaaattaatgtgaactacagagtattacattttctattgaataaatgaaattaagatttctaatatatgcttgcagataagtttagaaaggaaaatgagacacaagtagataaaatgagtaacctaattgttaaaattgaggtttttttttctttttttttttttttttcgagatggagtcttgctctgtcacccaggctggaattcagtggtgcactctcagctctctgcaacctctgcctcctgggttcaagggattcttctgcctcagcctcctgagtagctgggactacaggtgcacgccaccacacctggctaaatttttgtatttttagtagaaat

SEQ ID NO: 36155 - DNA, 572 bp, Homo sapiens
ttattaattctactttgactgtatgagaaattgttctctaaaagcctaaagctatattaaaaagaacaacaaattgataacaaaatcatttatgtatttttcaatctaatttatttgaaaacctttaatccaggagtgctgctaaatataaagcatgtttctaatgcagcactgtagttttattttctctaagactggattttcatgtcaatgtcatgataataaaaacagaaattaatgtgaactacagagtattacattttctattgaataaatgaaattaagatttctaatatatgcttgcagataagtttagaaaggaaaatgagacacaagtagataaaatgagtaacctaattgttaaaattgagktttttttttctttttttttttttttttcgagatggagtcttgctctgtcacccaggctggaattcagtggtgcactctcagctctctgcaacctctgcctcctgggttcaagggattcttctgcctcagcctcctgagtagctgggactacaggtgcacgccaccacacctggctaaatttttgtatttttagtagaaat

SEQ ID NO: 36156 - DNA, 534 bp, Homo sapiens
gtatgttttttttgatggctcctaccacttgcttaatagcaaacacaaaatgaataaataagtagcaaacattgaagaaaaactcaggttggtgtgtgacagatacatgcatgtgtgaatatgatgtaatattgtctatagcaggagacctctggctgcctggattcaagctcagcgacctctccctgtctccttaattcatgccaaatgcctgatcttgattataaataacaattacagctaattaattctcagccatccagggttggtttagccacaggaataayaataataataactgttgttatttgaacatttgtaaaaagtaaataaataaaatgtcaaatcaacaaaaccatctacccattagagaagagtcaattttatatttcgtaattttatatatatatatatacacacacacacacacatgcacacatacatatatggatgcatacatttgtatatatgatgataaagcatataatgagctaagtcgtaaaacagaaaaacagaatgcaacatttcaacatt

SEQ ID NO: 36157 - DNA, 574 bp, Homo sapiens
aacaatgtgaaggattccagtttttttctagagtcaatactcctggttgcccatgtgtgctgagtactgttctaggcactataggtacaatgataaaccaatgtccctgtctctatggagctcacattcttttgggagtaactgacaaataaataaatgaatggacaaatacatgtattgatccctaagagactgaatgtcagctgataagagcagggaaggggaagtagattaagaggatgggggattctgttttagataaagtggtctgtgtctctgaggagytaccatttgagcagagccccagaagaattggggaagaaggctggggcacatctgcagggagagttttgctggaggaaagaacaagcatcaactcccatctcttgagatgggagtatgactggtctgtgcacgaaacttgcaaagtggccagtttggctggcgtgcagtgagtgaaaggaagagagcccggataaccagcaggaagtgctgttcagtgatggctgagtgctggccacacaggctctgggccaggactttggagtttattctgagagtttctagaagcccc

SEQ ID NO: 36158 - DNA, 589 bp, Homo sapiens
cctgctatataaacccctaattttagtcagtcagagagatggatttgagactgatctcccatctcctcacctgcagcacctgaataaagccttcttccctggcagtactgattatctcagtgattggctttctgtgtggtgaacagcagcaggatcaagaccgaaccactggtgttttggtaacattacctctcagtgtcacctaaacayatacacactcattcattcttctgtttttaagtggaaaaaaaagagtgtgtgtgtgtgtgtgcgcacacgcacaatataaactctttgagagcaaagactaacttaataaacacaaatactaggtaaatgctaaccagcttacccccaatgcagagagcttacaaagcagtctttgagcatgatgataaagtaaaacatgtttctggaactgcacacagaggtttgcagagatttcctcttgtcaaaggtaagtacaaaaaaatccacaagggtttggctggctccaatggagcaagagaggtcactctgggccctgagttatcaccttaaggggccggagcagctggcagttggaacactgagctggacattggtttgg

SEQ ID NO: 36159 - DNA, 534 bp, Homo sapiens
aaagactgttctaactaaaaccccacaatggcatctctcttcaagggacccgtgctatgggaccacttatctgatctgaagtatagtcaatacatatgattatgaagttccgggttctttctcacactcagtggtgaacaactcgcttctagaagtcagatttaataaaaccacatacatagacactccctggtgtccgcgcggttttaaaaccacttttcctggctccatttctccctgtcattaatatacataacttatgtgctgacttgaaaggtttgtattttgttgtggttttcatcctatctcagaaatatgtgactacaattatagacattggtcatccaagaaaaacagctaatgataccagcataaataagttcctagagcaaaagcattgaaaaaaaatttccccctggatttttatttattcactttgctttccaaaatgctacatgccacrttttaacctaaaaccaatgtacacatcagttttacccaattccagagctgaaactgaaaattataaagctt

SEQ ID NO: 36160 - DNA, 520 bp, Homo sapiens
cgggttttttggggtcttttttcagctttgaggtataattcacaaatgcaaattgtatatactcaaggtgtgcagcatgatgttttgatataaaagctgaactcacagaaacaaaatggaaaggtggtaaccaggggctggaggtaggagaaattggaaagacattggtcaaaggatgcaaacttgtagttacgagtaagttctggaaacctaaggtatagcatggtgactatarttgctaacaatgtattatatatttaaaatttgccaagaagtagatcttaagttttctcaaggcacacacacacggttatggcccctacatcagacacacataactatgtgaaaccatggtaggtattttacattttgttattaacctaagcacttgaacaacagatgtagggctgaagatcaagagaatcgctcagggtactttagtaccattccattggaacttaaacgctacgagggcaggaattttgtttcccaccgctctttccccaacacctataccagt

SEQ ID NO: 36161 - DNA, 567 bp, Homo sapiens
gcaaagatgtttgaaagaacaatctcaaaccatctcctacaccaagattagaacctttaaaggaaatgagtcagacccagggacttggaatgtctgatgttctattgctttaaaaaaaaaatgccttgggacataagttgctacacagacttctccaatgaaatgtgggcttcttgtacagatagaatttaggatcagtctttgaggcttttccaactccaggagggatagctctttccctgtttcyttttttttttttttttttttttttttcagaatttcgctcttgttgcccaggctggagtgcaatggcatatctcggctcaccgcaaattctgcctccctggttgaagcaattctcctgcttcagcctcccaagtacctgggattacaggcatgtgccaccatgcccagctaattttgtatttttagtagagatggggtttctccaggttggtcaggctggtctcgaactctcgacctcaggtgatccgcctgcctcagcctcccaaagtgctgggattacaggcatgaatccagtcttaaactttaagtttcaagtggccc

SEQ ID NO: 36162 - DNA, 681 bp, Homo sapiens
cttcaattataaatcatatacaactaaattatataaaataatgttgatatacacatactttgtaatactttgtgttctagagtaaaatacatgacakaatttataacattaaacatgcaattaaattttgtctggtacatgataatcatcctaatcttacttgtaatataaaatgtccttttcgtgtttttgattttattataagaactgattatttattttaaaatgttaatgtcatcagaacacaggccatctcaattatataatattttttaaatgagattaaagaaataaaatgtggggaataagacaacattgatacaaagtaggtataatcttggaagactgttatttaataacttcgaatgaaagtataagattgaatttaattgtattgaaattaggagaaactgtggatttctttggggttcatagcattcgatgattgctatatcttccatttcaatccaacattattctatgcaggataattaaatttagctcttgttaaattatgtcacctcattttctgattcattttatactgctgtataatgtaaggtatgttttcactaagctttattatgtgaaactgttttccacttagcaggtcctacagctgaggtttctaccatttaatttaacttttggagttacataagaatcaatcattgttcctgg

SEQ ID NO: 36163 - DNA, 551 bp, Homo sapiens
ggtctcactttatcacccaggctggagattagtgacataatcacagctcactgcaaccctgaactgctggcctcaagcaatcctcccaattgagcctcccaagtagctgtgactccaggctcatgccaccatgcctggctaattttttttttgagagccatagtcttactatgctgcccaggctgtgctggaattcctgagctcaagcaatcctcagcctcccaaagactgggactccaggcaagaaccaccatgcccagctgtgtggggacttttaaacttactcatatctcttttaaacttactcatatcataccacacatatttccttttttttttttttttttttttgagatggagtcttrctctgtcgcccaggctggagtgcagtgacgcaatctaggctcattgcaagctctgcctcccaggttcacgcctccacaccccgttaattttttttttttttttttttggtatttttagtagagatggggtttcaccgtgctagccaggatagtcttgatctcctgacctcgtgatccgcccacctt

SEQ ID NO: 36164 - DNA, 551 bp, Homo sapiens
ggtctcactttatcacccaggctggagattagtgacataatcacagctcactgcaaccctgaactgctggcctcaagcaatcctcccaattgagcctcccaagtagctgtgactccaggctcatgccaccatgcctggctaattttttttttgagagccatagtcttactatgctgcccaggctgtgctggaattcctgagctcaagcaatcctcagcctcccaaagactgggactccaggcaagaaccaccatgcccagctgtgtggggacttttaaacttactcatatctcttttaaacttactcatatcataccacacatatttccttttttttttttttttttttttgagatggagtcttgctctgtcgcccaggctggagtgcagtgacgcaatctaggctcattgcaagctctgcctcccaggttcacgcctccacaccccgttaattttttttttttttttttttggtatttttagtaragatggggtttcaccgtgctagccaggatagtcttgatctcctgacctcgtgatccgcccacctt

SEQ ID NO: 36165 - DNA, 607 bp, Homo sapiens
gacatctaaactaagcccgtgtcataaatccttaggtccagaaggacccagaagggctactgagcccgtccctgatgctccagataggaccctctggaatgaccctttgtgtttgttaactgtccctgtccaccccatccccagctccttcaacttccccccgccgccccacctcgctttccccttctcaccactgtgggtaggagtgaaagtgagccgcaccagggagggaaatcgcaaagtgccttttaccttctctcttaatcctgaatggtaagaaagtcttctttcctaacacattaatagtttcagccgtggtattttaggtaagctatgaaagattggaaagtgttttctgtcgagaagaaataattatccctttcaaaaaattgtatattccaaacatcttctctctttgttaggttattgaaagtctgctatttaaatagttatttcctgttacttattaactcagaaaattttctatatggttrtatttgggaagatttatttaaaagttttcttttagagttaacatcaataatctgcatgttttctacagtggaggtgttaatgttgaaacataagagaatgaacatactcagcg

SEQ ID NO: 36166 - DNA, 572 bp, Homo sapiens
aaatttgaaatgtattgagcacccacatgatgatcaaaggaaattctcactggagcattgtggattttggatttttaaattagagatactcaaccagtatrtataaggcaaatattcccaaaatctgaaacacttctggtttcaagcattttgggtaagagatatgcaacctgtgtctactacaatgtgtcatgtggacacagggctctggtacagagcaggcacttacatatttactgaatcttgaataaatgaatttatgaaaaaatatccagatacagtcacataaaataatgttacatgtttcaatggatatatatataaagaggaaactatacattatatatgttagatatatatttatatagtaaatacatgttaaaaatatataatcattatatcttatgtattatatgtaaaatattgtgtcatactgtatatattataaaatatctaatatattatttatattatataaatacaaataaaatatagttatacttttaatgtattttaaaagtaatgtatatattatttaaatataaataaataaaggaaatgatctcataccc

SEQ ID NO: 36167 - DNA, 1245 bp, Homo sapiens
tatatgcattatgccaaattccattacaacagaatacttgccagaccccatggagtgtcataacagaagagtaactctgaagccacagaggtagctatcaagattgcttcatatatatttactcctgcctattttcaaaagaaaaaggggaaacataggaagatagcaaaaactcagtccatcttcccagaaactgtctgaaaggcccaaaggattggctataaaatgaagaaggaaaatcctctggcttgacacccagatgtaaggtccagaaggcagggaaagatcctgctcacaaaagctggctggaccagtctcaaacctgcttaactttgtcctcatactgtttccatttcaggatttgctctccctttagagactcttttttggatcacagattctttttctttttttttttgagacagagtctcactctgtcacccaggctggagtacggtggcaagatctcgtctcactgcaacctccacctcccaggttcaagtgatccattcttctgccacagcctcccaagtagctgggattacaggaatgcgccaccacgcccagctaattttgtatttttagtagagatggggtttcaccatgttagtcaagctggttttgaactcctgacctcaggtgatctgtccacctcagcttcccaaagtgctggtattacaggtgtgagcgaccacgcctggccgagatgtaagtattgaatgatggtcaagctaggtgatttaaagagttgttctaaccaaaaagactgatttgggaatgctctacacaatcatagtgactcatcttggagagatcccacccccaagaagtgagtactcacaagccaaagacaccaaattctcaggggaggcccaaacttgtaatgcaattgggttcagccattccccatgcaatagtaactggggtctgtggcctaagacacccaggcagtaacagaaatggagagggagggtgtggcaagagaaaggcaatgttgggagttaaaggtatggggttggagaccacaaggccatatatcagtcctgcctgtcaatttttgacacctggagcacatgcttaggtggggaacttctaaccacaacccttaccttccaggatttggagagaaaaatttcactaactgccttaccctraagcctcagaacacactgggttgggtagatctggtggaggggaggagtggtcagtccctaggtgttttcttcagtgaagaagcgacaccaa

SEQ ID NO: 36168 - DNA, 1245 bp, Homo sapiens
tatatgcattatgccaaattccattacaacagaatacttgccagaccccatggagtgtcataacagaagagtaactctgaagccacagaggtagctatcaagattgcttcatatatatttactcctgcctattttcaaaagaaaaaggggaaacataggaagatagcaaaaactcagtccatcttcccagaaactgtctgaaaggcccaaaggattggctataaaatgaagaaggaaaatcctctggcttgacacccagatgtaaggtccagaaggcagggaaagatcctgctcacaaaagctggctggaccagtctcaaacctgcttaactttgtcctcatactgtttccatttcaggatttgctctccctttagagactcttttttggatcacagattctttttctttttttttttgagacagagtctcactctgtcacccaggctggagtacggtggcaagatctcgtctcactgcaacctccacctcccaggttcaagtgatccattcttctgccacagcctcccaagtagctgggattacaggaatgcgccaccacgcccagctaattttgtatttttagtagagatggggtttcaccatgttagtcaagctggttttgaactcctgacctcaggtgatctgtccacctcagcttcccaaagtgctggtattacaggtgtgagcgaccacgcctggccgagatgtaagtattgaatgatggtcaagctaggtgatttaaagagttgttctaaccaaaaagactgatttgggaatgctctacacaatcatagtgactcatcttggagagatcccacccccaagaagtgagtactcacaagccaaagacaccaaattctcaggggaggcccaaacttgtaatgcaattgggttcagccattccccatgcaatagtaactggggtctgtggcctaagacacccaggcagtaacagaaatggagagggagggtgtggcaagagaaaggcaatgttgggagttaaaggtatggggttggagaccacaaggccatatatcagtcctgcctgtcaatttttgacacctggagcacatgcttaggtggggaacttctaaccacaacccttaccttccaggatttggagagaaaaatttcactaactgccttaccctgaagcctcagaacacactgggttgggwagatctggtggaggggaggagtggtcagtccctaggtgttttcttcagtgaagaagcgacaccaa

SEQ ID NO: 36169 - DNA, 615 bp, Homo sapiens
aatgttattctctgtgcccaggaaatatggaatagacatgtcactctgcactgaatgcgttaatcagtttttgttagcagcatggcataatgagtatattaactacaacacgtacgttggcagccagcagtgtgcttgtgaaatcttttagaaaacagaaatctggtgagaagtgttcctgagcagttgaagtattgttgggtgcagagggagggcgttacatagagcaaataaagtagaaaaaatttatcctccaaaaagtagttgtttcaccactgaaagccatgagacttyaagacgttttatctgtggattgagatgtggctgtctaatttatgtaggacttacagagttctttttgtattttgatttttcatttaactttgtcatttaaagaacttcaaggtacatttccatttgatgaaaaaagttatgtaaaacatttattttaaggatggtttctcattttttagtatatattatatgctactgtaaattatttttcccttccacttccaattaaaacatatctgacttgaaaaaatatcttcagcagaaataagaaaagtttctatttaagcagagttcttggcacttaagaggtgttcaataagt

SEQ ID NO: 36170 - DNA, 600 bp, Homo sapiens
acttaagctaagatcaaataaacacaaaaagatgtgtataatcataaaggtaagttacagtttcataaattcctttcaaatggaacatattccagacaccataacagtagacataacatagtgatgtgaaaactgcaattacccagacataagtagtagcacttcatgccatcccaacyctttagagtagaacaatgccttaatataatttaagaaaaataatgtttccacagaagattgttttcaaaacaattacaggctcatgcctataatcccaacactttgggaagccaaggcaggtggatcacctgaggtcaggagtttgagaccagcctggccaacattgcgaaacactgtctctactaaaaatacaaaaattggccgggtgtggtggcgggtgcctgtaatcccagctgcttgggaggctgaggcaggagaatcacttgaatctgagaggcaaaggctgcagtgagctgagatcacgccattgcgctttagcctgggcaacaagagtaaaactccatctcaaaaaaggaaaggaaaagggaaagggaaggaaaggaaaagaagaaagaagagaaagaaaagagactttgactc

SEQ ID NO: 36171 - DNA, 585 bp, Homo sapiens
aggccacagaacagtaagtgggaaggcccaagtttcaacctagataggccacaatccatactcacaaccccttcrgtagatttcacccactgactcatctcctagggcctagatcaaagaaacacaaataaagatatccgtgaccattaataatgaaatcagatcctttctctgctaaaaggggatatttatactcacaaacttcaaggaaatgtggccctgttaggtggagggtgctctgacctgctggtccccttgatggattggaggatgtgtgttgggccacaggtgttgagaaatctgaactgctctgtacagtaaagggagatggatgatcccagggacaatccatgataaaggatgaggggggaacaaagagtcgttcaggggaaagctggaagaggctgggatgagctaaagggcccacaatgatgaggcatccaatgggtatgttagaaacagggatgcctatagtgcctattaaagctgatagtgcagctcccaaattttcctttcaatgaagtctatgtggctccctaatgttctataagacagattctttgagaagaacttgcaaaagtatct

SEQ ID NO: 36172 - DNA, 1309 bp, Homo sapiens
ggaagaagtaggtcagttgagactcagattgtctttaaattaaatctccggatttgtcacactttcccatctatttcccagkaatactgggctaagacaggcctcctcacgttggggcagatctgtgccaacaactagctcctgagaggaagaaaatgcagagaatgcccaattattaccaaatccatcagttggataagctcttccatatcccctggggagaaatgagtaaaggggagaaaagtagaaaaagtttcatggagtgttagaggtgtagggtaaccatgttcccttctacatagaattattggggattttgtccttcattgctcttgatggaccatgggaactccaaggccaggtaaaaagcaagggtcagcaagcttccactctgtggaatcacagataatagcaacattcaacacaacataccttgtttcaggtgagatcaaatctacagtgtttgctaagaggctatgatgggtatcatgataaggtattatgctgggcatcaaaggggaacacaaacatcacagagacacactgtagccctttaggagcttttatctaatagggaacacagacagatgtttaccaatgacaaagatatatagagtgtggtaaaagtgtctctgggaagtatttcggcaataggaattgtgagagttttctataagaatgtattcgacctaggccttgaagttccagatcaaatgctccctttcccatagagccttctttcatacccacagcaggaatcaatctcctcttcctcacaattcccatggcaatttaactaatatttcttccacccaagtactaaccaggccctaccctgcttagcttccaagatcaggcacattcagggtggtatggccatagaacttaactaacatttcttattgtgcttatgattcttgtaccttatctactaggtcattgtaatgaatctgttatttctcttttatgccacaagccattaaagacaggaaacatgtctcacctgcagtaggtatttgagaaacgtttctcaagttaataagcagtaaacctataatggagaaaatttgttgaggtggctactaatatttctcttccacacgtttttttcccttatgaaaatagaagtggtggcatctccatgcctcaccctgtgtatgattccaaccacataaggagaggtggccccgaccacttaactgctttgtccatgcattcaatcgtccctttaagtaccctagttgcttactttctgagtatttgccatttgtggcttttctcataggacagaaatttctgccagaataat

SEQ ID NO: 36173 - DNA, 794 bp, Homo sapiens
catagaaagagctaaaaatataatagaagaggaaataataamctgagtcctcaggaacatggacagaaaaagtcaacagtacagaaggaatgaggggggggtgtctttctcagaaactggaagacagctgaggtaaagctatgaaacttagtggggatggagacaggaatctgaggaattttatccctgagaaccttgaagtttctcccattaaggacaaggaatggagcaacacgaaacaaagtggaagagcttagaaggcaatgatgaaggtttggaagagtcactggggacaattaggagagggagctggccagatttttggaccattttgaagacttacctgagactgggtactatgaatgtatagagggaaaaaatccaaacaattatatcagttttcccaatagcctaaaggtagaagtagagaaagtatatagtgggattgatccatgtttgaggatttgcaggaccaatggagtgattaaaaaaaaaaaatggggccaaggcttccaggctaaacaagcattgaagctacaggagaagagagactatatgacaggtggagggaattagatagatttaaacatagaagggacagggccaaattgagttttgactataactactctgggtgcagaatagaacatgtaacataaaagggctaagactggagacagagaaaccactaggcagctctctcactaatccaagacaaggatgacaagtttctgaactggcaaaggcagtgcattccattccggtggctgccataacaaattaccacaaactac

SEQ ID NO: 36174 - DNA, 794 bp, Homo sapiens
catagaaagagctaaaaatataatagaagaggaaataataacctgagtcctcaggaacatggacagaaaaagtcaacagtacagaaggaatgaggggggkgtgtctttctcagaaactggaagacagctgaggtaaagctatgaaacttagtggggatggagacaggaatctgaggaattttatccctgagaaccttgaagtttctcccattaaggacaaggaatggagcaacacgaaacaaagtggaagagcttagaaggcaatgatgaaggtttggaagagtcactggggacaattaggagagggagctggccagatttttggaccattttgaagacttacctgagactgggtactatgaatgtatagagggaaaaaatccaaacaattatatcagttttcccaatagcctaaaggtagaagtagagaaagtatatagtgggattgatccatgtttgaggatttgcaggaccaatggagtgattaaaaaaaaaaaatggggccaaggcttccaggctaaacaagcattgaagctacaggagaagagagactatatgacaggtggagggaattagatagatttaaacatagaagggacagggccaaattgagttttgactataactactctgggtgcagaatagaacatgtaacataaaagggctaagactggagacagagaaaccactaggcagctctctcactaatccaagacaaggatgacaagtttctgaactggcaaaggcagtgcattccattccggtggctgccataacaaattaccacaaactac

SEQ ID NO: 36175 - DNA, 1215 bp, Homo sapiens
tactgagtcgggcccttccctgcctgcagggtcaggtccagtcgccacttgctggccctgtttctgccccacccctgcccccaactgtttcctcctcccctccccctgcccaggcactcacacctgtctgctgttttctggggcagcccacaattcccttgaaggctgctgtctcaactggagaagggatgcctrgagcaggggcctttaggttgtctccagcccagcttctgtgttccttccacatgggggacttacaaggccagcagtccctatacctgtggacagaactccttctgcacccccacaccccagcaccctcaaggggactgcctgagccctctgggtgcttgtggagtccacatgcatcttaacaagctggtccttggggaggggaaaggaactcctaccaggttctcttttcatttcctcaaaggagccctgctagtggccgggcttcttaacagcacggtgaccttggatgtccttgaccaagctggcagcaggcgatgggcagaccacagagggggtgcttgggcagtgtggacacagctgaaatccccaggggagcctgagaatgcagaagggggcctgagagtggggcaacatgcccacatgcagtccatgtgcaaacagccatgcacacgtgcacaggcacacatgggcacacatgcacatgctcatgcacacatacacacatggacacaccaaggaatggcccagcttatggtctcattcttggccttttcttaacaaaacacccaaaactatgtttgggaaaagcaaggacttctctctaggctacttgaaatattcagacaagcccaggaagggtgaataggtttcccatgaccccacacatctgaggctttgggcagaccctctcagaaggcttaacatggttgtttttagatccaaatatctggctgcagctctggagacctgggcctgcgctcattgaaagtccttctctctttgtctttgagtctggatgtgaatctggagccctcattttcaaacagacaatctgaggcctggacaggggaaaaagatttccctggaaatcactgttgagggggcacagtaggctagactcaggggcctgccctggtctgccctgcaggcagccacgggcatggcgctgtctgctatagccgctgtccttcctaccttccctgcctgccctcacggtgcctcctcccgctgcattcgctg

SEQ ID NO: 36176 - DNA, 1021 bp, Homo sapiens
gaagaaaccaacaacactgccaataccttgctcttggctttctagcctctaggactctacagacttacattctgttgcttaagcctcccagattgtggtgctttgctgtgacgttggagcggactcatacaccacccaacccccgtgtgatcttggctaactcaacatctctgagccttggagacattatctgtacaatgaggagtttggatccttctagctccaatatcttatgcctctgaggatctaccccaaagagcacataaccacttttataagagtaatccctggaaaataagacagtaactgtccttaggatgaaggcaccaagacttgacagagtgccttgactagccacctgctctctgatttactaagttgaactgtccagtgacaccatggtgtagycaaagaatttagcaactactataaaagaattcattttcctaatgtatttcctacatcctagctctaaaaccctggtagtctcacaacggttcttgctccccatttttatttttaactagtggtcacttaaatttatattatacacatgtttagcaaccaatttttcatgacagttatgctatacacagaagcatcatgatcagggtgctgttttaagggcttggggtgatgagtattttaggtgctagttagtgctcattctaatctccgtgttctctaaaggaaatagccactaaacaggaaccatctggtaatgcattctgtacctcttaattacaatgttttgagtggcacctaaataaatttcatttacaagcacatgactgcttgtcaaaagtctgttgataattttattattgtaacatactttcttccttaattatttagttccagtaaagttaggaatattaatttttatggaaattacttgtaccaacaaacctaagccacaaacctggttttatttatgtaaatgtatttataaatgtatggtaatatatctacccacacacccatcacaatgggttcccatgggccgttcaaaacttctgcc

SEQ ID NO: 36177 - DNA, 1021 bp, Homo sapiens
gaagaaaccaacaacactgccaataccttgctcttggctttctagcctctaggactctacagacttacattctgttgcttaagcctcccagattgtggtgctttgctgtgacgttggagcggactcatacaccacccaacccccgtgtgatcttggctaactcaacatctctgagccttggagacattatctgtacaatgaggagtttggatccttctagctccaatatcttatgcctctgaggatctaccccaaagagcacataaccacttttataagagtaatccctggaaaataagacagtaactgtccttaggatgaaggcaccaagacttgacagagtgccttgactagccacctgctctctgatttactaagttgaactgtccagtgacaccatggtgtagtcaaagaatttagcaactactataaaagaattcattttcctaatgtatttcctacatcctagctctaaaaccctggtagtctcacaackgttcttgctccccatttttatttttaactagtggtcacttaaatttatattatacacatgtttagcaaccaatttttcatgacagttatgctatacacagaagcatcatgatcagggtgctgttttaagggcttggggtgatgagtattttaggtgctagttagtgctcattctaatctccgtgttctctaaaggaaatagccactaaacaggaaccatctggtaatgcattctgtacctcttaattacaatgttttgagtggcacctaaataaatttcatttacaagcacatgactgcttgtcaaaagtctgttgataattttattattgtaacatactttcttccttaattatttagttccagtaaagttaggaatattaatttttatggaaattacttgtaccaacaaacctaagccacaaacctggttttatttatgtaaatgtatttataaatgtatggtaatatatctacccacacacccatcacaatgggttcccatgggccgttcaaaacttctgcc

SEQ ID NO: 36178 - DNA, 1021 bp, Homo sapiens
gaagaaaccaacaacactgccaataccttgctcttggctttctagcctctaggactctacagacttacattctgttgcttaagcctcccagattgtggtgctttgctgtgacgttggagcggactcatacaccacccaacccccgtgtgatcttggctaactcaacatctctgagccttggagacattatctgtacaatgaggagtttggatccttctagctccaatatcttatgcctctgaggatctaccccaaagagcacataaccacttttataagagtaatccctggaaaataagacagtaactgtccttaggatgaaggcaccaagacttgacagagtgccttgactagccacctgctctctgatttactaagttgaactgtccagtgacaccatggtgtagtcaaagaatttagcaactactataaaagaattcattttcctaatgtatttcctacatcctagctctaaaaccctggtagtctcacaacggttcttgctccccatttttatttttaactagtggtcactyaaatttatattatacacatgtttagcaaccaatttttcatgacagttatgctatacacagaagcatcatgatcagggtgctgttttaagggcttggggtgatgagtattttaggtgctagttagtgctcattctaatctccgtgttctctaaaggaaatagccactaaacaggaaccatctggtaatgcattctgtacctcttaattacaatgttttgagtggcacctaaataaatttcatttacaagcacatgactgcttgtcaaaagtctgttgataattttattattgtaacatactttcttccttaattatttagttccagtaaagttaggaatattaatttttatggaaattacttgtaccaacaaacctaagccacaaacctggttttatttatgtaaatgtatttataaatgtatggtaatatatctacccacacacccatcacaatgggttcccatgggccgttcaaaacttctgcc

SEQ ID NO: 36179 - DNA, 669 bp, Homo sapiens
tgccatccatacaatgaagccctcagcctccccctgaaccctggcctgtgtaggaggcttcctgcctgttctgggagcctgggcctggctgagatcctcctggctcattaccagcccagagtccccctctgtcttcatcatctcatgcccgagccaagccagtgacctcaccactcacccagggatgcctcaagagcagcatttgtcacaaagtggctaactaacctagaagtgggccacaacctgagaaagctttctacggaacaaaaggggtgattgcctataggtcagaactgtcctcatcaaaaacgagaagcaagttcagccacaggaggcagaggctgtgtttgtgaagggaacataaatggccttggaagtggtgcaacaagcagaaacataagtagtgtagcccagagccctctggaaaggttcttgtcatcagtgacccccgtcggatcgcatggcctctgattttcacagtcacggatggtctcaggagaaaaaacatgtaaactaggactyaagcaaggggtttgctttttgccactgattggtggactaattaattaggcttcctgggcagaaacggctctgctgctggcggagcccccataccacgcagagatctggggagagaggaaggggctggccaaaatagtcacaccaggg

SEQ ID NO: 36180 - DNA, 669 bp, Homo sapiens
tgccatccatacaatgaagccctcagcctccccctgaaccctggcctgtgtaggaggcttcctgcctgttctgggagcctgggcctggctgagatcctcctggctcattaccagcccagagtccccctctgtcttcatcatctcatgcccgagccaagccagtgacctcaccactcacccagggatgcctcaagagcagcatttgtcacaaagtggctaactaacctagaagtgggccacaacctgagaaagctttctacggaacaaaaggggtgattgcctataggtcagaactgtcctcatcaaaaacgagaagcaagttcagccacaggaggcagaggctgtgtttgtgaagggaacataaatggccttggaagtggtgcaacaagcagaaacataagtagtgtagcccagagccctctggaaaggttcttgtcatcagtgacccccgtcggatcgcatggcctctgattttcacagtcacggatggtctcaggagaaaaaacatgtaaactaggactcaagcaaggggtttgctttttgccactgattggtggactaattaattaggcttcctgggcagaaacggctctgytgctggcggagcccccataccacgcagagatctggggagagaggaaggggctggccaaaatagtcacaccaggg

SEQ ID NO: 36181 - DNA, 991 bp, Homo sapiens
aacayagaaccctcactaggccattgcaacaaggacatcaacaataaattagttaataagtgccataaattcaaagtatgtatgactagtcactgtacagaaattactaatcaggagtttgtgaggttgaaataaacttttcttaactatccatcatgaaaatataaattttgatcaaccaggttaaggggaagaattattttttttctctttaggaagaattgtttctctttttacaaaatcattgtcatgtaaaaaaacaaagcaatgtaaccaaaaatatataggaaaaagtattacagatgtgtgtcagtctaaatactatgcatttttctggactttgtgattgataactttgtcagctttttagaatttgtaacttttttactattttcattttaaataatcattttcacttgtaactttatagtcacaattttgtgttctttttttaaaaatacagtcacccaaactgcattggtttcaggccacatatagctgtgctatgcctttgcttgttggagtgatagatcctgcggctttcaataatggagcagaaaattacaggctgagttctagtgggaagcgcactcttctcttaggaggctctgcaagtcatggcaatgggttagtatatgtaattctctgcaggaatacccctttcctgcagaggagttcacaccagcacatctagtagtaaatacttaagcaaaataatacaacctacatagttgctgtcttgtttgctcctacatagaaattcccttgccctttcccaaagtagatttctccaaagttccattcaatcttgatgttggcccaaagattagtattttgtgatcatattttattagttccagatgtgattcttgagtgggaagagaatgaacaaaaacactaaacgataagccaacaaaactacccaaaactagtaccattgtgtccgaaattggtggattcttggtctcattgacttcaagaatgaagctgc

SEQ ID NO: 36182 - DNA, 991 bp, Homo sapiens
aacatagaaccctcactaggccattrcaacaaggacatcaacaataaattagttaataagtgccataaattcaaagtatgtatgactagtcactgtacagaaattactaatcaggagtttgtgaggttgaaataaacttttcttaactatccatcatgaaaatataaattttgatcaaccaggttaaggggaagaattattttttttctctttaggaagaattgtttctctttttacaaaatcattgtcatgtaaaaaaacaaagcaatgtaaccaaaaatatataggaaaaagtattacagatgtgtgtcagtctaaatactatgcatttttctggactttgtgattgataactttgtcagctttttagaatttgtaacttttttactattttcattttaaataatcattttcacttgtaactttatagtcacaattttgtgttctttttttaaaaatacagtcacccaaactgcattggtttcaggccacatatagctgtgctatgcctttgcttgttggagtgatagatcctgcggctttcaataatggagcagaaaattacaggctgagttctagtgggaagcgcactcttctcttaggaggctctgcaagtcatggcaatgggttagtatatgtaattctctgcaggaatacccctttcctgcagaggagttcacaccagcacatctagtagtaaatacttaagcaaaataatacaacctacatagttgctgtcttgtttgctcctacatagaaattcccttgccctttcccaaagtagatttctccaaagttccattcaatcttgatgttggcccaaagattagtattttgtgatcatattttattagttccagatgtgattcttgagtgggaagagaatgaacaaaaacactaaacgataagccaacaaaactacccaaaactagtaccattgtgtccgaaattggtggattcttggtctcattgacttcaagaatgaagctgc

SEQ ID NO: 36183 - DNA, 991 bp, Homo sapiens
aacatagaaccctcactaggccattgcaacaaggacatcaacaataaattagttaataagtgccataaattcaaagtatgtatgactagtcactgtacagaaattactaatcaggagtttgtgaggttgaaataaacttttcttaactatccatcatgaaaatataaattttgatcaaccaggttaaggggaagaattattttttttctctttaggaagaattgtttctctttttacaaaatcattgtcatgtaaaaaaacaaagcaatgtaaccaaaaatatataggaaaaagtattacagatgtgtgtcagtctaaatactatgcatttttctggactttgtgattgataactttgtcagctttttaraatttgtaacttttttactattttcattttaaataatcattttcacttgtaactttatagtcacaattttgtgttctttttttaaaaatacagtcacccaaactgcattggtttcaggccacatatagctgtgctatgcctttgcttgttggagtgatagatcctgcggctttcaataatggagcagaaaattacaggctgagttctagtgggaagcgcactcttctcttaggaggctctgcaagtcatggcaatgggttagtatatgtaattctctgcaggaatacccctttcctgcagaggagttcacaccagcacatctagtagtaaatacttaagcaaaataatacaacctacatagttgctgtcttgtttgctcctacatagaaattcccttgccctttcccaaagtagatttctccaaagttccattcaatcttgatgttggcccaaagattagtattttgtgatcatattttattagttccagatgtgattcttgagtgggaagagaatgaacaaaaacactaaacgataagccaacaaaactacccaaaactagtaccattgtgtccgaaattggtggattcttggtctcattgacttcaagaatgaagctgc

SEQ ID NO: 36184 - DNA, 991 bp, Homo sapiens
aacatagaaccctcactaggccattgcaacaaggacatcaacaataaattagttaataagtgccataaattcaaagtatgtatgactagtcactgtacagaaattactaatcaggagtttgtgaggttgaaataaacttttcttaactatccatcatgaaaatataaattttgatcaaccaggttaaggggaagaattattttttttctctttaggaagaattgtttctctttttacaaaatcattgtcatgtaaaaaaacaaagcaatgtaaccaaaaatatataggaaaaagtattacagatgtgtgtcagtctaaatactatgcatttttctggactttgtgattgataactttgtcagctttttagaatttgtaacttttttactattttcattttaaataatcattttcacttgtaactttatagtcacaattttgtgttctttttttaaaaatacagtcacccaaactgcattggtttcaggccacatatagctgtgctatgcctttgcttgttggagtgatagatcctgcggctttcaataatggagcagaaaattacaggctgagttctagtgggaagcgcactcttctcttaggaggctctgcaagtcatggcaatgggttagtatatgtaattctctgcaggaatacccctttcctgcagaggagttcacaccagcrcatctagtagtaaatacttaagcaaaataatacaacctacatagttgctgtcttgtttgctcctacatagaaattcccttgccctttcccaaagtagatttctccaaagttccattcaatcttgatgttggcccaaagattagtattttgtgatcatattttattagttccagatgtgattcttgagtgggaagagaatgaacaaaaacactaaacgataagccaacaaaactacccaaaactagtaccattgtgtccgaaattggtggattcttggtctcattgacttcaagaatgaagctgc

SEQ ID NO: 36185 - DNA, 441 bp, Homo sapiens
tgcyatctggagagcagaacatgatgacaaaggtatattttattatctccaagtaaggtgtatatcaatattatgtttagagtcagaatagatgacaaagatttaaaatacttgtaacatccagtgttggtgagtatgtgagaatgtgatcacttatgtatgctattgatggaataacactgataaagccttttcagaagaattggttaaattctcatatagtgatacaatggaatatttccatcattaaaggttttttagctccatatttgttaaaataagttgtccatcgataggttgacaatggacaattgccagaaagcaatataagtgacaaaaagcaagttatagaacagtatgtataaaatagttctcgagatatatttaaaccttctaggttatacccagaaagacttttagttggcagaaatttgcagaaac

SEQ ID NO: 36186 - DNA, 541 bp, Homo sapiens
aaaatttaattataaattgacaggaaagatataaaatgtttcctcataattttcttatttaaaattagaaattcctcagagttaacaaacacttctgtctaatgctcactattattattacagataggctcacagctaaatgtgtaattcaggaaaagaaaaggcaatattccccaggtcaagaaaacgttcaggactcgataatcaaaaagctttgcttatactaggaattactggggataataggcaaaacacatggttttaaagggagttcagtgaggaaagaatattcttttcaacaaatggtactgggaccattgggtatctctgtgcaaaaatgatgaacttggacctttagcccacaccacatacaaaaattaatttaacatggatctgaggcccaaatgtaagaggtaatattacaaaacttttacaggaaaacatamgaggaaatcttcttggcctttggttaggcaaaagtgtcttagatacaacaccaaaagcatgatccataaaagaaaaaattggtaagctgaatttc

SEQ ID NO: 36187 - DNA, 1087 bp, Homo sapiens
  misc_feature (1)...(1087): n = A,T,C or G
actccttttggtgacactgtactgaatgaaataggaagcaatgaacttcaggctctcacagaggaaggctaaagtacttcttattctatttgaattgcaggaatcataaatctagttttacaataaagatgaattaggaaagctacaaaataccataataaaaattgaagtgggtcaaaaaaataaataagcagtttttagtatataacataaatctatcactaaggcatacatacataactttttgtttttcttttccatatattatatgtaaaatggcatctctcagagtaatgggatttctttgaaaacagaatgggtaagtgtgtatataatgactcagctggatcagctaggtggtgatccttttaaaccactggcaaaatacccctctccagtgagatccattttccctgcatctggtaagtctcatgccatgtgtaaatgctcacagcttggtttgcaccagaaaaaattctgtagctataatgcagtccagctcctttacttttctttaagagttttttaaaaaattagttcttcttcccaactagatggatggtggaatccatgagatggaatttttgccaaatactcacagcatttatcaagtccagnggcctgaggttatgtgataccttaaggacttaggagaaaataatttttttttctgtcatgcagtccctggtgtttgtcacaggatagtaaaaatgtctcaattsttcatttttagataacaatcaacagagacagtggtgaagatgtaagctcccccaaacacgggaaggaggacccagacaacatgcctcacgtgggcggcaacacttgggctggcggaacaggttggtagcacaggcattctccctgagtccagccttccccaggtttacccaagccccattagggccagcacatcgcccctgagaagactcagaggcgggctttcttctctagcctccctcattactcagttggattgttgtcttgccctctgccccagcgtgacatcaaggcatgtgaagagcctggctttggagtaccgcaggctctgccacctgtgactaaaaaacatgctgcnccccnctgg

SEQ ID NO: 36188 - DNA, 525 bp, Homo sapiens
tgtcmagatggtttcactggagaaatgcgctaattaggctggaggtcaaagagctgctgctgtttgaagcaggtgctattagttttgtgtgcaccagtggctttgaaggtgcatgaaaaatagaccacgtctccctggtttttattacaattaaggaaaagatgtgttctctgcctggagcctggtttctcacccaggaaatgtacgttgccttgagagagtcctgtgtatctcttgggctgtcttcatagtcatcactagcttccttcttcccaagcccttgtttaccatcacggaagcctagaatagtgatactggcaccctagatattatccaggtgaccacataacattccacaggggaggagatggatgccaggagaggtgagatgattcttattactcttccagggtgaggttagtgatggacactgggctggaacctggctctgatgtcctcatcccgtgatgcacagcagggtaagaggcactgaatgtagcaccatggcttattggagggaggcat

SEQ ID NO: 36189 - DNA, 525 bp, Homo sapiens
tgtccagatggtttcactggagaaatgygctaattaggctggaggtcaaagagctgctgctgtttgaagcaggtgctattagttttgtgtgcaccagtggctttgaaggtgcatgaaaaatagaccacgtctccctggtttttattacaattaaggaaaagatgtgttctctgcctggagcctggtttctcacccaggaaatgtacgttgccttgagagagtcctgtgtatctcttgggctgtcttcatagtcatcactagcttccttcttcccaagcccttgtttaccatcacggaagcctagaatagtgatactggcaccctagatattatccaggtgaccacataacattccacaggggaggagatggatgccaggagaggtgagatgattcttattactcttccagggtgaggttagtgatggacactgggctggaacctggctctgatgtcctcatcccgtgatgcacagcagggtaagaggcactgaatgtagcaccatggcttattggagggaggcat

SEQ ID NO: 36190 - DNA, 525 bp, Homo sapiens
tgtccagatggtttcactggagaaatgcgctaattaggctggaggtcaaagagctgctgctgtttgaagcaggtgctattagttttgtgtgcaccagtggctytgaaggtgcatgaaaaatagaccacgtctccctggtttttattacaattaaggaaaagatgtgttctctgcctggagcctggtttctcacccaggaaatgtacgttgccttgagagagtcctgtgtatctcttgggctgtcttcatagtcatcactagcttccttcttcccaagcccttgtttaccatcacggaagcctagaatagtgatactggcaccctagatattatccaggtgaccacataacattccacaggggaggagatggatgccaggagaggtgagatgattcttattactcttccagggtgaggttagtgatggacactgggctggaacctggctctgatgtcctcatcccgtgatgcacagcagggtaagaggcactgaatgtagcaccatggcttattggagggaggcat

SEQ ID NO: 36191 - DNA, 525 bp, Homo sapiens
tgtccagatggtttcactggagaaatgcgctaattaggctggaggtcaaagagctgctgctgtttgaagcaggtgctattagttttgtgtgcaccagtggctttgaaggtgcatgaaaaatagaccacgtctccctggtttttattacrattaaggaaaagatgtgttctctgcctggagcctggtttctcacccaggaaatgtacgttgccttgagagagtcctgtgtatctcttgggctgtcttcatagtcatcactagcttccttcttcccaagcccttgtttaccatcacggaagcctagaatagtgatactggcaccctagatattatccaggtgaccacataacattccacaggggaggagatggatgccaggagaggtgagatgattcttattactcttccagggtgaggttagtgatggacactgggctggaacctggctctgatgtcctcatcccgtgatgcacagcagggtaagaggcactgaatgtagcaccatggcttattggagggaggcat

SEQ ID NO: 36192 - DNA, 1425 bp, Homo sapiens
aaagcaggcctcagctacggcaccttcaggaaaccaacagagcaaataaaacacccttagaaactgcttacaaacacatcaagacaaagggaaatgtaatgtattacttttataaataactaggtagaccaaaatttagaactacgcaaatgttccacacatcatctctgtaaacacaagaaagaacagagaataaacaagcttggacaagaaattgacaaaataacaaatcaatcratctctctctctctctttcgaattattccagcttgattcaacttctataaccccttcaaaacagctctctacgtggaaacctctaagactttcctgggcccctggcaaggtcttgaaaacaacatctgagatgtcatggtttcccatccaataacattgactttgaagtggtgactgagatggggtttggtcatcaaaggcacagctgaatgggcaacctccagatcttcctcagggacagcagctgttgtaacatgctctgcaggttattcattcatactttaaaatgcagtctacaataccagtctcaggaaatgggcctgcaacagcaccatctcagctaatggagatcttcctgggcatggacttgaagaagcttggcagtgctttgctacttttaacatcatttatttaactttcagaaatccagtcaagtgctctggcagtgtgaaggcattactggtaatcacaggcgactaaatgattctttcagctaatattaaatatctagtatgtttcatgacagcacaatgtaggtaacacctttcttggatctttctttgacttcttacctagaatctgcaaagcaaagggctgctggaatctgtctctggataagtcattttctacatcctaagaggtggttacaatctttttttcctggcacactaactccccataactgatggtgtcaaatgggctatttttcttcagtagatgaataacacaacaatgggaagctaagggaggtgatgcaaattcttaaataatcatgcaaagaaaatgacacacagttacacaggcgcgccggttttaattcagtgaaggcaccccaccctgccccaccccacttacgggtggctggccggccctgctctggctgtgcactgtccccggactgggtgctggagactgaggagacgctggagctccggacaaagccaaatgccgccagtttggctgccgggagacgtgagtatccgggaggacggagaccagatttcgggagattggattttgcagcatttgaactggaagctttctttaaatctgctaaaacgaacccaaataaaattaaaaaattattctcagttcataatgagataatgaattctacagattatgaattcgaacccagttctatcataaacagactaaaattaatcttgcaaggtttgattcaacaca

SEQ ID NO: 36193 - DNA, 1425 bp, Homo sapiens
aaagcaggcctcagctacggcaccttcaggaaaccaacagagcaaataaaacacccttagaaactgcttacaaacacatcaagacaaagggaaatgtaatgtattacttttataaataactaggtagaccaaaatttagaactacgcaaatgttccacacatcatctctgtaaacacaagaaagaacagagaataaacaagcttggacaagaaattgacaaaataacaaatcaatcgatctctctctctctctttcgaattattccagcttgattcaacttctataaccccttcaaaacagctctctacgtggaaacctctaagactttcctgggcccctggcaaggtcttgaaaacaacatctgagatgtcatggtttcccatccaataacattgactttgaagtggtgactgagatggggtttggtcatcaaaggcacagctgaatgggcaacctccagatcttcctcagggacagcagctgttgtaacatgctctgcaggttattcattcatactttaaaatgcagtctacaataccagtctcaggaaatgggcctgcaacagcaccatctcagctaatggagatcttcctgggcatggacttgaagaagcttggcagtgctttgctacttttaacatcatttatttaactttcagaaatccagtcaagtgctctggcagtgtgaaggcattactggtaatcacaggcgactaaatgattctttcagctaatattaaatatctagtatgtttcatgacagcacaatgtaggtaacacctttcttggatctttctttgacttcttacctagaatctgcaaagcaaagggctgctggaatctgtctctggataagtcattttctacatcctaagaggtggttacaatctttttttcctggcacactaactccccataactgatggtgtcaaatgggctatttttcttcagyagatgaataacacaacaatgggaagctaagggaggtgatgcaaattcttaaataatcatgcaaagaaaatgacacacagttacacaggcgcgccggttttaattcagtgaaggcaccccaccctgccccaccccacttacgggtggctggccggccctgctctggctgtgcactgtccccggactgggtgctggagactgaggagacgctggagctccggacaaagccaaatgccgccagtttggctgccgggagacgtgagtatccgggaggacggagaccagatttcgggagattggattttgcagcatttgaactggaagctttctttaaatctgctaaaacgaacccaaataaaattaaaaaattattctcagttcataatgagataatgaattctacagattatgaattcgaacccagttctatcataaacagactaaaattaatcttgcaaggtttgattcaacaca

SEQ ID NO: 36194 - DNA, 1425 bp, Homo sapiens
aaagcaggcctcagctacggcaccttcaggaaaccaacagagcaaataaaacacccttagaaactgcttacaaacacatcaagacaaagggaaatgtaatgtattacttttataaataactaggtagaccaaaatttagaactacgcaaatgttccacacatcatctctgtaaacacaagaaagaacagagaataaacaagcttggacaagaaattgacaaaataacaaatcaatcgatctctctctctctctttcgaattattccagcttgattcaacttctataaccccttcaaaacagctctctacgtggaaacctctaagactttcctgggcccctggcaaggtcttgaaaacaacatctgagatgtcatggtttcccatccaataacattgactttgaagtggtgactgagatggggtttggtcatcaaaggcacagctgaatgggcaacctccagatcttcctcagggacagcagctgttgtaacatgctctgcaggttattcattcatactttaaaatgcagtctacaataccagtctcaggaaatgggcctgcaacagcaccatctcagctaatggagatcttcctgggcatggacttgaagaagcttggcagtgctttgctacttttaacatcatttatttaactttcagaaatccagtcaagtgctctggcagtgtgaaggcattactggtaatcacaggcgactaaatgattctttcagctaatattaaatatctagtatgtttcatgacagcacaatgtaggtaacacctttcttggatctttctttgacttcttacctagaatctgcaaagcaaagggctgctggaatctgtctctggataagtcattttctacatcctaagaggtggttacaatctttttttcctggcacactaactccccataactgatggtgtcaaatgggctatttttcttcagtagatgaataacacaacaatgggaagctaagggaggtgatgcaaattcttaaataatcatgcaaagaaaatgacacacagttacacaggcgcgccggttttaattcagtgaaggcaccccaccctgccccaccccacttacgggtggctggccggccctgctctggctgtgcactgtccccggactgggtgctggagactgaggagacgctggagctccggacaaagccaaatgccgccagtttggctgccgggagacgtgagtatccgggaggacggagaccagatttcgggagattggattttgcagcatttgaactggaagctttctttaaatctgctaaaacgaacccaaataaaattaaaaaattattctcagttcataatgagataaygaattctacagattatgaattcgaacccagttctatcataaacagactaaaattaatcttgcaaggtttgattcaacaca

SEQ ID NO: 36195 - DNA, 1425 bp, Homo sapiens
aaagcaggcctcagctacggcaccttcaggaaaccaacagagcaaataaaacacccttagaaactgcttacaaacacatcaagacaaagggaaatgtaatgtattacttttataaataactaggtagaccaaaatttagaactacgcaaatgttccacacatcatctctgtaaacacaagaaagaacagagaataaacaagcttggacaagaaattgacaaaataacaaatcaatcgatctctctctctctctttcgaattattccagcttgattcaacttctataaccccttcaaaacagctctctacgtggaaacctctaagactttcctgggcccctggcaaggtcttgaaaacaacatctgagatgtcatggtttcccatccaataacattgactttgaagtggtgactgagatggggtttggtcatcaaaggcacagctgaatgggcaacctccagatcttcctcagggacagcagctgttgtaacatgctctgcaggttattcattcatactttaaaatgcagtctacaataccagtctcaggaaatgggcctgcaacagcaccatctcagctaatggagatcttcctgggcatggacttgaagaagcttggcagtgctttgctacttttaacatcatttatttaactttcagaaatccagtcaagtgctctggcagtgtgaaggcattactggtaatcacaggcgactaaatgattctttcagctaatattaaatatctagtatgtttcatgacagcacaatgtaggtaacacctttcttggatctttctttgacttcttacctagaatctgcaaagcaaagggctgctggaatctgtctctggataagtcattttctacatcctaagaggtggttacaatctttttttcctggcacactaactccccataactgatggtgtcaaatgggctatttttcttcagtagatgaataacacaacaatgggaagctaagggaggtgatgcaaattcttaaataatcatgcaaagaaaatgacacacagttacacaggcgcgccggttttaattcagtgaaggcaccccaccctgccccaccccacttacgggtggctggccggccctgctctggctgtgcactgtccccggactgggtgctggagactgaggagacgctggagctccggacaaagccaaatgccgccagtttggctgccgggagacgtgagtatccgggaggacggagaccagatttcgggagattggattttgcagcatttgaactggaagctttctttaaatctgctaaaacgaacccaaataaaattaaaaaattattctcagttcataatgagataatgaattctacagattrtgaattcgaacccagttctatcataaacagactaaaattaatcttgcaaggtttgattcaacaca

SEQ ID NO: 36196 - DNA, 527 bp, Homo sapiens
cttttgctaaacgtcgctgaaaactctgctacacgccctttcttaactggcttgaaagtggctcagaagagtaggagaaagtccctactgtgcctgtggttcccgagagaatagaagatccagaaagaattgttgtgcggtatttccccttttccacaccataaaacctacccaaacctgcttatgggcagttaggctagatgactagaaaataaaacagtgtgcacayagtgctctgtaacccctcaccaggagcggccctgtgcccgcaacaggctggagggctcccttctcgctctgcctttccaggctccagtcagcatcatttgctttcctggcacgatttttgcggtctgctcatgttgtttacatcattatttctgtcctgaagtcagcagcactgtgcattgggcttagatttttgacagcgattttggcagatgtgcgctacagtgggaagacatgtaggtatcttacataaatcttaatggtttcaatgattgtaaatgtctgtggcactcaaagtt

SEQ ID NO: 36197 - DNA, 787 bp, Homo sapiens
ttttaatcttttattactggatattgatatatattttaaataactagggaagcagcaataagataacatttagcctaatctaatcatgtatgttttaaccacttcctactgggaaattatttgtttatgaagtaaattattcttttttgaaatattttgaaatgaaattattttttcattttaacagcaaaaatgttctttgatgcattaatatgagtgatcattttagctcatcataattgaggaaatcagtgtatatattgatgtagtatttattgtgaaaaaagrttgtgtttaaaagactgtcttttttatttttgtgacttaccatttagtatataatagatttcacggctgggcgcggtggctcattcctgtaatcccagcactttgggagactgaggcgggcaaatcacaaggtcaggagatcaagaccatcctggttaacacagtgaaaccctgtctctactaaaaatacaaaacattagccgggcgtggtggcgggcgcctgtagtcccagctactcaggaggctgaagcaagagaatgccgtgaacccgggaggcggagcttgcagtgagccgagatcatgccattgcactccagcctgggcgacagagcaagaccccgtctcaaaaaataaaaaataaatagatttcacaatccattcatgcctgctaactcagtttatcctcataatgatcccatgagtttgagattgacaggcatcagctttatgtatcgttatttcagtgatttcaaagctaagtgtatcttagcagatatca

SEQ ID NO: 36198 - DNA, 787 bp, Homo sapiens
ttttaatcttttattactggatattgatatatattttaaataactagggaagcagcaataagataacatttagcctaatctaatcatgtatgttttaaccacttcctactgggaaattatttgtttatgaagtaaattattcttttttgaaatattttgaaatgaaattattttttcattttaacagcaaaaatgttctttgatgcattaatatgagtgatcattttagctcatcataattgaggaaatcagtgtatatattgatgtagtatttattgtgaaaaaagattgtgtttaaaagactgtcttttttatttttgtgacttaccatttagtatataatagatttcacggctgggcgcggtggctcattcctgtaatcccagcactttgggagactgaggcgggcaaatcacaaggtcaggagatcaagaccatcctggttaacacagtgaaaccctgtctctactaaaaatacaaaacattagccgggcgtggtggcgggcgcctgtagtcccagctactcrggaggctgaagcaagagaatgccgtgaacccgggaggcggagcttgcagtgagccgagatcatgccattgcactccagcctgggcgacagagcaagaccccgtctcaaaaaataaaaaataaatagatttcacaatccattcatgcctgctaactcagtttatcctcataatgatcccatgagtttgagattgacaggcatcagctttatgtatcgttatttcagtgatttcaaagctaagtgtatcttagcagatatca

SEQ ID NO: 36199 - DNA, 1114 bp, Homo sapiens
taaaattttaaagattagttcaacagtgaaaatgtatatattagattctattattttaaagaaattacttgttaatagaaaaatagtcacgtttcagataataggaaaaacatagaaatttccatttttggtctttagagcattgacatagcttatggttttgcctcacatattttgttgccacttaaagataggaggggctgggcgtggtggctcatgcctgtaatcccagccagcactttgggaggctgaggagggcagatcatgaggtcaggagtttgagaccagcctgaccaacatggtgaaaccccgtctctactaaaaatacaaaaattagccaggtgtggtggtgcgtgcctgtaatcccagctactcgggaggctgaggcaagagaatcgcttgaacccgggaggtggaggttgcagtgagctgagatcacgccattgcatgccagcctgggcaacaaagcaagactccatctcaaaaaaaaagataagagggagattcaatcaaaggtgttgtggatctaacttttgtttaggtcaggcatgtatgtgtcatgctggtatctaataggacattttagtggtttccattttctatgtatgtgactggaacagtaggaagcctgcacgatggtaacagatcctgctgtttctgagtcagtctatacagattgaagtagcttcaatcaggtaattttcaattgtatttgattttgttgtaattacaaaacccgaaaaycccaatattttctgaggttttactccaacatatgtgttagttgaagagccactctaataaggtgaaactacaggctcctcccattccacactgttctctacattatagtatacacatctactacagttcttattattctttctttctcctgccgaagtatgaatgcctccagatggggatctagtctaatacagtagaattcaacaagcatttatgatgttccaggcacagcgctagacacgcataatacagagaggagggggcaagtgctggtggaatgggcccccagcacagagcacaatatgtgaaatgtttggaaaaattagatctcatttatctttacttctagcccagagtgagcctacactac

SEQ ID NO: 36200 - DNA, 1114 bp, Homo sapiens
taaaattttaaagattagttcaacagtgaaaatgtatatattagattctattattttaaagaaattacttgttaatagaaaaatagtcacgtttcagataataggaaaaacatagaaatttccatttttggtctttagagcattgacatagcttatggttttgcctcacatattttgttgccacttaaagataggaggggctgggcgtggtggctcatgcctgtaatcccagccagcactttgggaggctgaggagggcagatcatgaggtcaggagtttgagaccagcctgaccaacatggtgaaaccccgtctctactaaaaatacaaaaattagccaggtgtggtggtgcgtgcctgtaatcccagctactcgggaggctgaggcaagagaatcgcttgaacccgggaggtggaggttgcagtgagctgagatcacgccattgcatgccagcctgggcaacaaagcaagactccatctcaaaaaaaaagataagagggagattcaatcaaaggtgttgtggatctaacttttgtttaggtcaggcatgtatgtgtcatgctggtatctaataggacattttagtggtttccattttctatgtatgtgactggaacagtaggaagcctgcacgatggtaacagatcctgctgtttctgagtcagtctatacagattgaagtagcttcaatcaggtaattttcaattgtatttgattttgttgtaattacaaaacccgaaaaccccaatattttctgaggttttactccaacatatgtgttagttgaagagccactctaataaggtgmaactacaggctcctcccattccacactgttctctacattatagtatacacatctactacagttcttattattctttctttctcctgccgaagtatgaatgcctccagatggggatctagtctaatacagtagaattcaacaagcatttatgatgttccaggcacagcgctagacacgcataatacagagaggagggggcaagtgctggtggaatgggcccccagcacagagcacaatatgtgaaatgtttggaaaaattagatctcatttatctttacttctagcccagagtgagcctacactac

SEQ ID NO: 36201 - DNA, 1235 bp, Homo sapiens
taaatctatctttttttcttaaataaattggtgttttaactaaaaaacaagcctgccacagctggttgagaggccaagccaggaggacctcttgagccgggagttcgattttgcagtgtgccacgatcacarctgtgaagagccactgcactctagcctgggcaacataacgaaaataattttgtatagtaattcataaatggcattttcttctgaaatagtatgccagagtacttaactatgccatcggaaactgctgcatgggattaggactgcctaatgtttttatcggcttttagaggatactaatctcataggctttcattgatacaaagtttatatcttacttcacattatttctagatttatcaatgaataatgcacaatatgttaccatttgagaatgacttgaagacttacatatcttactagttatatttcccatgctaagttgagggattgctggagtggctatttttaatactttttttttttttttttgtgcttcttttcctcatctcagattagaatcccccactcggagtctaagcatggatgccccaaggggtgtgcatattcaagctcacgctgggaaaattgaggcgctttctcaaatggatattctttttcatagtagtgatggaatggtgagttcattcacagatcagcctcctactgtatgtcctgatgatattcctgagtaccatgtctgtaaagctatcagtattaaatttctagtagtttgtaggaaaacattgtgaaggtcatagagtagcaaatgtacaaggaaagcaaaagacaatttagcattgaaagaagggccaagaaagtctaaaattattctgtattagatccagacagctttctttaactggcatttatgctatcaagtgatttagtgacttgttattttcaagtcggaaaaaaaaaacactacagacgttcacagtttacagagaatgtccattttgccatttcctagggatggctgtcactaggagtcacccactaacaaccactgtcacctttcactgcccagagtgctgcgtttaagctgcatttccagtttaaatgaaaatgaaagatgaaaaataagagtgtttttttcaaagtcaactacaataaagataaaatctgggacttcaagtctagaaatacagttgtccccctttattgacaggggatttgttccaagacccctactggaagcctaaaaccacagagagtacagaacc

SEQ ID NO: 36202 - DNA, 1235 bp, Homo sapiens
taaatctatctttttttcttaaataaattggtgttttaactaaaaaacaagcctgccacagctggttgagaggccaagccaggaggacctcttgagccgggagttcgattttgcagtgtgccacgatcacaactgtgaagagccactgcactctagcctgggcaacataacgaaaataattttgtatagtaattcataaatggcattttcttctgaaatagtatgccagagtacttaactatgccatcggaaactgctgcatgggattaggactgcctaatgtttttatcggcttttagaggatactaatctcataggctttcattgatacaaagtttatatcttacttcacattatttctagatttatcaatgaataatgcacaatatgttaccatttgagaatgacttgaagacttacatatcttactagttatatttcccatgctaagttgagggattgctggagtggctatttttaatactttttttktttttttttgtgcttcttttcctcatctcagattagaatcccccactcggagtctaagcatggatgccccaaggggtgtgcatattcaagctcacgctgggaaaattgaggcgctttctcaaatggatattctttttcatagtagtgatggaatggtgagttcattcacagatcagcctcctactgtatgtcctgatgatattcctgagtaccatgtctgtaaagctatcagtattaaatttctagtagtttgtaggaaaacattgtgaaggtcatagagtagcaaatgtacaaggaaagcaaaagacaatttagcattgaaagaagggccaagaaagtctaaaattattctgtattagatccagacagctttctttaactggcatttatgctatcaagtgatttagtgacttgttattttcaagtcggaaaaaaaaaacactacagacgttcacagtttacagagaatgtccattttgccatttcctagggatggctgtcactaggagtcacccactaacaaccactgtcacctttcactgcccagagtgctgcgtttaagctgcatttccagtttaaatgaaaatgaaagatgaaaaataagagtgtttttttcaaagtcaactacaataaagataaaatctgggacttcaagtctagaaatacagttgtccccctttattgacaggggatttgttccaagacccctactggaagcctaaaaccacagagagtacagaacc

SEQ ID NO: 36203 - DNA, 1235 bp, Homo sapiens
taaatctatctttttttcttaaataaattggtgttttaactaaaaaacaagcctgccacagctggttgagaggccaagccaggaggacctcttgagccgggagttcgattttgcagtgtgccacgatcacaactgtgaagagccactgcactctagcctgggcaacataacgaaaataattttgtatagtaattcataaatggcattttcttctgaaatagtatgccagagtacttaactatgccatcggaaactgctgcatgggattaggactgcctaatgtttttatcggcttttagaggatactaatctcataggctttcattgatacaaagtttatatcttacttcacattatttctagatttatcaatgaataatgcacaatatgttaccatttgagaatgacttgaagacttacatatcttactagttatatttcccatgctaagttgagggattgctggagtggctatttttaatactttttttttktttttttgtgcttcttttcctcatctcagattagaatcccccactcggagtctaagcatggatgccccaaggggtgtgcatattcaagctcacgctgggaaaattgaggcgctttctcaaatggatattctttttcatagtagtgatggaatggtgagttcattcacagatcagcctcctactgtatgtcctgatgatattcctgagtaccatgtctgtaaagctatcagtattaaatttctagtagtttgtaggaaaacattgtgaaggtcatagagtagcaaatgtacaaggaaagcaaaagacaatttagcattgaaagaagggccaagaaagtctaaaattattctgtattagatccagacagctttctttaactggcatttatgctatcaagtgatttagtgacttgttattttcaagtcggaaaaaaaaaacactacagacgttcacagtttacagagaatgtccattttgccatttcctagggatggctgtcactaggagtcacccactaacaaccactgtcacctttcactgcccagagtgctgcgtttaagctgcatttccagtttaaatgaaaatgaaagatgaaaaataagagtgtttttttcaaagtcaactacaataaagataaaatctgggacttcaagtctagaaatacagttgtccccctttattgacaggggatttgttccaagacccctactggaagcctaaaaccacagagagtacagaacc

SEQ ID NO: 36204 - DNA, 1235 bp, Homo sapiens
taaatctatctttttttcttaaataaattggtgttttaactaaaaaacaagcctgccacagctggttgagaggccaagccaggaggacctcttgagccgggagttcgattttgcagtgtgccacgatcacaactgtgaagagccactgcactctagcctgggcaacataacgaaaataattttgtatagtaattcataaatggcattttcttctgaaatagtatgccagagtacttaactatgccatcggaaactgctgcatgggattaggactgcctaatgtttttatcggcttttagaggatactaatctcataggctttcattgatacaaagtttatatcttacttcacattatttctagatttatcaatgaataatgcacaatatgttaccatttgagaatgacttgaagacttacatatcttactagttatatttcccatgctaagttgagggattgctggagtggctatttttaatactttttttttttktttttgtgcttcttttcctcatctcagattagaatcccccactcggagtctaagcatggatgccccaaggggtgtgcatattcaagctcacgctgggaaaattgaggcgctttctcaaatggatattctttttcatagtagtgatggaatggtgagttcattcacagatcagcctcctactgtatgtcctgatgatattcctgagtaccatgtctgtaaagctatcagtattaaatttctagtagtttgtaggaaaacattgtgaaggtcatagagtagcaaatgtacaaggaaagcaaaagacaatttagcattgaaagaagggccaagaaagtctaaaattattctgtattagatccagacagctttctttaactggcatttatgctatcaagtgatttagtgacttgttattttcaagtcggaaaaaaaaaacactacagacgttcacagtttacagagaatgtccattttgccatttcctagggatggctgtcactaggagtcacccactaacaaccactgtcacctttcactgcccagagtgctgcgtttaagctgcatttccagtttaaatgaaaatgaaagatgaaaaataagagtgtttttttcaaagtcaactacaataaagataaaatctgggacttcaagtctagaaatacagttgtccccctttattgacaggggatttgttccaagacccctactggaagcctaaaaccacagagagtacagaacc

SEQ ID NO: 36205 - DNA, 1235 bp, Homo sapiens
taaatctatctttttttcttaaataaattggtgttttaactaaaaaacaagcctgccacagctggttgagaggccaagccaggaggacctcttgagccgggagttcgattttgcagtgtgccacgatcacaactgtgaagagccactgcactctagcctgggcaacataacgaaaataattttgtatagtaattcataaatggcattttcttctgaaatagtatgccagagtacttaactatgccatcggaaactgctgcatgggattaggactgcctaatgtttttatcggcttttagaggatactaatctcataggctttcattgatacaaagtttatatcttacttcacattatttctagatttatcaatgaataatgcacaatatgttaccatttgagaatgacttgaagacttacatatcttactagttatatttcccatgctaagttgagggattgctggagtggctatttttaatactttttttttttttktttgtgcttcttttcctcatctcagattagaatcccccactcggagtctaagcatggatgccccaaggggtgtgcatattcaagctcacgctgggaaaattgaggcgctttctcaaatggatattctttttcatagtagtgatggaatggtgagttcattcacagatcagcctcctactgtatgtcctgatgatattcctgagtaccatgtctgtaaagctatcagtattaaatttctagtagtttgtaggaaaacattgtgaaggtcatagagtagcaaatgtacaaggaaagcaaaagacaatttagcattgaaagaagggccaagaaagtctaaaattattctgtattagatccagacagctttctttaactggcatttatgctatcaagtgatttagtgacttgttattttcaagtcggaaaaaaaaaacactacagacgttcacagtttacagagaatgtccattttgccatttcctagggatggctgtcactaggagtcacccactaacaaccactgtcacctttcactgcccagagtgctgcgtttaagctgcatttccagtttaaatgaaaatgaaagatgaaaaataagagtgtttttttcaaagtcaactacaataaagataaaatctgggacttcaagtctagaaatacagttgtccccctttattgacaggggatttgttccaagacccctactggaagcctaaaaccacagagagtacagaacc

SEQ ID NO: 36206 - DNA, 1235 bp, Homo sapiens
taaatctatctttttttcttaaataaattggtgttttaactaaaaaacaagcctgccacagctggttgagaggccaagccaggaggacctcttgagccgggagttcgattttgcagtgtgccacgatcacaactgtgaagagccactgcactctagcctgggcaacataacgaaaataattttgtatagtaattcataaatggcattttcttctgaaatagtatgccagagtacttaactatgccatcggaaactgctgcatgggattaggactgcctaatgtttttatcggcttttagaggatactaatctcataggctttcattgatacaaagtttatatcttacttcacattatttctagatttatcaatgaataatgcacaatatgttaccatttgagaatgacttgaagacttacatatcttactagttatatttcccatgctaagttgagggattgctggagtggctatttttaatactttttttttttttttktgtgcttcttttcctcatctcagattagaatcccccactcggagtctaagcatggatgccccaaggggtgtgcatattcaagctcacgctgggaaaattgaggcgctttctcaaatggatattctttttcatagtagtgatggaatggtgagttcattcacagatcagcctcctactgtatgtcctgatgatattcctgagtaccatgtctgtaaagctatcagtattaaatttctagtagtttgtaggaaaacattgtgaaggtcatagagtagcaaatgtacaaggaaagcaaaagacaatttagcattgaaagaagggccaagaaagtctaaaattattctgtattagatccagacagctttctttaactggcatttatgctatcaagtgatttagtgacttgttattttcaagtcggaaaaaaaaaacactacagacgttcacagtttacagagaatgtccattttgccatttcctagggatggctgtcactaggagtcacccactaacaaccactgtcacctttcactgcccagagtgctgcgtttaagctgcatttccagtttaaatgaaaatgaaagatgaaaaataagagtgtttttttcaaagtcaactacaataaagataaaatctgggacttcaagtctagaaatacagttgtccccctttattgacaggggatttgttccaagacccctactggaagcctaaaaccacagagagtacagaacc

SEQ ID NO: 36207 - DNA, 769 bp, Homo sapiens
tttttcagtgttacgtctttttttttccattgggacttttaaaagtttctttacttttagtgttttcccgattcagaatgatttcatttcataaatttgaattaatttattctgttcatgagtcagtgtctgttttcaattgaacttgtcttcagttatagaaaactcttggcaattgcttatttaaccattgtctttcctatattttctccggttacttccactggggcttcaataagatatatttagacctcctcattcaccagtcatgttttttaaacttagctttatatttccacagctttatcactctgtggtgttttctaagatctaccttccaatatactaattctctttgcagctgtatgcaatctgtcagataagagagtaagccatctttctaatcttcatgggagattyacctgagtgttagcgatggcattctacctgccttgggtaaggtcctttccgttcacagggcttgctgactgagggcttagcaaacctcttatagcacttatgatgtcaatctgaaaactcctgaaaaattactttccacagtttcaaaaactgtctttcataagccatgtcacctagctctaatatccagatagataatttcttactaggtaacaagcaccatcatggtgcatcgtccctccaaatgacaaggtaacccacgtgagaagtcaattacaacgatgtgactaggtgaccgtgaccagtatcagttatgtgcacataataggcaatcagtaagtgcttgttg

SEQ ID NO: 36208 - DNA, 512 bp, Homo sapiens
cccttgtaaagtacaactataagttaacatgcaactgcacagagattatacaaccaatatttaaggcgatatactacaataatagataacatttgcatgctacttttacagttttcaaaggcatttccttcctttgagtctctccaacatccttgtgagacagtcagggcacatttccaccaacaacaggaaaactaggatgtgacttcttatacatgagtcacttctcagctctagttccttgaatcagaggctagactatgtgacctatgtttgagttatgtttgttatcagctgcaaaaatgtttattctcttcatttatcaagtatcctataatgtaaccatgatgacaaaattgaaatgtgatttgaagaattaaatttttattgtttaaaaaattaacaggcagaaccagtgggatggtratcaacctagcacctttagttagaattttcttcatatgagttcatttctcatccagtatatgcaatgtaaacttctctcacttata

SEQ ID NO: 36209 - DNA, 553 bp, Homo sapiens
tgcccatgagtcaggattttagaatattagcatattatctggtttcttatattttattaaacaaatatattttatacttttgcctgatgagctttctagtattagtatgtttgaattcattatttaattgtattctgaaccttaatattttgtttactttagggaacaattggctttcatgatggagatccattggtaagatgctttcctttgaacaaaatatagttttaattcaaagaccatatagcctgcagatgagttttctttaaaagatttccctggaatattctatgtgtctgtgttttcctttcactcaaatggcagagcagtctgtaacgctagtggactagtggcttgcatctactcagactaataatttttcattatagatgtatctttgttcttytatgatctttttactttatgactaagacatgcttttcactagagcatccaggttttaaagagatagagttcaaataacttcctctaggatttgttttactcacagattaacagtccaatgatggtggtaatgtacactaaatgcaat

SEQ ID NO: 36210 - DNA, 587 bp, Homo sapiens
ccagaactgtcttctgttaaaaaaaaaaaaaaaaaaaagcaagagagagatttctaaaaagctccttggggccaatgacatcggaaagagagagaggtggaaggaggaggaagaaccaccactgcgagctcgccccctggtccaccagaaaatagagaatgaacagccgattgagccccaaaggcaggcccagggatcccctaccgtggtggagcacacttcatatagtgcctacaccccgactaagttgcgggagttaggcagtgtcggcagcatccggggaagcccctacctgcctggatgctccgcctctgggaagaaggagctgagagtatttccttttctgcagccaagatggaaaagttggcttatatcacaactcacccccaccccatcagcmgttgcaggtgagcaggtggttggcacaagggcaaggtgaccacaccctgactgaatggctgatggcagccatacggacggtgtggaaggatgctggagaaataccagaaactgtgagtaaatgacaatcatatgcaaagctcgtgcaggtaatttaggagatgggtatgcggcaggctatgtttgat

SEQ ID NO: 36211 - DNA, 550 bp, Homo sapiens
agagctattcagcagttgaaattgcaggacattacatgacacttgtgaaaaatctctattttgtgaaaagttaggtgtaaaatataatcttccagaactgtttgatagatatctctgtatatataggcataagactttgaaattcctcattcaaatattcagttcattatgagaaaaaaaagttaatcatttttctacatgagagcatgatgagatgtatgtagatacaattctgtatttatcaaaacaaaatatcatatcggtctaaactctaagttgcatttaaagagagtaaattcaaaccttctcaaagggaaaatggaaaataacagctcacatgattcaaaagtccaggggtatgtatctggctcagctcactaaaggtgctcattggatatctctctctcatgytttctttttgaaatgtcttccaggacttacagagttttctttgttcggtgttttatagtaagttataattgtttactatacagatgctaaagttttcatgttttcttatataaaaacattcctatggcttaaaagtaaa

SEQ ID NO: 36212 - DNA, 547 bp, Homo sapiens
ctcaaagagaaagtccctattatgaaggcattatctagaagagaatctatgtctatacacatgtagatataaacattatgaatttttcacatactcatccatttacttatcaaattaaaaattctaaatattgtcagagttcagtgtagctgcatggctagaaaggctagtagcaaaggggaccttgtgtcaggcttttgaggactggggagtggggaaggcattcccagaaggagatgggtttgactatmggcagggcaatgaggactgcttagaggagagtaaatcagggtagcagatcataaaattatgtaggtaggaagtggccaaattaaggagtattttataggctgcattttgaagtttggattttatcctagaagcatttgagactagctacgaatttttctagagaatgatgatgttattagagtagtatttaggaaggtctcattcctgtcctctttacatttatatatagcaaatatggttgtttaccaattctggtaactaaattatcccaagaaggaataattcaaaattctgc

SEQ ID NO: 36213 - DNA, 1226 bp, Homo sapiens
ctgtaatgtgcacactcacccacccagaaccaaagaaacagaggctgggctctcaggcgggtacccggtagctcacacaaagctttgtgtatggaatttgtctgctgggaggaaagtctgatgttggtcacttccctcctggagaaaaatacaacaatacgaggaagcgccaagcactgtgggaatgttccaagtgtgagttccagctcagcccagaatataaacaaaagcgatgaccagcctggaggtcaggcctagcaaagcactgaggcagaaagtctgggaggcactcttctgtcttctggggtcctctagactctgccttttttttttttttttttttttgagacagtctccctctgttgtccaggttggagtgcagtggtgcaatcacagctcactgcagcctccaactgctgggctcaagcaatcctcctgtctcagcctcctgactagctgggactatacgcacttgccaccatgcctggttaattagtaaaattattttttgtagagatagcatcttgcttggttgccaggctggtctcaaactcatggcctcaggtgatcctcgagcctcagcctcccaaagtgctggaattataggcatgagccaccgagtctggccgagactgctttgaagtaactttcctgtccaggcctggaggaaatcatcgaaggcaaaggccaccacgtgtcgaatgtcataggaaatacaagctcagggactctcttatgacacatctgcaaacttatagatcagtctcagaatgtcatagctggaggggcctcagagatttactcaacaaataccaacacggagcttggggagggtcggataacatgcacgaagaatcacttagttatcccggtgatcagtgctaaattcagggtgggggacgcatgtctagcagggcgacctaatctaagctggaagtcagggaagggtgagacttgaaggatgagcagagctggaccaggcaaaggggcagtgtgtatgaaagmcctgtgtagctggaggtatgtgcccaggggaaggccgggggtcagatgggacagggccttatagatccagggctttgtctcatgggctttgggggttcctaaggtgccggcaaaccacgtgttcattcttctgggaagagaggtctatggctttcaccaaagtcttaaggagtttcaagaggttaagaatggccgggcacggtggctcacgtctgtactta

SEQ ID NO: 36214 - DNA, 602 bp, Homo sapiens
cccaaagtactgtgattataggcatgagccactgcgcctgacctctctggtttggtgtcacatccctttcctcacagtctgaccattggtaccacttctcccrggggaagggacttggctctcggagtgtcacctctgctgttctgctactgcacatcctatgactggtcaccagaaggccaggtgggaaacgtgtgcagtccctcccctctggggtggggactccaggcccaagcttcaccatgaacccaggcctggagtctctcagagcctgggagctgtccagggtcctgcaccgcttgaggcctgaggttcacatcccggcctgcccaatggtggattgtgaggccctgggcaagtcctaccctatttccgagccccaggctccccgtctgaaagatgggcaggacagatcagatggtctccagggctcctgctggctgccttcttagatcctttatatcccaaaaggattgtcatgggtcttgggctcttttctggactggacagacgacacttgaaggacagggggtcagcaccaagtacagatctgggcagagtggatgtcccacaaaaatattggcataaagagccagcaagcc

SEQ ID NO: 36215 - DNA, 602 bp, Homo sapiens
cccaaagtactgtgattataggcatgagccactgcgcctgacctctctggtttggtgtcacatccctttcctcacagtctgaccattggtaccacttctcccgggggaagggacttggctctcggagtgtcacctctgctgttcygctactgcacatcctatgactggtcaccagaaggccaggtgggaaacgtgtgcagtccctcccctctggggtggggactccaggcccaagcttcaccatgaacccaggcctggagtctctcagagcctgggagctgtccagggtcctgcaccgcttgaggcctgaggttcacatcccggcctgcccaatggtggattgtgaggccctgggcaagtcctaccctatttccgagccccaggctccccgtctgaaagatgggcaggacagatcagatggtctccagggctcctgctggctgccttcttagatcctttatatcccaaaaggattgtcatgggtcttgggctcttttctggactggacagacgacacttgaaggacagggggtcagcaccaagtacagatctgggcagagtggatgtcccacaaaaatattggcataaagagccagcaagcc

SEQ ID NO: 36216 - DNA, 602 bp, Homo sapiens
cccaaagtactgtgattataggcatgagccactgcgcctgacctctctggtttggtgtcacatccctttcctcacagtctgaccattggtaccacttctcccgggggaagggacttggctctcggagtgtcacctctgctgttctgctactgcacatcctatgactggtcaccagaaggccaggtgggaaacgtgtrcagtccctcccctctggggtggggactccaggcccaagcttcaccatgaacccaggcctggagtctctcagagcctgggagctgtccagggtcctgcaccgcttgaggcctgaggttcacatcccggcctgcccaatggtggattgtgaggccctgggcaagtcctaccctatttccgagccccaggctccccgtctgaaagatgggcaggacagatcagatggtctccagggctcctgctggctgccttcttagatcctttatatcccaaaaggattgtcatgggtcttgggctcttttctggactggacagacgacacttgaaggacagggggtcagcaccaagtacagatctgggcagagtggatgtcccacaaaaatattggcataaagagccagcaagcc

SEQ ID NO: 36217 - DNA, 689 bp, Homo sapiens
ttctccagatgtcatgatgcctgttcttccctgagctgagagctgcaccatgtgacttccacccagtgctccaagctcctcattctgcctttgggacagcccagaatgtgcctaatcccccttccacatgatagtcacatgcactggaaactggctgtcctgcggctgattgatctctttccctgggttccaagcaggtcccggctgaccagtacaggagcttggctgagagtgccctcttggagccccaagtgagaagatatatcatctacaactcgaggcctatgcggctggcctttgctgtggtaagggggaggtggcccgcacactgaccctgccctgacagcttatggcaccaccaaattcagcaccgtgtcttggagcctgttggtgtgggtcaggggcttgggggctgttggcccaggtgcctggaaacgagcagtacatatggacattgatttgggatcagaggaaatttatgggagagagttgtaacsaggtcgttgcataaaggatgggagtcagggtttactgtgggcagagcttgggattgggagtctgcagatccacccaggctctgggctcaatatctggccttggccaagactttcctcctctccggaacttggtttccccatctgctcaacagatgggttatttcagctctattcatatatacatgtacatat

SEQ ID NO: 36218 - DNA, 1594 bp, Homo sapiens
ttataaacaaggaacattagctcattctcacagatccaggtgactgcatcaatctcttactggtgctgtgagctgtctgaatccaaggagggtatcagtagtgtctgaaaggtgtccctttgaatggagctgctttatgcaaggactgaagttcctgaccatgctctctgtctggcatcttgcaggttttctatgtggtggtgtgggccaatatctactctaccagtcagatgtttgccttggggaaccactgggctggcatgctgctcgtgaccctggccgcggtgagcctgaccttgactcttgtgctggtctttgaaagacaccagaagaaggtgagatgtctggagatccctgccacactctctccagaagagcggtgcaggcgtgagaatcagatttttcccttttgcctccctcaaagaatttccctggccatgaaaattcacactagcccgtaagcccagtgactaaaagaaatcaaattgtgtatgtgattgttctctctgcttttcctgtctaatccctgtggattgtttttctggaagcaagctgtgttttgggaatgtgagaggagagcagtaattgcccgtatcctgacagtactttagttaactgagccctctcatgcacttcctctccctgggtgctcacaacagccctatgaacaagggaggattactgaacccaccctgcagcacagggtgcctaaagttgacgtctggggagaggtaatttacattattccctcctgtgacgggcagatgccgacctggtgctctattgacagtcatgtctctaatcccagcaatgacctttgaggcaaggtgggtggtccgagagtttaggtaacttgtcctggatcccactgttagtgacagagccagggttcaaaccctgagccctctggttcctgatcatgttccgaaaggaggtggatacctcccagcttgatgtatgattttaattgttttctgtctcttcagtgtctgtcttttgatatgtactgagcacatcatatgtagtaggtcctctgttaaatgcttacacattaactcattaaatccttcgacattaaatctgggtagaggctgttacactcactttgcagtcgaggaaccctagactcrggctcatagagtagccctggccatgctgctaataaatgccagagttggaaatcaaggccagggcctcagattccaagccatgttcttagccacaacgctagagaaaactgttggttttccaaagctgctgtaacaaattaccatgaacttattggattaaaacaacaccaatttattatcttccagttctgtaggttagatatttgacataggtctcactggactaaaatctaggtacaggcagggctgcttccttctgaaggctctgggggagaatctgttttcttgcctgtttagctcctagtggtcctctgcattccttggctcgtgatccttttcttcatcttcaaagccagcaatggcagatccaatctttttcacatctccttctctggctcttttgcctccctcttctacttttaaggacccttgtgattacattgggccagctggataatctgaga

SEQ ID NO: 36219 - DNA, 606 bp, Homo sapiens
tgcttcctggggtaggtgccatgcagggaattgaaacagaatgaagtgagatgagaggatggtggagtctactttcacctggctgatgaggacctctctgatgtgacactgaaaccaagacctgaagggcaagaagaaggaagcagcccgaggaagggctggaggaagacagaggaatagggagtgcaaggggccaggtagtgaagggttggaggagctcaagcataaaacaacaaagaaggagggtaactgggctagggccagaggatgggcctggaggtgcaggcagagaacgatgcgcgagcgatgtgaccccgacgacgtgaccccgacgacgtgacccgagaggtggcacggctttatagaccttaccyggggggtgaggagactgggtttgggccaagtgtgttaagctggctggtgcgagatctgccttaggtttaggaattcccccagctgctcagactggagcctcggggtcaggaggtggagcagagggacctgataggagatgatcttggcaaccaggggagatgtgacggtgcttggactggggctgtccaggctctattacttagtgagccttgggcaagaatacatgtggga

SEQ ID NO: 36220 - DNA, 606 bp, Homo sapiens
tgcttcctggggtaggtgccatgcagggaattgaaacagaatgaagtgagatgagaggatggtggagtctactttcacctggctgatgaggacctctctgatgtgacactgaaaccaagacctgaagggcaagaagaaggaagcagcccgaggaagggctggaggaagacagaggaatagggagtgcaaggggccaggtagtgaagggttggaggagctcaagcataaaacaacaaagaaggagggtaactgggctagggccagaggatgggcctggaggtgcaggcagagaacgatgcgcgagcgatgtgaccccgacgacgtgaccccgacgacgtgacccgagaggtggcacggctttatagaccttacctggggggtgaggagactgggtttgggccaagtgtgttaagctggctggtgcgagatctgccttaggtttaggaattcccccagctgctcagactggagcctcggggtcaggargtggagcagagggacctgataggagatgatcttggcaaccaggggagatgtgacggtgcttggactggggctgtccaggctctattacttagtgagccttgggcaagaatacatgtggga

SEQ ID NO: 36221 - DNA, 202 bp, Homo sapiens
atgacaaagattggtgtgtctttattttaattatcagagtatctagtttagcactttgggtgtagaagtttacaagaggtaaaatgaatgaatgattagtattggaagcattgagctttcagcygtatctttatttttcctttgaacacttggaaaagatgtttctgccaaactcagtgactaaatatgaggagataaatgt

SEQ ID NO: 36222 - DNA, 525 bp, Homo sapiens
tgctgtaccacatcaaagtaaatctacaaaagtgaaaataaattgttggttcgttcttattttctcctgggagattctataataaaccattatttttcttccccccatctgcccaattttcctccctttattttcataaattgatagggaaaatatcataagcatctaaactaatttggtcttgtggttgtaactgcatagaagattaaatcrtcaattaacaaaagagtgacttaaaagccatcttctttctgtattccctgatgaatcatttgacaagatgtccccaaagcagcttggtttacaagaaccgtattagtgtggacacaaaagcaagaagctcggtgatgataattagctatagtatgtctgcttttcgcatagtgaacgcatccatttctaatggttcctaattattgtgacatgctgatataggtttataaatgggaaaggtgaattttactaacctccttctaatgccacacacacaactgattatatagaaatgtaatcaaacagcactcc

SEQ ID NO: 36223 - DNA, 625 bp, Homo sapiens
aattttcttcccccagtcaaatgcagcttgcttttaaaagcatttatctaaggttaggatggaagtttacactctgggtgtaaacttggttggggaaaaaaaacattgatttgggggagttatgttgcttaatttgctgaaatgacgctgtgctcagttgactctgtttgtcctattatagaatacagattctycaaagtataacttagaggcaatgcaaatatgtttttatcacaaaggtcagtggtagatatggatatcatttgatgaaggcaggtgctgaaaaagtgcatgaatttgaatagtgatattgaaaatgactggaacactcagctgttcaagcagccctgttcaaatgaggcatttagagatggtcctgagggccagctgtcctaccataataatactgaaggttacatattgagtacttaaaataagtatatcggtcagactagcagaagaatacagatggcacactccagttgggtaattagaacagaatttaataataaataggagtgtgtaggctgttagagaaccaagagaaaaaatgcagtgctctgaaactagcaataatggggcaccttaactactgataggtgtaaaaagacggggacctgaagag

SEQ ID NO: 36224 - DNA, 625 bp, Homo sapiens
aattttcttcccccagtcaaatgcagcttgcttttaaaagcatttatctaaggttaggatggaagtttacactctgggtgtaaacttggttggggaaaaaaaacattgatttgggggagttatgttgcttaatttgctgaaatgacgctgtgctcagttgactctgtttgtcctattatagaatacagattcttcaaagtataacttagaggcaatgcaaatatgtttttatcacaaaggtcagtggtagatatggatatcatttgatgaaggcaggtgctgaaaaagtgcaygaatttgaatagtgatattgaaaatgactggaacactcagctgttcaagcagccctgttcaaatgaggcatttagagatggtcctgagggccagctgtcctaccataataatactgaaggttacatattgagtacttaaaataagtatatcggtcagactagcagaagaatacagatggcacactccagttgggtaattagaacagaatttaataataaataggagtgtgtaggctgttagagaaccaagagaaaaaatgcagtgctctgaaactagcaataatggggcaccttaactactgataggtgtaaaaagacggggacctgaagag

SEQ ID NO: 36225 - DNA, 776 bp, Homo sapiens
tcctggcatcagacttcatggtggtatatcttcctagctactgagcctggtggcatatcttcctagctactgagcctggtggcatctcccagagcagtggaaagaccactggagggatgaggaatcatgatgtcaacagaagataagcaacgcaaccgctcccaaagttatgtttttgaggagtataaaagtagacgctttcctttcttcrtgcctttctgaattgggaccgcagaggaatgatgagcttggaggctgcagactgctgggaaccactacatggaaaatgggggtagagtatcagaggaccacggtgtaggtcctccagctggacatcaaagttcttacacaactatctgatcactgagaattagctcttaatgaccaggtcttattgaagaaattaccagtccttgcagaacttatagataatgagctaaatttgcagtactaattatcagaaaaagaagagcagtcttgccatggcaggcatggaaggagttcttttttacttccttactctccttactgctcaaacacctagtacagctggtaaggccagaattatgtaaccctcagtataaaaatgagagtatatacccagatgaataaaatccttcacctatagcaggaaaaaagtgtatttaaaattctcaaatgtaaagtacgactataaaattttgatgcaggtgccataaatgacatggaaatcagcatcgttagtatagagcagggaatagcaaactatagcttgcaggccaaatctagcccatttt

SEQ ID NO: 36226 - DNA, 671 bp, Homo sapiens
accacagcactaaattaatccactgacatgaaaaaccttcaaatgttttatttctccatttaacaaaaaataaactatttttaagtmattactttgttgctacactttaaaatgaaacatatactataaacaattcaaataatttgaaaaagatatgaaaaaagcaacaaatcacctcaaatatcagtaccagaaattatcagtgttactggatgaatgtctacatagatagaagaaattatagaagtcatgtggaaagatagggagaaaaaatcagttgacaaaaatgggataacactacttacagtgttttaataagaagtcattaaaaaaatttttaatttggcagaagaaaagaaaatgaactaaaacagaaggaattgttaatttgtacaaaatttttatttactactcaagatggtaatttgtggaagagccttttaaaaaagaaattgcaccatgaagaccattaagctgtgctgtgtgtgtgtgtgtgtgtgtgtgtgtgtgtgtgtgtgtgtgtgtgtgcctgtgtgtttttatttagctagttcaattcagttgttggcaatatgatgctctgctatgaaatagagaatagcaatgctattatcttccccttttacatctactatttgtttgttgttttattgtgttttcttctttagttt

SEQ ID NO: 36227 - DNA, 531 bp, Homo sapiens
tccagcttttaaaaatctacactattcacttagtcaaagtatctattcgtcaagtacagcctattcctaattattttaagaatccacaatttggactctgagagccttggcattcaggacattatttgaccccctgtacttaaaatatcgatatttaatatatccaatatgtgttatttatattactttcatagtaatacagtcatgcatcacttaacagcagggatacattctgagaaatgtgtcgttaggtgatttcatcattgtgtgaacatcatagggtgtacttaacacaaacctagatggtgtagccctacagcacacctagactgaacgggatagcctatggcttctaggctgtaaacctgtacagcatgttactgtactgaatactgtaggcagttgtaacrcagtagcatctgtgtatctaaacatctaatcacaggaaaaggtacagtaaaaaaatatggtatgaaaaattaaaaaccccacctgtttaagtgcacttaacatgaatggagcttttcagga

SEQ ID NO: 36228 - DNA, 561 bp, Homo sapiens
agaatatacatccaggtagctttcgcatttaaaggacatattaggcagggcatggtggctcatgcctgtaatcccagcactttgggaggccaaggtggttagatcacttgaggtcaggagttcaagaccagcctggccaacaagttgaaaccccatctctagtaaaaatacaaaaattagccaggtgtggtggtgtgcacttgtagtcccagctatttgggaggctgaggcgggagaatagcttgaacccaaaaggcagaggttgcagtgagccgagattgcaccactgcactccagtctgggtgacagagccagaagctgtctaaaaataatcataatcataaaggagaaattatggtttcagctttgaacaaaaaaacaacaaaaaccaaaaagacttcattaatatgrtcatatatgtatatctatacatctaaattattcaaatatgcacctaaaactacattatcctacaatataaactctttagtacaaatatgacataccagattggtgttctactaaaaaaaaaaaattcaagggcatcaccttagttttcta

SEQ ID NO: 36229 - DNA, 603 bp, Homo sapiens
cccacctagatgatgtgtgaccctgggcaggcagcgtagggaaggtgtgcttttgggaaaagctgctctgtagtagagatagtccctaaaataactaaatgctgaagggtgtccacctcctggcacctgggacaggtcctttcatgaaggggttctggatggtgcctcagtgcctcagccttctcctttgtgaaaagtgcatgatgacacttcactggactcttgttctgatatagaactatatgtatatacatacatatatggtctcgctctatagtccaagctggagtgcagtggcacaggaactgctcactgcagcctcaacttcctgggctcaagcaatccccctacctcagactmctgagtagccctgacgacagtcatgtgccaccacacccagctactttcgtattttttgtaggaacggggtcttgctatgttgtgcaggctggtctcgaactctagaactcaagcgatcctcctgcctcggcctaccaaagtgctgggattacaggtgtaagccaccgtgcctggcctaattcattaatactaatataatacattgtctttttgttttaatttttcaatataagcatttaatat

SEQ ID NO: 36230 - DNA, 982 bp, Homo sapiens
gggggatcctccagcagctgcatttgaaaaacgggtgctgagttttcctctcgacaatggtgtgttgaaagcacccccgcccccgaccccgccacctttggagagaagcagctcagcctgtctttatggagggatttggttggtttgctttttcttttctatgctttaaagggcaccggtgttaagattcaggtttgttttgcgtgctaggaatgattttgtccttagtgactggaggcttaaattttttttcttatcattcacatgtgtttttattcataggcagtaattgtttttttttcagattgtaaaagtaatacagctttgtgcagaaagttagaaaatagaactgtataaaagaaaatgttattcattcagagtccttacctctcagagaccatattcarggtggttttggtctatatttcttccagtagtcttttctatatacatatatttcaaaaatataacttagattatacattgcagtttatgttctgccttttttctaaaaatcctagacctatacctgtcattacattcccctccccccacaaaaacattgctttggattgttgcataacttattatctgaacatgccataatctatttaatagtttccattttcagacatttaggttgcttcttgtttctgttttattttgtttgccatcagtaattctatgaaatgcatccttgtatgtaaatctttatcttcatttcaaattaattacccaagatggacagacaggagttgagattagtaagtcaaagagttatgtactctttagattttaagtcacattgtcagttgcttccccgaagggctgatcaatttacattttcacaagcagaatgtactgcttcctgccttagcattgctattatgattgcatctgctatacggtctcttttcctctttttatctcttgcaaatcctttttcttctgcgtatgcttctctatattcttggctcttgga

SEQ ID NO: 36231 - DNA, 971 bp, Homo sapiens
cttgatcccaggaggttgaggcagcagtgagctgtgattacaccactacactctagcctgagcaacaaagcaagacccagtcttaaaaaaaaattaagtttaagacttgttctaatttgtakgaatccttttaattctaagatctcactcattcagggctagttaattgggcaatttatacacacaatttttttgcatgcctgttagaagcacaggtcaattaaactacatactatacaatttcttttgtattacggactgctgtaaattggatttcctgggcaacacactctgggatacagatttgtatataggacacttattaggaagtgctctcaggaacaatgcccatgagggaaacaggactaagcagcaggagaagacagatagatcctaatgcagttgcaacagaggactcagccagttccacagggggcttgaggctggcatggcctttcccagttgtgttctaccccaggtaaggggctaggcatcagtcagtcatgacgtggctgcctctcaggagctgtgatatgttttggctctgtgtctccacccaaatctcttgtcaaattgtcatccccatgtatcaggggaggagcctggtgggatgtgattggatcatggggctggatttcccccttgctgttctcgcgatttcacccttgctgttctcgtgttctgttctcatgactgagttctcatgagatctgatggtttaaaagtgtgggcacttccccctttgctctctcctgctgccctgttagaagatgtgccagctttccctttgccttccgccacgactgtaagtttcctgaggcctccccactcaggtggaactgtgagtcaattaaacctctttcctttataaattacccagtctcaggcagttctttatagtagtgtgacaccaatacaaggtgtcaccttggaagagacagttcctttcacagaggacacctgtgtgggaa

SEQ ID NO: 36232 - DNA, 971 bp, Homo sapiens
cttgatcccaggaggttgaggcagcagtgagctgtgattacaccactacactctagcctgagcaacaaagcaagacccagtcttaaaaaaaaattaagtttaagacttgttctaatttgtatgaatccttttaattctaagatctcactcattcagggctagttaattgggcaatttatacacacaatttttttgcatgcctgttagaagcacaggtcaattaaactacatactatacaatttcttttgtattacggactgctgtaaattggatttcctgggcaacacactctgggatacagatttgtatataggacacttattaggaagtgctctcaggaacaatgcccatgagggaaacaggactaagcagcaggagaagacagatagatcctaatgcagttgcaacagaggactcagccagttccacagggggcttgaggctggcatggcctttcccagttgtgttctaccccaggtaaggggctaggcatcagtcagtcatgacgtggctgcctctcaggagctgtgatatgttttggctctgtgtctccacccaaatctcttgtcaaattgtcatccccatgtatcaggggaggagcctggtgggatgtgattggatcayggggctggatttcccccttgctgttctcgcgatttcacccttgctgttctcgtgttctgttctcatgactgagttctcatgagatctgatggtttaaaagtgtgggcacttccccctttgctctctcctgctgccctgttagaagatgtgccagctttccctttgccttccgccacgactgtaagtttcctgaggcctccccactcaggtggaactgtgagtcaattaaacctctttcctttataaattacccagtctcaggcagttctttatagtagtgtgacaccaatacaaggtgtcaccttggaagagacagttcctttcacagaggacacctgtgtgggaa

SEQ ID NO: 36233 - DNA, 821 bp, Homo sapiens
acagcagcctccgggccaggttccgggatgcttggggatggcgcggctgcacctgtcactcgccgctcactcctgctccggggagaccccgcgctgacctctgcccttgcgcctgacagctgggccccgagcctcccctgcctctgctgtcactcggaggtggctggtgattagtaatcgtctccatcctccacgcgggaggcgtgaccgggcgtttacacgcagcctgtgagccagcgcctggaaattcctttcrgggactgcttttgcatctagaaaccagaagtgattcaagtgatatgttcaactcctgcccctgggctggggagagcgttgcagctcagtaaagcactgctcccagggaagagctgtctctgctcccatggcatagttcttttccctttcctgatcaaggagacaatgacataaatatgactgtcatgggtgatgatagccagactggagagacattctcactagggttttgttttgtttgcttttgtagacagtgtcactctgtcacccaggctggagtgcagtggcacaatcacggctcactgcagcctcaatctctccagctcaagtgattctcccacttcaacctcccaagtagctgggactacaggcgcatgccaccatgcctggccaatttttttttttttttttttttttaagtagagaggacagtctcactatactgtccaggctagtctcaaactcctgacttcaagtgatcctcccacctcagcctcccaagtgtgttaccactaacacacttcctcaattgtaaaataaggcattgaacaagttgtttacattta

SEQ ID NO: 36234 - DNA, 567 bp, Homo sapiens
tttcaggaaccccagatcctggtcctggtcctcctccaccagacggaaggaagtcagagcttgctccaaagagattcttgcaaagtggccccacaactgcttgtctgagtcaagcctcagcagaaaaaatccctgtatccatcatctatttctctattcctctaggaataatttatcttatagttcatcatattccataatatctgcttatgataactaaagcatctagcagcttgacctgctggaaaggatatggatttgggacattttgtctcagatctactacatacaaactttgtgactttggaaatagacacttccttggtatgagtcttagtaagctcacctgtaagatgggagttgtaagaattttatagtgccaggcacagtgattcacacctgtaatcctaacactttgggaggcagaggcaggagaaccacttaagcctatgagtttcaraccagccctgtcaacacagagagaccctgtttttccaaaaaacttaaaaaaatgtagccaggcatggtggtatgctcctgtcagctcttcaggaggctgagatgtga

SEQ ID NO: 36235 - DNA, 871 bp, Homo sapiens
acctaaaaattaaaataaaaatttaaagatatagagaatacagcaacaaatgcccatctacctacctccaagcttaataagcaacctatttacaacacagttgaaactttctgtgaatgcttccagatcagataactctccctcttgaatttggtytataccattcccaagcctctcttcataatcttattacttatgtatcctaaaccacatgaaatattgcttgaattttaaatttgatatgaatgatgtcatagattatgtattcttctgcaacttacttgactcactcagcattatgtgtgtgagaatcatccatgcacatcccgagagttaatgttcattcattttcactgctgtatagcattccactgcatgaagatgccataacatggtctagattagtgactactgtaaatactaactcacttctgtgaatggacactagttatctccagattatgaaaccctaagtaggtttcataatcccgcttactatttccagatttttatgccacattctctccaatgtttgatatagtctacttacctttttgccaggtcatttaatttacatatctctgattactggtataattaagcctctttttttgtaataagtttttggttatttaagttttatctcctgaaaattgttctacatgtcaatctttttgggggagaggttttttgttttgttttgttttttacttttaacattgtcaaatttatcaagcctttcatttatggtttaataaattcttctttatcctaaggtcataaagatatcttcttatatttttcttctatagcaattttgcctttcaaattattccactaaggattgatttttgtatataaagtgcagcag

SEQ ID NO: 36236 - DNA, 871 bp, Homo sapiens
acctaaaaattaaaataaaaatttaaagatatagagaatacagcaacaaatgcccatctacctacctccaagcttaataagcaacctatttacaacacagttgaaactttctgtgaatgcttccagatcagataactctccctcttgaatttggtctataccattcccaagcctctcttcataatcttattacttatgtatcctaaaccacatgaaatattgcttgaattttaaatttgatatgaatgatgtcatagattatgtattcttctgcaacttacttgactcactcagcattatgtgtgtgagaatcatccatgcacatcccgagagttaatgttcattcattttcactgctgtatagcattccactgcatgaagatgccataacatggtctagattagtgactactrtaaatactaactcacttctgtgaatggacactagttatctccagattatgaaaccctaagtaggtttcataatcccgcttactatttccagatttttatgccacattctctccaatgtttgatatagtctacttacctttttgccaggtcatttaatttacatatctctgattactggtataattaagcctctttttttgtaataagtttttggttatttaagttttatctcctgaaaattgttctacatgtcaatctttttgggggagaggttttttgttttgttttgttttttacttttaacattgtcaaatttatcaagcctttcatttatggtttaataaattcttctttatcctaaggtcataaagatatcttcttatatttttcttctatagcaattttgcctttcaaattattccactaaggattgatttttgtatataaagtgcagcag

SEQ ID NO: 36237 - DNA, 536 bp, Homo sapiens
acccatttaaaatacatcattccatattgtttagtaaattacagaaatgtgtaactgtcactacaatctcttattttttaacgtactttttctagtattatttcagtgccatctcttattatatattaaatacattgtgatatattgaaagtattattgattttgatgctcaaattgttcaatttagccattgtccctttcccccaggcctggcaaccactgatctacttttttttgttgttgagatggagtcacgctctgtcacccaggctggagtgcagtggcatgatctcggctcattgcaagctccacctccygggttaatgccattctcctgcctcagcctcccaactagctgggactacaggcgcccaccaccacacctggctaattttttgcgtttttagtagagatgggatttcatcgtgttagccaggatgttcttgatctcctgaccttggcctccaaagtgctgggattataggcttgagccacctcgcctggcctaatctactttctatctctatggatttgcc

SEQ ID NO: 36238 - DNA, 1129 bp, Homo sapiens
gagcttttctatgcctgtcttctctgtgatgatgtgaaagctcctaattccaaaagatttcatctacccagtaatagctaccaacccgcttccttctactgttcaacttattactgtgtttccttaacgctgagatgcacattattttccattttaaaactctgaaattgagggtagatcttacaattgatattgccaactgatctcttgcaatctatattgtagtatttctttcccactctttttctctaaacaggggcgattgaataaatacagtatcctagtcaggaaaaatgaaactctgcctccagcctctaaaggccacaaagaatgaaattgacagaagtaagtaggaagagagtgcccagggctgaaccctgatggttctgggtcaagtagccaagacaagtggaggtcaaagagatgtggccctcagacctctaccggacgatccatatgggctctrccaatctgtgaccacatggcaattgtcttagaataagggaatcaacccaaatttgtccctgttctttctattggtttgttttagcttttgccatcatagctatactaaaagaataagggtctttttctacacaagagtggtgagaagagcacttcacctgtttactttttaatgtcccttttaaatacatgcccccagatgtctaatatgcacattcttcctgctgcataatgtgcctgaagcactgggtttgccatgtgcctccccaaagcagcccaacatccacatgcccacctccccattggccaagcaatgtctgtgtccttctgccccttctttcagggctctgttaagtgattaaagccacttggagaaataaatttaggcaaaaaggttaatggatcatagtatctgctttactcgggtatttgtattttaaagggttctttaagaagtacagcatcttaatcaaaaataattgactttgaattgaaggatttttcaggatgcaaggaaggatatttagggcaagaaggatttcaagtacccatcgaatcctatcatgtgggcacacacacactctgcctgagcccaaatggtctgggcatcaagaaatttaaaaaagctacttctttgctcctggcattgtcatcacagctttgg

SEQ ID NO: 36239 - DNA, 1129 bp, Homo sapiens
gagcttttctatgcctgtcttctctgtgatgatgtgaaagctcctaattccaaaagatttcatctacccagtaatagctaccaacccgcttccttctactgttcaacttattactgtgtttccttaacgctgagatgcacattattttccattttaaaactctgaaattgagggtagatcttacaattgatattgccaactgatctcttgcaatctatattgtagtatttctttcccactctttttctctaaacaggggcgattgaataaatacagtatcctagtcaggaaaaatgaaactctgcctccagcctctaaaggccacaaagaatgaaattgacagaagtaagtaggaagagagtgcccagggctgaaccctgatggttctgggtcaagtagccaagacaagtggaggtcaaagagatgtggccctcagacctctaccggacgatccatatgggctctgccaatctgtgaccacatggcaattgtcttagaataagggaatcaacccaaatttgtccctgttctttctattggtttgttttagcttttgccatcatagctatactaaaagaataagggtctttttctacacaagagtggtgagaagagcacttcacctgtttactttttaatgtcccttttaaatacatgcccccagatgtctaatatgcacattcttcctgctgcataatgtgcctgaagcactgggtttgccatgtgcctccccaaagsagcccaacatccacatgcccacctccccattggccaagcaatgtctgtgtccttctgccccttctttcagggctctgttaagtgattaaagccacttggagaaataaatttaggcaaaaaggttaatggatcatagtatctgctttactcgggtatttgtattttaaagggttctttaagaagtacagcatcttaatcaaaaataattgactttgaattgaaggatttttcaggatgcaaggaaggatatttagggcaagaaggatttcaagtacccatcgaatcctatcatgtgggcacacacacactctgcctgagcccaaatggtctgggcatcaagaaatttaaaaaagctacttctttgctcctggcattgtcatcacagctttgg

SEQ ID NO: 36240 - DNA, 1129 bp, Homo sapiens
gagcttttctatgcctgtcttctctgtgatgatgtgaaagctcctaattccaaaagatttcatctacccagtaatagctaccaacccgcttccttctactgttcaacttattactgtgtttccttaacgctgagatgcacattattttccattttaaaactctgaaattgagggtagatcttacaattgatattgccaactgatctcttgcaatctatattgtagtatttctttcccactctttttctctaaacaggggcgattgaataaatacagtatcctagtcaggaaaaatgaaactctgcctccagcctctaaaggccacaaagaatgaaattgacagaagtaagtaggaagagagtgcccagggctgaaccctgatggttctgggtcaagtagccaagacaagtggaggtcaaagagatgtggccctcagacctctaccggacgatccatatgggctctgccaatctgtgaccacatggcaattgtcttagaataagggaatcaacccaaatttgtccctgttctttctattggtttgttttagcttttgccatcatagctatactaaaagaataagggtctttttctacacaagagtggtgagaagagcacttcacctgtttactttttaatgtcccttttaaatacatgcccccagatgtctaatatgcacattcttcctgctgcataatgtgcctgaagcactgggtttgccatgtgcctccccaaagcagcccaacatccacatgcccacctccccattggccaagcaatgtctgtgtccttctgccccttctttcagggctctgttaagtgattaaagccacttggagaaataaatttaggcaaaaaggttaatggatcatagtatctgctttactygggtatttgtattttaaagggttctttaagaagtacagcatcttaatcaaaaataattgactttgaattgaaggatttttcaggatgcaaggaaggatatttagggcaagaaggatttcaagtacccatcgaatcctatcatgtgggcacacacacactctgcctgagcccaaatggtctgggcatcaagaaatttaaaaaagctacttctttgctcctggcattgtcatcacagctttgg

SEQ ID NO: 36241 - DNA, 522 bp, Homo sapiens
tgttttgctacagccttgcagaggcattcttgtaacaaaccaaatgtctgtatatgtgggtctatttctggccattttcttctggcttattgtttcatatttacatccttgcatcatcactgtgctgtatttccttgctttaaggatttctggcaatggaggtgcttccacatgggtcttcttcatgattattttggctagtcttcaaatttcatattcattttagaataagattataatttctaccctcaaaccttgctgggatgtttattagtattacaatgaatctatggattaatttggggacatttctgcaatgttgactgtttcagtattataaatagaggtattgaatgatttcaggttttctgcctccctccttctatcttcgactcctattagcaacagagaaatctcaatgcttgtattaatacaaaagtcatatcttgtccttcccaatccccatcctttttccatgatgttctcctgcyccctcttgattcccagctgtctccagcaacc

SEQ ID NO: 36242 - DNA, 522 bp, Homo sapiens
tgttttgctacagccttgcagaggcattcttgtaacaaaccaaatgtctgtatatgtgggtctatttctggccattttcttctggcttattgtttcatatttacatccttgcatcatcactgtgctgtatttccttgctttaaggatttctggcaatggaggtgcttccacatgggtcttcttcatgattattttggctagtcttcaaatttcatattcattttagaataagattataatttctaccctcaaaccttgctgggatgtttattagtattacaatgaatctatggattaatttggggacatttctgcaatgttgactgtttcagtattataaatagaggtattgaatgatttcaggttttctgcctccctccttctatcttcgactcctattagcaacagagaaatctcaatgcttgtattaatacaaaagtcatatcttgtccttcccaatccccatcctttttccatgatgttctcctgccccctcttgattcccasctgtctccagcaacc

SEQ ID NO: 36243 - DNA, 601 bp, Homo sapiens
ctctctcaaaagaccagctgcttagatgaatcaacataaacagtttcacacaattagcaggagatctgacttacagccaccttgtaccaaattctgcttcagcatcaaagcgtgttggtgtagttctggcctacgtagcaagccctagaaaacaagaggaaagggaaagagatatatttactaatgtgaaggaaggtacatttactaagaacaaatattttctctagccctgtgataggtgcttcccttgtgttaactaagtaatactcatcaacagccattatgtaggtaaagaaactcaaattcagagaggttggataatttatcaaaaatcacacagtaattgaagtcattttttttagcatccttctcttygtgtccaaaatccatactttttcccatacaacatgctactcactggttaaagtacaattccttatgatttatctgaagtgactgagtgtgtatatcccagaaaagacagagccaggagctgggcactgtatcagcacctcccttttctgcccgtgttcaacttggcaaaattattcctggaggctgggtttcagaatgataaagcagtcaccaaggaggggtttta

SEQ ID NO: 36244 - DNA, 592 bp, Homo sapiens
tgcatgattataaatttgatatttgttggtggtattttaaattaagagaatgaacaactccataattttcttaaagaaaatgaaaattggtcatagcaaaaatatggttgtgatatataaaaaaaatcacagagcttctaacacttgaaatttcctgagtgataagactgttttatttatttatttatttatttgtttatttatttttgagacagggtctcactctgtcacccaggctggagtgcagtggcatgatcacagctcactacaacctagacctcctaggctcaaacacttctctcacctcagcctctcgaatagctgggactacaagcatgcaccaccatgcccggctaatttattttttatttattttagagatggagttttatcatgttgcccaggctggtctcaaacccctgggcttaagtgatcctcctgccttgacatcccaaagtgctaggattacaggagtgacccaycatgcaagcaagagtgtttttttttggtatggttaattagattactcatgatggaggtcttaccctcagattagggatttttcccttttgtatatccttacatactattt

SEQ ID NO: 36245 - DNA, 602 bp, Homo sapiens
ggggcagtctgtgagactgatgccttaacctttaggatcatttctatctctgtgcagtgaatgtcagaattaaattgaattatgggatagccgtttggtgttggagaattggttgttgttgaaaagacataaaaatcattatcaaaaataatgaagagtcttctagaggaaaaaatgttaaattgggaagtgtgaaaaattgtgygaaattaatattggcatgcaaaaatttaaaaattagtagtcaaagtagttaccatcaaaaaagctacatcagaatgtcacaaccaaaatattatctacccatattttcagtcattacacagttttcatcaagtgtcattggtgtgcacagagcgtagcattattctaatttttgagagacacactctcagaaactgatttctttggtgaaagaaacaccctcccacgtaaaagatgattgatatctactttaaaaaatgtcaggactccttagcatataagagctgaagagagtaaaatataaagaagaaactgaatcattagaactagtataatttaatttttaatttaaatcctataatgttctgcaaatgtctggaataaaaagaaaggacata

SEQ ID NO: 36246 - DNA, 537 bp, Homo sapiens
tgacctatcacatatagtacttactatggtactaggctctgtttaggcacaggggatagaagtaggaatgattcattcctgtcattgtggaacatctagaggtagtttcctatagatatagacatkcatttcagttttgcaagaagtataattaatgctatctatatatctatctgtgtatttatctatggatactcccaggtggaatataaacccaaaataggtcaggcacaattttccctctgtagattaggaatttggaaaatttttatagacaggctgtatttaatccaggtattgaataatgttcagtcatgaaacacacactttttgtcaatgactccagaataagtttaacctatggagctgagaagcattcctaagtgtaaccatttaattaacagctaaattttgaaaatattcacctatttgcttcagtttcttttttaggtatagccatgatcatccagaaaatgaagtaaaacatttcaaaataattaaagattttacctttcttgataaaaaattggtagtttt

SEQ ID NO: 36247 - DNA, 450 bp, Homo sapiens
ccagcccccgaggagatcccacaaccgacccagcccccacggagaacccagaaccgacccagcacctgggcaacattctgcccccggcctcctccacttgctgggcatgcatcaccgtcatctgcagccactttccccaatgccagaatcagaaattttcaaaatggttgaatagtatttggttattttttgataggatataatgcttttgttccttctttgacttcacgttttctttgttctctaagctaaatgccagcatttaaactgtatacygagacacacaattgtgtgaatattagcttgaggctctcttaagacagactcagatatccaaaggctttgaactcacagaattttgtaaaactcgaagcacattcgcactgccctttggaacctgccttgtctacagagctaataggcaagacccagctcacccagggggctcgg

SEQ ID NO: 36248 - DNA, 553 bp, Homo sapiens
ttgtttttttttttttttgagatggagtctcgctctgtcacccaggctggagtgcagtggcgcaatctcagctcactgcaggctccgcctcccaggttcacaccattctcctgtctcagcctcctgagtagctgggactacaggcacccaccactacacccggctaattttttgtatttttagtagagacggggtttcaccgtgttagccaggagggtctcaatctcctgacctcgtgatcygcccgcctcagcctcccatagtgctaggattacaggcgtgagccactgcgcccagcctatagtttttttttaatatgactaatatttagttatagttttaagacagcagtgacgtcacagaaaacggcagggcaggaagcttcagggattaattggttcttccaccaaaaccaccattaagctggacaacaaattagcagaatcaactgttttctaactctgtcacctcatcagatgcttactgcaacccggggaaggcttgatgatgcagaggctgcagctttttggttaagagggtggtgtggatggac

SEQ ID NO: 36249 - DNA, 915 bp, Homo sapiens
ttacattatcgcagactatgcatgtgcaagataaggagcaaagtatattcattctgtgagtaaattagcccccaacagaaactcaaacctacatccagaatgaactaatatttcccttgatggaattggtaaaattgaagttggatgaatcacaaaacagtctcaattcacaaacatttttggtgtttgaatttggaaatagatttggccccagaagttggcacccctaccactgttctgtgagctacatccatcaaagcgaataaaggaaagatgaggaggagacagtggttaacctgtrgactagaatttccagaaaatgtattcatactacaattttaatgaaacctagaaaattagaaaataagatttaaattttaaaacttcatcttatcctttcttcccttgcaataatctttctcttccatatcatctattttctatggtttttcctttctttcctaccataccctatgtgatcatccattgagatgattcttttccttttcatatatctttttctaattgaagtttaattaaccaaaggtaaatttcatagatcttaggtattctgtttgataacttttaagtattgtatatacctatacatcaactacctgaaacaaaagtatttacaacatcccagaaagttatcctgtgttcctcttccagtcaattcctgcacctaccttccataaaccactttatattttctatcacaacagattaatattttgtctaattttgtatctcatataaatgggaatcataacagtatttatgagtggggtctgtttttgcttaacaatgtttttaaggttcatccatgatattgtgtttcagtaattcatttcttttcattactgaggagtattccattgtgtaaagagaccatagtttagttacccattctcc

SEQ ID NO: 36250 - DNA, 887 bp, Homo sapiens
tttaccttccactcayatatttggtatctgcaacatctatcagagttcctaacacaatggctcaagagaaacttccattgcatgagagaatatatgaataaagaaatgaatgaatcaagtcaatgttttagacatgaacgtctctgctgtgcccttcctcagtctaggtctcattccttctccccacttttgtatgtcctcttggtgactgcttcctcctttctgtctcagttttactttcactgctctatttggtgtgtcatttctgcccctcttttaagtctccccttaactgattaaattgatgggcttcaggtttaaaaaggaagattaaacacacatttttaacctgatttccttctctaaactcctctaaaataaatgtgtagcatttttaaaggcataaatcctcaaggacaaacagaacaagagaggaaacaacagcaacacaatttgagaagctagaaatcagatggataagtggtaaatgatttagcaaacctgaaaaatcgaaaaccgagactggctggggagggaggcccaaaagctagccagtgcatacctcaaattccagaagtgttcagaaattaaagttacctggtacctcttaaaggagtgtgaaggcagaggtgattggttaaaaatctgtttaaaaagacgttagataccctgtccaatctcaacaaaagttagaaaatgttctctctgaatagcgtgaattgagggattctagggggcactgggcataggagcagggctgccaaactgaacattgctagattaagtgaaaaatctactcatggaatgatgatactctcatcccctttcccaactcagatcccagaacagagtcagccagacttgtacctaccagacaggtcactgaa

SEQ ID NO: 36251 - DNA, 887 bp, Homo sapiens
tttaccttccactcatatatttggtatctgcaacatctatcagagttcctaacacaatggctcaagagaaacttccattgcatgagagaatatatgaataaagaaatgaatgaatcaagtcaatgttttagacatgaacgtctctgctgtgcccttcctcagtctaggtctcattccttctccccacttttgtatgtcctcttggtgactgcttcctcctttctgtctcagttttactttcactgctctatttggtgtgtcatttctgcccctcttttaagtctccccttaactgattaaattgatgggcttcaggtttaaaaaggaagattaaacacacatttttaacctgatttccttcyctaaactcctctaaaataaatgtgtagcatttttaaaggcataaatcctcaaggacaaacagaacaagagaggaaacaacagcaacacaatttgagaagctagaaatcagatggataagtggtaaatgatttagcaaacctgaaaaatcgaaaaccgagactggctggggagggaggcccaaaagctagccagtgcatacctcaaattccagaagtgttcagaaattaaagttacctggtacctcttaaaggagtgtgaaggcagaggtgattggttaaaaatctgtttaaaaagacgttagataccctgtccaatctcaacaaaagttagaaaatgttctctctgaatagcgtgaattgagggattctagggggcactgggcataggagcagggctgccaaactgaacattgctagattaagtgaaaaatctactcatggaatgatgatactctcatcccctttcccaactcagatcccagaacagagtcagccagacttgtacctaccagacaggtcactgaa

SEQ ID NO: 36252 - DNA, 1156 bp, Homo sapiens
agaaatgcttattagtttagttttakcagttttaaaactcaattgctttctaaatcaataattcacagtatatctttaataatcattgcataatgagccaccgaaaagtttgtcttcaagttatgcactaattttaaaaatatttccatcatccaataatacaaatgttaggctaaattcacttcctttgtaaatactgaaataccagatgccttctataacaaaacaaaagcataacacttgaataatttatcacatgaggtacctaattttcatcgttatatttgagttttgcagaatgataatcatgacttcaggtgcagcattctctctaccccacacatccttccttcttgtctctgcctggaaaaaaatctattctctcttcaaaatgcagctttattttttctctgcctttatgaaattccccttgactacctgggacagagttagtggtccccccgatcttcttatagttttttcatctattaaagcccttgttacactgtatttatatcacttctccccatgtgacttttcccattctaacctataatgtaccagagggcagagatccttaatattttttattctttaacaagcatttattaaacacctaatttggtgcaggcaccaggctaatagctagagatacagaaaaacataattctacttacaagttgcttaccatccagggaggagatagaaaaacatatacaatatagcgaggagagtaacatgatgcagtcaagcatggggtgtctgcaatcatatgggttgagcatctctgcccagacagggattcagagaaggattactgaaagcagcagcatctaaattgagttgtaacaaatgaagaggcatcatctgcactggcggagagtggttagtaagaaaagttggggtgggatcaggaacaagggttaggatgggtgtttcaggaatgaaatactgggtgtggaggctgcactggaggtcttggacttctctctgcttcatcacttcctcttgattgcttgtatctttgaaattattagcaagctttctagggataagagccctgattcacatgagtttgattttatagtgcgatcctctgtgttatcttgaaatgaaagaaaagcagataataagtctgaatatagagatttaatgc

SEQ ID NO: 36253 - DNA, 1156 bp, Homo sapiens
agaaatgcttattagtttagttttatcagttttaaaactcaattgctttctaaatcaataattcacagtatawctttaataatcattgcataatgagccaccgaaaagtttgtcttcaagttatgcactaattttaaaaatatttccatcatccaataatacaaatgttaggctaaattcacttcctttgtaaatactgaaataccagatgccttctataacaaaacaaaagcataacacttgaataatttatcacatgaggtacctaattttcatcgttatatttgagttttgcagaatgataatcatgacttcaggtgcagcattctctctaccccacacatccttccttcttgtctctgcctggaaaaaaatctattctctcttcaaaatgcagctttattttttctctgcctttatgaaattccccttgactacctgggacagagttagtggtccccccgatcttcttatagttttttcatctattaaagcccttgttacactgtatttatatcacttctccccatgtgacttttcccattctaacctataatgtaccagagggcagagatccttaatattttttattctttaacaagcatttattaaacacctaatttggtgcaggcaccaggctaatagctagagatacagaaaaacataattctacttacaagttgcttaccatccagggaggagatagaaaaacatatacaatatagcgaggagagtaacatgatgcagtcaagcatggggtgtctgcaatcatatgggttgagcatctctgcccagacagggattcagagaaggattactgaaagcagcagcatctaaattgagttgtaacaaatgaagaggcatcatctgcactggcggagagtggttagtaagaaaagttggggtgggatcaggaacaagggttaggatgggtgtttcaggaatgaaatactgggtgtggaggctgcactggaggtcttggacttctctctgcttcatcacttcctcttgattgcttgtatctttgaaattattagcaagctttctagggataagagccctgattcacatgagtttgattttatagtgcgatcctctgtgttatcttgaaatgaaagaaaagcagataataagtctgaatatagagatttaatgc

SEQ ID NO: 36254 - DNA, 1156 bp, Homo sapiens
agaaatgcttattagtttagttttatcagttttaaaactcaattgctttctaaatcaataattcacagtatatctttaataatcattgcataatgagccaccgaaaagtttgtcttcaagttatgcactaattttaaaaatatttccatcatccaataatacaaatgttaggctaaattcacttcctttgtaaatactgaaataccagatgccttctataacaaaacaaaagcataacacttgaataatttatcacatgaggtacstaattttcatcgttatatttgagttttgcagaatgataatcatgacttcaggtgcagcattctctctaccccacacatccttccttcttgtctctgcctggaaaaaaatctattctctcttcaaaatgcagctttattttttctctgcctttatgaaattccccttgactacctgggacagagttagtggtccccccgatcttcttatagttttttcatctattaaagcccttgttacactgtatttatatcacttctccccatgtgacttttcccattctaacctataatgtaccagagggcagagatccttaatattttttattctttaacaagcatttattaaacacctaatttggtgcaggcaccaggctaatagctagagatacagaaaaacataattctacttacaagttgcttaccatccagggaggagatagaaaaacatatacaatatagcgaggagagtaacatgatgcagtcaagcatggggtgtctgcaatcatatgggttgagcatctctgcccagacagggattcagagaaggattactgaaagcagcagcatctaaattgagttgtaacaaatgaagaggcatcatctgcactggcggagagtggttagtaagaaaagttggggtgggatcaggaacaagggttaggatgggtgtttcaggaatgaaatactgggtgtggaggctgcactggaggtcttggacttctctctgcttcatcacttcctcttgattgcttgtatctttgaaattattagcaagctttctagggataagagccctgattcacatgagtttgattttatagtgcgatcctctgtgttatcttgaaatgaaagaaaagcagataataagtctgaatatagagatttaatgc

SEQ ID NO: 36255 - DNA, 1231 bp, Homo sapiens
ctgctcagcaggccaatcagagagatcccattatgcaaggggctgctgagggactatttgtcccgaactggaggcagaaaactgaaggatgcccttttagagtttgtatgggttgtttttggagagaagccatgccatttttttgttttgttttgttttgttttactggcatctagtttgtgtgtgtgtgtgtttgtatgtatgtgtgcatgcgcacgtgtgtgcatgtaaatctgctgtctttgaagggagacaaacatttttccagttccttccttaaggtactttagtattctcacattttaattccccattgttttaattccaaccatccaaatatgttatgatctgaatcaaaagctagtaccccaaatgtattcaaataggctacacacacacacacacacacacacacacacacacacacacacacactctgctgtgtcatccattctattacccccaacatcatggtattaattagtgaattctttcacccttaagctacagctgatagctttgcaccaggagaatttctctgcctatttccctatctggcagagctaacaggattggagtggctactcctgcagtaacacttcacactgttgtggtcaccagaggttgaaggaggccctggggttttcatctacgaggctgactctgaccgggttgtccgtagatttagactaggttccaccttaatcaaaccaaatacagctcaaaatgtttctccagcagattacaaatcaatttaccagacaaaactccccattaatccataagtgtcatagagcsacctgcacagacctgcagagcatctatacaacaatgatattttgtgttctgattttcctacctgtgcaattgtaaaatatccctaaatagccggtatttataagttttcatttgaaagaagcataagaaatctatgtctcatcttagtcaatgaaaaaaaattatccttaactgtgaacaaagtcagagacatagtctctcacaagtgggaatgaagaaattatgcaggacctatttagcttctggtgaatgtggcaggtatttccaaggggtgtttcaaaaataaaatccctatggagatatatatatatatatatatatatatatatatatatatatatatatacatttaccgatcaaaagatatgccattatatacatcaccttcttctcctgtttaacttgacattttcttcatgatcactgagctctg

SEQ ID NO: 36256 - DNA, 1231 bp, Homo sapiens
ctgctcagcaggccaatcagagagatcccattatgcaaggggctgctgagggactatttgtcccgaactggaggcagaaaactgaaggatgcccttttagagtttgtatgggttgtttttggagagaagccatgccatttttttgttttgttttgttttgttttactggcatctagtttgtgtgtgtgtgtgtttgtatgtatgtgtgcatgcgcacgtgtgtgcatgtaaatctgctgtctttgaagggagacaaacatttttccagttccttccttaaggtactttagtattctcacattttaattccccattgttttaattccaaccatccaaatatgttatgatctgaatcaaaagctagtaccccaaatgtattcaaataggctacacacacacacacacacacacacacacacacacacacacacacactctgctgtgtcatccattctattacccccaacatcatggtattaattagtgaattctttcacccttaagctacagctgatagctttgcaccaggagaatttctctgcctatttccctatctggcagagctaacaggattggagtggctactcctgcagtaacacttcacactgttgtggtcaccagaggttgaaggaggccctggggttttcatctacgaggctgactctgaccgggttgtccgtagatttagactaggttccaccttaatcaaaccaaatacagctcaaaatgtttctccagcagattacaaatcaatttaccagacaaaactccccattaatccataagtgtcatagagcgacctgcacagrcctgcagagcatctatacaacaatgatattttgtgttctgattttcctacctgtgcaattgtaaaatatccctaaatagccggtatttataagttttcatttgaaagaagcataagaaatctatgtctcatcttagtcaatgaaaaaaaattatccttaactgtgaacaaagtcagagacatagtctctcacaagtgggaatgaagaaattatgcaggacctatttagcttctggtgaatgtggcaggtatttccaaggggtgtttcaaaaataaaatccctatggagatatatatatatatatatatatatatatatatatatatatatatatacatttaccgatcaaaagatatgccattatatacatcaccttcttctcctgtttaacttgacattttcttcatgatcactgagctctg

SEQ ID NO: 36257 - DNA, 1231 bp, Homo sapiens
ctgctcagcaggccaatcagagagatcccattatgcaaggggctgctgagggactatttgtcccgaactggaggcagaaaactgaaggatgcccttttagagtttgtatgggttgtttttggagagaagccatgccatttttttgttttgttttgttttgttttactggcatctagtttgtgtgtgtgtgtgtttgtatgtatgtgtgcatgcgcacgtgtgtgcatgtaaatctgctgtctttgaagggagacaaacatttttccagttccttccttaaggtactttagtattctcacattttaattccccattgttttaattccaaccatccaaatatgttatgatctgaatcaaaagctagtaccccaaatgtattcaaataggctacacacacacacacacacacacacacacacacacacacacacacactctgctgtgtcatccattctattacccccaacatcatggtattaattagtgaattctttcacccttaagctacagctgatagctttgcaccaggagaatttctctgcctatttccctatctggcagagctaacaggattggagtggctactcctgcagtaacacttcacactgttgtggtcaccagaggttgaaggaggccctggggttttcatctacgaggctgactctgaccgggttgtccgtagatttagactaggttccaccttaatcaaaccaaatacagctcaaaatgtttctccagcagattacaaatcaatttaccagacaaaactccccattaatccataagtgtcatagagcgacctgcacagacctgcagagcatctatacaacaatgatattttgtgttctgattttcctacctgtgcaattgtaaaatatccctaaatagccggtatttataagttttcatttgaaagaagcataagaaatctatgtctcatcttagtcaatgaaaaaaaattatccttaactgtgaacaaagtcagagacatagtctctcacaagtgggaatgaagaaattatgcaggacctatttagcttctggtgaatgtggcaggtatttccaaggggtgtttcaaaaataaaatccctatggagakatatatatatatatatatatatatatatatatatatatatatatacatttaccgatcaaaagatatgccattatatacatcaccttcttctcctgtttaacttgacattttcttcatgatcactgagctctg

SEQ ID NO: 36258 - DNA, 1231 bp, Homo sapiens
ctgctcagcaggccaatcagagagatcccattatgcaaggggctgctgagggactatttgtcccgaactggaggcagaaaactgaaggatgcccttttagagtttgtatgggttgtttttggagagaagccatgccatttttttgttttgttttgttttgttttactggcatctagtttgtgtgtgtgtgtgtttgtatgtatgtgtgcatgcgcacgtgtgtgcatgtaaatctgctgtctttgaagggagacaaacatttttccagttccttccttaaggtactttagtattctcacattttaattccccattgttttaattccaaccatccaaatatgttatgatctgaatcaaaagctagtaccccaaatgtattcaaataggctacacacacacacacacacacacacacacacacacacacacacacactctgctgtgtcatccattctattacccccaacatcatggtattaattagtgaattctttcacccttaagctacagctgatagctttgcaccaggagaatttctctgcctatttccctatctggcagagctaacaggattggagtggctactcctgcagtaacacttcacactgttgtggtcaccagaggttgaaggaggccctggggttttcatctacgaggctgactctgaccgggttgtccgtagatttagactaggttccaccttaatcaaaccaaatacagctcaaaatgtttctccagcagattacaaatcaatttaccagacaaaactccccattaatccataagtgtcatagagcgacctgcacagacctgcagagcatctatacaacaatgatattttgtgttctgattttcctacctgtgcaattgtaaaatatccctaaatagccggtatttataagttttcatttgaaagaagcataagaaatctatgtctcatcttagtcaatgaaaaaaaattatccttaactgtgaacaaagtcagagacatagtctctcacaagtgggaatgaagaaattatgcaggacctatttagcttctggtgaatgtggcaggtatttccaaggggtgtttcaaaaataaaatccctatggagatatatatatatatatatatatatatatatatatatatatatayatacatttaccgatcaaaagatatgccattatatacatcaccttcttctcctgtttaacttgacattttcttcatgatcactgagctctg

SEQ ID NO: 36259 - DNA, 1073 bp, Homo sapiens
ggatccatcccaaaatttcagatgttataaataccctgaagcatcacaaaaaaagcggcccttgttagaaactaactttgcatgcataattaatgtgggcaccacattcctacttcacaaccagaagagaaattgaattcaggtgtttggtgaacatatgggggatttactgtgaatttatgacctgtgatttgagtgtaaaaccccaagatacttgctgataaaacttaatgaagcttgcgcagaggagctatttttatttgtagtttgataattgatacatttcttggtttaaccctcccacccttcctccattcctcataagtcttccagcctgagagatagagccatagtgaatagccacagtctttttagccagcttggcctcatgcttaactaatttgaaagttcacagtttgcttttctgtgacattttagtctgttctttcccttctctcttaatttagcgattaatactttttcacaaactgtacaggtgatacaggtgacaggaggcacaccgtgtgctttgaacaggtaccgtgggagaacgtgcaaacgctttcacagggggtgacatcaatttactatttcttaagaaagcaaagataaaggcataatactgctcatcattaaaatttagacaaatccattgccatttaaaggttttttctccaagaagaaacacttcaaggggcaggaacctgccacacatatcctgaccatgtctctctgcttcaatgtttttatctaggattttaycaagaatgctcctgatttgagagccaggagaaaaatattctaaaaaaaaaacaacgaaaaacaaaagcaaatgacaagtgttccattttaacacacggggtgtaatgggtttaatgagaaacctgtgtttgctcactaatttacagcaattaagaactcagttctgacatctgtagattagaactatttatctagagatcaggcatattttatggaattgctaatcagtatagaaaaatatctaagtgggaagcaggttgtttatctgcctctctgaatggtgtcaatatctggtagttctgtatcatagg

SEQ ID NO: 36260 - DNA, 1073 bp, Homo sapiens
ggatccatcccaaaatttcagatgttataaataccctgaagcatcacaaaaaaagcggcccttgttagaaactaactttgcatgcataattaatgtgggcaccacattcctacttcacaaccagaagagaaattgaattcaggtgtttggtgaacatatgggggatttactgtgaatttatgacctgtgatttgagtgtaaaaccccaagatacttgctgataaaacttaatgaagcttgcgcagaggagctatttttatttgtagtttgataattgatacatttcttggtttaaccctcccacccttcctccattcctcataagtcttccagcctgagagatagagccatagtgaatagccacagtctttttagccagcttggcctcatgcttaactaatttgaaagttcacagtttgcttttctgtgacattttagtctgttctttcccttctctcttaatttagcgattaatactttttcacaaactgtacaggtgatacaggtgacaggaggcacaccgtgtgctttgaacaggtaccgtgggagaacgtgcaaacgctttcacagggggtgacatcaatttactatttcttaagaaagcaaagataaaggcataatactgctcatcattaaaatttagacaaatccattgccatttaaaggttttttctccaagaagaaacacttcaaggggcaggaacctgccacacatatcctgaccatgtctctctgcttcaatgtttttatctaggattttaccaagaatgctcctgatttgagagccaggagaaaaatattctaaaaaaaaaacaacgaaaaacaaaagcaaatgacaagtgttccattttaacacacggggtgtaatgggtttaatgagaaacctgtgtttgctcactaatttacagcaattaagaactcagttctgacatctgtagattagaactatttatctagagatcaggcatattttatggaattgctaatcagtatagaaaaatatctaagtgggaagcaggttgtttayctgcctctctgaatggtgtcaatatctggtagttctgtatcatagg

SEQ ID NO: 36261 - DNA, 563 bp, Homo sapiens
aagaggaaggactgaggctgcccaaggtgctgacaccagcgcggccctgcttgtgagtgagctcgcccatctccgctttcatctcagagatctgcaggcacagacaggtaaaggaatttgcccacagtcagaaatcagcagatgagaattcaaacccagaccgtgaagaatcagagccacagcaaggttattacatgcaaggagaaacaaattttgtgcttaaagtaaaaagcagagtggcatttcttctgtaatgtaagcagctgtgtgactttgggcaagttgcttcacctctgtaggcctstgtttgcctgtctgtaataaacagatcccccatctctgggacttcaaaagaggagaggacggtcagcaggggtggcctgctcagaagggccatacttcatccccaatgtccctcaacaactccaagggcaatgccaccccagacctcactgccaggccttccagagtccaacaaactcgtgtcccatgaccacagcttgttcccttgatctatgtgcacctggggatgctggtggctgggaggtgagttcatgaggcct

SEQ ID NO: 36262 - DNA, 563 bp, Homo sapiens
aagaggaaggactgaggctgcccaaggtgctgacaccagcgcggccctgcttgtgagtgagctcgcccatctccgctttcatctcagagatctgcaggcacagacaggtaaaggaatttgcccacagtcagaaatcagcagatgagaattcaaacccagaccgtgaagaatcagagccacagcaaggttattacatgcaaggagaaacaaattttgtgcttaaagtaaaaagcagagtggcatttcttctgtaatgtaagcagctgtgtgactttgggcaagttgcttcacctctgtaggcctctgtttgcctgtctgtaataaacagatcccccatctctgggacttcaaaagaggagaggacggtcagcaggggtggcctgctcagaagggccatacttcatccccaatgtccctcaacaactccaagggcaatgccaccccagacctcactgccaggccttccagagtccaacaaactygtgtcccatgaccacagcttgttcccttgatctatgtgcacctggggatgctggtggctgggaggtgagttcatgaggcct

SEQ ID NO: 36263 - DNA, 1721 bp, Homo sapiens
ggatccagagagcagtgaggacccccattcccctccttgggaacagaatccaaagtggagagggaagaaggtggctgcatggcaagcccaccacaacgggatagagccttggagtcaaagtgaagaaaacaaaatcatgtgacattatccacacacttgagtttgtccacctggagccctacatcttaaataattcttttcttcttttttttttttttgagatggagtctccctgtgtctcccaggctggagtgcagtggcgcaatctcggctcaccacaacctccgcctcctgggttcaggtgattctcctgcctcagcctcccgagtagctgagattagaggtatatgccatgacgcccagctaatttttgtatttttagtagagacagggtttcaccatgttggccaggatgatcttgaactcctgactttgtgatccacccgcctcagtctcccaaagtgctaggattacaggtgtgagccactgcgcccggctaataattctttttttttttttttctttgtttgagatggagtcttgctctgttgcccaggctggagtgcaatggagcgatcttggctcactgcaacctccgcctcccaggttcaagcaattctcccacctcagcctcccaagtagctaggattacaggcatgcgcyaccatgcccggctaatttttgtatttttagtagagatggggttttcaccatgttggcctggctagtcttgaactcctgacctcaggtgatccacccgcctcagcctcccaaagtgctgggattacaagcctgagccaccacgcccggccaataattcttataatgacaatcaactcactcccaagccatctatttacatttatatttttatggtgccccaaatgatggcgatctgttgttttacatgtatatcttcaatctacagaaccataccctctgcctcacgagggtgagctaaaacattattgtggcctggtggcctttggagaaccaacttgtggtttgttgggaaaggacacactgtgttttccatgagtcactaggagagcagagaaataacaggatccaacacagtcttatggacccagcctcacactctccactttcctctgttggcgtcatctgcaggcagctgctggtggcagagatggctgccaaccctaagcttatataacatcctctcctcaaccttggagggatgggagtctccacagcagctcacctacagagctggctctgtctggatgtcacatctgtccttgaaacagtcgccatggccaagatggtggagggttctaattagctgggttaaattcccacctctgctaggaggggtggaactggcctgtccagaacagcatgagaatagggaagaagcaatttcccaagaaaatgagagttcagttactggaagatgaaggatgaatgctggagggatgggaaaacaccagatatcttcctcaggtaaacttcaagctggtagacccttcctttcccacccttccccagaaacaattgtgcccagagcatgcagagctcgttggtgtggagaagacactgatatcttgttcttggaaaattccaagtgtgtttacagactgaggagcctcaggcaagggggtcccccacctggcatgactgggggccctgatggacatgctgccagtttctgctaaactcagaatgcacattcttagaatcctgtgtattggcttggg

SEQ ID NO: 36264 - DNA, 799 bp, Homo sapiens
acccagctcagcctcccaaagtgctgggattataggcgtgagccactgcgcccggccgtcacaataattttkaaaagagaaaacctaatcagttagaatagtgggcatgtgtcatgcttataggaacctgctgcacacctttatgcttgggcaatttcccacttatgagttaacttcctcacaacagagtctgcaaattactttcccagactccatgctactgagtgcaagcgtgtgacccaagttctatggctgggattttcccatagactccagttaaaaacaaacaacataaacaacatgaaccaagacgagctgccagtgtctgctggggcaagggtgacggagagagacctccgaagcttggagggtgctgtggccaggttcctggtggtcgagccctgtactcagcgagaatggtagttagttactcaggcatcctggacagagatggctgaaacagacaccctcgcaggagtggcctgcactttaatttgagcatcgattcaggacgcttccttgcaagatggagtctccatctcccgagattccatgagctacctagcagtgtttaacacactccttttctgattcagctggctacagtgagttctgctgccacatcctgggtcatcgattctgccattggtgtcctaggacagcattaagaccttcagctgtcttctgattgaggacaagatcatggtgtctcatcgtccccaccccactgtaattcaaaataaaaacaatgctaaaccacaaaataggtacttgtcttttttttttttttagatggagt

SEQ ID NO: 36265 - DNA, 758 bp, Homo sapiens
ctggcacaccacggccagggagccctcctgccctgtccagagtccaccctggaggccttcctcccagcctcctaccccctcctcctccttcccctctcctctctttagtgccctcctccctcccaccttctacagttttccttggcgaccccagctctcctaggtatgtccacatagactctcagggctccggcgatcttccctttacccagtaagcaaaggacctacttggaaggtagaagaggaagaaatgctgccacttcaggctttgccccagaagcattttctcatttgaacctgttagcttgcctgtatcttggaaataggattaagatatataacggtattattatacccattttgcagattacaaaactgaggctttgaagatgtggcttcargtaagcaacaatcctacctgagattcatagccaggtctgcgtgaggccaagcactctgaaccactctgacgcagctgagacgcacatgctccatggtggtccgtgccgtttcctccttatatgcagccgctttttgaagccaggtgccaagtatcatgcccatcaggcttccgcagcaccaggcacagctctctatcatagagttactcaagactctattgaagaaacatgcacaggtggcaggatgacacggagggaagggggggggcgtgagagggagggaaaaagctcagaaaagctggtgagcatctattcccacaaaacaccctccgctctcttgagcctccaggcccctct

SEQ ID NO: 36266 - DNA, 758 bp, Homo sapiens
ctggcacaccacggccagggagccctcctgccctgtccagagtccaccctggaggccttcctcccagcctcctaccccctcctcctccttcccctctcctctctttagtgccctcctccctcccaccttctacagttttccttggcgaccccagctctcctaggtatgtccacatagactctcagggctccggcgatcttccctttacccagtaagcaaaggacctacttggaaggtagaagaggaagaaatgctgccacttcaggctttgccccagaagcattttctcatttgaacctgttagcttgcctgtatcttggaaataggattaagatatataacggtattattatacccattttgcagattacaaaactgaggctttgaagatgtggcttcaagtaagcaacaatcctacctgagattcatagccaggtctgcgtgaggccaagcactctgaaccactctgacgcrgctgagacgcacatgctccatggtggtccgtgccgtttcctccttatatgcagccgctttttgaagccaggtgccaagtatcatgcccatcaggcttccgcagcaccaggcacagctctctatcatagagttactcaagactctattgaagaaacatgcacaggtggcaggatgacacggagggaagggggggggcgtgagagggagggaaaaagctcagaaaagctggtgagcatctattcccacaaaacaccctccgctctcttgagcctccaggcccctct

SEQ ID NO: 36267 - DNA, 520 bp, Homo sapiens
cctttcagtgtttgctcagatgacttaacaatattttcctttttaaataaatgccagaatttgaggggaaagagttcctcctctcaaatgttagagcagtgcctagatcctggtgtcagtgattgccactgctttctgaaatctcctgcctttaatatgagtaccagatcgaacagtttaaaaatgctagttatgtaaaggagcgtgttaaatatctatactgaagttttcagaaaagtcagtctatgaataaatgaagaagaaaagataaagcaacaagaaaagaaggaaagaacataaaaagtrcaaacaacagagaaacagggagcagtagagggcaagaaaacaagtatgactacaactgaatttacactgctcatgtcctctgagtcctttcctgggtctgctttgattttctttaggtgatgggttctgagctggctgaattggacttacggttttataggcagaacaaagctgttatttttaatcttgatttctttccatatatttttaattg

SEQ ID NO: 36268 - DNA, 596 bp, Homo sapiens
taagctgtttaatgtatagataaaaggagaattcaatgttttcttcataaggaattcattttctaagaaatagctttaattaaaaatctctgataaataaaacagaattttaaagcatttttgacaaaagatttaataatttaaagacattcgcttcttttcatttgaaataatgtaaaaatgtaaatctcatttacttaaatgtgataaygtagccctatacaattgtctttaaaatgaataaaatccccatggttattttatcgaacaagactagggactttacagcaaagagaaatgaaatctaaagtactgtgaaataaaatctggtatatgattgaaagataaatttgtaagaacatcttctaatgctaatgaagtataatttagaaaaaaattctataatcttagaaattctttaacttttgtgcagatagatggagaggactactaaaaatgcaaaaccttgaatcaagaggtgaaatttaagaaaaactaagagcaattcaaagaaattaaaaaggaaatgtttactttggaagaaatagctattctgaagctggcctcctgataggcggtgaagttttgcaaatgcg

SEQ ID NO: 36269 - DNA, 596 bp, Homo sapiens
taagctgtttaatgtatagataaaaggagaattcaatgttttcttcataaggaattcattttctaagaaatagctttaattaaaaatctctgataaataaaacagaattttaaagcatttttgacaaaagatttaataatttaaagacattcgcttcttttcatttgaaataatgtaaaaatgtaaatctcatttacttaaatgtgataacgtagccctatmcaattgtctttaaaatgaataaaatccccatggttattttatcgaacaagactagggactttacagcaaagagaaatgaaatctaaagtactgtgaaataaaatctggtatatgattgaaagataaatttgtaagaacatcttctaatgctaatgaagtataatttagaaaaaaattctataatcttagaaattctttaacttttgtgcagatagatggagaggactactaaaaatgcaaaaccttgaatcaagaggtgaaatttaagaaaaactaagagcaattcaaagaaattaaaaaggaaatgtttactttggaagaaatagctattctgaagctggcctcctgataggcggtgaagttttgcaaatgcg

SEQ ID NO: 36270 - DNA, 616 bp, Homo sapiens
atgtaggacaacatcatttagtcattatgttttgttttgtccttaaagaatctgcagaaaacaacagatgaaaacaagatttttaaaaaaaattctccacaactcttttattcattaggtacataaggaataactcctgagaatggagtaagtagtacattagttgtataaacaaaattctattcttaaattgatttcaaaatagcccaggaaaactgacccaatgctcttggatagtcttagctcagaggaaaycttctacatgagatgtagaatctcacagggcttccctaccaccctttcttattatcagattacttcagtgcttcatactcttttcttcagtgtagacaaagccttgggaaattggcatttcaccatcaccttttgtcttgtggaagtaaaaaaggtataaataaaataaattggcttcatttgattaattttcatattggcacaaatatcttcctctgagcagctgaaaacatttccctctgcagtttgaaaatgtgctttataaaaattcaccttcccttttggataaggttccaaaatgtttaagagcaaaaacaacagtggcagcagcattctcaccaccatgttaactatttatgca

SEQ ID NO: 36271 - DNA, 588 bp, Homo sapiens
acatgataaatcctgggtaaacctgtttttctttttaaacaccttgcagagtgaagcctagcactgcatctagttgccaaagcacaatcaatatggaaggagcrgtattttatgattggagaagttgttgtgtttttggtggtgaaattcattatttagtatctgaaccctcagcatttcagtatcatttattcataaagtccctttttgccaggaggaaatggatacagctgtagagagagagagagagtgcgtgagagacagagagagggagagagagggagagggagtgagacggattgatgatattgatcaggtaccatcttgaaacaaaggctaggtgctctattttagttgacaactgtgacacataaaaaacaagcaagagagggggaaggctagggccttgaacatcacaggctttaaaaaacgtttgaagaaaccattatgacaagcaggtctagggaagctgctgcaaaaatgtattcagaagagtcattaaaaaatgatgctttgtttgccttgtgaatatgaggtttctagcttgctgcagtgcttgctcctacagaggaaatgaggaggtctgca

SEQ ID NO: 36272 - DNA, 1697 bp, Homo sapiens
ggttttagaggagctaaaatcagtgacttcatttttgaagagaatgactgtcatgggtaattgacagaattactgcatcttagccatagaagcattggaaattgtgcagaagctaaatggtttttgccactcaatatagttaaactctggaatgactttcgggggataygtgatgaaagtagcgtgtttttctttaaccctggctactgaactggaattatggagggtcactggcattttttcaaagctctgtaggcaatttggataaacaaccagagctaaaactctggattagagagttagaccgacttttgaagtgtaacagggactagggttgtcaccttccacatgaaatcatgagcttttgggggctaaaagcccaaaggtagtaattgttaaaattatattttaaaatttttacctaattcttttaggtattacccaataaattcacaatagagtgtgaaggaagaaatagaagctgcagtgaaccatggtagttccttaaatctgaccccctgtccgattaactgagaacaatcacacttgtcccaacataattatagccacctccctttcactttcaaaagtattcctgtttgggcaacaaatgataagctcatcccatctatatatgtaactccaggtctgtaaacacccattttctgggtagttgatacttagggaaacaattagatatttcttttccacgatgattagaaggaaagaaaaacaaaatagtttcctaagagttaaattagtaaatcagtacagataatattcttacttcagagatatagatacttatattcagaaaagctacctagtttaaccaggtattttagtacatttatttttaaaagatattagctgaaatggatggtggagctgaaaaaaaagagaggggcttcaaaaaagcaaatttggacaggcatgtattggtggaaaaggtgctgaatgagaggaatatgaacactctgctaataattaaaaggattaaaagtcctagaagtcacctttcttagtttcttctaatgctttgttcaccagatggcattctgagtccggatataagctgttcaggtcctatgatcaaagaagaggggactctaaaccgaggaagtaaatcttgctagctctggaaaagaatacccgccccgccattcctaatttaaaacttgactttttggttagtgcatcagcccaggtggttgtggttagggccagtgtcacggaggatggctgattgtcactcgcaaagcccagcctctgtgccagcagagctgagatgtgaacctgaacagtggtaaattcatttagatcagtggagtcgcccggagggcctgttaaaccacaaagcgctgtgctccgctgccagggtttctaattcagtaggtctggggtggggaatgtgtgtttctaacaagtccccaagtgctgctgatgctgctgatactgggccacactttggataaccactgatccaaataatcccaccttttgacacctcctggcggccagctgctggcctccttagagcctcaaggtcagcctttccttctatttgaaaactcaacaatcatcttacctaccttcaagcccacctttgagaaaagagagttcagaagaggtcgtctaatccacgtggctcacaaagccaattatgccattatttgtttgcactttataaggatgca

SEQ ID NO: 36273 - DNA, 1697 bp, Homo sapiens
ggttttagaggagctaaaatcagtgacttcatttttgaagagaatgactgtcatgggtaattgacagaattactgcatcttagccatagaagcattggaaattgtgcagaagctaaatggtttttgccactcaatatagttaaactctggaatgactttcgggggatacgtgatgaaagtagcgtgtttttctttaaccctggctactgaactggaattmtggagggtcactggcattttttcaaagctctgtaggcaatttggataaacaaccagagctaaaactctggattagagagttagaccgacttttgaagtgtaacagggactagggttgtcaccttccacatgaaatcatgagcttttgggggctaaaagcccaaaggtagtaattgttaaaattatattttaaaatttttacctaattcttttaggtattacccaataaattcacaatagagtgtgaaggaagaaatagaagctgcagtgaaccatggtagttccttaaatctgaccccctgtccgattaactgagaacaatcacacttgtcccaacataattatagccacctccctttcactttcaaaagtattcctgtttgggcaacaaatgataagctcatcccatctatatatgtaactccaggtctgtaaacacccattttctgggtagttgatacttagggaaacaattagatatttcttttccacgatgattagaaggaaagaaaaacaaaatagtttcctaagagttaaattagtaaatcagtacagataatattcttacttcagagatatagatacttatattcagaaaagctacctagtttaaccaggtattttagtacatttatttttaaaagatattagctgaaatggatggtggagctgaaaaaaaagagaggggcttcaaaaaagcaaatttggacaggcatgtattggtggaaaaggtgctgaatgagaggaatatgaacactctgctaataattaaaaggattaaaagtcctagaagtcacctttcttagtttcttctaatgctttgttcaccagatggcattctgagtccggatataagctgttcaggtcctatgatcaaagaagaggggactctaaaccgaggaagtaaatcttgctagctctggaaaagaatacccgccccgccattcctaatttaaaacttgactttttggttagtgcatcagcccaggtggttgtggttagggccagtgtcacggaggatggctgattgtcactcgcaaagcccagcctctgtgccagcagagctgagatgtgaacctgaacagtggtaaattcatttagatcagtggagtcgcccggagggcctgttaaaccacaaagcgctgtgctccgctgccagggtttctaattcagtaggtctggggtggggaatgtgtgtttctaacaagtccccaagtgctgctgatgctgctgatactgggccacactttggataaccactgatccaaataatcccaccttttgacacctcctggcggccagctgctggcctccttagagcctcaaggtcagcctttccttctatttgaaaactcaacaatcatcttacctaccttcaagcccacctttgagaaaagagagttcagaagaggtcgtctaatccacgtggctcacaaagccaattatgccattatttgtttgcactttataaggatgca

SEQ ID NO: 36274 - DNA, 1697 bp, Homo sapiens
ggttttagaggagctaaaatcagtgacttcatttttgaagagaatgactgtcatgggtaattgacagaattactgcatcttagccatagaagcattggaaattgtgcagaagctaaatggtttttgccactcaatatagttaaactctggaatgactttcgggggatacgtgatgaaagtagcgtgtttttctttaaccctggctactgaactggaattatggagggtcactggcattttttcaaagctctgtaggcaatttggataaacaaccagagctaaaactctggattagagagttagaccgacttttgaagtgtaacagggactagggttgtcaccttccacatgaaatcatgagcttttgggggctaaaagcccaaaggtagtaattgttaaaattatattttaaaatttttacctaattcttttaggtattacccaataaattcacaatagagtgtgaaggaagaaatagaagctgcagtgaaccatggtagttccttaaatctgaccccctgtccgattaactgagaacaatcacacttgtcccaacataattatagccacctccctttcactttcaaaagtattcctgtttgggcaacaaatgataagctcatcccatctatatatgtaactccaggtctgtaaacacccattttctgggtagttgatacttagggaaacaattagatatttcttttccacgatgattagaaggaaagaaaaacaaaatagtttcctaagagttaaattagtaaatcagtacagataatattcttacttcagagatatagatacttatattcagaaaagctacctagtttaaccaggtattttagtacatttatttttaaaagatattagctgaaatggatggtggagctgaaaaaaaagagaggggcttcaaaaaagcaaatttggacaggcatgtattggtggaaaaggtgctgaatgagaggaatatgaacactctgctaataattaaaaggattaaaagtcctagaagtcacctttcttagtttcttctaatgctttgttcaccagatggcattctgagtccggatataagctgttcaggtcctatgatcaaagaagaggggactctaaaccgaggaagtaaatcttgctagctctggaaaagaatacccgccccgccattcctaatttaaaacttgactttttggttagtgcatcagcccaggtggttgtggttagggccagtgtcayggaggatggctgattgtcactcgcaaagcccagcctctgtgccagcagagctgagatgtgaacctgaacagtggtaaattcatttagatcagtggagtcgcccggagggcctgttaaaccacaaagcgctgtgctccgctgccagggtttctaattcagtaggtctggggtggggaatgtgtgtttctaacaagtccccaagtgctgctgatgctgctgatactgggccacactttggataaccactgatccaaataatcccaccttttgacacctcctggcggccagctgctggcctccttagagcctcaaggtcagcctttccttctatttgaaaactcaacaatcatcttacctaccttcaagcccacctttgagaaaagagagttcagaagaggtcgtctaatccacgtggctcacaaagccaattatgccattatttgtttgcactttataaggatgca

SEQ ID NO: 36275 - DNA, 1451 bp, Homo sapiens
ggaagagctggaccagaggactggtttggtccctactgtatctccaagtgtgtgatttgtcagtcatctgtgataaatcctgaaggctggttcttttccttttacttgtttcttctttcccacagccatttctagagttttggayacacatgtcttgtaacactctctaacccctttttttattaatttaggaacaatctctcccctttctattattccccccacttcaccaccttctttttctttaaggtctaacttctgatattaatcatttaaaaggaagagggaaaatatttttgaatgagtacccagtcctataaactatattagtgagttactcaaggattaattaaactgaataaataattaagaaattatgcaagcaaattcaatacacgtggagaatgtcactttgaaagcatgttcaggaatgatcatcttcctcttcccttacagactaggccttggaaagcaatagttggtccctgctgagtcaactccgagcctctgggtaggactgggagctagagaatgaagtcagtgtctgagaatctggaagatgagcgtcagattttaacagtataatcttgttaagatacacaaatctcttataattaccctcatgagtagtagatgtatatttaattactgaaaaattcagtagagatactaatgatcaataatggaaaaatccattagtccaacgataatttctcccataacactgaaatccaatctgaggggtcatgtagttaaaacataaagcatgtcttccaaatcagcaattcttttcactttcatccaatgacattattcatgataagacagaatcatcaaaagaggaatggctgtaagcctgttctggatgtcattaacattacctgaaatttcagtaatgagaaaagggtgcttatagttatcttatcattttgttgcatttttctatcatgaccactcatatttacatccatggcatggtttattgaaacaaagctattatattgagttgtaagggttttttaaaatctattcccttttgcctttgcacttaacatattcagaatgtgtgtttgccatttgaaaaataaactcaatgttacatagtgaatgaaatttagaggttgattatgttcaacttgttagctctatgattaatagagaagaattggaagaaagtatatcatatttgggaaataagagtgaaataccagcctactgttgcttacaagtgtaatcttatcatatgcagattgtttaaaatcactttttcaaattagttctattcgggagtgaaaatgctcagattattgaaaccttaattttatctgaagataattatccaatgttcattgagactattatcacagtcacgaaatatttgaaaatctgtgtttgctgttgcagtgctaactaggattatgttttcccatttcattagtttgtttaaaatg

SEQ ID NO: 36276 - DNA, 1077 bp, Homo sapiens
tttcttgttaaactttaaaacaatcccagtactttgagaggccgaggcaggcagatcacttgaggtcagaggttcgagtccagcctggacaacatggtgaaaccccgtctctactaaaactacaaaaattagccaggtgtggtggcaggcacctgtaaccccagctacttgagaagctgaggcaggaggatcacttgaacccaggaggcagaagttgcagtgagctgagattgcaccactgcactccagcctgggcgacagagcgagactctgtctcaaaaaaaaaaaaaaaaaaaaaccttaaaacaatcctgagaggtagttactagtattattcccattttacagagaggagaatcaaggccctgagatgttaagttacttggccaaggtccgacagctggtcagtggagcaaagaggatttcactcaggtctgtctgattccaaagccttcttctcaagatactttgcatgcacctctccagcacactcagctgattgtagttcattttattatcactttttaaaagtcctgtttccctgcctgacacttcagcttcttttaccaactaccctggatccagaccttttgtcctccagaggaaatagataaaaactgtttttcattctcctcttgtgaagctggtgctgaaaacactgaagttcccttgatgtgtcccagttagatcctgcatggaaattcagtgagtcagagccatgtgtctcttctagataaaaccatgtcagtttgtgatctgagaaccactcccctcatttctcaaaggaaccctgactcccactcatccccacatcccacagctgggggctccagctcactgccgctcttaactcctaagactggggcatatttacagcaatgaggagcattttcagaacacagtcgatgaaacgcgcatgttgaagagctcagcttccctttcaagtcctcgctgaggctggtgcacaattttcaacaatcaygagaaatgatgctttatgctggacaaagagaattagacagtgagacctgcgtctttgttctcgctctttctcacctcgcccctggcagtcagaaa

SEQ ID NO: 36277 - DNA, 543 bp, Homo sapiens
aattgccataaattttgagaaaataagaagtcagagtagtgactatgtttttttttgtttgtgtgtgtgtttgagatagtctccctctgtsccaggctggagttcagtggcgcaatctcggctcactgcaacctccacctcccaggttcaagtgattcttctgcctcagcctcccaagtagttgggattacaggcgcgtgccaccacacttggctaatttttttctttttttttttgaaatggatggagcctcactctgttgcccgggctggagtgcagtggcacaatctcagctcactgcaacctgcacctcccaggttcaagcgattctcctgcctcagcctcctgagtagctggggctacaggcacatgccatcatgctcggctaattttttatatacttttttcagtagagacggggtttcaccatgttggtcaggctggtctcaaactcctgacctcaaatgatttgcccccctccctcccaaagtgttattacaggagtgagccaccgcacctggctgtgactacatttttaaagag

SEQ ID NO: 36278 - DNA, 753 bp, Homo sapiens
tgcatctcccacttgttattttattctaagaattagctccaggtgaaatgtacagactttagggttaacaactgtagtccccgctacttgggaggctgaggcaagaggatcacttgagctcaggagactgaggctgcagtgagctgtcttcacaccattgcattccagcctaagcaacagagaccgtgtctcaaaaaaaaattaaattaaaaaacaactttagggctgaggtatcgatacaataagaaactattgatgaccgacacatacttagtgcaaaattatactcatattccttcaacaagcatggcagggagcaagctcaggaggagaggaaagcattagggactgaagggcaggtgtcacacgacctgctgctgctggccctagggtgctgtggtgcctcagggggacagatgagcacaaggcagatggtgttttcctctggtctgttgtgttgtggtccacagaaaacctaattcagtgatctccatgaaaggtgcagggagatcgatgatgctctgtgctcagtgccaayatgcaggtcatattgtagtttacaacttcactagagggctagaagttacagcacccaaggaagtgagcatacattctggccagtgcctctataagcttttcaacacacacacacacacacacacaaacacacacaatcatattgctttttaggtgcaaacatgcctccttcattggaaacttttctgagaaacaagttccatataaatgtggtca

SEQ ID NO: 36279 - DNA, 546 bp, Homo sapiens
gagattttatttagtgatttaaaaagagctatcaaaccgtgaaaaaacattaagtaactctaaatgcacagacttaagcaaaagaagccaatttgcaaaagatcatgccatcttattccaactatatgacattctggaaaaggaaaatgatagagatggtatagataaagatctttggttgtccagattttgaagaaagkgaggaatgaataggcagagcacagggtttttgtgggtagtaaaccattctactttacattctaatggtgcattaatgacattctgcattttccaaaaccagtagaacttacatagcaaaaataatgaaccttattgtaaactatagactttagttaatatattaatacaggttcacaaactaacaaatttgccacacaaacgcagaatgttaaaaatagaggaaatggggttgagggttacatgggagctctctgcactaaatgctcaatttttctgcaaactaagctattctaagaataaagtattaattaaataaaagttaacagacctattcaaatgaagaag

SEQ ID NO: 36280 - DNA, 688 bp, Homo sapiens
acacctcgctgattcctgcccccttcacacctgcaagcagggatgccggcatcagaagaatgtttcgtgttcgaaagtgtttgaggggtttgggtttatttttgttggttttttctttttttttttttgcttacgtgggcatccttcagcttttaataatctgaaaaattctatttacccattgtcaatgtgtataaattaatctcagtcaattttatacaataaaaggtgaacttttatccatcaaacaataatttaacaaaaaatgtaccggaagaagaatgttcattacaaatataggaaacataaatattaccaaatattggcaagcactaaaatgttcagaaatataagtctattacagttatagctctctcaagcaaaaaaacagcagagaaaaacttagttttcctgaggggctatttatttacttagggatttgttaaaaggtcaaatggggtcacacagaatactaagaagagctgttcacccaggcctcactaagaactcttcttcatrcagtagctatatagtaatatgacaactgctcctacgacccaaagaggaactacagcaactactctttagcatctgttgctcccaactctgctttgcaattatatgactcaagcattctggctccgttaactattactgctgttactcccaagtaaattccctctaaaaa

SEQ ID NO: 36281 - DNA, 1297 bp, Homo sapiens
tgtgacaaagatctaatgtccaacactgataaggaacttaaacaaatttacaagaaaaaaaaaaatctcattagaaagtgggcacaggacataaacagacacttcaaaagaagacacacatgcggccaacaagcatatgagaaaaagctcaatatcactgatcattagagaaatgcaaatcaaaaccacaatggcataccatctcacaccagtcagtatggttattattaagaagtcaacgccgggcatggtggctcacgcctataatcccagcacttcaggaggccaaggcaggcagatcgcatgaggtcaggagttccagaccagcctggacaacctggcgaaaccccgtctctactaaaaatacaaaaattagcccagcgtggtggcgggtgcctgtaatcccagctactcaggatgctgaggcaggagaatcgcctgaacccgggaggcagaggttgtagtgagccgagatcataccactgcactctccagcttaggtgacagagcgagactctgtctcaaaaaaaaaaaaaatatttgaattttgtttaaatcgctaacacatactgggcatttaataacaaaaaaaaaaggacatgagattgtgatccttatgaaggtttgagaggcatttcactagggttcaacatacagcagtctgaaacatactgtaataatttaatccaatggctcatctacagcacctaaaaagattacagcagattctcattattcagtgtagttacggtctagaaagttccatgaacaaataaaaagttaggtttcagcaagctactggtcacacttttgtaagcttaccaacacctacttttgttgtatgtgtgcttatttaatatatattgttggccaggcacagtggctaacgcctgtaatcccagcactttgsgaagccaaggcgggcagatcatttgaggtctggagttcgagaccagcctggccaacgtggtgaaaccccgtctctactaaaactacaaaaaaaaaaaaaaaaaaaaaaattagccaggcatggtggcgcatgcctgtagtcttagctacttgggaggctaaggcaggggaatcgcttgaacccaggaggcagaggttgcagtgagccaagactgcaccactgcactccagcctgagcaacagagtgagactctatctcaaaaaaaataataataataattaattaaatgaagaataaataaataatatacattgttcattcattaacattgaactcacagccaacggcactacagcactcacgcctgaatggagtttatttaatgca

SEQ ID NO: 36282 - DNA, 1297 bp, Homo sapiens
tgtgacaaagatctaatgtccaacactgataaggaacttaaacaaatttacaagaaaaaaaaaaatctcattagaaagtgggcacaggacataaacagacacttcaaaagaagacacacatgcggccaacaagcatatgagaaaaagctcaatatcactgatcattagagaaatgcaaatcaaaaccacaatggcataccatctcacaccagtcagtatggttattattaagaagtcaacgccgggcatggtggctcacgcctataatcccagcacttcaggaggccaaggcaggcagatcgcatgaggtcaggagttccagaccagcctggacaacctggcgaaaccccgtctctactaaaaatacaaaaattagcccagcgtggtggcgggtgcctgtaatcccagctactcaggatgctgaggcaggagaatcgcctgaacccgggaggcagaggttgtagtgagccgagatcataccactgcactctccagcttaggtgacagagcgagactctgtctcaaaaaaaaaaaaaatatttgaattttgtttaaatcgctaacacatactgggcatttaataacaaaaaaaaaaggacatgagattgtgatccttatgaaggtttgagaggcatttcactagggttcaacatacagcagtctgaaacatactgtaataatttaatccaatggctcatctacagcacctaaaaagattacagcagattctcattattcagtgtagttacggtctagaaagttccatgaacaaataaaaagttaggtttcagcaagctactggtcacacttttgtaagcttaccaacacctacttttgttgtatgtgtgcttatttaatatatattgttggccaggcacagtggctaacgcctgtaatcccagcactttgcgaagccaaggcgggcagatcatttgaggtctggagttcgagaccagcctggccaacgtggtgaaaccccgtctctactaaaactacaaaaaaaaaaaaaaaaaaaaaaattagccaggcatggtggcgcatgcctgtagtcttagctacttgggaggckaaggcaggggaatcgcttgaacccaggaggcagaggttgcagtgagccaagactgcaccactgcactccagcctgagcaacagagtgagactctatctcaaaaaaaataataataataattaattaaatgaagaataaataaataatatacattgttcattcattaacattgaactcacagccaacggcactacagcactcacgcctgaatggagtttatttaatgca

SEQ ID NO: 36283 - DNA, 644 bp, Homo sapiens
actgatttgggggttacaaaaaatagtaggtgagttcacaaatacaaaagctgaaaacaaggaggatcgactgtattttcgtagacaatctaatctcagaagatttcagttcagacaaaaatcatgataattactgtattacaaaagggcactagatagggggaaaagagtaaaaatcacaattaaaacaaaggttcaaaattctgcagcaaccatatccagttacactttaatatgtttgyggcagactacattattgttcccaactcatcacccctccctatatctaaaacctttccccaagacaatgcagttcctcctgctagagatcaggtatatttatctatactatcaatgttagccatggacaaggtatgtgctttggctgactgaatgttagtggacatgagagaagcaatggcttaaaatgtacttccagaactggagtttccttgtgattctatcactgtgacaaaaacacattctcaggtagtccactgatccaagggggaacaaacacacagaaaacatacctagactctatctgcagcttgcagcctcaccaagccaagaacagtcaactcacagatatgttagcaaaaataaatgtttttcataccttaagttttatataattattgacc

SEQ ID NO: 36284 - DNA, 644 bp, Homo sapiens
actgatttgggggttacaaaaaatagtaggtgagttcacaaatacaaaagctgaaaacaaggaggatcgactgtattttcgtagacaatctaatctcagaagatttcagttcagacaaaaatcatgataattactgtattacaaaagggcactagatagggggaaaagagtaaaaatcacaattaaaacaaaggttcaaaattctgcagcaaccatatccagttacactttaatatgtttgtggcagactacattattgttcccaactcatcacccctccctatatctaaaacctttccccaagacaatgcagttcctcctgctagagatcaggtatatttatctatactatcaatgttagccatggacaaggtatgtgctttggctgactgaatgttagtggacatgagagaagcaatggcttaaaatgtacttccagaactggagtttccttgtgattctatcactgtgacaraaacacattctcaggtagtccactgatccaagggggaacaaacacacagaaaacatacctagactctatctgcagcttgcagcctcaccaagccaagaacagtcaactcacagatatgttagcaaaaataaatgtttttcataccttaagttttatataattattgacc

SEQ ID NO: 36285 - DNA, 644 bp, Homo sapiens
actgatttgggggttacaaaaaatagtaggtgagttcacaaatacaaaagctgaaaacaaggaggatcgactgtattttcgtagacaatctaatctcagaagatttcagttcagacaaaaatcatgataattactgtattacaaaagggcactagatagggggaaaagagtaaaaatcacaattaaaacaaaggttcaaaattctgcagcaaccatatccagttacactttaatatgtttgtggcagactacattattgttcccaactcatcacccctccctatatctaaaacctttccccaagacaatgcagttcctcctgctagagatcaggtatatttatctatactatcaatgttagccatggacaaggtatgtgctttggctgactgaatgttagtggacatgagagaagcaatggcttaaaatgtacttccagaactggagtttccttgtgattctatcactgtgacaaaaacacattctcaggtagtccactgatccaagggggaacaaacacacagaaaacatacctagactctatctgcagcttgcagcctcaccaagccaasaacagtcaactcacagatatgttagcaaaaataaatgtttttcataccttaagttttatataattattgacc

SEQ ID NO: 36286 - DNA, 644 bp, Homo sapiens
actgatttgggggttacaaaaaatagtaggtgagttcacaaatacaaaagctgaaaacaaggaggatcgactgtattttcgtagacaatctaatctcagaagatttcagttcagacaaaaatcatgataattactgtattacaaaagggcactagatagggggaaaagagtaaaaatcacaattaaaacaaaggttcaaaattctgcagcaaccatatccagttacactttaatatgtttgtggcagactacattattgttcccaactcatcacccctccctatatctaaaacctttccccaagacaatgcagttcctcctgctagagatcaggtatatttatctatactatcaatgttagccatggacaaggtatgtgctttggctgactgaatgttagtggacatgagagaagcaatggcttaaaatgtacttccagaactggagtttccttgtgattctatcactgtgacaaaaacacattctcaggtagtccactgatccaagggggaacaaacacacagaaaacatacctagactctatctgcagcttgcagcctcaccaagccaagaacagtcaactcacagatatgttagcaaaaataaatgtttttcrtaccttaagttttatataattattgacc

SEQ ID NO: 36287 - DNA, 548 bp, Homo sapiens
gtcacttttgatttatagtcttattttttaatctcaaattaaattgattttttcacctcacagtgccatatcctgtctttcaggcttctccagcttatgctactttatttttttaatttttaaatttttattatttatttatttatttttgagatggagtcttgctctgtcacccaggctagagtgcagtggcgtgatcttggctcrctgcaacctccgcctctcgggttcaagcagttctcccgcctcaccctcccaagtagctgggattacaggcacacaccaccatgcccggctagtttttgtaatttttttagcggagacagggtttcacccatgttggccaggctggtctcgaacccctgaccttgtgatccacctgcattggcctcccaaattgctgggattacaggtgtgagccaccatgcccagcttgctactttcattatgtctactctttacctagtgatatccccatgtttttgaaaatgtatttattttatcttgaggccttccttcttctcagaccctgatcattctacctaaag

SEQ ID NO: 36288 - DNA, 573 bp, Homo sapiens
catttacttctgatgccttagatcagtccctgtctgtaaaatcagcatgacaacagtatctacctcttgttgtgtagattaaaagattggatcgaagaaggtacactgtctatatttttgaatggatgaacaaatgaataaaatytcacacacagttacaaagtacagtggtccaaaatataagaatcctaattttttttttttttgagacaaggtctgttccggatacccaggctggcatgccatggcaccaccatagctcactgcagccctaaatgagtagctgggattacaggctccagaaaccatgcctggatatgaattctagttcagactccactgctagcactttgtgtgagcctgagccagtaaccaacttcccaaactttaatttcccctatggtttcaacacaatattataacactggcttatcattctataattacacattcttagataaatagagaaagggggtatcagtgaggactggagtcatggaagttttcattaaggaagttaaggtgatctacctaagggaaaaggtgagaaataaatttgcagggtcagggcca

SEQ ID NO: 36289 - DNA, 1107 bp, Homo sapiens
ctggatcctgctctgttctccccttgctggtttctcagcttacctgcagtcccccattggccactcttcttgagctgtctcctgttggtggcacagcagtgtttattatgcttgacactcctaggttaccttgagtcctcctttactcttgtcctggacaataacaattcctgttcattcttcttccrcagggggatctttccctccttccctcctcatctttacttccccttccccttctccctcctgtctgtccctgcttgtctgttccctacactgccctcattcaggtttctgcccacccacttgcccacccagcctcctgctctagacactccctgtccaggccatcttgcactgcctggttaatcattcagaaatattgtaccaattctactctttccctccttcagtgacttactattgtctgcagaatgaagtataagttccttattcaaggactcatatgcaggaactttccagaattgtcctcttcctatttccctagtgccattgacatcgttactttgcatcagtgcctaccaccctttccgatactctcactctttcactataatatattattgaaaactcccttcgggaagttttaaattatgtaatcatttggcatacagataaaaggaagcattattttagtttatatcactgtattagtaaatgttacattatatagtttatcctaataaaatgtaataatattcacattatataaatagcaagaaatgttttgacttttccctatttagcaaatgacacacactttcttgtatttgaattaattagataattaaaaatgtgatttttaaataaaatttaaaatggcacctttcattatgtttggcttcataaccaaatatatactgaaatgtacattattgttaacctgtactgactgggtgcgatggttgacacctgaagtttttaattccggcacttttggaggctgaggtggaaagattgcctgagcccaggagtttaagaccagcctgggcaacatagcaagacatggtctctacaaaaattttaaaaattagcttagcatggaggtgtatgcctgtgggtccagttacttgggaggctgagtgg

SEQ ID NO: 36290 - DNA, 1107 bp, Homo sapiens
ctggatcctgctctgttctccccttgctggtttctcagcttacctgcagtcccccattggccactcttcttgagctgtctcctgttggtggcacagcagtgtttattatgcttgacactcctaggttaccttgagtcctcctttactcttgtcctggacaataacaattcctgttcattcttcttccgcagggggatctttccctccttccctcctcatctttacttccccttccccttctccctcctgtctgtccctgcttgtctgttccctacactgccctcattcaggtttctgcccacccacttgcccacccagcctcctgctctagacactccctgtccaggccatcttgcactgcctggttaatcattcagaaatattgtaccaattctactctttccctccttcagtgacttactattgtctgcaraatgaagtataagttccttattcaaggactcatatgcaggaactttccagaattgtcctcttcctatttccctagtgccattgacatcgttactttgcatcagtgcctaccaccctttccgatactctcactctttcactataatatattattgaaaactcccttcgggaagttttaaattatgtaatcatttggcatacagataaaaggaagcattattttagtttatatcactgtattagtaaatgttacattatatagtttatcctaataaaatgtaataatattcacattatataaatagcaagaaatgttttgacttttccctatttagcaaatgacacacactttcttgtatttgaattaattagataattaaaaatgtgatttttaaataaaatttaaaatggcacctttcattatgtttggcttcataaccaaatatatactgaaatgtacattattgttaacctgtactgactgggtgcgatggttgacacctgaagtttttaattccggcacttttggaggctgaggtggaaagattgcctgagcccaggagtttaagaccagcctgggcaacatagcaagacatggtctctacaaaaattttaaaaattagcttagcatggaggtgtatgcctgtgggtccagttacttgggaggctgagtgg

SEQ ID NO: 36291 - DNA, 1130 bp, Homo sapiens
cacagtagagaacgtttctgggaacaactctgttctagtttctcaaacccacttggatattttcttttgcctctggaatacccagatctctcctacacctatgcttgccaagcgagggcttgtgcggggctcaacactgaaacgggttttacaccatgtcctactggatctgtgttttcccttagagcaggcacagcgtcttctacctcagctgcactaagccacaaagagcagaacttctaaggcaataagcaatggaacaaggggactaacctgcaatcaggacctacctctgtcaccgtgtaytttgaggagcttttgtgcgacttggcaagtaacacgtctgtgaaatgagtgtgaacttactctggagcagggtttgttacagaaagccactgaaataacactgaaaaaatacactcagaaaacacaagcataaatgtagggaactaggctattataaagtctaaaagatgctgggactaccttatagcaagtgggaatgataaatggacccagcaaaatctcacaagtacaggttctcatctaatctgacaagtaggcatgaagttctgaggacacatcttctaactccaaatttcaagaccagaaaaggttagtataaactagatgggaaggaaaaagaaaaaaaaagttctacatactaaagttaatattctaaaaaattggacttttcctactatatgtcaggcatttagtttatttgctcctttcaaattagtaggggaaaaaaactggggctggaaaatttaagcaaactgcctttatgtgagaaaaaaacattggctgcaagaacctcagtttgcattgcacagccctcaaaactaaaggccataactactcacccccagaatcttgaagagtattgttttcatgcttctttcacatttcaaccaaagctgaaaaatgtagccagtcctcatggaaatttcagtgatggactcctgctatcaaatttctaaatggtcctgtttctcttctcatgcccagtggtgaatgttaagtgagaactcaagtgtccaccgtaccattctcctccctcaaagtgagctcaaagttcagaggaaaggaagcagtcatcactctactgtaaacaggtgcatgctaga

SEQ ID NO: 36292 - DNA, 1130 bp, Homo sapiens
cacagtagagaacgtttctgggaacaactctgttctagtttctcaaacccacttggatattttcttttgcctctggaatacccagatctctcctacacctatgcttgccaagcgagggcttgtgcggggctcaacactgaaacgggttttacaccatgtcctactggatctgtgttttcccttagagcaggcacagcgtcttctacctcagctgcactaagccacaaagagcagaacttctaaggcaataagcaatggaacaaggggactaacctgcaatcaggacctacctctgtcaccgtgtattttgaggagcttttgtgcgacttggcaagtaacacgtctgtgaaatgagtgtgaacttactctggagcagggtttgttacagaaagccactgaaataacactgaaaaaatacactcagaaaacacaagcataaatgtagggaactaggctattayaaagtctaaaagatgctgggactaccttatagcaagtgggaatgataaatggacccagcaaaatctcacaagtacaggttctcatctaatctgacaagtaggcatgaagttctgaggacacatcttctaactccaaatttcaagaccagaaaaggttagtataaactagatgggaaggaaaaagaaaaaaaaagttctacatactaaagttaatattctaaaaaattggacttttcctactatatgtcaggcatttagtttatttgctcctttcaaattagtaggggaaaaaaactggggctggaaaatttaagcaaactgcctttatgtgagaaaaaaacattggctgcaagaacctcagtttgcattgcacagccctcaaaactaaaggccataactactcacccccagaatcttgaagagtattgttttcatgcttctttcacatttcaaccaaagctgaaaaatgtagccagtcctcatggaaatttcagtgatggactcctgctatcaaatttctaaatggtcctgtttctcttctcatgcccagtggtgaatgttaagtgagaactcaagtgtccaccgtaccattctcctccctcaaagtgagctcaaagttcagaggaaaggaagcagtcatcactctactgtaaacaggtgcatgctaga

SEQ ID NO: 36293 - DNA, 1130 bp, Homo sapiens
cacagtagagaacgtttctgggaacaactctgttctagtttctcaaacccacttggatattttcttttgcctctggaatacccagatctctcctacacctatgcttgccaagcgagggcttgtgcggggctcaacactgaaacgggttttacaccatgtcctactggatctgtgttttcccttagagcaggcacagcgtcttctacctcagctgcactaagccacaaagagcagaacttctaaggcaataagcaatggaacaaggggactaacctgcaatcaggacctacctctgtcaccgtgtattttgaggagcttttgtgcgacttggcaagtaacacgtctgtgaaatgagtgtgaacttactctggagcagggtttgttacagaaagccactgaaataacactgaaaaaatacactcagaaaacacaagcataaatgtagggaactaggctattataaagtctaaaagatgctgggactaccttatagcaagtgggaatgataaatggacccagcaaaayctcacaagtacaggttctcatctaatctgacaagtaggcatgaagttctgaggacacatcttctaactccaaatttcaagaccagaaaaggttagtataaactagatgggaaggaaaaagaaaaaaaaagttctacatactaaagttaatattctaaaaaattggacttttcctactatatgtcaggcatttagtttatttgctcctttcaaattagtaggggaaaaaaactggggctggaaaatttaagcaaactgcctttatgtgagaaaaaaacattggctgcaagaacctcagtttgcattgcacagccctcaaaactaaaggccataactactcacccccagaatcttgaagagtattgttttcatgcttctttcacatttcaaccaaagctgaaaaatgtagccagtcctcatggaaatttcagtgatggactcctgctatcaaatttctaaatggtcctgtttctcttctcatgcccagtggtgaatgttaagtgagaactcaagtgtccaccgtaccattctcctccctcaaagtgagctcaaagttcagaggaaaggaagcagtcatcactctactgtaaacaggtgcatgctaga

SEQ ID NO: 36294 - DNA, 1130 bp, Homo sapiens
cacagtagagaacgtttctgggaacaactctgttctagtttctcaaacccacttggatattttcttttgcctctggaatacccagatctctcctacacctatgcttgccaagcgagggcttgtgcggggctcaacactgaaacgggttttacaccatgtcctactggatctgtgttttcccttagagcaggcacagcgtcttctacctcagctgcactaagccacaaagagcagaacttctaaggcaataagcaatggaacaaggggactaacctgcaatcaggacctacctctgtcaccgtgtattttgaggagcttttgtgcgacttggcaagtaacacgtctgtgaaatgagtgtgaacttactctggagcagggtttgttacagaaagccactgaaataacactgaaaaaatacactcagaaaacacaagcataaatgtagggaactaggctattataaagtctaaaagatgctgggactaccttatagcaagtgggaatgataaatggacccagcaaaatctcacaagtacaggttctcatctaatctgacaagtaggcatgaagttctgaggacacatcttctaactccaaatttcaagaccagaaaaggttagtataaactagatgggaaggaaaaagaaaaaaaaagttctacatactaaagttaatattctaaaaaattggacttttcctactatatgtcaggcatttagtttatttgctcctttcaaattagtaggggaaaaaaactggggctggaaaatttaagcaaactgcctttatgtgagaaaaaaacattggctgcaagaacctcagtttgcattgcacagccctcaaaactaaaggccataactactcacccccagaatcttgaagagtattgttttcatgcttctttcacatttcaaccaaagctgaaaaatgtagccagtcctcatggaaatttcagtgatggactcctgctatcaaatttctaaatggtcctgtttctcttctcatgcccagtggtgaatgttaagtgagaactcaagtgtccacygtaccattctcctccctcaaagtgagctcaaagttcagaggaaaggaagcagtcatcactctactgtaaacaggtgcatgctaga

SEQ ID NO: 36295 - DNA, 526 bp, Homo sapiens
tctgtggtaaacatgtctctctcatgtgttgactaggaaatgcagtcctggcagctcaagagtgcctctttaagctctggagcagaatgcctcctctgagaaatgggtgctttgtattagttgagatggaaagaagagaccagaaatgcctgtagtctctgcacatccagacaaaaacaaattttccccccytttttttttttgtttgttttttgagacagggtctggctctgtcacccaggctggagtgcagtgccgtgatcttggctcaccgcaacctctgcctcccgggttcatgccatcctgtcacctcagcctcctgagtagctgggactacaaacacttgccaccatgcgcagctaatttttgtatattttgtagagatggggttttgctgtattgcccagtctggtctcgaactcctgagctcaagcaatccatctgccttggcctctcgaagtgctggattataggcatgtggcaccatgcctggcctaagaacagtttttagcatttgggaggggct

SEQ ID NO: 36296 - DNA, 526 bp, Homo sapiens
tctgtggtaaacatgtctctctcatgtgttgactaggaaatgcagtcctggcagctcaagagtgcctctttaagctctggagcagaatgcctcctctgagaaatgggtgctttgtattagttgagatggaaagaagagaccagaaatgcctgtagtctctgcacatccagacaaaaacaaattttcccccctyttttttttttgtttgttttttgagacagggtctggctctgtcacccaggctggagtgcagtgccgtgatcttggctcaccgcaacctctgcctcccgggttcatgccatcctgtcacctcagcctcctgagtagctgggactacaaacacttgccaccatgcgcagctaatttttgtatattttgtagagatggggttttgctgtattgcccagtctggtctcgaactcctgagctcaagcaatccatctgccttggcctctcgaagtgctggattataggcatgtggcaccatgcctggcctaagaacagtttttagcatttgggaggggct

SEQ ID NO: 36297 - DNA, 865 bp, Homo sapiens
tgggaaacgtagtctatatctgttgaacacagcattgtctctgcagaagagatgttaaactcatccagtccctatagctggagcataaagaagggaagcttaagttcaagtgttttctttgctatttatctattgctatggtttgaaggtgtcccccaagtttatgtgttggaaacttaatacccaatgcaacagtgttggagatggggctgaataagaggtgattaggttgtggaggctctgccctaatgaatgaattaatgtcattatctcaggagtggattagttcttgagagattgggtctgtaagaaaagtgagttcagcacacttttgcactcttgctttcacccctcttgcctttccacctttcatgaggggatgatgcagcatgaaggccctcaccagatrccaacaccttgatattggacttcccagcctcctgaactgtgagaaataaatttctttataaactacccagcctgagatgttctgttatagcaatacataatgaactgagacatctgttaaatgaccatgctcatgtcctgccccctttaaggacctcagtttcctcatttgtcagatggttatggaggcccatccctcacagctgcatgatgaccagatgtaagaggagtagggtgctagttgaaggaaatcatgaagagagctgcccccacctgaggtctgtccttgtccaacagctctcctgactccactgtcaccttctgcaggcagtaaagcccagcaagatctcttggatcttgaggaggccaggctgcctcttcctccctgtgaagtctcaagcacccatggtatctctaaatactggcattattgggggaaaatggttcaggggagtaa

SEQ ID NO: 36298 - DNA, 865 bp, Homo sapiens
tgggaaacgtagtctatatctgttgaacacagcattgtctctgcagaagagatgttaaactcatccagtccctatagctggagcataaagaagggaagcttaagttcaagtgttttctttgctatttatctattgctatggtttgaaggtgtcccccaagtttatgtgttggaaacttaatacccaatgcaacagtgttggagatggggctgaataagaggtgattaggttgtggaggctctgccctaatgaatgaattaatgtcattatctcaggagtggattagttcttgagagattgggtctgtaagaaaagtgagttcagcacacttttgcactcttgctttcacccctcttgcctttccacctttcatgaggggatgatgcagcatgaaggccctcaccagatgccaacaccttgatattggacttcccagcctcctgaactgtgagaaataaatttctttataaactacccagyctgagatgttctgttatagcaatacataatgaactgagacatctgttaaatgaccatgctcatgtcctgccccctttaaggacctcagtttcctcatttgtcagatggttatggaggcccatccctcacagctgcatgatgaccagatgtaagaggagtagggtgctagttgaaggaaatcatgaagagagctgcccccacctgaggtctgtccttgtccaacagctctcctgactccactgtcaccttctgcaggcagtaaagcccagcaagatctcttggatcttgaggaggccaggctgcctcttcctccctgtgaagtctcaagcacccatggtatctctaaatactggcattattgggggaaaatggttcaggggagtaa

SEQ ID NO: 36299 - DNA, 640 bp, Homo sapiens
ataaaatgtatatatacatatattaaataaaataattatatacatataattttatatagtataaaatacatagagaagcaattgtggtgaaattaacaactagcaagtctaggatgatacatgggtgttctttgtaatattctcttaacttttccattggtttgagatctctcaacagagagtrgggcaaaaatggaaataacacaataagatttttttctgaactgtttaattaattttatttggattatagtaactttacataagctattattaatgctacttgaacatctggtgaagacattacacagtattgggtttctgtatgactgggcaaaacttactttaagccttgagatagttttgctttgtagtattatttctagcatgagtattaaccttttcctttagtagtaatgaaataaataaaaatatgagaagaatggggaatgagagaaaaaagaaaaatagggaggaaagaaagaaaagtgtctttctatattttcattgattagttccttctttagctaaattcaaggcacttttcaagtgtcatctccaacaccatctactacagaaggccatagataaagccccatatctccttgtctttccttcttcttttctgctcttgggatcc

SEQ ID NO: 36300 - DNA, 640 bp, Homo sapiens
ataaaatgtatatatacatatattaaataaaataattatatacatataattttatatagtataaaatacatagagaagcaattgtggtgaaattaacaactagcaagtctaggatgatacatgggtgttctttgtaatattctcttaacttttccattggtttgagatctctcaacagagagtagggcaaaaatggaaataacacaataagatttttttctgaactgtttaattaattttatttggattatagtaactttacataagctattattaatgctacttgaacatctggtgaagacattacacagtattgggtttctgtatgactgggcaaaacttactttaagccttgagatagttttgctttgtagtattatttctagcatgagtattaaccttttcctttagtagtaatgaaataaataaaaatatgagaagaatggggaatgagagaaaaaagaaaaatagggaggaaagaaagaaaagtgtctttctatattttcattgattagttccttctttagctaaattcaaggcacttttcaagtgtcayctccaacaccatctactacagaaggccatagataaagccccatatctccttgtctttccttcttcttttctgctcttgggatcc

SEQ ID NO: 36301 - DNA, 1766 bp, Homo sapiens
tgtgctagccaatgtattgtgtactttcccaacatcatctcaattacaatatctagaaacctacaattcaaacattatttcatgcatttcagagaggaaaactagctttcagagtgtcgatgattttacacaaaaaaaggaagagaaaggaatcaaagactctcactacagaaaatcaccaaacagcaaaggtagacaacaggacaggaagaaaggaaaaaaagatctccctacggtaaccagaaagcaaaaaattacagcagatgcagasgttgagtaatttgcttcaagccacacaggtaatttctaatggagttccatatttagacttggacttacagattcagaaggtgttgccttcccaagaaaatatttttttcttaatatcttttttccaaaactggctaaaaatacttcttccaatcctctgaggtcctattactgagcctgttcagtaccatcttgcagcctgttactcctaggttatcctctgcacagcagtccatctgatggatatctcatcttcatggataggctctatggaatgttcaacaaacctcaactgataacctgatatgtgcttaaaccaggtcatcaaagcagccacataggtcccaactctttctctgcaggaagcacccattttgagaatatcctggtcatgttgatatgaagctgcttatctgaccagaagagtcattaatttcttcttgtgttaggcagaaagagagaataatgccaaagttgccaaatggaggaagaattggagggtcaggtttggcttttggtacctctcaaatcgtacttaagtgactgccctacttaactatggaggagtgtgaagggacttacaagtggtccctaggatttccatttccttaaggacatttagatcaaaattaggacaatggtcatcactttgagcctttggatctctgctttgggccttttttatagaacagaggcagatgttttattaaatttcttaaatgcgtgcctatgtgtgatttcaattttcatgttttgtggcagcatttttgatcaatattccttggctgctatctattttctctgttccttttctgactttttaaatatctctaattaaatatatataatatatatataaaccttatatataatatataataaactttagttaactagtagaggataaacctgcttctgcttcactcaaagataactttatatatatgtatatatggtttatatattacataatttgcatcagttatcctgggtaataactgccggagagatgggagtatatatatatgtgtgtgtatagataggtagatagatagatagatagatagatagatagatagatagataatctttgagtgaagcaggtttatcctctactagttaattaaataaagttcatgcattggagacaagtattctaaggagaattttttttctgttttatactaaagttaaaagctttatggcatagatactttatggcacagggctgagcgtgtgtgtgagtgcgtgtgtgcttctttatggtataaaataactttcagggaagatctgtcactagtccaattacccgcttctgttgttcaaaagaaggcattgctcctaggaggtatgtcaattttggagaattccagctgtttagtttcacagccccacatagaaaatctaggtttcccttggcatccttatttaaccagcactgcatctggcaatccttcttagatactgtgatttaagatttaaaaaaaaacacacac

SEQ ID NO: 36302 - DNA, 592 bp, Homo sapiens
gtgcttaccctctggcaattcaacctagtgaggaagcagttatgtaaaataaaacaaaaattaaaatgcaatrtattatatgaaaggaacatgtaagaatatactacaatttaaaatgtgctcatcctttgacccagaaatcccatctagggaactctagtctaataatatagagttttatgttaggatatttgtaaaagaatgtttatgcacacatcattatagtaggaaaagaaaaggaaaataatagaaaaaaagagataaaacatacatgtccactaatagaagcaggctgaataaattataaaacatttgtttacagaaagactgaggtatatacatgatactttggttttagaaaagcaagttccaacataaagcatactgcataaccatatttttgtaaaaagaaaataaaaaatctctacatgtttttaaagttatgtatttatttgttggaataaagacagaagagtttaaaacaagttacaagcattgagtatactggagaaatctgattggagggagtaagagtacagtccatttaccatttttcgagtatacttattttgttttgcttttgacaacagca

SEQ ID NO: 36303 - DNA, 592 bp, Homo sapiens
gtgcttaccctctggcaattcaacctagtgaggaagcagttatgtaaaataaaacaaaaattaaaatgcaatatattatatgaaaggaacatgtaagaatatactacaatttaaaatgtgctcatcctttgacccagaaatcccatctagggaactctagtctaataatatagagttttatgttaggatatttgtaaaagaatgtttatgcacacatcattatagtaggaaaagaaaaggaaaataatagaaaaaaagagataaaacatacatgtccactaatagaagcaggctgaataaattataaaacatttgtttacagaaagactgaggtatatacatgatactttggttttagaaaagcaagttccaacataaagcatactgcataaccatatttttgtaaaaagaaaataaaaaatctctacatgtttttaaagttatgtatttatttgttggaataaagacagaagagtttaaaacaagttrcaagcattgagtatactggagaaatctgattggagggagtaagagtacagtccatttaccatttttcgagtatacttattttgttttgcttttgacaacagca

SEQ ID NO: 36304 - DNA, 1826 bp, Homo sapiens
ttttttatcatttaccaatattttctttcacttttccttatggttagctcttatgttgyacattttttctttgtggtaaccaaccttccaatggatgccactgaccagaagctacctttcttacctctggctattttacatgtgacaccttcctgacccacagtaaaatttctttcattaaaaaagaggaaaaggaaaggaagaaaaagtaactcacagatatttttgctccaatttctcattttcttcagttccatgatgtgcaattctcaagaatctaatgttccttgggctgatcactattctccttcagtaaaaccacaggatgtagctgttgggcacagaagctaaatgtcatgaattcagtgccctgctcctcggcaggagactctggctgcgtgctttttatgtaattttttttcacctccactgccttattgtgctaacgaaagttggacagtaataactagtatattttcacactgcagttaatgattgtaatagtataaggtaagagggtaaatacttattaacacaaaaaagtacagtataaccaaccctacaatgaatagaaaaaattatttcagcagttgatgaaaacatggatacatttgacagaattgcttaggggaagaaaatcgcttgcaggcctcctgaaggcaaattaactgggtgtgtacctatttaatcctttcaagactgtaagtctaattgttgaaaactgccacccttcttgtctcctacccaagtctgaataggcacccgctggttctaccttaccttttggtagctaatctgagtttctcttcccaagatgcaccacagtgtctgcacgataaaggaggctaataataccttcctaggaaattctagattctgtttcctggggttaatagttgatcaaataatggacaatcagagaagtatagccatttggatgaagagggaaggagggagcagctatggataaaacaggaaaaaaaagatacgttcagcagatattccatagattatctaaattcattttttattctaaattaacactttcacgtaacgtctttcgatgccacattgtcctattagcttgctggctagacttattaaataaatctatctgtctatctatctatctatctttctatctatctatctatattttaatgagatttccatgatcatcttgttccttgctgatctagccattgacagctttccctggaatatatggaatatattatcacaaggagaaggcactcatcatatttagggaacgaatccatcaaacctcagaagagtaaaataatcttagttaaatgcattagaagtaatttaataagattagtaaattagcagtctagagctcgaatctgaaactattttatgagaaatgtcatgaaagtgaagaaattctcatgagacaattgacttatgaaggagattaattttatagttcttgcaatttgagatgaatcacttaagcactctagccctcagctaaatcatagcatcaataaaagaagcgaacagggttggccaaggtggctaaaactctaaaattattagatttaggttacatttaaacttgtgattattattgaagaaggaacagaatgacttaagaaaatgagagcatagatatatcattttagagtctgtgataatatagactttagcaaagtagaaatatgcagttcagagtagaaatatgcaggattctatggccagagaatctaaaaatttcacaggaaaggatgggagaagctaatatttccaagcaatcacagaaaggaagaaaaaggaaagtatttaaggaactatgtcacttg

SEQ ID NO: 36305 - DNA, 1826 bp, Homo sapiens
ttttttatcatttaccaatattttctttcacttttccttatggttagctcttatgttgtacattttttctttgtggtaaccaaccttccaatggatgccactgaccagaagctacctttcttacctctggctattttacatgtgacaccttcctgacccacagtaaaatttctttcattaaaaaagaggaaaaggaaaggaagaaaaagtaactcacagatatttttgctccaatttctcattttcttcagttccatgatgtgcaattctcaagaatctaatgttccttgggctgatcactattctccttcagtaaaaccacaggatgtagctgttgggcacagaagctaaatgtcatgaattcagtgccctgctcctcggcaggagactctggctgcgtgctttttatgtaattttttttcacctccactgccttattgtgctaacgaaagttggacagtaataactagtatattttcacactgcagttaatgattgtaatagtataaggtaagagggtaaatacttattaacacaaaaaagtacagtataaccaaccctacaatgaatagaaaaaattatttcagcagttgatgaaaacatggatacatttgacagaattgcttaggggaagaaaatcgcttgcaggcctcctgaaggcaaattaactgggtgtgtacctatttaatcctttcaagactgtaagtctaattgttgaaaactgccacccttcttgtctcctacccaagtctgaataggcacccgctggttctaccttaccttttggtagctaatctgagtttctcttcccaagatgcaccacagtgtctgcacgataaaggaggctaataataccttcctaggaaattctagattctgtttcctggggttaatagttgatcaaataatggacaatcagagaagtatagccatttggatgaagagggaaggagggagcagctatggataaaacaggaaaaaaaagatacgttcagcagatattccatagattatctaaattcattttttattctaaattaacactttcacgtaacgtctttygatgccacattgtcctattagcttgctggctagacttattaaataaatctatctgtctatctatctatctatctttctatctatctatctatattttaatgagatttccatgatcatcttgttccttgctgatctagccattgacagctttccctggaatatatggaatatattatcacaaggagaaggcactcatcatatttagggaacgaatccatcaaacctcagaagagtaaaataatcttagttaaatgcattagaagtaatttaataagattagtaaattagcagtctagagctcgaatctgaaactattttatgagaaatgtcatgaaagtgaagaaattctcatgagacaattgacttatgaaggagattaattttatagttcttgcaatttgagatgaatcacttaagcactctagccctcagctaaatcatagcatcaataaaagaagcgaacagggttggccaaggtggctaaaactctaaaattattagatttaggttacatttaaacttgtgattattattgaagaaggaacagaatgacttaagaaaatgagagcatagatatatcattttagagtctgtgataatatagactttagcaaagtagaaatatgcagttcagagtagaaatatgcaggattctatggccagagaatctaaaaatttcacaggaaaggatgggagaagctaatatttccaagcaatcacagaaaggaagaaaaaggaaagtatttaaggaactatgtcacttg

SEQ ID NO: 36306 - DNA, 1613 bp, Homo sapiens
gggatgttctttagtgttcttggagcttttctatgagtttcaaattgtttccaaataaatgattctatgtaatggcccgtcagtcagtcccactgagtttttactccctttgagatggacaaagcttgggcccacagctatcaccatcatacccaactctccaaagtgagcaattccagcttttagacagtcgtattaggttctgtctcaggcaaaaatactgagatcttctattaaaattgtatttttaatgttgtcaataaaggttttaaaatatattggaaaaaagaaaaaagagtaaatgaaataaaaataaacactacatataaagatataaaaataaaaagaatcacgtttgcatcataatttgagactcttgccttgttacataccagctgcgtgacttgggaaatgtcattttacctgtttgtttttcagtttctgtatatggaatgtggagctaaaaatccccagtcacatgacaaatggtaawtataattaagaacataaatagaatcagtagaagcttacctgggcttgaaatttctttttgcagatgatcgtaattattatggggggatcaggtacagcacctagcctaataatctgtgggacacagtcctacaagcctagagatgataggcttgtcatcttcctgccaagatgtagcacttcagtcttcttgtttttacgcgttaatagcactaccccacagagctaatctgctgaagaccaactccaagacaaaccccaccccatttcagccttttcaacacaatcctttcaggccacacttttgtccacctctgagtccccctttctaatgctgggttcaccgatttcacctaatttctatttctcttcaaaggttttctatgttgggataaacctgcccttgccccatatttgctttaccatgcattagaaaaccaatttatacttattacttatttattgagatggagtctcgcctctcgctctgtctgccaggctggagtgcagtggcaagatattggctcactgtaacctcggctccgcctcctgggttcaaacgattctcctgcctcagcctcccaagtcgctgggatgacaggcacgtgccaccatgcctggctaatttttgtattttttagtagagaaggagtttcaccatgttagccaggctagtctcaaactcttgaccttgggtgatctgcccacctcggccttccaaaatgctgggattacaggtgtgaacacccagccattgctgtcctttctaatagaaaaattttgttgccagcctccttcaacatagaaacaaatcctcgggtggagacatccaattcctctgtactttgttcatcagtttaattatctggagagaaggctgtgcttgcatgaagggtttgacctgcatttggaaattgcaacctgccatctctgggatgaagggtgtacttcaccagagtcttgattgaggcaatggaaatttccagttggaaaacttaagacaatgaaacatgaggctctatcctacagtccagtgctaaatcatacaaaatgaatttatgtttgaaaagaatacaaaggttttgacacatggcatatgtagttgcaagcacatatcaaaa

SEQ ID NO: 36307 - DNA, 1613 bp, Homo sapiens
gggatgttctttagtgttcttggagcttttctatgagtttcaaattgtttccaaataaatgattctatgtaatggcccgtcagtcagtcccactgagtttttactccctttgagatggacaaagcttgggcccacagctatcaccatcatacccaactctccaaagtgagcaattccagcttttagacagtcgtattaggttctgtctcaggcaaaaatactgagatcttctattaaaattgtatttttaatgttgtcaataaaggttttaaaatatattggaaaaaagaaaaaagagtaaatgaaataaaaataaacactacatataaagatataaaaataaaaagaatcacgtttgcatcataatttgagactcttgccttgttacataccagctgcgtgacttgggaaatgtcattttacctgtttgtttttcagtttctgtatatggaatgtggagctaaaaatccccagtcacatgacaaatggtaaatataattaagaacataaatagaatcagtagaagcttacctgggcttgaaatttctttttgcagatgatcgtaattattatggggggatcaggtacagcacctagcctaataatctgtgggacacagtcctacaagcctagagatgataggcttgtcatcttcctgccaagatgtagcacttcagtcttcttgtttttacgcgttaatagcactaccccacagagctaatctgctgaagaccaactccaagacaaaccccaccccatttcagccttttcaacacaatcctttcaggccacacttttgtccacctctgagtccccctttctaatgctgggttcaccgatttcacctaatttctatttctcttcaaaggttttctatgttgggataaacctgcccttgccccatatttgctttaccatgcattagaaaaccaatttatacttattayttatttattgagatggagtctcgcctctcgctctgtctgccaggctggagtgcagtggcaagatattggctcactgtaacctcggctccgcctcctgggttcaaacgattctcctgcctcagcctcccaagtcgctgggatgacaggcacgtgccaccatgcctggctaatttttgtattttttagtagagaaggagtttcaccatgttagccaggctagtctcaaactcttgaccttgggtgatctgcccacctcggccttccaaaatgctgggattacaggtgtgaacacccagccattgctgtcctttctaatagaaaaattttgttgccagcctccttcaacatagaaacaaatcctcgggtggagacatccaattcctctgtactttgttcatcagtttaattatctggagagaaggctgtgcttgcatgaagggtttgacctgcatttggaaattgcaacctgccatctctgggatgaagggtgtacttcaccagagtcttgattgaggcaatggaaatttccagttggaaaacttaagacaatgaaacatgaggctctatcctacagtccagtgctaaatcatacaaaatgaatttatgtttgaaaagaatacaaaggttttgacacatggcatatgtagttgcaagcacatatcaaaa

SEQ ID NO: 36308 - DNA, 1613 bp, Homo sapiens
gggatgttctttagtgttcttggagcttttctatgagtttcaaattgtttccaaataaatgattctatgtaatggcccgtcagtcagtcccactgagtttttactccctttgagatggacaaagcttgggcccacagctatcaccatcatacccaactctccaaagtgagcaattccagcttttagacagtcgtattaggttctgtctcaggcaaaaatactgagatcttctattaaaattgtatttttaatgttgtcaataaaggttttaaaatatattggaaaaaagaaaaaagagtaaatgaaataaaaataaacactacatataaagatataaaaataaaaagaatcacgtttgcatcataatttgagactcttgccttgttacataccagctgcgtgacttgggaaatgtcattttacctgtttgtttttcagtttctgtatatggaatgtggagctaaaaatccccagtcacatgacaaatggtaaatataattaagaacataaatagaatcagtagaagcttacctgggcttgaaatttctttttgcagatgatcgtaattattatggggggatcaggtacagcacctagcctaataatctgtgggacacagtcctacaagcctagagatgataggcttgtcatcttcctgccaagatgtagcacttcagtcttcttgtttttacgcgttaatagcactaccccacagagctaatctgctgaagaccaactccaagacaaaccccaccccatttcagccttttcaacacaatcctttcaggccacacttttgtccacctctgagtccccctttctaatgctgggttcaccgatttcacctaatttctatttctcttcaaaggttttctatgttgggataaacctgcccttgccccatatttgctttaccatgcattagaaaaccaatttatacttattacttatttattgagatggagtctcgcctctcgctctgtctgccaggctggagtgcagtggcaagatattggctcactgtaacctcggctccgcctcctgggttcaaacgattctcctgcctcagcctcccaagtcgctgggatgacaggcacgtgccaccatgcctggctaatttttgtattttttagtagagaaggagtttcaccatgttagccaggctagtctcaaactcttgaccttgggtgatctgcccacctcggccttccaaaatgctgggattacaggtgtgaacacccagccattgctgtcctttctaatagaaaaattttgttgccagcctccttcaacatagaaacaaatcctcgggtggagacatccaattcctctgtactttgttcatcagtttaattatctggagagaaggctgtgcttgcatgaagggtttgamctgcatttggaaattgcaacctgccatctctgggatgaagggtgtacttcaccagagtcttgattgaggcaatggaaatttccagttggaaaacttaagacaatgaaacatgaggctctatcctacagtccagtgctaaatcatacaaaatgaatttatgtttgaaaagaatacaaaggttttgacacatggcatatgtagttgcaagcacatatcaaaa

SEQ ID NO: 36309 - DNA, 650 bp, Homo sapiens
gtttaactccctattttttataataagaaacagaggtccacggaagatttacccaggactactcagctcgtgacagcacatccaggtcttccttggtctccgcgctctggatgctgtcctattccatggtcctgcacatgccaccaactctgcagccttttcctcaatatctcttctcctcttcaaggcctcttcaaggctttctagacaggctgcttcagataacaccctgaaactgttcttatttctattctaggtgtcttctcactgctatatgaagattcctctcaactctaatggaaaatgccattcttgttcactgaaatgcaatttgataccatttgcatctaggggctcttcctttctttcttttcttttatctccatttatacaacatttattgaacatctctgggtgagaagaactatgataggtgctgaggatataaagaagagtgagacaaatctcctgccagaaagaactcagtcttccttctgctgtcatgacagaggacataacccatctaccagcttgcattcttttggttcttattcttttctrttggacatggacatgatctagctaatattagatgatatttgtttacatgagttctattatgtctgcccatccatccatcagtccatgca

SEQ ID NO: 36310 - DNA, 584 bp, Homo sapiens
tcacttaattcagcatagttttctgttcttagataaaaatatgatagtacacctactgcctagtagactgtgagccttttgaaggtaaggatcatatttttatgtgtgtttgtaccccctacaccttgcacagtactcagggcctagtttagaaaaagcttgataaatattttatggatgcataaaaggatgattaacaattatcaacctcaatgtggatatataataaatgtttctgggagagtttattgatcttaatgtgaacaaactgtagtaacccaaagaacttctccatgggactgtatttggacttggcttaattttaagtctgcaatacagagaagttaagtaactttccaagggcacagtgttagttaagtggtagggctatttaaactcaaatgcatgmtttgaaaacctaagctcttaagtgtgacactaacttctttgctaagtatccgtaaagctccttaaaaatattatactgacattttgttggaattgtgcaacaaactgggaagagttgacatttctttctcatattaaattttttattttagggatacattgtatttctccttgta

SEQ ID NO: 36311 - DNA, 626 bp, Homo sapiens
atttgatagaagtggaagtttttaatagygtgaacctatcaaggtcatataattctttgcctactattcttaaatggttttttcatttaattttttatgacaaaataattaccaatgactatattatagtttcagaaagatgtcaaattctaaaagtgattttaaaggagttttgcctttcactactagtgataacagaaggcataattataaaacttgttaactagaaaagattgatattaattgattttatgataatatatacctgctaaataatgaatttattttaggtttgcattgcaagttttgaatttgttaatatccgtgttgttcatagattgttactagagatttagagggatcattttttaatttttcatctttggtagtcacatttccagttttctggcagtggtttctactaatgttaattgaattgaagagtgccatagcacattttagattcctggcatcatttaatgccctcatttttaagtcaagcaagatacagcatagtcttagggttagattgatagagtaaatcacgtttaatgcttatctattgttatcaataccttttttattttaaagaatttggaaagaatgttgtcttcttaagtcttgtt

SEQ ID NO: 36312 - DNA, 626 bp, Homo sapiens
atttgatagaagtggaagtttttaatagcgtgaacctatcaaggtcatataattctttgcctactattcttaaatggttttttcatttaattttttatgacaaaataattaccaatgactatattatagtttcagaaagatgtcaaattctaaaagtgattttaaaggagttttgcctttcactactagtgataacagaaggcataattataaaacttgttaactagaaaagattgatattaattgattttatgataatatatacctgctaaataatgaatttattttaggtttgcattgcaagttttgaatttgttaatatccgtgttgttcatagattgttactagagatttagagggatcattttttaatttttcatctttggtagtcacatttccagttttctggcagtggtttctactaatgttaattgaattgaagagtgcyatagcacattttagattcctggcatcatttaatgccctcatttttaagtcaagcaagatacagcatagtcttagggttagattgatagagtaaatcacgtttaatgcttatctattgttatcaataccttttttattttaaagaatttggaaagaatgttgtcttcttaagtcttgtt

SEQ ID NO: 36313 - DNA, 590 bp, Homo sapiens
aaaaaatctttcagcttgtatactaaattaaaacttcagtgtgttcctacaggttaaattttatttatggtcaaaatctacaaataaaatataataatcatgtccccaaatagctaatactataaaattccagtataaagtaattataacttttctgaattcaccagagatttaacctcttatataggaaacccacaaatacagtgatttaatgacccatccaaactgctttaagtcctaaggaaatatgaagtagtattttataataattgcagccatatctatagccttccctaagtgatcaatagggcagtccctttgaaacggttctctgtcctcatggttcttgggtgatgcctcaaggcgctctgtaaccacctttcggtgcccgctaccacagcacagctccagaactactgccctcctgagctatctggctctgtcaataggtcactggcctcctgctgtcttgttccctcaccgatatcttgcttgcacactccacgtggctacttcttgatcaaagattctctgatacacagaacagcaaakaaatgaaagcaaagaaaggaaccaaaaagcttatgtca

SEQ ID NO: 36314 - DNA, 527 bp, Homo sapiens
gtgatccacctgcctcagcctttcaaatttctgggattataggcgtgagctacagcgtccgtcctctccagcttcttgactgtggtctgataggtgtacctgttccgtaatgactgcagactgagcaacacttcagatgcttgcggtggatagtatgaaatcttgaaggcaaaatgaaattttattcttgactttggtgagtctattaagtcattaaattcatatttcatctttatataaggaatgtggtcatgatggcaggatttcatggtcaaaaaacagtttccagctttttaatgatcattttgcaaggtcttttattcctcccttctaagtgggggcatgtatttgtgcaaatattattgctatagactaagatccttggagatatacctactttcatgccccagtaaaagtgatcttaatttgggggaatagaggagtgtktttttcttactcctaagagcttttcttctttgtttgtatgctagatttatttgtcaaataagtaacagttatctgctaat

SEQ ID NO: 36315 - DNA, 527 bp, Homo sapiens
gtgatccacctgcctcagcctttcaaatttctgggattataggcgtgagctacagcgtccgtcctctccagcttcttgactgtggtctgataggtgtacctgttccgtaatgactgcagactgagcaacacttcagatgcttgcggtggatagtatgaaatcttgaaggcaaaatgaaattttattcttgactttggtgagtctattaagtcattaaattcatatttcatctttatataaggaatgtggtcatgatggcaggatttcatggtcaaaaaacagtttccagctttttaatgatcattttgcaaggtcttttattcctcccttctaagtgggggcatgtatttgtgcaaatattattgctatagactaagatccttggagatatacctactttcatgccccagtaaaagtgatcttaatttgggggaatagaggagtgtttttttctwactcctaagagcttttcttctttgtttgtatgctagatttatttgtcaaataagtaacagttatctgctaat

SEQ ID NO: 36316 - DNA, 533 bp, Homo sapiens
tgtttcctccctttgctagctcccttggagctaatgaaaaaaataattataaaggactttagtaagtgtaaaataaaggatgcgcaatataaaaaaagaawatatatatatatatatattggtaaggggtctagaaaaatggtccccaaaaggtattctttgaataattgatgggtcatattaaagtcatttgaaagatctagcatcaagttccagcatgactgaattggcatattctcatgagaataagtggcattctttatattcattctggggagagatcctttactttttaggaaattgccaggtgatagacttcttgggcgatatttccctgctcagtggctcaatgccctgctcaatgccctagatgttgagtaccaccgggcagctagtgggtgcgtatgaggggcaggctcctgagccaggaaccagagaatcaagatctcatctcagtcttcctccagctatgggcttgctttttgatctcatccaatttctcatcagtccactcttctgagcagagatgtcat

SEQ ID NO: 36317 - DNA, 586 bp, Homo sapiens
tttgttttaagtggttactctgggaaatttcaaatatgagttggtggtacttaaataaggaactgaaaacgtatgcaccattccaaccatgaaacacacagtcatacacacaaggagattagaggtttggacagagtcagtttggagccatttgagaaaagaggctgggcagtagccatggaaatagttactataaatgctcactttctaggaagacatacccagatttgatttgctgaaatgattctgaatacctttcaagcagaaagagtctttctttggacaaagccattgtaagtttattgtttcaaaattttagactgtratgtttctatccaggacaaaattacttgaagaaaatggtcataaagtcctttcagttctctcatttactaatgcagtttagccatcaaatctactgaactgtagcttacagacaaaaaccattttagagcttctatcatataaaacaatagatatgaaaatcctgcctgtggagctcttgatactattgtatttcatttttgtgttgggaattttttatcttttgggttttctgtgttttattataaacaagtacactgac

SEQ ID NO: 36318 - DNA, 586 bp, Homo sapiens
tttgttttaagtggttactctgggaaatttcaaatatgagttggtggtacttaaataaggaactgaaaacgtatgcaccattccaaccatgaaacacacagtcatacacacaaggagattagaggtttggacagagtcagtttggagccatttgagaaaagaggctgggcagtagccatggaaatagttactataaatgctcactttctaggaagacatacccagatttgatttgctgaaatgattctgaatacctttcaagcagaaagagtctttctttggacaaagccattgtaagtttattgtttcaaaattttagactgtgatgtttctatccaggacaraattacttgaagaaaatggtcataaagtcctttcagttctctcatttactaatgcagtttagccatcaaatctactgaactgtagcttacagacaaaaaccattttagagcttctatcatataaaacaatagatatgaaaatcctgcctgtggagctcttgatactattgtatttcatttttgtgttgggaattttttatcttttgggttttctgtgttttattataaacaagtacactgac

SEQ ID NO: 36319 - DNA, 1479 bp, Homo sapiens
  misc_feature (1)...(1479): n = A,T,C or G
cttccaggggatttagcggggtgatgcctgttggaggtcagtgccctcctagttggggggtgggggctaagcttaaagtttgagaagcagtgctgtagcacgtcagcttcataaaggcagggaccatgaaattcttatttactaatatattggcagtacctagtatagtgcccaccacagagtagattttcctatttttagcaaataaatttttaatataccctttttattgaactaaccattcagagttttgaaaatctttantggtcaataccaaaacaatttttaacccccaaataaaatggatatttggattcttacgaatannnnnnnnnnnnnnnnnnnnnnnnnnnnnnnnnnnnnnnnnnnnnnnnnnnnnnnnnnnnnnnnnnnnnnnnnnnnnnnnnnnnnnnnnnnnnnnnnnnncttaggattaggacatctttttgcatgagtctaatatagatgtaatcatttgtgttgttctttttcataaatgtatctagtgaaaaaagctcaaatgacatttctagccattgattattctcttttctgttccattctagctttccttacaaatggttatgggttaagtagcatgtagctcgatgacaatgttgatcagattagataacacccactcagaaagtttttttgaaataatcttttttattgatagaaatttatttttgtattgtttaatgataacttttaaagaggtattgtgttaagagcaaggacttgcagtcagtcacatttgggtttgagaataataaattgtcatttattaaccatgtcagtgtttttctacccaaccctggggtaaatggagggagggaacagacttgggagcaccagcacccccagacctcccctggccaccccaaggaccaagtgatcaatatctcagcacacctctacttatttgtggcacacagtgtgttttagttcttagtgagctgtgagctacatgactttgggacttctctgattttcagtttccttatctgcaaaatagagaccttagggagttaatgtgggtatgagaaatgtaaataaagtatatttcacaagatgagacatgtagtatatgctaataaatggtaagttgctgctgttatggttgttaacaataattataaaaagagaccagcctggccaacatggggaaaccccatctttgctaaaaatacaaaattagctgggcatggtggcacatgcctacaatcctagctgctcgggaggttgaggcaggagaattgcttgaaccctggaggcggggtttgcggtgagccaagatcgcgccattgcactccagcctgggcaacaagagcgaaactccgtctcaaaaaaaaaaaagcaacgkaaagggcttgaattgaaaaaaaatcttagatacatagttttttactttattgtaagtaagttttttactttattgtagactgcattgtatttttcatttttttctttaatgca

SEQ ID NO: 36320 - DNA, 953 bp, Homo sapiens
gcctggtatgtaaggcatttgctggtgggcatgttttgaacatgtattgatcccttatgtatactgacacaytgtccccatcactgttggacaggtatttccccctgtgctggcgacacagggacgcccctcaccgaggtagagatgctgtgggtagtcttaacttctgaggacaacgaagcccattcctggggggacaggatagggagggggagcgagacatggtctataggttgggggctgggcagaggaggtgcctagcagtgacacagaaacctctgttctgctgtgaggcctatggaatgcaaatggaacccacttttgaggatcttggagtcttggagtgctggagctagagagacctttagacattgttggctccaatgctcgttggatatgtagaaaaaggcccacagaggagcagtagatttgttcaaggttacacagcaagatggtgtgaagacagggcaggactgtgatccctgggtcccttgtctggtgtcgttgctgtctctgctttagtactccgtaatgcatctgcagcacactggaggggagggttagtttggagcctttgggccctgcctttctggatgtggaacttgctgggctttgggaattttctgccagccattgataggagcagaggacctgttgtgttttgtggcagaggtcacccacggaagcgatccatctgtaagcacagagccagctgcagcccgaggtgatgtggatggagcttaaatgtggtgttgtgtgtgtctcttcttttcctttaaacaacgttttccccaccacacaggtttttagccagcttatctactctaaagtgctgggaagttcccatttccctatctgcaatggctgtaagacatctagatccctaaacagctaggataaaggaggatttcaagaacttaggtgattaggtaattattgaaatgggggtgcgt

SEQ ID NO: 36321 - DNA, 953 bp, Homo sapiens
gcctggtatgtaaggcatttgctggtgggcatgttttgaacatgtattgatcccttatgtatactgacacactgtccccatcactgttggacaggtatttccccctgtgctggcgacacagggacgcccctcaccgaggtagagmtgctgtgggtagtcttaacttctgaggacaacgaagcccattcctggggggacaggatagggagggggagcgagacatggtctataggttgggggctgggcagaggaggtgcctagcagtgacacagaaacctctgttctgctgtgaggcctatggaatgcaaatggaacccacttttgaggatcttggagtcttggagtgctggagctagagagacctttagacattgttggctccaatgctcgttggatatgtagaaaaaggcccacagaggagcagtagatttgttcaaggttacacagcaagatggtgtgaagacagggcaggactgtgatccctgggtcccttgtctggtgtcgttgctgtctctgctttagtactccgtaatgcatctgcagcacactggaggggagggttagtttggagcctttgggccctgcctttctggatgtggaacttgctgggctttgggaattttctgccagccattgataggagcagaggacctgttgtgttttgtggcagaggtcacccacggaagcgatccatctgtaagcacagagccagctgcagcccgaggtgatgtggatggagcttaaatgtggtgttgtgtgtgtctcttcttttcctttaaacaacgttttccccaccacacaggtttttagccagcttatctactctaaagtgctgggaagttcccatttccctatctgcaatggctgtaagacatctagatccctaaacagctaggataaaggaggatttcaagaacttaggtgattaggtaattattgaaatgggggtgcgt

SEQ ID NO: 36322 - DNA, 953 bp, Homo sapiens
gcctggtatgtaaggcatttgctggtgggcatgttttgaacatgtattgatcccttatgtatactgacacactgtccccatcactgttggacaggtatttccccctgtgctggcgacacagggacgcccctcaccgaggtagagatgctgtgggtagtcttaacttctgaggacaacgaagcccattcctggggggacaggatrgggagggggagcgagacatggtctataggttgggggctgggcagaggaggtgcctagcagtgacacagaaacctctgttctgctgtgaggcctatggaatgcaaatggaacccacttttgaggatcttggagtcttggagtgctggagctagagagacctttagacattgttggctccaatgctcgttggatatgtagaaaaaggcccacagaggagcagtagatttgttcaaggttacacagcaagatggtgtgaagacagggcaggactgtgatccctgggtcccttgtctggtgtcgttgctgtctctgctttagtactccgtaatgcatctgcagcacactggaggggagggttagtttggagcctttgggccctgcctttctggatgtggaacttgctgggctttgggaattttctgccagccattgataggagcagaggacctgttgtgttttgtggcagaggtcacccacggaagcgatccatctgtaagcacagagccagctgcagcccgaggtgatgtggatggagcttaaatgtggtgttgtgtgtgtctcttcttttcctttaaacaacgttttccccaccacacaggtttttagccagcttatctactctaaagtgctgggaagttcccatttccctatctgcaatggctgtaagacatctagatccctaaacagctaggataaaggaggatttcaagaacttaggtgattaggtaattattgaaatgggggtgcgt

SEQ ID NO: 36323 - DNA, 953 bp, Homo sapiens
gcctggtatgtaaggcatttgctggtgggcatgttttgaacatgtattgatcccttatgtatactgacacactgtccccatcactgttggacaggtatttccccctgtgctggcgacacagggacgcccctcaccgaggtagagatgctgtgggtagtcttaacttctgaggacaacgaagcccattcctggggggacaggatagggagggggagcgagacatggtctataggttgggggctgggcagaggaggtgcctagcagtgacacagaaacctctgttctgctgtgaggcctatggaatgcaaatggaacccacttttgaggatcttggagtcttggagtgctggagctagagagacctttagacattgttggctccaatgctcgttggatatgtagaaaaaggcccacagaggagcagtagatttgttcaaggttacacagcaagatggtgtgaagacagggcaggactgtgatccctgggtcccttgtctggtgtcgttgctgtctctgctttagtactccgtaatgcrtctgcagcacactggaggggagggttagtttggagcctttgggccctgcctttctggatgtggaacttgctgggctttgggaattttctgccagccattgataggagcagaggacctgttgtgttttgtggcagaggtcacccacggaagcgatccatctgtaagcacagagccagctgcagcccgaggtgatgtggatggagcttaaatgtggtgttgtgtgtgtctcttcttttcctttaaacaacgttttccccaccacacaggtttttagccagcttatctactctaaagtgctgggaagttcccatttccctatctgcaatggctgtaagacatctagatccctaaacagctaggataaaggaggatttcaagaacttaggtgattaggtaattattgaaatgggggtgcgt

SEQ ID NO: 36324 - DNA, 560 bp, Homo sapiens
ggacrtcatctccgggcccaaaacttactcaagtcagactctctagtcccaactgctgcctcctggtggcctatgaaggcccaaaatctcctcaatttgacctgtccaggcccagctcctgcctcctgtcagcgtctacaggcccaacctctgcctcatgggggcttctccaggcccacctcttcctcttggctgggtctacaggcacaactgctgcctcacaacagccttttttggcccagttcctgtccagctcatggcggccaatgtaggcccaaaacttcctcaagtcaaactctccaggcccaccttctgcttcccggtggcatcaacaggcccagctttgacttgagaacagcctctgcaggccctgctcttgcctctcaggggctttttccaggcccagctcttgcctcatggcagctgccccaggccaaatttctgcctgcctgccagcagcctcaacaggcacagctcctccctcacagtggcccatttaggcccaactcatgactgtgaggccatttccaggcctagtgcctgcctcgtggctgactctt

SEQ ID NO: 36325 - DNA, 560 bp, Homo sapiens
ggacatcatctccgggcccaaaacttactcaagtcagactctctagtcccaactgctgcctcctggtggcctatgaaggcccaaaatctcctcaakttgacctgtccaggcccagctcctgcctcctgtcagcgtctacaggcccaacctctgcctcatgggggcttctccaggcccacctcttcctcttggctgggtctacaggcacaactgctgcctcacaacagccttttttggcccagttcctgtccagctcatggcggccaatgtaggcccaaaacttcctcaagtcaaactctccaggcccaccttctgcttcccggtggcatcaacaggcccagctttgacttgagaacagcctctgcaggccctgctcttgcctctcaggggctttttccaggcccagctcttgcctcatggcagctgccccaggccaaatttctgcctgcctgccagcagcctcaacaggcacagctcctccctcacagtggcccatttaggcccaactcatgactgtgaggccatttccaggcctagtgcctgcctcgtggctgactctt

SEQ ID NO: 36326 - DNA, 560 bp, Homo sapiens
ggacatcatctccgggcccaaaacttactcaagtcagactctctagtcccaactgctgcctcctggtggcctatgaaggcccaaaatctcctcaatttgacctgtccaggcccagctcctgcctcctgtcagcgtctacaggcccaacctctgcctcatgggggcttctccaggcccacctcttcctcttggctgggtctacaggcacaactgctgcctcacaacagccttttttggcccagttcctgtccagctcatggcggccaatgtaggcccaaaacttcctcaagtcaaactctccaggcccaccttctgcttcccggtggcatcaacaggcccagctttgacttgagaacagcctctgcaggccctgctcttgcctcycaggggctttttccaggcccagctcttgcctcatggcagctgccccaggccaaatttctgcctgcctgccagcagcctcaacaggcacagctcctccctcacagtggcccatttaggcccaactcatgactgtgaggccatttccaggcctagtgcctgcctcgtggctgactctt

SEQ ID NO: 36327 - DNA, 299 bp, Homo sapiens
taatatacaatggaaaggcattgtttgtagatacactacagacaataaatttaaaagaaatgatcacattaagacatcaccattttgtaactctcttttttttatgtatttagtcagattagtcatctacctttacaaagaaaagagatggctagacaatgtacacctcctaataacaaatataattctgcctacaagtatttttgaatamagagtaaaatacagtaaataaaacccaaatcctactaaaagtttaggtttactagtttataagaaattcaggtttcaaaggaattaca

SEQ ID NO: 36328 - DNA, 523 bp, Homo sapiens
tgtctctgtttgaggaagtaaacttcaatttattgggcaacacaccttctttaccggtgttgaataccagctggtgctataactaggtcttcagtgggccatgtcatcatttttcaaggccaaaatgctcctgagtaatgaaagccagtggataccatgagcatttgtctttagcatacttacttctctataaaatgaggctttaggtcagaagaattttatgtgatactaagatggttgtaaggcattctgtgactttatggatggtattgctggaaaaagcttggcaagaagagatgacaaattcaccaccagaatgtatcactrcaagcaaggattcatcttctcctccatgattgcagaggttcattttcattaacccatcatggtcaattaaacattataggctggtgcctatgggttataacaggtataaccctgaggtcataacaggtattcattattggtctcatcttttggaagattgggcatttagaagtttcagcaacctcataagaccttc

SEQ ID NO: 36329 - DNA, 523 bp, Homo sapiens
tgtctctgtttgaggaagtaaacttcaatttattgggcaacacaccttctttaccggtgttgaataccagctggtgctataactaggtcttcagtgggccatgtcatcatttttcaaggccaaaatgctcctgagtaatgaaagccagtggataccatgagcatttgtctttagcatacttacttctctataaaatgaggctttaggtcagaagaattttatgtgatactaagatggttgtaaggcattctgtgactttatggatggtattgctggaaaaagcttggcaagaagagatgacaaattcaccaccagaatgtatcactacaagcraggattcatcttctcctccatgattgcagaggttcattttcattaacccatcatggtcaattaaacattataggctggtgcctatgggttataacaggtataaccctgaggtcataacaggtattcattattggtctcatcttttggaagattgggcatttagaagtttcagcaacctcataagaccttc

SEQ ID NO: 36330 - DNA, 547 bp, Homo sapiens
gctctccaaaccccgtcattttgggggttgtatagaggttccattaagtagaaaasattgatgaagtcattggcctttggtgagtggactcaatccccagcccctctgccctctccagaggtccagggatggggctgagaggtttcaccctctactcacagggctggttcttttaacagccagttcccacctcgcagctatctaggggcccccagccaccagtcatctcagcacacaaaaagacacttatcaccctggagattccaaaggtgttagaagctcttgtaccattaactggagattaagaccaaatattacagcaaaagatgctcctctcacccctatcatggagaaattacaaggattctaggagctctttgccaggaactgaagatgaggaccaaatgtatacttcttgttatttcattatatcatcattacttcgatagaaaaccgacttagcataaattgtcatttttacgttgcaatatgtttgcctgggtcttcaacattaatttttttcacctgttctgcaagacaacctttc

SEQ ID NO: 36331 - DNA, 712 bp, Homo sapiens
aacaaggaaacttgtctctccagtcaaacctccttcttttccacattcactctagtcttcagttgttcagccctttctgggcttcctcccatttcatacctaacagcaactcctttcttcatcattcacttaatgctcaaataagtattctcactcctcccaatctctcaaccttcattcttctcccatgttcacattgaaaatccccagttcttggcaaagctatgtatccactgccatcacttttgcttctggaaagtttaagaattctgtagaaaatcacataattcacacacacacacacacacacacacacacacacacacaccamtgagttctgtgtcatttggtgctatcacaaatgctttatttccaaccttaattgagccttcagtactaatcaactcatcttccattcatctctagttaaaattcttttctgttcaaagtttgacctcttgctattcttctacctccatgacttagtcactgatttctcaaacaaatctgaggacacttttaccaaaaccttttaaaaatattcactcttccttacctccctccgacatggttattcttccttttccctaggtatagtttctacacaagtgaccttgtcccagtctactcctccttgaacatcacaagttagtctcgtccatttttttcccatttcttagatgttcaaaattcttcccatcaactgacagat

SEQ ID NO: 36332 - DNA, 831 bp, Homo sapiens
cacccccatcccatcccccaccaaaccccatcccagtggagggtaagtttctgaaattagaaaaacctacaatgccttgtcctgtaattctgggccagaagttctcagttggacaggttatgacattttgagtaggagaattctgtaaaactggccttgccaatgcattacaagacttttggtatccttgaccattgcgtcccccaacactaaatgccaaaatagttacacttactttttaatgctctcctctctacatgtccatttttcattgttaccaactgtatttccatttcctcagtctcactattaccttccttcataccttctttgaatgttttctttttcagacatttaataattcaaatgaataagaattagtgacattattattgggatcaataattgatgaactgtaacaatagtagggagataatttgaggtaaaataaacccttcatcttgtcaaataatataattcattgaactatacattaaaaaaatattatctgcaaggctttgttccaagagcagcacagagtgcaaagtgggaaattttggtgacttgaatttcagtggaaatgctgagcaactcctgtttctccctcctcttcctccgaataatctttaaaatgtyctttttagtctagcttttctatctttcgccttgcttccccatgtgattgctcaagatgagagtgagaatctctcttaaaagtcatcttagacagtcatctctagttctgagtgaccagcactgctacaagctaatttatccccaattttacagtttgtatttgttaaaaacttgagtttctgtcattctgtttgg

SEQ ID NO: 36333 - DNA, 1327 bp, Homo sapiens
tacctcaaagtcaggaactatgaatagtttagtggtattttcttctgagcctagcacagagaccaatataggtgctcctaaatatgaggtaagtaaataggtacaatcacaagccatctaggggtacttcagaaacccatctacatcaaatcttgatcctaaaatgggactgaatttctagttctatctttttaaagagtaacaaactttttggagacttagatatgtcagggtttttctgaaactttccaatgtgttcctttgtttttaaagcctaactaagctaatgaacagaaactaaataaaaaaaaggtttcagttcagttgtttagtcccttcttcaacagttttagatcygttttaaaattttttctcactttacctttttttttaaaaaaacacccttgtccttaatttttctttatgttggatcacattctcccttattttactatcaagatgtgtatagctctaggttgtagcatttcaacttataggaaaggacagttattaccaacaaacttgaaattcttcctttatatggggccttattattgtgtaactggctatataggaaaattcaagaaaatgaaacaaaacaacaacaaaagcttctgaatatgggctctcaaagattgaaattattaaataacctccttttcattaggtcatgagcaggcaactgataagctggagaagtcttttatatttttcttcactgaatggataattactgaacgtctgcaaagcagacattgtgtgcttcatagtttggcatgtcagttgccatttttaaaataaaatcagtggagaatttcaacttgaagcacatataaatgacaataaatagtacttttgcaaactttatttagtatttgcaaataggttccaaatgtccagcttaatttttctgagttcttatttcattcctttctagccatgcttatttttatgtaaaggagaaaacatgcttaattactctaaagaaaagttattttagaaatgataaaagttgaacatatttaaaggaaaaaagcagaataaaattaataattaaaatactaaatttggacaggaaaatggctattgaataagtccaaacatttccaggaaagacataaaggcatccttgtttttaagaaaacatacggcaaactatataaaatgaaatattactaagacttctttggtctcctcatcatacgtcaataatgaggagagctttgcaatgataaagcttttgaagtggcttgtggaatattaaattgtttaagtataattttggcatcaagtgaccttacatattttgaatgttggttatctatgc

SEQ ID NO: 36334 - DNA, 1327 bp, Homo sapiens
tacctcaaagtcaggaactatgaatagtttagtggtattttcttctgagcctagcacagagaccaatataggtgctcctaaatatgaggtaagtaaataggtacaatcacaagccatctaggggtacttcagaaacccatctacatcaaatcttgatcctaaaatgggactgaatttctagttctatctttttaaagagtaacaaactttttggagacttagatatgtcagggtttttctgaaactttccaatgtgttcctttgtttttaaagcctaactaagctaatgaacagaaactaaataaaaaaaaggtttcagttcagttgtttagtcccttcttcaacagttttagatccgttttaaaattttttctcactttacctttttttttaaaaaaacacccttgtccttaatttttctttatgttggatcacattctccyttattttactatcaagatgtgtatagctctaggttgtagcatttcaacttataggaaaggacagttattaccaacaaacttgaaattcttcctttatatggggccttattattgtgtaactggctatataggaaaattcaagaaaatgaaacaaaacaacaacaaaagcttctgaatatgggctctcaaagattgaaattattaaataacctccttttcattaggtcatgagcaggcaactgataagctggagaagtcttttatatttttcttcactgaatggataattactgaacgtctgcaaagcagacattgtgtgcttcatagtttggcatgtcagttgccatttttaaaataaaatcagtggagaatttcaacttgaagcacatataaatgacaataaatagtacttttgcaaactttatttagtatttgcaaataggttccaaatgtccagcttaatttttctgagttcttatttcattcctttctagccatgcttatttttatgtaaaggagaaaacatgcttaattactctaaagaaaagttattttagaaatgataaaagttgaacatatttaaaggaaaaaagcagaataaaattaataattaaaatactaaatttggacaggaaaatggctattgaataagtccaaacatttccaggaaagacataaaggcatccttgtttttaagaaaacatacggcaaactatataaaatgaaatattactaagacttctttggtctcctcatcatacgtcaataatgaggagagctttgcaatgataaagcttttgaagtggcttgtggaatattaaattgtttaagtataattttggcatcaagtgaccttacatattttgaatgttggttatctatgc

SEQ ID NO: 36335 - DNA, 1327 bp, Homo sapiens
tacctcaaagtcaggaactatgaatagtttagtggtattttcttctgagcctagcacagagaccaatataggtgctcctaaatatgaggtaagtaaataggtacaatcacaagccatctaggggtacttcagaaacccatctacatcaaatcttgatcctaaaatgggactgaatttctagttctatctttttaaagagtaacaaactttttggagacttagatatgtcagggtttttctgaaactttccaatgtgttcctttgtttttaaagcctaactaagctaatgaacagaaactaaataaaaaaaaggtttcagttcagttgtttagtcccttcttcaacagttttagatccgttttaaaattttttctcactttacctttttttttaaaaaaacacccttgtccttaatttttctttatgttggatcacattctcccttattttactatcaagatgtgtatagctctaggttgtagcatttcaacttataggaaaggacagttattaccaacaaacttgaaattcttcctttatatggggccttattattgtgtaactggctatataggaaaattcaagaaaatgaaacaaaacaacaacaaaagcttctgaatatgggctctcaaagattgaaattattaaataacctccttttcattaggtcatgagcaggcaactgataagctggagaagtcttttatatttttcttcactgaatggataattactgaacgtctgcaaagcagacattgtgtgcttcatagtttggcatgtcagttgccatttttaaaataaaatcagtggagaatttcaacttgaagcacatataaatgacaataaatagtacttttgcaaactttatttagtatttgcaaataggttccaaatgtccagcttaatttttctgagttcttatttcattcctttctagccatgcttatttttatgtaaaggagaaaacatgcttaattactctaaagaaaagttattttagaaatgataaaagttgaacatatttaaaggaaaaaagcagaataaaattaataattaaaatactaaatttggacaggaaaatggctattgaataagtccaaacatttccakgaaagacataaaggcatccttgtttttaagaaaacatacggcaaactatataaaatgaaatattactaagacttctttggtctcctcatcatacgtcaataatgaggagagctttgcaatgataaagcttttgaagtggcttgtggaatattaaattgtttaagtataattttggcatcaagtgaccttacatattttgaatgttggttatctatgc

SEQ ID NO: 36336 - DNA, 1752 bp, Homo sapiens
actagtcactcattttggcccacaaccatgtgctgttttgctctggaattaaatggttttctcaagatatgttctatctcttggttggattgcaaattcttcatggctagggaatgcattttatcttacttttatactctgcaggacatctggtaaagtgatagatgcccaaaagatgcccattaacttctttttgaattaaataaactataattcttgattctagatgggtccaaaaatagatctttttattacttattctaaaatttattatacatctttgtacctatataaatatcgattgtatccagaagagctatatactatttactttcattcaatgcaatatatattgatttagagagtggttatataataactttgctagccgatatataagatataagggtaaacaaggaacacagtctttttcaacaactgtccagaaagtcattttcacttaagtaattctgagaccaagattatagcttctaatgcaactgctttaaaaatagggatatatacctaaaaaattatattggcacttgtaacaaagccatcaatacttctctaaaaataaagaagcaagagcatgaataaagaagagaatatgtcagagtgagttttctttttgtagatgttacttctattgtcgtataatgagaaaatatactactgtgaaaacagcataattatttattttaagttcctgctaatgcatttagaatgtctatatttattaaaatgctagatattactaggattttagactttaaaataactttaattaattaatatgaaataactgtgtatagtatcaatggaattaattgtatggagagataaaagtttaataaaagttttatttgtttaatccagggtttcccaactgggcactattgacactttgggctggataattctttattgtcggggactgtcatgaactttggaggatgtttagcaccattccactacccactagatgccagatgcacaccccacagttataacaaccaaatatttcttcagacattgtcaartgttgcctgtggggcaaatttggcttcaattgaaaattattggtttagtcaaaagaaaaagaaataatatactcactcatacacacacatacttaattatctgtttctgattataaaatcaggatacatttccatggaaaatttgggaaagatgaaaaatagtggtgaaacaaattattccagaatcccgtaacacagaaaactgctgttaacaacttcaagaatttattccagtcatttgtttatttatcttccaagcttatgtatgtatgtgtgtgtgtgtgtgtgtgtatgtatgtatgtatatattcatttatgtatctacccatctgttcagataggtaactacctatataactaattcaaagaactggattgctaccaaccaaaaattagaatttaggattactcttgcaactctgtccagatgccaatcaaccatggagagtctgttttccaatttctgcagtgttttctgtctttgtttcttacttttcactttggtttccattctgaggctggaaccatttttcgagcatctgctctcttgaaagaagccccaattttctctttagctttttctaatagtattttattccctgcagttccacccttactcagagattcttaatccaattcaagtaatccacctcaaactgatgcaccagtgtccaccccaaagacactggtggcccaccaattcaggtga

SEQ ID NO: 36337 - DNA, 1752 bp, Homo sapiens
actagtcactcattttggcccacaaccatgtgctgttttgctctggaattaaatggttttctcaagatatgttctatctcttggttggattgcaaattcttcatggctagggaatgcattttatcttacttttatactctgcaggacatctggtaaagtgatagatgcccaaaagatgcccattaacttctttttgaattaaataaactataattcttgattctagatgggtccaaaaatagatctttttattacttattctaaaatttattatacatctttgtacctatataaatatcgattgtatccagaagagctatatactatttactttcattcaatgcaatatatattgatttagagagtggttatataataactttgctagccgatatataagatataagggtaaacaaggaacacagtctttttcaacaactgtccagaaagtcattttcacttaagtaattctgagaccaagattatagcttctaatgcaactgctttaaaaatagggatatatacctaaaaaattatattggcacttgtaacaaagccatcaatacttctctaaaaataaagaagcaagagcatgaataaagaagagaatatgtcagagtgagttttctttttgtagatgttacttctattgtcgtataatgagaaaatatactactgtgaaaacagcataattatttattttaagttcctgctaatgcatttagaatgtctatatttattaaaatgctagatattactaggattttagactttaaaataactttaattaattaatatgaaataactgtgtatagtatcaatggaattaattgtatggagagataaaagtttaataaaagttttatttgtttaatccagggtttcccaactgggcactattgacactttgggctggataattctttattgtcggggactgtcatgaactttggaggatgtttagcaccattccactacccactagatgccagatgcacaccccacagttataacaaccaaatatttcttcagacattgtcaaatgttgcctgtggggcaaatttggcttcaattgaaaattattggtttagtcaaaagaaaaagaaataatatactcactcatacacacacatacttaattatctgtttctgattataaaatcaggatacatttccatggaaaatttgggaaagatgaaaaatagtggtgaaacaaattattccagaatcccgtaacacagaaaactgctgttaacaacttcaagaatttattccagtcatttgtttatttatcttccaagcttatgtatgtatgtgtgtgtgtgtgtgtgtgtatgtatgtatgtatatattcatttatgtatctacccatctgttcagataggtaactacctatataactaattcaaagaactggattgctaccaaccaaaaattagaatttaggattactcttgcaactctgtccagatgccaatcaaccatggagagtctgttttccaatttctgcagtgttttctgtctttgtttcttacttttcactttggtttccattstgaggctggaaccatttttcgagcatctgctctcttgaaagaagccccaattttctctttagctttttctaatagtattttattccctgcagttccacccttactcagagattcttaatccaattcaagtaatccacctcaaactgatgcaccagtgtccaccccaaagacactggtggcccaccaattcaggtga

SEQ ID NO: 36338 - DNA, 626 bp, Homo sapiens
gttccttgcactctggtcttcagctagctttggtcaaagggaagcactaacaggaggcttggagagcaaggggataaaaaaatgcaagagtatttcttttcccttctttttcaggcagtgcatcctacaaatggctgcatctcctctagataagccacctgtcttctgtaygtaagccactatgtaaacctaccactccccacccaagggcagctcttgggctctggtgacactctctcactttctccctcaagcactaaagttttagcaatttcctgtttgtttctaatctctatgctgcttcttccaactcctttattactatttctttacatcacaagtcttcttttgagtcacctactgtggattctttttccatataggaccttgtgtaacacagtacaatgaagttggaggaaaggagtaaaggatgatgtccaggttttgagccttggcaaccccatggtcagtgatgacattgactgaattggtaaagacttaatgaggaatagtcatggaaagggctctgaggatggcaggaaccaataattttattttgcacatgttaaatttgagatgaccggtagagtagacatctacattctgatgtcaagtaggcatttaaa

SEQ ID NO: 36339 - DNA, 626 bp, Homo sapiens
gttccttgcactctggtcttcagctagctttggtcaaagggaagcactaacaggaggcttggagagcaaggggataaaaaaatgcaagagtatttcttttcccttctttttcaggcagtgcatcctacaaatggctgcatctcctctagataagccacctgtcttctgtatgtaagccactatgtaaacctaccactccccacccaagggcagctcttgggstctggtgacactctctcactttctccctcaagcactaaagttttagcaatttcctgtttgtttctaatctctatgctgcttcttccaactcctttattactatttctttacatcacaagtcttcttttgagtcacctactgtggattctttttccatataggaccttgtgtaacacagtacaatgaagttggaggaaaggagtaaaggatgatgtccaggttttgagccttggcaaccccatggtcagtgatgacattgactgaattggtaaagacttaatgaggaatagtcatggaaagggctctgaggatggcaggaaccaataattttattttgcacatgttaaatttgagatgaccggtagagtagacatctacattctgatgtcaagtaggcatttaaa

SEQ ID NO: 36340 - DNA, 627 bp, Homo sapiens
aatcctgtagtttcacagcacatacctatatgacagcaatgtaattattttcattgaatgaacaatggttaagatcataataaaatggactgtggaagcatagcaggattcataaggaagtccagcttcggtcctagagaaagttaggatgcttgtctaagatcagtacgacttcagcgactgggagaaaaaggggtgtggaagttaacctgtggaccctgcagtcacaaggccaagttcaaakctgatttctaccacttattagcaagtgtggacgttactaaacctcatggcaccttaagactgctcatttacagaatggacagtaatcatgatgttctttaaaaatggtaagatagccgggtgtggtggcacgtgcctgggagtcccagctactcaggaggctaaggcaggagaatcttgaacccaggagaggaggttgcagtgagccgagatgcatcgctgcattccacactccagcgctggcaacagagtgagactccctccaccccctccccccctccaaaaaaaaaaaaggtaagataacctatgtagagactctgggttaaaataaactcacagtacatgttagctactactactattattaattctaaaaatgccagc

SEQ ID NO: 36341 - DNA, 549 bp, Homo sapiens
  misc_feature (1)...(549): n = A,T,C or G
tatatgaaatgcttacaaacattaaatagctttgttttcaaaaatcaattttataacttggcaattggttctacagctgataagcgctgctgttctaaaaaaagaaagtcaagtactaccaatttgaccgttataaatctgttcataacaagatttctagagatttgacackagtttttaatgccagaaacttaactatttcattaggaaatgagttgtgaatagtaataatacaaataaaaatgaataactgaccatcattaatataaaataatgttaagaaaagtatttagactttttaccatttaaaagtaaggaaagtctgaatcacttagtgctgattccaggtgacatcctgccccattctgagcacttcacatgctgtcaggtgtattacatgtccgggcatccagcgataatgatgtgctgcacgagtctttaaagaaatctgtgaaattaaaaaacaatgtgacaagggatatatggacacatagtattcacacactcagaaaatatgttggtgaactaatcctacatattngctttttt

SEQ ID NO: 36342 - DNA, 1208 bp, Homo sapiens
atgatgaaggtcaggtgttttgttgaaaatgacaggcggctatctccccaggtgagatagcaaccttcctttctcactccccacccttcttgctggtggtctgatatttttatagggaatatttgggaattccagtgagcaaggacagtcaagtaagtgttgacagcgtgctaaaaaaaacctagcaaagctggaatggaatcaagaaagggcaatcttccaaactcagcttttctgctttttaattttgagtaatcctcccaaggaaaacagcaatttgcaaaccctttaatactgtcactccaaaggcaacacacggatgcttcccaattttcaaaataagaatggttctaggtatactatttatccttcagaagtataatactttctttcctgtatacagctaaggttttaaagaaaagataaggcaggctgaggaaatcaccttctgaagtcaattagagttggggtgcagtttgagtggtggtatgtgtgtgtgtgaggggagagggagaatgttgagaaactagtgggcataaagcaaaacagtggacagataggttttgttccctgaccaagtgtacgtttgcctttggttagacctagcctgaagctttctgaacaagtcatgtggaaagtcaggcgcatctgtcaacaggaagaacctgggcatgtctggcttctaaccatagatctgcagtgatcatgtttatcatacagtttctcctagaattcaggggctacttcagaggctaaaaggtagttgaaaaaatgttgctggtrgccgagatggtgggattctaaggcattccaatcacctgtggggtcaacagagtagaattttttctctgtacacattttcaaatgtgcaaatatatttcaattcctcatacatgtgatgttaccatcaaaaaggtaggatcaaaagatcctagagggaggattcttcaggcagatggcttacccactgaatccaaagcaagagcatagacctccaaaacaaatctgattatttttatttggcccttgacttttaggcagtggttctcaaagctgggtcctgagaccagcagcatcagcatcactgggaacttgttagaaatgcagacttttttttttcttgagacagggtctcactccgttgcccaggctggagtgtagtggtaagatcaattagctcactgcaaccttgaactccagggctcaat

SEQ ID NO: 36343 - DNA, 634 bp, Homo sapiens
ctccactgggccgggcgyggtggctcacgcctgtaatcccagcactttgggaggccgaggcggacagatcacaagatgaggagatcgagaccatcctggctaacacggtgaaaccccgtctctactaaaaaaaatacaaaaaaataagccgggcgtggtggcgggcgcctgtagtcccagctactcgggagactgaggcaggagaatggcctgaacccgggaggcggagcttgcagtgagccaagatcgcatcaccgcactccagcctgggggtcatagcgagactcggtctcagaaaaaaaaaaaaaagaaaaaaagaaaagaaaagcctccgctggacagtgtccatcatggaagacattcattgtgcctggttcagtgccctgcacgtgaattggagcctggatctgtaatgagtttagtgcgtttgtgaaactgtgtggtgtgccatcatttaggcagtagctgtgccccatttaaagtttagaaaaatcaagctttttaaaaaccaataattttaggtaatgttagggacgaaggaagggatgttcttcttaagtggaagaccttttggaataccgtaaacctctcctaatttgttttgttattttggatttttcttgagaggctgcac

SEQ ID NO: 36344 - DNA, 634 bp, Homo sapiens
ctccactgggccgggcgtggtggctcacgcctgtaatcccagcactttgggaggccgaggcggacagatcacaagatgaggagatcgagaccatcctggctaacacggtgaaaccccgtctctactaaaaaaaatacaaaaaaataagccgggcgtggtggcgggcgcctgtagtcccagctactcgggagactgaggcaggagaatggcctgaacccgggaggcggagcttgcagtgagccaagatcgcatcaccgcactccagcctgggggtcatagcgagactcggtctcagaaaaaaaaraaaaagaaaaaaagaaaagaaaagcctccgctggacagtgtccatcatggaagacattcattgtgcctggttcagtgccctgcacgtgaattggagcctggatctgtaatgagtttagtgcgtttgtgaaactgtgtggtgtgccatcatttaggcagtagctgtgccccatttaaagtttagaaaaatcaagctttttaaaaaccaataattttaggtaatgttagggacgaaggaagggatgttcttcttaagtggaagaccttttggaataccgtaaacctctcctaatttgttttgttattttggatttttcttgagaggctgcac

SEQ ID NO: 36345 - DNA, 467 bp, Homo sapiens
tgaggacagcctgagtggggacacagaggccagaacagaacagagtggactgaggagcaaagggagtaccaagcaggcrgtctgtggggttcctggatgcagctggattggtttgctgctcaaagaaaatcccagctcagacctactctaggacagaagaggccttcatgaaagatgcctggctgcaggtgtccaggtgtgggaaggtgagtgggaggaggcagtgactgagcagcacttccccaaatccaggagggaagccaacaccgaagcccaggcttccatttatagagtttccacaagtggacccggactactccaccctgttcacaaagcaacctcgcctgaacctttgacaccagaggctgagtcaggcccagatggcaaacacactttaagccctaatcagactttgcatgggtttactcagcccatgcctgcttctctgcccctaccatgtcctccta

SEQ ID NO: 36346 - DNA, 549 bp, Homo sapiens
aataaataccaataaagacatcaaaaaaatcatcactagtaatcaaggaagtaaaattaaagcaacaattttgcttatcaggttggcaaataatgaaataataaaaggaatgataatacccagtgttgacaaaggtgtgtggaaatcaacacatacaatgcttgtgggagtttaaattgggacactctttcaggacaagttggcaacaataacagaaataataataacaataatagctaagagttttgagttaactgtgggccaggtgatgatccaagtacttaccatgtattaaggcacacgcacctcatagcaattcaataaaggaggtactgttagccacattcactggaagaaaccattgtcctaagaaacccctcaaggccattcagctagcaggtggcagacttgggatccaattctaagtggtctgagtctatgtcttacatgtgcataaaacrtgataggtgtactgtcatgctaggaatttagcaaaagaaaacagttggcaatgtttacaaacttaggtgtacgaagacacttattgca

SEQ ID NO: 36347 - DNA, 553 bp, Homo sapiens
tggtcccatctccctggcacagatagtgaagtctctttttttgcccaggtatggttccataagcacagttttccctaccaaataatacaacaaagcaaacacatcaaccagtgaaattagtggatgtctaacattacccaaagaccacaattcccctcttgagctctgcccaatgcttctgccctcccctcccatgccccccgaatccccagccctgtactccagctatcagtatctacgtctgtcctttggccatgtactaaggacttgttcagaccttcttctttggtttaccaatttcctyttacactcaactttaatcctccattgaaattggagcgacctacagcttcaggtatccagcatcctcctgaatacatgagacaagtgacagtcaagccatgtcccatgagaggaccaggaattggcttccactctacttcacctctcaccttccagggtctatcaacactccctgactgaaaaaactatccttaaattataactctcatgctcagaagaccaggtctacttctccagactgtcccattta

SEQ ID NO: 36348 - DNA, 606 bp, Homo sapiens
cagatcgaaagtgtctggtacaaactggacacagaaggtgytcaagcaatgatatttgtggtcattgccaagctcacagaggctgaattgaacccatgtctcctaaccacaagctaagtgcatattcttggcaccgcctgcctttgaaccaaatgcaaaaactgagacaggacttggaacagtctctacatcgggttatcattgctgcatccccagagcccttctatcaatccaaagggacaagggaccaacatctgagtcaactttaaaaataatatagcccacagaagtgaatggctgtcagcctgtggcccactgggactgggagatctttctcatgttgagctgaatcccagcctgcatcagtgttctcccagcttggtatccgggcatccatgctcacctcccaaatcttggaccatggggacagggaaaacttgctgatgacaaggatgagaagacccctcctccacccaggtctttgggaaagttaatccagcttctaggccaggccattctgggtaatggatgcctctttttaatgctctctgggaggtgggtcccgccttcatctgctacagtgtcattaagacagaaaacattagc

SEQ ID NO: 36349 - DNA, 1064 bp, Homo sapiens
atctgcacctagcacaggttacttctcttktcttagctttgaaccagatgcactgatggaaggagagagacctgcccagcatttgatcatcaagcctacgcccagagccacttaggcagctaatcgctgagccatgagcggccggaggtgggcacaacccaaagcctctcaagcacccccagggtgcccaccagggacaagatgcagcctctgcactagggacccccacatgggggggcgacagtcctgggtccacatgacccttacttgctcctgcctctggtgagtctcctgtcctgacacctctaagcctccacatccatctctatgaaatgggatcgtattcctgcagccgggtcagctgagttggaggagagttgctgactcctcttcagtggtgaaaggaaatgaagaaaagaaatttgtctcatcctggggaaggccccaaacctcatccccaggaggtctgcctgcctggcattttacaaggcagtgggcctcttggaggcagggagccgagatcaaaagtacatcagacattgcaccagacaaggtgacttgccccccaccccccttggattggcaaggtgttctttccagaataactgccaagatccccctccccagttctctctttgccactattgtggctctggagaaaagattagaaaggcagtgctaatttaatttgccagaatgaataaagataagacagtgactcagggtgatgaagtgctgggagcccataattcacatgcctgatagcccacgttggagctgattcagccaggacagcctcggtttactgtctctgtcgctgaggaaggctggcttccccgcctaggcagtgggtgtgagaggcttataaatgggcaaatgagtttaaggggaggaaggagcggagatctgtgggtccttctagtgcccatggctgccaccaggatgtggggagggagcactcagatcattcattcatgatcacgcagcactcattcactcattcatgatcattttaccaagcagccccctgggcctggagtggggcataagtggagggtgttttg

SEQ ID NO: 36350 - DNA, 758 bp, Homo sapiens
aggtgggaaggtgccttccactgggagagggtggactttgctacgaaatggctgagaacaggtagatgggctgttccatagaaggaagagaaggatgtgtgtgcctcatggcctctacttcccaacaggaagaaagtcagaccatttgctgggagcaaatgctgactggtgactggacaggggccatgaagagggcttaggcctgaagcagcatttgaagtgtagggcagtgggtatggaccacaggaaggtcaggggagggatggacagtgctggtgccagactcagcatacagcttggcagcattgtggtcattacgggcagcccctccacatctcaggatcagagtagtggaagtaaacggtcactttggtcctttgctgagyttggcaggacatgggtggcacaaagaggacaccagccagtgtgcgtgccatggtcctggggcagaacctcaccggctccccatctcctcccctcctacatttggtcctgggaaaagtagagagtaggaagcatggaaaagatcccactgggtgttagggggctgggtcttaaaatagccctgcagctctcttgctgaataaccttggataagtcactttccctttctgggcctgtttccatacccattcattggaataatgataagacctacccagccaattacacaaggggttcccgtgaaagttacataaaataactaaggtgtttgtggatggagaggtcctttggaggctggttcgagcagggcagag

SEQ ID NO: 36351 - DNA, 575 bp, Homo sapiens
gcggtgagctatgatctcaccactgcactccagcttgggggacagggcaagtctgtctcaaaaaaataaaagaaattgaatacattgatattttgccaggaccctgccttctacaggcatctagtctaatgggactgggagtaatcaaggcagatgacctaatcccagtgtccaggatgtaactagagagctacgggcatgcagaagttggaagatgagggaaggcatcacagaggctgtggggtgaactgacttcaaggaatgggtccttcccttcagagccacatgtgtgcgggacacccagacagaaaacacaaacacaaagtcgagtggagggcatttggaaggagcagtgaagccgagccaggaaataccaagatggcgagccagtgtgcttgtagagattgtagagagggtagaattgacactgtggaccctggcctcgatagagaaaggcatcagctaaggaagttgttcaggtgggcagtgaggttgtcgtgctttggaaagatgttcaggctgcactaggaagccccctggcttggggagagactccaggagaccccagcrgggag

SEQ ID NO: 36352 - DNA, 587 bp, Homo sapiens
tttgtcaagatagggtctcaccatattgcccaagttggtctcaaactcctgggctcacgcattcctcttgtctcagcctcctaaagtgctgagattacaggcatgagccaccacgcctgactgaatttttaaagatttagagagggctgtcagctgggcgcagtggctcatgcctctaatcccagcactttgggaggccaaggtgggaggatcacataaggtckggagtttggccaacatggggaaaccccgtctccactaaaaatacaaaaattagccaggcgtggtggcatgcgcctgtaatcccagctactggggaggctgagagaggagaatctcctcaatccagggggcagaggttgcagtgagccgagatcgtgccattgcactccagcctgggcaacagagtgagactctgtctttaaaataaaataaaataaaataaaatagggctctctcctctctggcagtatccccactccccacaacatacacagtagggcagtttgccacttgcgttcttgcataaaggtccacagcctaaggggcagtggcaggagcagcggcaggaaatattcctggcaggg

SEQ ID NO: 36353 - DNA, 1256 bp, Homo sapiens
tggttgatatttatgatcaactagtttgacgttgggaagaagctacagaaccaaagggatagcctataattactactggttttctttctctccctttctttctttcttctttctttcattctttactttctttctttctttctttctttctttctttctttctttcctttcttttctttctttcgttccatctttctctttctttctttggttccttttctttccctttctctctctttttttcttttgtttctttctttctttttctttctttctttctctttttttgagacggagtcttgttctttcaccaagctggagtgcagtggctagatctctgctcactgcaacctccgcttcccagattcaagcgattctcttgcctcagcctcccgagcagctgggactacaggcaaacgccaccacacccagctaatttttgtatttttagtagagacagggtttcaccatgttggccaggatggtctcgatctcttgacctcgtgatccgcccacctcagtctcccaaagtgttgggattacaggcatgagccaccgcgcccggcctactactggttttcttaaagtattcatttgctcttaatgaaactgcaaaaggttttcatttttagttctgcaatctgtgtctttttgaaacatctcagatttatatcccaggaattcaacttttgtgatacctcactgaattccaatttgcaggccatacatattgccttctgttctttatccctttgaaaaggtatgttttttccctcgactatgatgataactgtctccttccatcttttttgtcaactcctgtaactttttctctggttataattctgctgttatggcctgacactgaaacgtttattttcaaggtctagaaaaggcaatgttttcctccagtatcacttgattctgtactcttggcttttcttggtatgtctgaattgttcaatgtaatcgggaaacttaccatgctgttattaagagccatgtattccctgagcaaggtacttgttttcttgtttacattcctctataatatggtatacactcataacactggacacactcttcctgtgtctggttaaagtacccttttcatcaggtttgacttccaggttatctaaatgggcctttagcattcatatttctagcaggaaccttamaactttcaatctctacttacctattacccagttccaaagccatttccacatgtttagatattatcacagcagtaccac

SEQ ID NO: 36354 - DNA, 1258 bp, Homo sapiens
tgcattcatccatgcaccaacatggatgaatctgaaaagtgtttagattagcaaaagaagatagatacaaaataagttcatattgtataattccatttatataaaactgcacaataagagaactaatgtaaagtgagagaatagtgattgcttggggctgagatgaaggatttgtatcaaaagggcagagaagagcttgttagggtaattgaaaygttctgtatcatgatgtggaggtgtttacatgggtgtataagcttttgagaacttatcaaattatacacaaatatgtacattttattatatggaaattatatctcattaaagttgatacaaaacaagaatccagaactctattttgacatctggtggacatcgctccaatcatgattccatgtctctctgcatatacagaaagaaagttaaatttgtatagctagagaactgcttagattaggttgaaagataaaattttatgagaatatcatatatgttttaaaagcaagttttagctatatttactaataaaaagaaaggaaactgatgaagctaaagaagttcaggaaaatatttctcataaagattagtttccaagaaactacattactacatatcctcaccctgtgagggcacaaaacgccctgacaaacctcatttcagtttttccttcttggagattagtctgttattcttaaatcaggggcttatcagggtctctgtgtttcttcccagggaaagagtgggcatctagaatgtgggaggtaatacataatacctccaaatctccagggcgtatttatttcttcagacatcatgcttactgccccccacttttttttttttttagaaagaaagaacaaaaaagagaaggagagtaaattcttgtttccaagttagacaagagagttatgattaaatgccaccttgggtccacaagtcttccataagaaaaacaatgaaaggatttctggatgattctattatgacatcacaacttgcagcagaggcagatgtaatgaggcaatacttgacattgttttcagggcatttggtaggttcaatgggaaacaaaactcttaaaacccctatctgctggctggtgcttaaagtttctatctcaattgtcttagtccatttagtgttgctataaaggaatagctggggctgggtaatttgtaaagaaaagaggtttatttggctcatggttctgcaggctgtacaggaatcatggtgccagcatttgcatccgatgatggca

SEQ ID NO: 36355 - DNA, 550 bp, Homo sapiens
cagggacaggggtgagtccgcgtccctggcacggagcggggggtgcataacacgccccgggacagttacgggcgctagccacgtcggcgatggccaaataataaactaacagtaatattatagtaayagcatccgaaggatgagatcaggattagggcgatggcccccgcgcgttgcctgcggagcgaggcgcactgagtcgcccaggaatccggcctctcggcgactgtgcgggagagtttatggggatgggcggggctgcttctgagcaggagtcgccgcccccacccccaccgttccgcctctgggcccgcaggctcctcccgggagcgctttcccctcctgttcaaccgccggggtacaggtggcttcgtccaccgaggtcccctcacccacgctgaggcgtcggaagctgcggacactgctcgcttcagggctttgctcagctgcagctggtgacctccagagagggagtctctgatgtcccgctggggtggatgtcctgagaccgggaagggggaagagacccactgaaatcctatctcccagc

SEQ ID NO: 36356 - DNA, 550 bp, Homo sapiens
cagggacaggggtgagtccgcgtccctggcacggagcggggggtgcataacacgccccgggacagttacgggcgctagccacgtcggcgatggccaaataataaactaacagtaatattatagtaacagcatccgaaggatgagatcaggattagggcgatggcccccgcgcgttgcctgcsgagcgaggcgcactgagtcgcccaggaatccggcctctcggcgactgtgcgggagagtttatggggatgggcggggctgcttctgagcaggagtcgccgcccccacccccaccgttccgcctctgggcccgcaggctcctcccgggagcgctttcccctcctgttcaaccgccggggtacaggtggcttcgtccaccgaggtcccctcacccacgctgaggcgtcggaagctgcggacactgctcgcttcagggctttgctcagctgcagctggtgacctccagagagggagtctctgatgtcccgctggggtggatgtcctgagaccgggaagggggaagagacccactgaaatcctatctcccagc

SEQ ID NO: 36357 - DNA, 884 bp, Homo sapiens
aactgccttggataaaaagattccagtcctatagttcccgaaaaaaaaaattctgttttggtcccaagtccattcattttatttataaaagaggaagccatatgaaatacacaggtactatttcrtttaagaagcttcgagtttatatggagataaagtattgcaaggaatttgcttaaagatcactgattaacgcaaatcatctcttgtttgccaagacaaatatacatttgaaaatgaataattaaaaggaaccatttttaaaatattttattaaatagtcctggtcaaattgcttagagagaccacaggtcacctataggaattccccaccttctggactatggaagtgccctctaacaggaataagactttaacaagtgaggactcacttaaaaatttaaaccaccaagactcccgtggaatgttgggatttcttactcatcaaagctctcttggtgacaatgacagaaacagaactcagacaagttgggagagaggagaggatgcttgatggataaaattggcaagttacagggggtgggtggggacaacaggatctgagaacttgatgtagccaggccccttccatgctcgctgctacctaagtcgattttgttccctcacttgagcttctttatgagggcaggaccatgtgttctggaagcttctgggctcatattccagctccacaacaagagagaaaagatttgctttaactctccctgctttgatgtgacttagattcgactttgccacatgaccaggtccagacctgtcacatgaccagaagaatggggcactgtgattgactcagcctcagttccacaaagccacattccagaaggcgatggtatgtggggtggaggaaggtctgcaccacc

SEQ ID NO: 36358 - DNA, 884 bp, Homo sapiens
aactgccttggataaaaagattccagtcctatagttcccgaaaaaaaaaattctgttttggtcccaagtccattcattttatttataaaagaggaagccatatgaaatacacaggtactatttcatttaagaagcttygagtttatatggagataaagtattgcaaggaatttgcttaaagatcactgattaacgcaaatcatctcttgtttgccaagacaaatatacatttgaaaatgaataattaaaaggaaccatttttaaaatattttattaaatagtcctggtcaaattgcttagagagaccacaggtcacctataggaattccccaccttctggactatggaagtgccctctaacaggaataagactttaacaagtgaggactcacttaaaaatttaaaccaccaagactcccgtggaatgttgggatttcttactcatcaaagctctcttggtgacaatgacagaaacagaactcagacaagttgggagagaggagaggatgcttgatggataaaattggcaagttacagggggtgggtggggacaacaggatctgagaacttgatgtagccaggccccttccatgctcgctgctacctaagtcgattttgttccctcacttgagcttctttatgagggcaggaccatgtgttctggaagcttctgggctcatattccagctccacaacaagagagaaaagatttgctttaactctccctgctttgatgtgacttagattcgactttgccacatgaccaggtccagacctgtcacatgaccagaagaatggggcactgtgattgactcagcctcagttccacaaagccacattccagaaggcgatggtatgtggggtggaggaaggtctgcaccacc

SEQ ID NO: 36359 - DNA, 884 bp, Homo sapiens
aactgccttggataaaaagattccagtcctatagttcccgaaaaaaaaaattctgttttggtcccaagtccattcattttatttataaaagaggaagccatatgaaatacacaggtactatttcatttaagaagcttcgagtttatatggagataaagtattgcaaggaatttgcttaaagatcactgattaaygcaaatcatctcttgtttgccaagacaaatatacatttgaaaatgaataattaaaaggaaccatttttaaaatattttattaaatagtcctggtcaaattgcttagagagaccacaggtcacctataggaattccccaccttctggactatggaagtgccctctaacaggaataagactttaacaagtgaggactcacttaaaaatttaaaccaccaagactcccgtggaatgttgggatttcttactcatcaaagctctcttggtgacaatgacagaaacagaactcagacaagttgggagagaggagaggatgcttgatggataaaattggcaagttacagggggtgggtggggacaacaggatctgagaacttgatgtagccaggccccttccatgctcgctgctacctaagtcgattttgttccctcacttgagcttctttatgagggcaggaccatgtgttctggaagcttctgggctcatattccagctccacaacaagagagaaaagatttgctttaactctccctgctttgatgtgacttagattcgactttgccacatgaccaggtccagacctgtcacatgaccagaagaatggggcactgtgattgactcagcctcagttccacaaagccacattccagaaggcgatggtatgtggggtggaggaaggtctgcaccacc

SEQ ID NO: 36360 - DNA, 884 bp, Homo sapiens
aactgccttggataaaaagattccagtcctatagttcccgaaaaaaaaaattctgttttggtcccaagtccattcattttatttataaaagaggaagccatatgaaatacacaggtactatttcatttaagaagcttcgagtttatatggagataaagtattgcaaggaatttgcttaaagatcactgattaacgcaaatcatctcttgtttgccaagacamatatacatttgaaaatgaataattaaaaggaaccatttttaaaatattttattaaatagtcctggtcaaattgcttagagagaccacaggtcacctataggaattccccaccttctggactatggaagtgccctctaacaggaataagactttaacaagtgaggactcacttaaaaatttaaaccaccaagactcccgtggaatgttgggatttcttactcatcaaagctctcttggtgacaatgacagaaacagaactcagacaagttgggagagaggagaggatgcttgatggataaaattggcaagttacagggggtgggtggggacaacaggatctgagaacttgatgtagccaggccccttccatgctcgctgctacctaagtcgattttgttccctcacttgagcttctttatgagggcaggaccatgtgttctggaagcttctgggctcatattccagctccacaacaagagagaaaagatttgctttaactctccctgctttgatgtgacttagattcgactttgccacatgaccaggtccagacctgtcacatgaccagaagaatggggcactgtgattgactcagcctcagttccacaaagccacattccagaaggcgatggtatgtggggtggaggaaggtctgcaccacc

SEQ ID NO: 36361 - DNA, 457 bp, Homo sapiens
tataatcccagtatttcgggaggccaagccgggaggactacttgaacccacgggtttcagatcagcctgggcaacacagtgggaccccgtctctacaaaaaaaaaaaattagctaggtgtggtggcacatgcttgtagtcccagctacttgggaggctgagcgggaggattgcttgagcccaggaggttgaggctgcactgaaccatgatcatgccactgcactccagcccgggcaacaggttgagatcgtgcctccagaaaacaaaaaaaaaatgctacccgattagcatcccaaaatgattttagtttatayagaggagagccacagagaactatgattagtacattatctataactgtgaaatattagcaacatcagggaaatgattaagtaaattctgggtacaccaacttaaggattttaggagacaaaaaaaaagagttgattcatgctct

SEQ ID NO: 36362 - DNA, 643 bp, Homo sapiens
acagagtttcaccatgttggccaggctggtttcaaactcctgacctcaagtgatccatcctcctctgcctcccaaagtgctgggattccagctgtgagccactgtgtccggccttatatttatttttaatggcaaaaatatattgatacatgctcgttataaaatatttataattcagacttatatggagtaaaaaatttaaagtcttcccacrccacaagtactctctagacaagtgcatccctccttagaatagggaagagagttctgtaacatgtctttacgaaagtttatgtagtgaatcacttatgtttaagttgtttccattcttctgccatcacaaaaaaatgctgcagtgaacatccttctacatatgacattgcatgcttgtgaaagtctgtctataaggtgaattcctagaaatggaaatgttagataaaaggcatgaatatgcatttaaaatttacatgatttagaggctgggtgaggtggctcacacctgtaatctcagcaccttaggaggccaaggtgggaggattgcttgagcccaggagttcaagaccaccctgggcaacgcaggcgaaaccccatctttaccaaaaatgcgaagattagccggatgtggtggcctgtgcctgttgtc

SEQ ID NO: 36363 - DNA, 558 bp, Homo sapiens
agtgaagattgcaccattgcactccagcctgggcaacaggagtgaaactctgtctcaaaaaatcaaaataaaacaacaaaaaaaggatattacaaaggatatagatgaagggatgtatagagcaaggtatgggagaagggggaggttctcgcggggaatctccacatgttcagctccccggaagctctctgaacccagtccttttgagttcttatggagacttcattacacaggtgtgactgattaaatcattggccattgataatcaactcaatcttcagcccttctcctctccccaaaggttgggaggtgcagctgataagcctgmcttaatctttctgtggagccacttctaccgctgatgctacctagaggctgtcagccatcagtcaagttattagcatataaaaagacacacatcactttgaagattccaagcattttaggagttgtatgccaggaaacctgcaaagaccaaatatatatttcacagtatcacagaagcatatcaaaatttaaagtgaaattcttccccttccacattctttcttagagtca

SEQ ID NO: 36364 - DNA, 1201 bp, Homo sapiens
cattgtgttcatccatgaattttttagaggtctacgtagctcagatttagaaactccagagttgggtgaagataacactagtatgtttgtacgcagtgtggacatagccatgctatttttttttttttttttgagacagggtctcactctgtcatccaggttggaatgcagtggcatgatttcggctcactgcaacctccgtctcccaggttcaagtgattcttctgcctcagcctccctagtagctgggactacaggcatgcatcaccatgcccagctagtttttgtttttggtagagacggctttcaccatgttggccaggctggtcttgaactcctggcctcaagctatctatctgccttggcctagtgatgctatttcttaaaggagatgcttcttggaaattygtttaaaactttagataatttttaatgcatcacagaactcattcttaatggcttcttaaaaattgttgataagtgccaccttatttatctgcttaaatttacatttggttaaataagaatttgtaatctttagctcccaggcttgaatggaacatggtgtggacacatgcagatacttttaaatggaatacctttcccatttccatttttcgctttcttcgtcagtcagcctcataggccaaaaccacttgaatacaattgataaccagttaacaaactaatggaccttgcattttgctgttttcagtctgaaccctcttttgtctaattttttgctatttctttagcttcttttcccctgcctatatattttttgttctagttacctgtttttttctaaaatcttaagttcctacccctctctctgaattttgctcatccttcagaaagttgagatgaatgctcatctttctctgtgaagccctccttttcatccaactgaaccagcaatgtgtggaaagaaatacaaggtaccccacagcctggggaccatcaagaacaacacctatgtaataacttcagcaggagatgaaagggaaaagagcaaatttgttgaacccccactctatatcacgtggaggaaacaggtgtaaagtggttaagtgaccagaacgagggaacgacagagctttctgcatggcttccaagtggctgctccaccatgtcccctgctgtctctgcaagtaatgtgtgtgtgcacttgtgcacttgagatgccccatcaggtcaatct

SEQ ID NO: 36365 - DNA, 586 bp, Homo sapiens
agacatgaaggcaataaggagacttttctcctgaaaggctgcccatggctccccatgggtgtctcacacaggcgagaccaactcaattgacaccccagaaactctctttcccacaatctggaaaaactcaatcctaattaaactctatgatctgacctttgtacctgctctgaccagctgcatgtttctagagcaaatcacacaaccttattggctgatttcactttaaattagttacagtaaaccctaaacaggcactcaaaagtacccaacaatcccccaggaggcatgagtgcacatacacatacctgcacaaatacatgtaattcatagatagatagatcgataggaaatgaagaaataaaagaaaaggagatgtcagggaaactcctgctttttctggcatataggcccagatgtcttatgaggaacacacaaggcaagttgggtcgaggcaaggtggatgaattcagttttgtacattttgcaattaaagcgaytttgtgacatgttagaggagatgttaagtatgaatttattacatagatttaaaatttagagtagaactctgagtgaaaaaccctga

SEQ ID NO: 36366 - DNA, 525 bp, Homo sapiens
gcagatttgctttggaggcagaagcgttatagagctcagaaacagttccctggtatggtgtatgtagggagagacaaacagtttgcaagtgctgggggtaccaagcatacggacagcagygtgaggagatgagaaagggagacgagggactggtgttgaagttcaaattagccacgtaagttgggtagtttcttttctggtgtttgttctgtcttctaaacactagaatggaaactatgatttccctcagtctatttcacaggttattaggataatttatgagatattgtccagcaccctcatcaacccagtttgcaggtacaagtctgctccggctacttgagtcgggaatatacacacgtctctctgagcgcacactggccagagccgcattcccaagtctgtttcatgtggggtgcagccccagtccacagcagttttcagactgttttcctgcaggttctatgttcattcagcaagtatttcatacgtgcctactatctgccaggcagagctaaatgctga

SEQ ID NO: 36367 - DNA, 525 bp, Homo sapiens
gcagatttgctttggaggcagaagcgttatagagctcagaaacagttccctggtatggtgtatgtagggagagacaaacagtttgcaagtgctgggggtaccaagcatacggacagcagtgtgaggagatgagaaagggagacgagggactggtgttgaagttcaaattagccacgtaagttgggtagtttcttttctggtgtttgttctgtcttctaaacactagaatggaaactatgatttccctcagtctatttcacaggttattaggataatttatgagatattgtccagcaccctcatcaacccagtttgcaggtacaagtctgctccggctacttgagtsgggaatatacacacgtctctctgagcgcacactggccagagccgcattcccaagtctgtttcatgtggggtgcagccccagtccacagcagttttcagactgttttcctgcaggttctatgttcattcagcaagtatttcatacgtgcctactatctgccaggcagagctaaatgctga

SEQ ID NO: 36368 - DNA, 619 bp, Homo sapiens
cagctaagagaattttgcaatagtctgatgagagggagaagagggaatgcacagttggccatggctgtagaataagattcaaggtgacagacctggatatatgtgggtactgaggaggaagaaagttgagaataacttggaagagtctasttccagatctgggtggaaagaaagtggcattgacaaaagagaatgcaaatgtggtagagggaacatttttgaaggaatgtaaagacaccctattatatggcaggataggtgatgtggtcagctttgtgtccccacccaaatctcttcttgaattttaatcctcataatccccataatccctacgtgtcaagggagagaccaggtgcaggtaaatgaacatcatgggcggggggtggttcccctatgctgttctggtgatagtgagtgagttctcacgagaccgaatggttttataaagggatcttcctctcttcactcagcaactctccttcctgccaccttgtgaagaaggtgccttgcttcgtcttcaccttctgccatgattgtaagtttcctgagtcctccccagctatgttgagctgtgagtcaattaaacctctttcctttataaattactcagtctccggca

SEQ ID NO: 36369 - DNA, 1188 bp, Homo sapiens
tataactggataatgtctaatatttccatagtacataataatttattaaaatttaccttgggttttcatttaccagaaaaaggtgacttgtcaawgaaaaatgatagatttttggtagataaatttttttctcaatatttggaaaaatattgtttcaagtatttaccttatattaaggggctatttcctttgtgtgtatgtgtgtatattgtttatgtaagtgtgttttaatatacatgtgtgcacaccatcactggtaattatcctgttactgagtttattgagtttaataaacccagaatttttttccccaaggctactactgtactctcttttgggttctctggtgctttaaaggctgctgtgcttgtctggggactttcagttgtcttcttatattcacttgtcatcaaaagaattttgggaaatggcatgatgtgtgggctgatccataaagcttggtcacttatgccaaagaattgatgtttatgcaaaataatgaagctttatgttggccttaccagcttattcctcttagtttcctggctgtttgcatcacctatcatagctgtttggtgatacgtgtatgcaatggcttagttttagaacatcattagaaaaagggtttgtatgaaagccagtaaaagaaaggaaataaagaaattgtttaagagaaagttaagcaaaaacaggagtgaactacttaagaaaagctatattgtctttaaaaatgttcttagctagttaaatgtcataagagaggggtaaaatatacttttacaaataacagttttttaagaaagtaattgttttctctgaatttcagttagagacatttaactttattaaagtagttttaatcataaaaaaatcaaaacgtaatcctttcatttcttttaattgatcaaagatgtatggatttttgaataagtttatatattgttatagcagggttttttatgcgttttatataatgaacttttcagtaactatctttgctgtcgtatttcttattcaacattcattctctcaagtgcatctgcattgtctaatactgaatcatgcaaataagtaaactgtatcaaataagagacacgtaaaagggaagaagtatgaccaaagcataatgagttttaaattatcctcctcactctcctccctgatgttattcttgtagctccacagtcc

SEQ ID NO: 36370 - DNA, 1188 bp, Homo sapiens
tataactggataatgtctaatatttccatagtacataataatttattaaaatttaccttgggttttcatttaccagaaaaaggtgacttgtcaaagaaaaatgatagatttttggtagataaatttttttctcaatatttggaaaaatattgtttcaagtatttaccttatattaaggggctatttcctttgtgtgtatgtgtgtatattgtttatgtaagtgtgttttaatatacatgtgtgcacaccatcactggtaattatcctgttactgagtttattgagtttaataaacccagaatttttttccccaaggctactactgtactctcttttgggttctctggtgctttaaaggctgctgtgcttgtctggggactttcagttgtcttcttatattcacttgtcatcaaaagaattttgggaaatggcatgatgtgtgggctgatccataaagcttggtcacttatgccaaagaattgatgtttatgcaaaataatgaagctttatgttggccttaccagcttattcctcttagtttcctggctgtttgcatcacctatcatagctgtttggtgatacgtgtatgcaatggcttagttttagaacatcattagaaaaagggtttgtatgaaagccagtaaaagaaaggaaataaagaaattgtttaagagaaagttaagcaaaaacaggagtgaactacttaagaaaagctatattgtctttaaaaatgttcttrgctagttaaatgtcataagagaggggtaaaatatacttttacaaataacagttttttaagaaagtaattgttttctctgaatttcagttagagacatttaactttattaaagtagttttaatcataaaaaaatcaaaacgtaatcctttcatttcttttaattgatcaaagatgtatggatttttgaataagtttatatattgttatagcagggttttttatgcgttttatataatgaacttttcagtaactatctttgctgtcgtatttcttattcaacattcattctctcaagtgcatctgcattgtctaatactgaatcatgcaaataagtaaactgtatcaaataagagacacgtaaaagggaagaagtatgaccaaagcataatgagttttaaattatcctcctcactctcctccctgatgttattcttgtagctccacagtcc

SEQ ID NO: 36371 - DNA, 1040 bp, Homo sapiens
aatacggaaacattcttggtaataacattaagtggctaaaagaggtatagaaaattgtatgtgcagaatgattacaattatgcagaaataaataccacgtttctgttgagagaaagaaaacacacaaaaaagtcacagggaagcaatttaaatccatacatatgggaaggagaaaggaaggaaaaaggaagggaaaggagaagggagcgggaaggagggaggcccacaagagacgsaggagtagccagtactccttactgctgcagtaacattaagccatcacaggtgtgtatcgcaattaagctcttccgaaatctttcccatcctttattccaacccatttggcagttttaataaactctctgagcttcagttcccttatctaaaatgctacctgcaaacccagctgcactccactttgtgctcatgggcaatctccttcatttctattggcctctgttttccaatctataaaatggggatgttaaaagcactccctcactgagtggttgacaccgtctcagacctgggcctggcacatagtaggtgctcaataatctcgagctgctgttatttcatatgggacacgagcctggtggatcactgctggcaaggccaactccttagggctgtcttctcgtcctctggagagacccaagggttgagaagatcccctggtaccccacagacctccatggccagagggcagatgagaaggtgggagagggcacccattcagtgttcccaccggggacagcctcatttcatcttggcacaagacaacttcctggttcaaagaccaaaggccttgaaaaagaaaggagaaagggttcctggacatcaaatgtttcttacaaacactgttttgatggtttaaatgtaaacaaatctgaaacatatggattacatttctcctgaagggcttaaaagttaaaggggaaaaaagggagttgtctccagccaaattcatgttgatttttgccaatctccaggatctttgggaaataattggagacatgtcctcacaccccaactagtgc

SEQ ID NO: 36372 - DNA, 599 bp, Homo sapiens
tgaagaagcacgaagcctaaagtggtgctaaacaaggtgatcgataattccctttaaaaccctcgagaccatctacgaaagcacctcgaatcaagtttcagttactcggtctgtggattcgctggctcctgacttcccctgcctttctccacaccggcttcttatcagatttcttgtcggtggcccactttcactaagagactgggaaggaggggacagatgaaacataattacgagtgtttgctctgcatcttgcatcaggcccacacatctgtggtctagagacacacctgtgctgcttaaagcaacagcctgattcctttctgtcctcctttctaktcactcctgttgcatgtaggaaagaaatcccatgtaccagtctctaaagaatttacagtccattatggagaggagacacacacgcaggataaaggcttacatatgctaaggaaaatcaagatatatgtaaccacaagtcggatggcactaaaattaaggcctaaatatttcagagaggatttagggcagtggttctcagtcctgcctgcacgttaaaataccctcagttttttcttttttttcttttttaaaattccatg

SEQ ID NO: 36373 - DNA, 1299 bp, Homo sapiens
ttttgtaaagtgaaattatacaacacttccagaaaccacagaatgtgacttaacaaccaattacttgtacagtttgcaaaacaagtaaacctcccagcagytgggagcttggctgagaggcctaggcttgcccttggcatggtaccttgctcttttctatgagttcacattgctttctagcctgctaatgcactggccttatgaacacagattccctaaatgctctccaagagtctgatatcacattcagggttaacacattttttcccttgttgcaattcagcagttttttacagtcattcatatccaaccaattgctgtcaacaggcatcttcacatatgaatgttaatagcatattattaaagagttcctggtaatttgttttgtgggtagagttgatgaggggtgactataggaagggaagccaaaggaaaaacatttcaactactctggaagctgacctctggaaagcagtcagagagaacagatgaaggagccaggcaagctctttttgaataagatggtgtgtattacagctaggaagagccaacagagtagatctcacagtgaccagcccagctaacagcagttgaaattgttagtcatgaaaatacagatgccccctgtatggattaccctcatattttctcagtcactagtttgagagtatcatatttgagagacagagtttttcttgataattgagaaagatcaaaaagggaactgaattttcattggcaaaaagactacataaatagaagcaacatctttgttggtgcctacttgtcatcagctagaaaggtccgattttttttgcaaaaaccttaggaacaggattcagggtaccttccaaaagcgaaaagtaaaggcagacttcagggctcctagaaagtttacatccaagaattccctataatgtaaacttgaaaattaatgctttttcctccacaagaacttgtttcaaaaagttagtctggtaactcattctcataaattgttcttagtatttttcttgcagattttcatgatatggttcccaaaataaatcagtagcaagcattatgatctgtgccttccacttcagcatagtactttgctccataaacataatataatgaacatttatgtatcactacctttcttacttttctttactcacttcatcatatcaacaaaatgtatttgatacacagttgcaaataaatattaagctttacattttgtaataaatatttctgagtaataaaaatgttccaactgatcaaaaaatttgatatttgatgatggcatttgaagag

SEQ ID NO: 36374 - DNA, 663 bp, Homo sapiens
agctcccatccattgataccatattgctagcctgaaatcagctgtgatcagcaaacactacaaaataggcctttaaagaaaaaaaaaaaagacagccaaattagtgtatagcactctcctcctaagaacacatagccccctccaacaagaaaatatgctgcatgaagcagagtttttgtccattttgctccatgctttctccacagaaccttagtgcttggcacatcataggaacaagataaatgtttgttaaatgagtgaacatttctcctatcctcaagcagattgaaagtactagtatcagarctccaaaccttcattttcagaactgctctaagcatgttctgtggtttagaaagcgtggccattttcctgaacctactccatctgttcctaacgggggctcctctccacttgcatggtctatgggcagaagacacaaggattgccagtgccctccagtctctgcacatgcctctaactcacagacggcaaagcagtaaattgggaaaagcctgacaaaactgttttttcatttttattgtaacttgttaaaacaaatattaaactacagatgatacagtgtgctatgttcaaaactgtagaaaaatgtgtgttaaaactatgggtcatgtttaagaagacccctttaaaaacacgttg

SEQ ID NO: 36375 - DNA, 1109 bp, Homo sapiens
acttttcttgtgctgtgtattcaactgtgtatgcttgtacctgctcattcatcctccacacccaccccacacaatctgtccaactgagatttgatcatgtgaatgctgagaaaggctaaaggtttggtacccattcaaaatgatatttttaaagtacttattcaacatttattagatggagttggggaaaacttattttccattaagaaaagtatgtctctctttatgcttagttaacgaacaggattagttcacgcactaaatgaacatatcacttttatttgggtcagtctttcatttcacaattttgtggtttctcattaagggacagcattagttattcatattcaggagggcagaggtaactctcacagatatggttacaaagttacaaaayagatttcaaagttcttttatttactttcatgttgttaaaacatttcccatagttttttttttttttcagttcagttttatgacttaccgatccaggaaaatgcttggaaagcacagtaacaacttttaaacttaatattaaaaacaaataaaattgctcattgccaataaatatacctatgtaaaatactactcagtgtaagaatttcaactgacagtgacctgtcaaattcaggcaattctaaaataggatggtggtggttacactgtgcaaaatattcaatagagagagttcaggaatgccaataattttttgttattattatcaaaacattcaataaagatagttcaataatggcagcaactcttactgttatctccctcctatcccaccttgggggccttgtaataaattttgcttgcaaattgcctaagtgttatatgtggaaagctaagttaacaggtgtcatgtttcccatttataccactgatgttccaatgcaaggtgcccggggaaactgccatcccttaatccagctctgctcacccagacatacacatatacccatcaatccatctgttaggcattaagaattacaatagtataaagaacaatcctttggtgtacatatttaaatgttaaatatatactgaagggtttgaagcaaggatctggcaaacacgactgcatcacacatttggttcagccctgt

SEQ ID NO: 36376 - DNA, 1109 bp, Homo sapiens
acttttcttgtgctgtgtattcaactgtgtatgcttgtacctgctcattcatcctccacacccaccccacacaatctgtccaactgagatttgatcatgtgaatgctgagaaaggctaaaggtttggtacccattcaaaatgatatttttaaagtacttattcaacatttattagatggagttggggaaaacttattttccattaagaaaagtatgtctctctttatgcttagttaacgaacaggattagttcacgcactaaatgaacatatcacttttatttgggtcagtctttcatttcacaattttgtggtttctcattaagggacagcattagttattcatattcaggagggcagaggtaactctcacagatatggttacaaagttacaaaatagatttcaaagttcttttatttactttcatgttgttaaaacatttcccatagttttttttttttttcagttcagttttatgacttaccgatccaggaaaatgcttggaaagcacagtaacaacttttaaacttaatattaaaaacaaataaaattgctcattgccaataaayatacctatgtaaaatactactcagtgtaagaatttcaactgacagtgacctgtcaaattcaggcaattctaaaataggatggtggtggttacactgtgcaaaatattcaatagagagagttcaggaatgccaataattttttgttattattatcaaaacattcaataaagatagttcaataatggcagcaactcttactgttatctccctcctatcccaccttgggggccttgtaataaattttgcttgcaaattgcctaagtgttatatgtggaaagctaagttaacaggtgtcatgtttcccatttataccactgatgttccaatgcaaggtgcccggggaaactgccatcccttaatccagctctgctcacccagacatacacatatacccatcaatccatctgttaggcattaagaattacaatagtataaagaacaatcctttggtgtacatatttaaatgttaaatatatactgaagggtttgaagcaaggatctggcaaacacgactgcatcacacatttggttcagccctgt

SEQ ID NO: 36377 - DNA, 588 bp, Homo sapiens
tatgctcccacctacagattaagggattgattaagttcatccttcatccctttgagataatcattcacttttaaatgtaaaagaccctctcctagcgcataaagaaatcgcaagcatttcctgmacaaaagcaatttctaaaaagaaattttgccaaacatgtttcaatcagagagtgagtcacaaagagggcacatttgttccctaattcgaggtctgttggttatgaaggttgtagcacatcagtttggggttattcaaaactgtaaattttacaattcttttcatttataaagctgtttaaaaacatcagtggtttccatctagttttaatgacagctttccacatcctttgtgatcctcaaaaacaattacatggtaatttactaatactgacctacaaaatttaatagacatttttaaggaaatgggggcactgctatcaaagctggcatctccttagtgaatgtgttgctggcatctttcatctccctggtctatgttgtttttggaacaaggagcacatctgacctgatcatggttatgccctcagagctggcatgtcatctccagggaacagggcttcga

SEQ ID NO: 36378 - DNA, 588 bp, Homo sapiens
tatgctcccacctacagattaagggattgattaagttcatccttcatccctttgagataatcattcacttttaaatgtaaaagaccctctcctagcgcataaagaaatcgcaagcatttcctgaacaaaagcaatttctaaaaagaaattttgccaaacatgtttcaatcagagagtgagtcacaaagagggcacatttgttccctaattcgaggtctgtyggttatgaaggttgtagcacatcagtttggggttattcaaaactgtaaattttacaattcttttcatttataaagctgtttaaaaacatcagtggtttccatctagttttaatgacagctttccacatcctttgtgatcctcaaaaacaattacatggtaatttactaatactgacctacaaaatttaatagacatttttaaggaaatgggggcactgctatcaaagctggcatctccttagtgaatgtgttgctggcatctttcatctccctggtctatgttgtttttggaacaaggagcacatctgacctgatcatggttatgccctcagagctggcatgtcatctccagggaacagggcttcga

SEQ ID NO: 36379 - DNA, 555 bp, Homo sapiens
ggttctgtttttatctctgaagcaaaactttcctatagagtacagatattcttctcttatagtataagcgacgaacattgggtaccaaaaagtcccagaaaagcatacaaactccatcatgaaaaggaaggatgatgaagacggatggtcacacacacaatcagatagaaggaagtctagcattaagttacacaatgatggactcaccaagtaacccaaaaagaaagctgagcacccagcccaggttagcccccctgtttcctgatagataaatctgctggatgattctgttgattatagtgagaagataatgatacacagtgaaaaataatgatgcaccataaagtaattataaaacagaggtcagacatcctgtaacaagatgatatgggcattttagtataaagtggtagtgctaggaatacagtttaaggtggaaagggggtaggaggaaggaggaagtgtatttctttmgtcacattagccagattctctaccttgacattgtatctcccagatctatttagagataagagatttgggctggaagtcgtt

SEQ ID NO: 36380 - DNA, 1341 bp, Homo sapiens
catattttattatactgtcccaggctcattcatctcccatgactctccaaggcctacagaatgaagttgtaaaacatctgcttggctttcacagccctggatagttgggccatgtagccaactatttccaactttactacttactactgtccaacaggcctcctgctatcaagctagtccctcgcttgtgatccttccgcattacatcattgctaagaaactctaatgagagaaatatagtagatctgttatrtaatgtagaaagagcttatcatgttgactctactgctaaactctcaaggttttgggaaaatccaaaaagaacttaaaatactttattaatgccccatttggcctattttagaatagaatatacagaaagatgacactccccaccaccaactaatcagtttacccaaataatatgcaagcatgacccacttcttccccctgcagtgtttaaatcttgtctctgctctgatttttatgctttctgtttctgttcatgttaaatgaagtcaacctatttattggttttccttgtatacaagtaaacagtgtgctaaaaataacctctaggtccctgagttattctttggcattccaatctttactcttttgtattgttttttagatctactccccaattttcatcttcaagagaaatcctccatgctttcccatccagattgttcatctccattcacgacatttctttagcatttatcattcctaccacttgctttgtattcgtctcaacaaatttacagagtatcccaaataaatccaaaatcagggttttgatgtgattcttctttttaatactcaactttctcaacctgtgcttttcattcttagacacactatctctttattttatttcctttttttatttcaatagaatttggggtaagaggtggtgtttggttacatgaataagttctttagtgatgatttctgagattttggtgcacccatcacccaagcagtgtacactgtacccaatgtgtagtcttttatcccttgccaccccctaccctttcctctgagtctccaaagtccaatgtatcattcttatgcctttgcatcctcatagcttagctcccacctatgagtaagaacacaagatatttggttttccattcctgagtcacttcacttagaataatagtctccaattccatctaggttgctgcaaatgccattattttgttcctttttatggctgtgtagtattccatttatatatctatcgatcacattttctttatccactcgttgattgatgggcatttgggtttgttccatagttttgcaattgcaaattgtgctgctacaaaa

SEQ ID NO: 36381 - DNA, 1341 bp, Homo sapiens
catattttattatactgtcccaggctcattcatctcccatgactctccaaggcctacagaatgaagttgtaaaacatctgcttggctttcacagccctggatagttgggccatgtagccaactatttccaactttactacttactactgtccaacaggcctcctgctatcaagctagtccctcgcttgtgatccttccgcattacatcattgctaagaaactctaatgagagaaatatagtagatctgttatgtaatgtagaaagagcttatcatgttgactctactgctaaactctcaaggttttgggaaaatccaaaaagaacttaaaatactttattaatgccccatttggcctattttagaatagaatatacagaaagatgacactccccaccaccaactaatcagtttacccaaataatatgcaagcatgacccacttcttccccctgcagtgtttaaatcttgtctctgctctgatttttatgctttctgtttctgttcatgttaaatgaagtcaacctatttattggttttccttgtatacaagtaaacagtgtgctaaaaataacctctaggtccctgagttattctttggcattccaatctttactcttttgtattgttttttagatctactccccaattttcatcttcaagagaaatcctccatgctttcccatccagattgttcatctccattcacgacatttctttagcatttatcattcctaccacttgctttgtattcgtctcaacaaatttacagagtatcccaaataaatccaaaatcagggttttgatgtgattcttctttttaatactcaactttctcaacctgtgcttttcattcttagacacactatctctttattttatttcctttttttatttcaatagaatttggggtaagaggtggtgtttggttacatgaataagttctttagtgatgatttctgagattttggtgcacccatcacccaagcagtgtacactgtacccaatgtgtagtcttttatcccttgccaccccctaccctttcctctgagtctccaaagtccaatgtatcattcttatgcctttgcatcctcatagcttagctcccacctatgagtaagaacacaagatatttggttttccattcctgagtcacttcacttagaataatagtctccaattccatctaggttgctgcaaatgccattattttgttcctttttatggctgtgtagtattccatttatatatctatygatcacattttctttatccactcgttgattgatgggcatttgggtttgttccatagttttgcaattgcaaattgtgctgctacaaaa

SEQ ID NO: 36382 - DNA, 2084 bp, Homo sapiens
ggagtactgattctaatgctaacgacaatgctagtgtatttacccagttattattgcttgtcagggactgttgtaagtactttgaaagaatttcttgttaagttctcacaataatcaactactcaaatattagatgctcacaatgacttatctgtttgtcacataccactcttactctctttcttctttaaactcatttattttccctttataacatcacttatctatatgtttgctgctgttttctctgtctttaccactgaaataaaagctccaagagggcaaggccttctctaccttgtttactgatctgacttcattgcttacaaaaaaagccaggcctatagcaatcgctaattaaagacagaagaaaaaagggaaataaggaaggaagaaaggtagaaaggaaggaaagaagaaaagaaggaaaggagagatagagggaaggaggaagggaaaaagaaaagaaaggaggaagggaaggagagagggagaaagcaaaggagggaaggaaataagaagagagaaagtgtgaaaacaagaaaatgagtcaaggaaggagtaagtgagggaggaagaaaagacaaaaatgcctgcttgtagaccaagaagattcactggagcaaacarccaagacatattaggaacccaggtttttggtggtatgaaatgcctgtggctgaccttacttgtcactgttacaaagtcgtggacacctgttaggctcactcagtgctcagctaaattaaaaaatatacaaaacctagaagcaccttatattttgtatgtcagagatccttctaacataactttagttttgtggatgataatatcctaagaaatactgaaatattacctctttgttcttatacaggcttttcagaattacatttgcaattcattgggtttacatttacagtggaaaattattcttctaattggggatttctgattatcttgaagctgtttaataataaatgcattaaccataggtgatgatgtgcagcaggattcagggaacattctctatagatgcaaatttcccccactaaagttagcttttcaaggccacttcagtttactggctctctgacaaccatcttaaaatatgtcaaagaactatcttccccttgaggtaaaatattttgatttacttcacttgcaaattgaattttatgaaagacgggtgtgaagacaagtacaagagaaactggaactgagtaggaagttacaagaaagcacacaaattctacagtcccttcatttttctctttgtgccataaaaattgaaaccaacataaagaaatcaaacatttgaatgaagaaagtgtgcatttcaatagtaaatatctcattcaaatatactcaagtgataacttgatacattgatactttactaaaagaatgatgattccacacccagacttgagaggactagaaaaccagtgctgcatcatgagtcaggaaaataaagatttttataagcaactggttgaaacttcagagaggacaaaattgtaggccaaaaatacagagtttcccatcagtaataaaagccagccctgcaagaattctcagagattaaagcatgtttggaatacagaaacagaaaatttcctgaacatttagtgacaaataggaaaagatgaaagtggccatgcagaaaagtgactccatggaatagtaaatctccaaaccttagatgttcagcaaagagatgaaaacttagcttgaggataccattgataaggcttcaaagcaacacacactttgtgaatgcacatagcacttctccaaacgaatagaagtgagctttgaggtccttatacgatgaagctaggaaaattgccactttagggtatcagcaagagatttctaaattaaatctgaacttgagaagaaagtattattttgcaaagaggaatgcgaggttcgaagaaaagaaaataaattaactggtgaaaatgaaaggcttttttctgttgtggatagcttagcagctcaaaatagacaatgtgaaaatgagcttgagattttgtcattaagagtaggttgccttctggaaaacttaaattgcagaaacc

SEQ ID NO: 36383 - DNA, 2084 bp, Homo sapiens
ggagtactgattctaatgctaacgacaatgctagtgtatttacccagttattattgcttgtcagggactgttgtaagtactttgaaagaatttcttgttaagttctcacaataatcaactactcaaatattagatgctcacaatgacttatctgtttgtcacataccactcttactctctttcttctttaaactcatttattttccctttataacatcacttatctatatgtttgctgctgttttctctgtctttaccactgaaataaaagctccaagagggcaaggccttctctaccttgtttactgatctgacttcattgcttacaaaaaaagccaggcctatagcaatcgctaattaaagacagaagaaaaaagggaaataaggaaggaagaaaggtagaaaggaaggaaagaagaaaagaaggaaaggagagatagagggaaggaggaagggaaaaagaaaagaaaggaggaagggaaggagagagggagaaagcaaaggagggaaggaaataagaagagagaaagtgtgaaaacaagaaaatgagtcaaggaaggagtaagtgagggaggaagaaaagacaaaaatgcctgcttgtagaccaagaagattcactggagcaaacagccaagacatattaggaacccaggtttttggtggtatgaaatgcctgtggctgaccttacttgtcactgttacaaagtcgtggacacctgttaggctcactcagtgctcagctaaattaaaaaatatacaaaacctagaagcaccttatattttgtatgtcagagrtccttctaacataactttagttttgtggatgataatatcctaagaaatactgaaatattacctctttgttcttatacaggcttttcagaattacatttgcaattcattgggtttacatttacagtggaaaattattcttctaattggggatttctgattatcttgaagctgtttaataataaatgcattaaccataggtgatgatgtgcagcaggattcagggaacattctctatagatgcaaatttcccccactaaagttagcttttcaaggccacttcagtttactggctctctgacaaccatcttaaaatatgtcaaagaactatcttccccttgaggtaaaatattttgatttacttcacttgcaaattgaattttatgaaagacgggtgtgaagacaagtacaagagaaactggaactgagtaggaagttacaagaaagcacacaaattctacagtcccttcatttttctctttgtgccataaaaattgaaaccaacataaagaaatcaaacatttgaatgaagaaagtgtgcatttcaatagtaaatatctcattcaaatatactcaagtgataacttgatacattgatactttactaaaagaatgatgattccacacccagacttgagaggactagaaaaccagtgctgcatcatgagtcaggaaaataaagatttttataagcaactggttgaaacttcagagaggacaaaattgtaggccaaaaatacagagtttcccatcagtaataaaagccagccctgcaagaattctcagagattaaagcatgtttggaatacagaaacagaaaatttcctgaacatttagtgacaaataggaaaagatgaaagtggccatgcagaaaagtgactccatggaatagtaaatctccaaaccttagatgttcagcaaagagatgaaaacttagcttgaggataccattgataaggcttcaaagcaacacacactttgtgaatgcacatagcacttctccaaacgaatagaagtgagctttgaggtccttatacgatgaagctaggaaaattgccactttagggtatcagcaagagatttctaaattaaatctgaacttgagaagaaagtattattttgcaaagaggaatgcgaggttcgaagaaaagaaaataaattaactggtgaaaatgaaaggcttttttctgttgtggatagcttagcagctcaaaatagacaatgtgaaaatgagcttgagattttgtcattaagagtaggttgccttctggaaaacttaaattgcagaaacc

SEQ ID NO: 36384 - DNA, 2084 bp, Homo sapiens
ggagtactgattctaatgctaacgacaatgctagtgtatttacccagttattattgcttgtcagggactgttgtaagtactttgaaagaatttcttgttaagttctcacaataatcaactactcaaatattagatgctcacaatgacttatctgtttgtcacataccactcttactctctttcttctttaaactcatttattttccctttataacatcacttatctatatgtttgctgctgttttctctgtctttaccactgaaataaaagctccaagagggcaaggccttctctaccttgtttactgatctgacttcattgcttacaaaaaaagccaggcctatagcaatcgctaattaaagacagaagaaaaaagggaaataaggaaggaagaaaggtagaaaggaaggaaagaagaaaagaaggaaaggagagatagagggaaggaggaagggaaaaagaaaagaaaggaggaagggaaggagagagggagaaagcaaaggagggaaggaaataagaagagagaaagtgtgaaaacaagaaaatgagtcaaggaaggagtaagtgagggaggaagaaaagacaaaaatgcctgcttgtagaccaagaagattcactggagcaaacagccaagacatattaggaacccaggtttttggtggtatgaaatgcctgtggctgaccttacttgtcactgttacaaagtcgtggacacctgttaggctcactcagtgctcagctaaattaaaaaatatacaaaacctagaagcaccttatattttgtatgtcagagatccttctaacataactttagttttgtggatgataatatcctaagaaayactgaaatattacctctttgttcttatacaggcttttcagaattacatttgcaattcattgggtttacatttacagtggaaaattattcttctaattggggatttctgattatcttgaagctgtttaataataaatgcattaaccataggtgatgatgtgcagcaggattcagggaacattctctatagatgcaaatttcccccactaaagttagcttttcaaggccacttcagtttactggctctctgacaaccatcttaaaatatgtcaaagaactatcttccccttgaggtaaaatattttgatttacttcacttgcaaattgaattttatgaaagacgggtgtgaagacaagtacaagagaaactggaactgagtaggaagttacaagaaagcacacaaattctacagtcccttcatttttctctttgtgccataaaaattgaaaccaacataaagaaatcaaacatttgaatgaagaaagtgtgcatttcaatagtaaatatctcattcaaatatactcaagtgataacttgatacattgatactttactaaaagaatgatgattccacacccagacttgagaggactagaaaaccagtgctgcatcatgagtcaggaaaataaagatttttataagcaactggttgaaacttcagagaggacaaaattgtaggccaaaaatacagagtttcccatcagtaataaaagccagccctgcaagaattctcagagattaaagcatgtttggaatacagaaacagaaaatttcctgaacatttagtgacaaataggaaaagatgaaagtggccatgcagaaaagtgactccatggaatagtaaatctccaaaccttagatgttcagcaaagagatgaaaacttagcttgaggataccattgataaggcttcaaagcaacacacactttgtgaatgcacatagcacttctccaaacgaatagaagtgagctttgaggtccttatacgatgaagctaggaaaattgccactttagggtatcagcaagagatttctaaattaaatctgaacttgagaagaaagtattattttgcaaagaggaatgcgaggttcgaagaaaagaaaataaattaactggtgaaaatgaaaggcttttttctgttgtggatagcttagcagctcaaaatagacaatgtgaaaatgagcttgagattttgtcattaagagtaggttgccttctggaaaacttaaattgcagaaacc

SEQ ID NO: 36385 - DNA, 2084 bp, Homo sapiens
ggagtactgattctaatgctaacgacaatgctagtgtatttacccagttattattgcttgtcagggactgttgtaagtactttgaaagaatttcttgttaagttctcacaataatcaactactcaaatattagatgctcacaatgacttatctgtttgtcacataccactcttactctctttcttctttaaactcatttattttccctttataacatcacttatctatatgtttgctgctgttttctctgtctttaccactgaaataaaagctccaagagggcaaggccttctctaccttgtttactgatctgacttcattgcttacaaaaaaagccaggcctatagcaatcgctaattaaagacagaagaaaaaagggaaataaggaaggaagaaaggtagaaaggaaggaaagaagaaaagaaggaaaggagagatagagggaaggaggaagggaaaaagaaaagaaaggaggaagggaaggagagagggagaaagcaaaggagggaaggaaataagaagagagaaagtgtgaaaacaagaaaatgagtcaaggaaggagtaagtgagggaggaagaaaagacaaaaatgcctgcttgtagaccaagaagattcactggagcaaacagccaagacatattaggaacccaggtttttggtggtatgaaatgcctgtggctgaccttacttgtcactgttacaaagtcgtggacacctgttaggctcactcagtgctcagctaaattaaaaaatatacaaaacctagaagcaccttatattttgtatgtcagagatccttctaacataactttagttttgtggatgataatatcctaagaaatactgaaatattacctctttgttcttatacaggcttttcagaattacatttgcaattcattgggtttacatttacagtggaaaattattcttctaattggggatttctgattatcttgaagctgtttaataataaatgcattaaccataggtgatgatgtgcagcaggattcagggaacattctctatagatgcaaatttcccccactaaagttagcttttcaaggccacttcagtttactggctctctgacaaccatcttaaaatatgtcaaagaactatcttccccttgaggtaaaatattttgatttacttcacttgcaaattgaattttatgaaagacgggtgtgaagacaagtacaagagaaactggaactgagtaggaagttacaagaaagcacacaaattctacagtcccttcatttttctctttgtgccataaaaattgaaaccaacataaagaaatcaaacatttgaatgaagaaagtgtgcatttcaatagtaaatatctcattcaaatatactcaagtgataacttgatacattgatactttactaaaagaatgatgattccacacccagacttgagaggactagaaaaccagtgctgcatcatgagtcaggaaaakaaagatttttataagcaactggttgaaacttcagagaggacaaaattgtaggccaaaaatacagagtttcccatcagtaataaaagccagccctgcaagaattctcagagattaaagcatgtttggaatacagaaacagaaaatttcctgaacatttagtgacaaataggaaaagatgaaagtggccatgcagaaaagtgactccatggaatagtaaatctccaaaccttagatgttcagcaaagagatgaaaacttagcttgaggataccattgataaggcttcaaagcaacacacactttgtgaatgcacatagcacttctccaaacgaatagaagtgagctttgaggtccttatacgatgaagctaggaaaattgccactttagggtatcagcaagagatttctaaattaaatctgaacttgagaagaaagtattattttgcaaagaggaatgcgaggttcgaagaaaagaaaataaattaactggtgaaaatgaaaggcttttttctgttgtggatagcttagcagctcaaaatagacaatgtgaaaatgagcttgagattttgtcattaagagtaggttgccttctggaaaacttaaattgcagaaacc

SEQ ID NO: 36386 - DNA, 529 bp, Homo sapiens
tactatgtcttaatgacacataatccacttgccaaaaagagtccgggtctgaccttgaaaacccaaatagtgtgagagccaagcagaccaaaagaagtgtcatgtggaaataatacacttgactgtgatatttggcatcaattaatggaaaataatgttctctctgataatctgcggatctacacttcctcatatactcttcttctgcagaagaagagaagggyatattcattcttgttttattaataggaagtaaagcttaccaaaggaagaaggaggttgttagcaagaaaataggaaagtgacctgttctaatagagaggaaagcagactgggtatgatttgaagaaaatggggacacacctaatgccaaagtatcttctcagtattctgttatctcacatttattcaatagagacaatattagacaacagacatagagagattatttcagaaaaaatcaaatttttttttttttgagataaagtttctctctgttacccaggctggaatgcagtgacgtaatcat

SEQ ID NO: 36387 - DNA, 750 bp, Homo sapiens
cctctcaatcaccccatgagatcctcctgtcactttcctggsgggcactgttaatgaagaatatttccagtatcctctttacttgaaccaagtaataaaactcttactgatcaaaatctgcattcctgtagacagtcccttgttactcaccaggtgaatgaagcccagtatttttcaggtaacaataaccttccttatgaaaaatacatctttatattcataagttttttacatctgtctctaagttttttacatctctcactcctacttactgttttctttcttccttatttcataaataacctttctaagtccataatttgaatcaacctttagataacttctgaattagacaaaattattctttttctcaataagaacatattttctatggcaaattatatatataggattatatattaactaaaattataattcttagttaccttaaattttagtgaaaaacataagaagcaagaaatcctatactatctattagatgttatcattttgtagatgagaagattccacaactttaaaaagaaatgcctctccatattataaccgtttcttaattggatgtgacacagacatttaacgagcatgcaaaatactcaaaatactttccagattttaagttacacgaaatatttacctacaggatttacctcatttatgtttaattcagtttttatagtttatttagattacttattagcaaagataagttattaataacttataattaat

SEQ ID NO: 36388 - DNA, 571 bp, Homo sapiens
tgcaggtatctttataatagaatgatttatattcctttgggtatatacccagtaatgggattgatgggtcaaatagtatttctgtttctagatctttgaggaatcaccacactgtcttttacaatggttgaactactttacatacccaccaacagtgtaaaaccgttcttttttctccccaacctcgccagcattaccattatccttaggaagctaacgcaagaagcaaaaaccaaacaccgcatgttttcacttataagtgggagctgaacgattgaacgatgrgaacacatagacatgtggtggggaacaacacacagtggggactgttgtgggggtgaggcaaggaagagcatcaggaataatagctaatggaagctgggcttaatacctaggtgatgggttgacctgtgtagcaaaccactgtggcacatgtttacctatgtaacagactgcacatcccgcacatgtatcctggaacttaaaagtcgatgaaaaaaattaaaataataaaacgaagccttctataattaaccctacaaattcaattgtttgaagcctccatcatgtc

SEQ ID NO: 36389 - DNA, 620 bp, Homo sapiens
gccagtagaattgtggaaaactgcggctggaaaccattgtagagggcttgcagtgcaaactttctctatatggatgagaaaacagaggcacagaaagctacatgccttattttagacaactgagatagttagtagcccaaagaggcctagaagcctgagaaccactaagtcagggttattgacttagtcacctcttaagagggtgacttagtcaccctctttaaaatgtgtgagcaaatttgggcattgttgatttattgtaaaatggtatgccaaagcacaacctgttggtaaatagcataaaacccagggacatccttaaagaaaataataaaataatgttctttgatttctctttcattcctcttccttcccttctttcacattttatctcaaacgttgtggtacaggagcctatgctcacttttaggcccctgttctatacatactctgactagtgtcttagactcaagcgtactgttttggctttatcttaagatcataactttccckttgctcttgatccaaaaatactgtatttgttttttgtaaatttattctggcattctgtactcttctcaagatagtgtgaaaatgtctaagtcattaaagacaagcaa

SEQ ID NO: 36390 - DNA, 585 bp, Homo sapiens
tggctttcctaccagcatttcctctgagccagggaatgtcactattttccttatggccaacagcatttagactcaatgtcattgctgacctacagtgatgtgttcatcaccatgggcagacagataggcaggtacctatccatacactcactcacccactgatgacactcaggaaggcttggtaaagacaagtaaagccaatgaatattataaatagatagtatttcttgtgaggagccatcwtgtggggaaagcttcttcattaactctggctgagtctaatgttgaaattaattcttggctggcacactggctcacacctataatcccagaactttgggaggccgaggtgggcagatcacaaggtcaagagatcgagaccatcctggccaacatggtgaaaccctgtctctactaaaaatacaaaaattagctaggtgtggtggcacatgcctgcagtcccagctactcaggaggctgaggcaggagaatcacttgaaccatggaggcagaggttgcagtgagctgagattgtgccactgcattccaccctggtgacagagagagactctgtctcaaaaaaaa

SEQ ID NO: 36391 - DNA, 585 bp, Homo sapiens
tggctttcctaccagcatttcctctgagccagggaatgtcactattttccttatggccaacagcatttagactcaatgtcattgctgacctacagtgatgtgttcatcaccatgggcagacagataggcaggtacctatccatacactcactcacccactgatgacactcaggaaggcttggtaaagacaagtaaagccaatgaatattataaatagatagtatttcttgtgaggagccatcatgtggggaaagcttcttcattaactctggctgagtctaatgttgaaattaattcttggcyggcacactggctcacacctataatcccagaactttgggaggccgaggtgggcagatcacaaggtcaagagatcgagaccatcctggccaacatggtgaaaccctgtctctactaaaaatacaaaaattagctaggtgtggtggcacatgcctgcagtcccagctactcaggaggctgaggcaggagaatcacttgaaccatggaggcagaggttgcagtgagctgagattgtgccactgcattccaccctggtgacagagagagactctgtctcaaaaaaaa

SEQ ID NO: 36392 - DNA, 585 bp, Homo sapiens
tggctttcctaccagcatttcctctgagccagggaatgtcactattttccttatggccaacagcatttagactcaatgtcattgctgacctacagtgatgtgttcatcaccatgggcagacagataggcaggtacctatccatacactcactcacccactgatgacactcaggaaggcttggtaaagacaagtaaagccaatgaatattataaatagatagtatttcttgtgaggagccatcatgtggggaaagcttcttcattaactctggctgagtctaatgttgaaattaattcttggctggcacastggctcacacctataatcccagaactttgggaggccgaggtgggcagatcacaaggtcaagagatcgagaccatcctggccaacatggtgaaaccctgtctctactaaaaatacaaaaattagctaggtgtggtggcacatgcctgcagtcccagctactcaggaggctgaggcaggagaatcacttgaaccatggaggcagaggttgcagtgagctgagattgtgccactgcattccaccctggtgacagagagagactctgtctcaaaaaaaa

SEQ ID NO: 36393 - DNA, 585 bp, Homo sapiens
tggctttcctaccagcatttcctctgagccagggaatgtcactattttccttatggccaacagcatttagactcaatgtcattgctgacctacagtgatgtgttcatcaccatgggcagacagataggcaggtacctatccatacactcactcacccactgatgacactcaggaaggcttggtaaagacaagtaaagccaatgaatattataaatagatagtatttcttgtgaggagccatcatgtggggaaagcttcttcattaactctggctgagtctaatgttgaaattaattcttggctggcacactggctcacacctataatcccagaactttgggaggccgaggtgggcagatcacaaggtcaagagatcgagaccatcctggccaacatggtgaaaccctgtctctactaaaaatacaaaaattagctaggtgtggtggcacatgcctgcagtcccagctactcrggaggctgaggcaggagaatcacttgaaccatggaggcagaggttgcagtgagctgagattgtgccactgcattccaccctggtgacagagagagactctgtctcaaaaaaaa

SEQ ID NO: 36394 - DNA, 792 bp, Homo sapiens
gcagcccaggacagaagctcaaaggctgggcaaagcctatctactccctgtcgtgttttgtgccattcacaggcccccaacgtgtccccatgccacctgatatgttcctccactagagtcgtgaccaaaagccttgtcatggtttgttggcctacccggctccccagtcagtgtttcctaaaagtactcattcattcattcattcattcattcattcattcattcattcatctattctctcatgcaacaaatcactttgctaagcacagggaccaaagcagtgaacaagagagttaarcgtcttgctctcaaggaacagaagttctagtcatggagagacagacaataaaccagataaataagcaaaggagtcacgtcagttagaggcagatctgaacttcatagctggaagagaggcttggcatggggccaaggcatctgtgggcccctctgccccatccaccccacacatccattgcagaaggcccagggtgggtgtctggataccactgagcaaccctcaaagtctctctcctttccaacctcaaaacatttgaaacagtactatttcgtgtaagtaatttttacaagttacagcattccaatgaaaatgtttctggtgggtaagcattctggattctaggtggaaatctagaatccagagatgcagggcctcagggtgggctgccagtgatcgtctgtgtgtcccactggctatatacacgcccttgaagccgcactgcccttctttccccactccagaatctaacaaggctgcacagttttcacaca

SEQ ID NO: 36395 - DNA, 792 bp, Homo sapiens
gcagcccaggacagaagctcaaaggctgggcaaagcctatctactccctgtcgtgttttgtgccattcacaggcccccaacgtgtccccatgccacctgatatgttcctccactagagtcgtgaccaaaagccttgtcatggtttgttggcctacccggctccccagtcagtgtttcctaaaagtactcattcattcattcattcattcattcattcattcattcattcatctattctctcatgcaacaaatcactttgctaagcacagggaccaaagcagtgaacaagagagttaaaygtcttgctctcaaggaacagaagttctagtcatggagagacagacaataaaccagataaataagcaaaggagtcacgtcagttagaggcagatctgaacttcatagctggaagagaggcttggcatggggccaaggcatctgtgggcccctctgccccatccaccccacacatccattgcagaaggcccagggtgggtgtctggataccactgagcaaccctcaaagtctctctcctttccaacctcaaaacatttgaaacagtactatttcgtgtaagtaatttttacaagttacagcattccaatgaaaatgtttctggtgggtaagcattctggattctaggtggaaatctagaatccagagatgcagggcctcagggtgggctgccagtgatcgtctgtgtgtcccactggctatatacacgcccttgaagccgcactgcccttctttccccactccagaatctaacaaggctgcacagttttcacaca

SEQ ID NO: 36396 - DNA, 792 bp, Homo sapiens
gcagcccaggacagaagctcaaaggctgggcaaagcctatctactccctgtcgtgttttgtgccattcacaggcccccaacgtgtccccatgccacctgatatgttcctccactagagtcgtgaccaaaagccttgtcatggtttgttggcctacccggctccccagtcagtgtttcctaaaagtactcattcattcattcattcattcattcattcattcattcattcatctattctctcatgcaacaaatcactttgctaagcacagggaccaaagcagtgaacaagagagttaaacgtcttgctctcaaggaacagaagttctagtcatggagagacagacaataaaccagataaataagcaaaggagtcacgtcagttagaggcagatctgaacttcatagctggaagagaggcttggcatggggccaaggcatctgtgggcccctctgccccatccaccccacacatccattgcagaaggcccagggtgggtgtctggataccactgagcaaccctcaaagtctctctcctttccaacctcaaaacatttgaaacagtactatttcgtgtaagtaatttttacaagttacagcattccaatgaaaatgtttctggtgggtaagcattctggattctaggtggaaatctagaatccagagatgcagggcctcagggtgggctgccagtgatygtctgtgtgtcccactggctatatacacgcccttgaagccgcactgcccttctttccccactccagaatctaacaaggctgcacagttttcacaca

SEQ ID NO: 36397 - DNA, 582 bp, Homo sapiens
tggcacaagtgtctatcaattatggtttattcatgctataaactattacatgacaataaaaaactcctgataaatgcctcaatagggatgaatctcgcaaccagacacaaaagagcacacactttatgatttgatttatatgaggttcaagaacagatcaaactaagcactgttaatagcaatcatctctaagagggacatgcctgagaaggggcacaaggactctagggtgatgtaaaggttctgtatcgatccaggtagcggttacactcaaatcctaagctgtgcacttaagtttgtggcctttattgtacatggtatatgttaatgaaaccactgaatacatttgagacaggcttaagtagcaayacacacacacatacacacacaactgaagagaaaaatatttaaaagacatgaatgggatttttggtgtgttttagaggtggtttcgctctgtcacccaggctggagtacagtggtgtgatcatagctcactgcagcctcaaactcctgggctcacgtgcttctcctgccttagcctcccaagcagctgggaatacaggtatgcaccactgcacc

SEQ ID NO: 36398 - DNA, 647 bp, Homo sapiens
gtagctgggattacaggtgccygccaccacgcccgactaatttttatatttttagtagagacggggtttcaccttgttgaccaggctggtcctgaacttctgacctcaagtgatccacccgccacagcctcccaaagtgctgggattacaggcatgagccaccacgcgtggctgccttttttttttttaatgcaagaggagaacaggaacaacagttcccttaaacacaaaacctatgtgtttggatgtatttgggtctgtttgcagcatgtggcatccagaatgaaggcatttctatttactgaaaccatcatccagctgtagctgcctcgggcatatcaacctgtgtggttagcctgctttccagcacttttctctaaagtcccccgaaattgttcctgaacacaaatattgaggctccttctttttttttttggtttttcaaaactagccatgacacctatgtggaaatagactcaggaaacacctgcagaaagctgtcgctcagtaggcagactgcatgaaaaggcatacaataaaaaagttaatatttaaaggtgaatgccaagacgtataatacactgaattccaacccaaaagccttcggagaatcgtaaaaggaatgcacacagagttgcaaacaatat

SEQ ID NO: 36399 - DNA, 647 bp, Homo sapiens
gtagctgggattacaggtgcccgccaccacgcccgactaatttttatatttttagtagagacggggtttcaccwtgttgaccaggctggtcctgaacttctgacctcaagtgatccacccgccacagcctcccaaagtgctgggattacaggcatgagccaccacgcgtggctgccttttttttttttaatgcaagaggagaacaggaacaacagttcccttaaacacaaaacctatgtgtttggatgtatttgggtctgtttgcagcatgtggcatccagaatgaaggcatttctatttactgaaaccatcatccagctgtagctgcctcgggcatatcaacctgtgtggttagcctgctttccagcacttttctctaaagtcccccgaaattgttcctgaacacaaatattgaggctccttctttttttttttggtttttcaaaactagccatgacacctatgtggaaatagactcaggaaacacctgcagaaagctgtcgctcagtaggcagactgcatgaaaaggcatacaataaaaaagttaatatttaaaggtgaatgccaagacgtataatacactgaattccaacccaaaagccttcggagaatcgtaaaaggaatgcacacagagttgcaaacaatat

SEQ ID NO: 36400 - DNA, 647 bp, Homo sapiens
gtagctgggattacaggtgcccgccaccacgcccgactaatttttatatttttagtagagacggggtttcaccttgttgaccaggctggtcctgaacttctgacctcaagtgatccacccgccacagcctcccaaagtgctgggattacaggcatgagccaccacgcgtggctgccttttttttttttaatgcaagaggagaacaggaacaacagttcccttaaacacaaaacctrtgtgtttggatgtatttgggtctgtttgcagcatgtggcatccagaatgaaggcatttctatttactgaaaccatcatccagctgtagctgcctcgggcatatcaacctgtgtggttagcctgctttccagcacttttctctaaagtcccccgaaattgttcctgaacacaaatattgaggctccttctttttttttttggtttttcaaaactagccatgacacctatgtggaaatagactcaggaaacacctgcagaaagctgtcgctcagtaggcagactgcatgaaaaggcatacaataaaaaagttaatatttaaaggtgaatgccaagacgtataatacactgaattccaacccaaaagccttcggagaatcgtaaaaggaatgcacacagagttgcaaacaatat

SEQ ID NO: 36401 - DNA, 1836 bp, Homo sapiens
ttttcctgtgcttttctggaagcttttcctaacgccaggattaaccaggagaagccttccctcaagatatcttagcaaagttataaagtacgtgaacattgagttggagcagcccagagtaatctatcttcatgtgttctcttacacttcaaagacaactggaggatagctggagaagggtccttcctgctagaagaggggarggacgcttactgggggtaaagagaagaggcgttcccaagaaaggggcaggaaccagcttaacgcatctgtcaccacccagcggggtcatggaaacgcgaagcaggtggagcccatttcctgccgtggtttggtggacgcaggcagccccatccatgcaggtgctaaaggccctgtgtggcttggtggatgcaggcagccctgtccatggaggtgctgagggtcctgcgtgatttggtggatgcgggcggccctgtccttgcaggtggtgagggtcctgcgtggtttggtggacgcgggcagctccgtcattctttctttttgacggagtctcgctctgtcgcccaggctggagcgcaggggcgccatctgggctcactgcaagctccacttcccgggttcacgcctttctcctgcctcagcctcccgagtagctgggaccacaggcgcctgccaccgtccccggctaattttttgtatttttagtagagacggggtttcactgtgttagccaggatggtctcgatctcctgacctcgtgatccgctcgcctcggcctcccaaagtgctgggattacaggcgtgagccactgtgcccggccccagccctgtcagttctgtggcgagggcctgcatggcttggtggatgcgggcagccccgtcagttctgtggtgagagccccgcatggcttggtggatgcgggccgccctgtccatgcaggtgctgaggaccctgtgccatgcgtccttgcagagtgctgtgtggccccacaagcctaccatcgtgaacggtgtaccaccccttctgtggccctcagcttctctgtgttggttcctctgtgtgccaagggtaggagccatctgagactcttggaatggcagtggggagggctggctggtggtcatgatttgctaagtcacccaccctgacactgactgtaacctctcgtaggtctgggcatgatctggggcaacagaagttgcttctcactttaatctggccaactgctgagtctgcaagctcggaaaatgcagtccactgcatgaggaaatagcctactttcatttaatcccacaaaacaagtcacggtgcccctgtgtttgggacacagttacaggataacttgtctgtctctgggtggtggggctggcccaggagtactgcaaatcagagccatccttacaaggactttctccctccggtctcctctctctgaatttagatgcttcctggatccaggcatcacaggaaaaagacctcaggctttacaaaattacttgtataaatgtgcacatagtacccactccttccatttggaaatatgtgaaaaatgtacttactgtttcctttggctaaatcgctaacaaacagctcttctctggaggcattactagctgacttatttgggcttcttgggctttgtcatttcactgcccattctttcttttttttattcatttgagacagcgtttcgctcttgttgcccaggctggagtgcaatggtgcgatctcggctcactgcaacctccgcctcctgggttcaagggattctcctgcctcagcttcccaagtagctgggattacagacatgtgccaccacgcccagctaatttttatgtatttagtagagatag

SEQ ID NO: 36402 - DNA, 1836 bp, Homo sapiens
ttttcctgtgcttttctggaagcttttcctaacgccaggattaaccaggagaagccttccctcaagatatcttagcaaagttataaagtacgtgaacattgagttggagcagcccagagtaatctatcttcatgtgttctcttacacttcaaagacaactggaggatagctggagaagggtccttcctgctagaagaggggaaggacgcttactgggggtaaagagaagaggcgttcccaagaaaggggcaggaaccagcttaacgcatctgtcaccacccagcggggtcatggaaacgcraagcaggtggagcccatttcctgccgtggtttggtggacgcaggcagccccatccatgcaggtgctaaaggccctgtgtggcttggtggatgcaggcagccctgtccatggaggtgctgagggtcctgcgtgatttggtggatgcgggcggccctgtccttgcaggtggtgagggtcctgcgtggtttggtggacgcgggcagctccgtcattctttctttttgacggagtctcgctctgtcgcccaggctggagcgcaggggcgccatctgggctcactgcaagctccacttcccgggttcacgcctttctcctgcctcagcctcccgagtagctgggaccacaggcgcctgccaccgtccccggctaattttttgtatttttagtagagacggggtttcactgtgttagccaggatggtctcgatctcctgacctcgtgatccgctcgcctcggcctcccaaagtgctgggattacaggcgtgagccactgtgcccggccccagccctgtcagttctgtggcgagggcctgcatggcttggtggatgcgggcagccccgtcagttctgtggtgagagccccgcatggcttggtggatgcgggccgccctgtccatgcaggtgctgaggaccctgtgccatgcgtccttgcagagtgctgtgtggccccacaagcctaccatcgtgaacggtgtaccaccccttctgtggccctcagcttctctgtgttggttcctctgtgtgccaagggtaggagccatctgagactcttggaatggcagtggggagggctggctggtggtcatgatttgctaagtcacccaccctgacactgactgtaacctctcgtaggtctgggcatgatctggggcaacagaagttgcttctcactttaatctggccaactgctgagtctgcaagctcggaaaatgcagtccactgcatgaggaaatagcctactttcatttaatcccacaaaacaagtcacggtgcccctgtgtttgggacacagttacaggataacttgtctgtctctgggtggtggggctggcccaggagtactgcaaatcagagccatccttacaaggactttctccctccggtctcctctctctgaatttagatgcttcctggatccaggcatcacaggaaaaagacctcaggctttacaaaattacttgtataaatgtgcacatagtacccactccttccatttggaaatatgtgaaaaatgtacttactgtttcctttggctaaatcgctaacaaacagctcttctctggaggcattactagctgacttatttgggcttcttgggctttgtcatttcactgcccattctttcttttttttattcatttgagacagcgtttcgctcttgttgcccaggctggagtgcaatggtgcgatctcggctcactgcaacctccgcctcctgggttcaagggattctcctgcctcagcttcccaagtagctgggattacagacatgtgccaccacgcccagctaatttttatgtatttagtagagatag

SEQ ID NO: 36403 - DNA, 649 bp, Homo sapiens
gatagagttaggatggattgaaaagagacacagataaaagaaaagacacagaatagattgtaggtaattgtctattaaatgtatgagcactgctgctaatagaatctctgagggtacattgcagttcctatgtctcattcaaaagttttaggatgaaataccattgcttatctacctactgccttcacatatcaaatggtagttactgcagtgggactataaagagtggcaaacttcatgcaaagaatattatacagagcatgcattcatgttttgttgttggtggatagagtagttaggagaagagggatggagtttctgtaatttyttttcagaggccccttccaactctgaaatgatgattgtctgataataaaggtttacagtactatgctgtgatttctctggacatagattgcatttttgcatactagttcaaaagggtcttcatgtgttctttgttaggacttttaccttcctcatctcctaaggataatctatgagtgcaaaacaactctggaaattagcatttatttctaaagaattacttgagcaactaatgtgagtaggcttttgtatgtctgtagctcctggaagtcctttaatcatcaggaaatgccctacgtatccatcaatattccttgaaaag

SEQ ID NO: 36404 - DNA, 1012 bp, Homo sapiens
tcctctaatgctatttccgtttgaagatggaaagttccatccatttcccaaagaggaaacagcacaaaaacatggtgtggtggggtgagagggggcatgaaggggtcaaggggaggcaagctttcccaagaggtaaagtcggtgatgcaaatgagaacagtagacatttgcacattaactgtataaggatgcatattctttttttttttcaagacggagtcttgctttgttgcccaggctggagtacagtggcgtgatctcagctcactgcaacctccacctcccaggttcaggcgattcttctgcctcagcctcccgagtagctgggactacaggtgtgtgccaccatgcccagctaattttttgtatttttagtagagatggggtttcactatgttagccaggaatttctcaatctcctgacctcgtgatctgcctgccttggcctcccaaagtgctgggattatacgtgtgagtcaccatgcccggccagaatgcatattcttaacatcyacacaaagctatgcactctcatttgtccttagatattggctcctctatgtgtatttttttgtcctgccattttttttttttttgagacagcatcttgctctgttgtccaggctggagtgtagtggtgcaatctcagctcactgcaacctcctcctcccaggttcaactgattctcctgcttcaagtctcccaattaggctgcttcaccatgcctggctaatttttaatagagacagggtttcaccatgttggccaggctggtctcaatctcttgacctcaagtgatccacccaccttggcctcccaaagtgctgggattacaggtctgagccaccacgcctggccatcctgccacttctgaaggacatgtgacaggctggctgtcttccatttggctcttcccacagatcctctctgcctccccaccccaagtctgtgtttggggggctgattcatatggactcttctgtctgctagcttccagctggtgtggcccctg

SEQ ID NO: 36405 - DNA, 1012 bp, Homo sapiens
tcctctaatgctatttccgtttgaagatggaaagttccatccatttcccaaagaggaaacagcacaaaaacatggtgtggtggggtgagagggggcatgaaggggtcaaggggaggcaagctttcccaagaggtaaagtcggtgatgcaaatgagaacagtagacatttgcacattaactgtataaggatgcatattctttttttttttcaagacggagtcttgctttgttgcccaggctggagtacagtggcgtgatctcagctcactgcaacctccacctcccaggttcaggcgattcttctgcctcagcctcccgagtagctgggactacaggtgtgtgccaccatgcccagctaattttttgtatttttagtagagatggggtttcactatgttagccaggaatttctcaatctcctgacctcgtgatctgcctgccttggcctcccaaagtgctgggattatacgtgtgagtcaccatgcccggccagaatgcatattcttaacatctacacaaagctatgcactctcatttgtccttagatattggctcctctatgtgtatttttttgtcctgccattttttttttttttgagacagcatcttgctctgttgtccaggctggagtgtagtggtgcaatctcagctcactrcaacctcctcctcccaggttcaactgattctcctgcttcaagtctcccaattaggctgcttcaccatgcctggctaatttttaatagagacagggtttcaccatgttggccaggctggtctcaatctcttgacctcaagtgatccacccaccttggcctcccaaagtgctgggattacaggtctgagccaccacgcctggccatcctgccacttctgaaggacatgtgacaggctggctgtcttccatttggctcttcccacagatcctctctgcctccccaccccaagtctgtgtttggggggctgattcatatggactcttctgtctgctagcttccagctggtgtggcccctg

SEQ ID NO: 36406 - DNA, 591 bp, Homo sapiens
gctgggtagttctttgaagtctccaagtttggggtcaaaaattcctgtgaattttcctatttactcctaatataaatgtgtttggttttgacagtcagaacaaaaattaggccgggcatggtggttcacatctgtaatcccaacaatttgggaggccaaagtgggaggatcgcttgagcccaggactttgagaccagcctaggcaacatagtgagaccccgcctctatatttaagaaaaaaaaaattacccacaaattttcaagtaaaagcgatgttcccagcgacttcaactactttgcaactgcacaaagtcagtaatcaatacattttaaaaaaatgaattctgatcaatgcttcatgcacaaaagataaagaatgctaagtatgagtgcatggaatcatttaacaacataggcctagaatatttccaatgttaattaaattatttttataagttataatgtttattatagattatacaaagtctcttcagtattgaagggtcttaacaaatccagcttgagaattaggctggaaaattyacttccccacaaagactacctcaaaatgtcactttaacagtcagatta

SEQ ID NO: 36407 - DNA, 630 bp, Homo sapiens
cagggtttcaccgtgttagccaggatggtctcgatctcctgacctcgagatccgcccgcctcggcctcccaaagtgctgggattacagatgtgagccaccacgccagaccaaaaattcttaaacatacttgccataagtgtgtatttctctgcgttatgttatgtattctcagagaaataagacttattccagagacagataaaagaactcaatcttttcatgaacatgtcacccacaaatataaataatttaagtgctgtggcatggttctcttaatgttcttcaaaaagacagtttctatcattaaagaagaaaaaacatccaagggcagtgttcttattcatgattacaaaatgaactgattttacaaaataaatttctatgacagagaaaatgatagaagcacagggcataataatactggaaaactaaagaatgaaaagcaaacacttttaatacattgacaagagctttttgtgcattcagtttaatcaacataagatttcataagtattgagtgatcattarcatctcacatcctgcccacaggaaagatgataccatacatcttctaaaaatttctccagtggtcactggcactccacccacaggctctttgagcaccagaa

SEQ ID NO: 36408 - DNA, 776 bp, Homo sapiens
tagataaccagaaaagaattcagagacaagggctgaagaaagtgaaggatgctccttaccaaagggaattcctgtatctgacttacatcctgaaacaggccaaagccctcctctgtgttcaccggaaaagctgttgcaatcccttccttctggagcagggctatacaaatcattagaattgagggagcttttcaaatagccttctacaaaaccactggggctttttaggattgtattagagacccactgtaaggactgaactttaaccaccagttccacttcaacctaaacagtgctacctggagttatttcctgtgtttgaattttttttttttttgagacagagtttcactctgcagcacaggctagagtgcagtggtgtgatctcggctcactgcaagctctgcctcccgggttcacaccattctcctgcctcagcctcctgaatagctgggactacaggcgcccgccaccgtgcccggctaattttttgtatttttagtagagacggggtttcaccatgttagccaggatggtctcaatctcctgacctcatgatccgcccgygtaggcctcccaaagtgctgggattacaggcgtgagccgctgcacctggcctgaatttcttttaagctttttgctttaaatatatatatatatatatattagtctggctcaactattttgttttattggataaaggaatcaaagttgaaaaagcagtgacttgtcccatgtcatagggccattaagtggcagaactgggactagcactg

SEQ ID NO: 36409 - DNA, 640 bp, Homo sapiens
gccaatttgccacaatgtggaatgtgtaagctttgtgatgaccaagtcgggtaggctacactacgtctttcagaattctctttctactgcgttttcacatgaggtaggtcacaagagatacactcttgtgagaattggaaaaggctacaaaacaaccatatagacacctcccagtgattcaatcatacactaatctaggtgctgctgtgaaggaatttttcagctctaactaaagttcttacttagttcactttaagtctttagaaaggtataccatcctgagtgggtctgatttaattaatcagaaaaatgttaaaagagaggaggcccttcctgcattcagagactacaaacttcagctcatgctcatgcgtaatttgccagcgtaatcatgattatctctttttgtgttccttgacaacttctgcttatttagtgagtcctccattgtgtaaacatatacagtgtaatacatatatataattatatacayaatttatttacgagctaaatagcaattatattatattttattttattactaattttatgtttctatatagcctaacatgaatatatgtagaactattacaatagttgtgttaactgctaccctaatatctaaattatgtgatatgca

SEQ ID NO: 36410 - DNA, 573 bp, Homo sapiens
ttcctgggaatccacccaagagactgtatttcagtacgtagggcccgggaatctgcatttaaacaatctaccgcaaataattctatgctcagtacagttagaaaaccaccaagtctaaggattaaactaggtgatcctgcaggtgctttccaacccaacagcctgtgatgtactttgctgtcttctaagcattcagtcctcctcctctctgtccttgaaagcctactgtgtgtctcgcttctgccagtgtaggaaactgatgctcagccaatgttcaggaaaagcgtcaaaggggagactagcattgctgtccctgctcccagcaagagagcaaggagggtggaggaggacaagatggggctgtgggctggrgaaggggaaggaccagaacaggagggggctgaatgagccagcaggaggtgccttggaccttggcagtcactgggggccctgctggtcccatggcccctgcactccctgcccacccaactagcctgcccaaaaggagggaacagtgctagccagacacctttgtgctttgatcactaagagaactcactaccaccaagaaga

SEQ ID NO: 36411 - DNA, 1242 bp, Homo sapiens
tcaaccaacaaatagttgctaaattcctgctatgctacaggaagtaaggtactaagggaagatagaggaaaatgcaaggataaaacatacagtctacgaggaacagtaagatacacacacacacacacgtaactatcttacaggacaagacatcacaacaactaacatgtcttgagcacctaatatattcacgaccctctttagaaatatttcttcatctaacatctagaaatgttattttatgtaatccccacactggtctgcaaagtaattattcttatctccatattgtggttgacagaaatcaagggctagagaagttgtatccatctttggctgctcaagagtctattcggttcaaacaaaagactttgacttcttccctcccctctagactttcctgtgggtttgatgaataaaacataatgatcctaaccacttgtcacccaaactagaggagttttacaatgttaaactaaaaagatgtttgttagaccaggactgtcatacacgtcagcaatggtaggtccttgcctgtggggacttctgcacagggcccatagcacgtcttaacaccatgctcttcttgctaawgtctgtacagtcattatgggccagtacctactcactggagatcccaccttgcagtcaaggtggagggttgagggactggtgctctgatgagagactctgcagtccccagcctggtgatttctttatttgcatgacaaatacacagtttctgcagaacaagaaggctgccattcaaaacctctcctttgcacttactcaacagtggcacttagggtacagttgctggcaaacatgaaaaggataaaatcagctgagctgcaggggctcctgagaaatctgggcttggccgatgccatggtgacattggttggcatcacagctggtcatgggagagaacagagttcaagggaaaatagatccctagcctttatctctttttcctgagatatcttacctgaatcttttttaaaaaactgagaaccaaatgaattccctggtcactcagatcagttgaatgtgcctacctgggcactgagaatgtcaaatgccaagcatgtgatgtgatgtgggatgtgtcagagaatcagagatgttttgggagtgttgcaggagtagaggaggcaagagtgttgacggctttcacacacatctgtaccttcccaccctgagttggaaatatacactctgggcatcccactctcacatgca

SEQ ID NO: 36412 - DNA, 501 bp, Homo sapiens
  misc_feature (1)...(501): n = A,T,C or G
tcacttgagcctcgtatgtcaagactgccgtgagccatgattgcaccactgcactccagcctgggtgacagagcaagactctgtcaaaaataaaataaaataaaataannnnnnnnnnnnnnnnnnnnnnnnnnnnnnnnnnnnnnnnnnnnnnnnnnnnnnnnnnnnnnnnnnnnnnnnnnnnnnnnnnnnnnnnnnnnnnnnnnnntctgcatgaaaagctgatatccagagatggaacatttttctttggctcctctcctcaagggctttgttagagtatatacagaaggcctgtctccagctgagtcgcataaggcagtgattcttcagtggaatatargaggggatcaatttcctttaaaatgcagagaacattctcctgctcaaccactttgatacctccttacaatattgtattacccaaacaatagtttctaaacttcttatcctggcagtgaagatcctgaataagctgggtgtctcccaatattaatttcc

SEQ ID NO: 36413 - DNA, 591 bp, Homo sapiens
taacatgaaaataatgtttagcatttttaaaagaaagagagcaaattgattagaaatgctctttattttacsataatgaatctgtttttgtgtaaataccaatctcagttttgtgctatctttcctataatggctagggaagacagatcaacttttcgttgcagttcattgagtttaacaatttcttatcctcttttttcagaaaaaaatgaatacctaattcaaagcaaaaaaaaagttacatttgattgactaaaatgacataaaattcatagagttacacagcagcttttgagagtcaaactatagtgtttgtttttctctccaaattgcaacatttaaaaaaaatgcctaatcacatcattgataaaaatcatagtctacaagaataaaaccattatgctcatttctctgagcaagacttcactcaaatagcattttggcttttagtgaatcttggaagcagtggtttaactttcatggaattactatacattggtatattttaatgtaatgtaaattattccattcaatgatagtgaagttaacagtttatatttccatgtgattctacagacctgaatttcctgg

SEQ ID NO: 36414 - DNA, 652 bp, Homo sapiens
tgtaattttttgacagtggtttgatttataaaagtgaaagaaagatgatcttaagtcatctgattaatttcagaaaaaaattgttaaaaagtgtacaaagtatataaaatatcacccttgataaagaaagagcaggccaggcatggtagctcacaccagcactttgggaggccaaggtgggtggattacctgagatcaggagtttgagaccagcctggccaacatggtgaaaccccatctctactaaaaatacaaaaattagccaggcatggtggtgcacgccagtaatcccagcttctcaggaggctgaggcaggagaatcgcttgaacccaagaggyggaggttacagtgagctgagatcgcgccactatacttccccctgggtgacagagtaaggaggctcatcccaaaataaaacaaaacaaaacaaaaaacaaaaaaagaaaaagcacataccatactatataaatgcttaagtagtgaaaatttaaagttatgaatatatgtgctatgtactattaaagatataggaatgtgaaatagtaattacagaggcaaaatgtgactatgttaaagatttttaaaacaaaatgatgagtgtgtgaaatattctccatttgaagtaagtgagatttattttggactgtctta

SEQ ID NO: 36415 - DNA, 492 bp, Homo sapiens
ttttacactttctactggtgtattgtgaatttcttaaaaaaaaaaatttccttacttgcccttggtgtctggggaaaacttagataaaacaaaacaggaagaatcagtttcctctatayagttcatcttctgttatctctcaattaatatatataatatatataaatatatactaatataaatatgtttattatatattataatatgttatatattatacataatatacaagtatataataatactatataaatatatttcttatacataaaatatatatattttaaaaatatataatatataaatatttatatataaaatatatgaaaatatatacttatgtgatatattatagaatatattcttatatgttcatagtatatagttaaatattatataaatacatataattatatattatttataatatataataattatatacatttattatatataagatataaaacataaacataaaatatatttatt

SEQ ID NO: 36416 - DNA, 536 bp, Homo sapiens
aaataccatgcctattgaatttttgttgtggtgatggcatttcatataaataaattactttgacctttaataaatcatttaactattgcctatcyagatagcattaagtaaaatctaagaaatgtaccaaggataccacttatatattaacttcagcttagaaactctatgtgccactttttttccctttattattttcagagggaatatcctctctgttgccatgtatggtgatattgatgtccaatttctgtcagctgtctttgtgactctaaatcagagatcagcaaactataatccatgagccacacttgactcaccatctatttttgtgataaaactttacttgaaacacaggcacacccatttgtttatgtattatctatggctgcttttgtgctatagtggcagagttcagtacttgcaacagagaatttatgacctataaagcctaaaatacattctttttcagaaatgttaactagtatagttgtagtaatcattgagagattctctggtcttttacaggcatttgc

SEQ ID NO: 36417 - DNA, 377 bp, Homo sapiens
cttctcaggtgggactgggttccatgagagcaaaccccagtacacaggtgagtattaggttcttgtgcgcattgagtttgttattattttrttgaacaaaacaaacatgagagagaatcatacctgaatgagtcgtacgtgaatcctgggaggtgtgatccactggagtcattattgtaataatctaccactgcctgcactgagaccccagttattcatatccctcccaagactctgagtctcattccaccacagcatcaggctcaaaggccaggatctacatcaggtctggatagaaatggggctttctagctgggtatggtggctcatgcctgtaatcccagcactttgggaggctgaggcaggtggatcacttg

SEQ ID NO: 36418 - DNA, 828 bp, Homo sapiens
  misc_feature (1)...(828): n = A,T,C or G
ggaggnnnnnnnnnnnnnnnnnnnnnnnnnnnnnnnnnnnnnnnnnnnnnnnnnnnnnnnnnnnnnnnnnnnnnnnnnnnnnnnnnnnnnnnnnnnnnnnnnnnnctcgggggctgggtcggttgtgggatctcctcgggggctgggtcggttctgggatctcctcgggggctgggtcggttgtgggatctcattgggggctgcgtcggttctgggatctccttgggggctgggtcggttctgggatcttcgygggggctgggtcggttctgggatctcctcgggggctgggtcggttctgggttctcctcgggggctgggtcggttctgggttctcctcgggggctgggtcggttctggattctccttgggggctgggtcggttcaggattctccttggggcttgaacagttgcttcttcttgcctgtcttctcaactctgtgccttaaaccaacttaaccatcaaagaaaacaaattgtatgtgcttcctaccctgggtcttcttaattgtttgtggaattctggaaaattcgcgagcaaggctgttccctctaatttagtggttcagaaactgattttaggctttccatctccttgacgtcgaaaacttgccaaactttaacttctgtgatctttgattcactgcttaaaacaggtcctgggcatcaggtttagatccactgccgaaatggaaaatcctgttctcagacacagcggtgagtgtgatgctgcagacagttctcattgggatccaccttgtgattctcatttgggtctaatagcctttctttttttcagttccttgttattaagttgctgtttgaat

SEQ ID NO: 36419 - DNA, 828 bp, Homo sapiens
  misc_feature (1)...(828): n = A,T,C or G
ggaggnnnnnnnnnnnnnnnnnnnnnnnnnnnnnnnnnnnnnnnnnnnnnnnnnnnnnnnnnnnnnnnnnnnnnnnnnnnnnnnnnnnnnnnnnnnnnnnnnnnnctcgggggctgggtcggttgtgggatctcctcgggggctgggtcggttctgggatctcctcgggggctgggtcggttgtgggatctcattgggggctgcgtcggttctgggatctccttgggggctgggtcggttctgggatcttcgtgggggctgggtcggttctgggatctcctcgggggctgggtcggttctgggwtctcctcgggggctgggtcggttctgggttctcctcgggggctgggtcggttctggattctccttgggggctgggtcggttcaggattctccttggggcttgaacagttgcttcttcttgcctgtcttctcaactctgtgccttaaaccaacttaaccatcaaagaaaacaaattgtatgtgcttcctaccctgggtcttcttaattgtttgtggaattctggaaaattcgcgagcaaggctgttccctctaatttagtggttcagaaactgattttaggctttccatctccttgacgtcgaaaacttgccaaactttaacttctgtgatctttgattcactgcttaaaacaggtcctgggcatcaggtttagatccactgccgaaatggaaaatcctgttctcagacacagcggtgagtgtgatgctgcagacagttctcattgggatccaccttgtgattctcatttgggtctaatagcctttctttttttcagttccttgttattaagttgctgtttgaat

SEQ ID NO: 36420 - DNA, 828 bp, Homo sapiens
  misc_feature (1)...(828): n = A,T,C or G
ggaggnnnnnnnnnnnnnnnnnnnnnnnnnnnnnnnnnnnnnnnnnnnnnnnnnnnnnnnnnnnnnnnnnnnnnnnnnnnnnnnnnnnnnnnnnnnnnnnnnnnnctcgggggctgggtcggttgtgggatctcctcgggggctgggtcggttctgggatctcctcgggggctgggtcggttgtgggatctcattgggggctgcgtcggttctgggatctccttgggggctgggtcggttctgggatcttcgtgggggctgggtcggttctgggatctcctcgggggctgggtcggttctgggttctcctcgggggctgggtcggttctggrttctcctcgggggctgggtcggttctggattctccttgggggctgggtcggttcaggattctccttggggcttgaacagttgcttcttcttgcctgtcttctcaactctgtgccttaaaccaacttaaccatcaaagaaaacaaattgtatgtgcttcctaccctgggtcttcttaattgtttgtggaattctggaaaattcgcgagcaaggctgttccctctaatttagtggttcagaaactgattttaggctttccatctccttgacgtcgaaaacttgccaaactttaacttctgtgatctttgattcactgcttaaaacaggtcctgggcatcaggtttagatccactgccgaaatggaaaatcctgttctcagacacagcggtgagtgtgatgctgcagacagttctcattgggatccaccttgtgattctcatttgggtctaatagcctttctttttttcagttccttgttattaagttgctgtttgaat

SEQ ID NO: 36421 - DNA, 828 bp, Homo sapiens
  misc_feature (1)...(828): n = A,T,C or G
ggaggnnnnnnnnnnnnnnnnnnnnnnnnnnnnnnnnnnnnnnnnnnnnnnnnnnnnnnnnnnnnnnnnnnnnnnnnnnnnnnnnnnnnnnnnnnnnnnnnnnnnctcgggggctgggtcggttgtgggatctcctcgggggctgggtcggttctgggatctcctcgggggctgggtcggttgtgggatctcattgggggctgcgtcggttctgggatctccttgggggctgggtcggttctgggatcttcgtgggggctgggtcggttctgggatctcctcgggggctgggtcggttctgggttctcctcgggggctgggtcggttctgggttctcctygggggctgggtcggttctggattctccttgggggctgggtcggttcaggattctccttggggcttgaacagttgcttcttcttgcctgtcttctcaactctgtgccttaaaccaacttaaccatcaaagaaaacaaattgtatgtgcttcctaccctgggtcttcttaattgtttgtggaattctggaaaattcgcgagcaaggctgttccctctaatttagtggttcagaaactgattttaggctttccatctccttgacgtcgaaaacttgccaaactttaacttctgtgatctttgattcactgcttaaaacaggtcctgggcatcaggtttagatccactgccgaaatggaaaatcctgttctcagacacagcggtgagtgtgatgctgcagacagttctcattgggatccaccttgtgattctcatttgggtctaatagcctttctttttttcagttccttgttattaagttgctgtttgaat

SEQ ID NO: 36422 - DNA, 543 bp, Homo sapiens
tggaacctttccctttttcactatccttggaattctgggacaaaatggaaattctcttcccattcggctccctagagtataagaatactacttctttctgacaaacaaaaatracactgccctttcctgatcccctccaagtctctcaggataaaactctataaagcgatgagctttgtcccctacaacctcaatatgttgatctctatgttcattaacgcaaattgctggggtactcccaggtcaccctttgcccctgcacctctgccccgtggatctagaacctctggaatctatggcattatcccagatggacaaatgttgaccaaacttagctgcctgcccggggataacccctttggtctagtgccacttgggaagttctagtctcaaatctgatctagtacctgagatctacaggttgtggaggtatgagtgttagttctaaacctgagtgtgctcagaagaaactagccagatgtctagtagagcagaggctctaattggccctgcagagctccagaccatgatctgactttgatt

SEQ ID NO: 36423 - DNA, 620 bp, Homo sapiens
atatggtacattggctttggaactaggtggactcaacagcatgggccccatgcagtttcttcagctgtaatttttgttggtgatgtctgtgattacctcagtgaactaacctctgaaagcttgtgacttcagtggtataatttttctgaaggtgggggtgcctagctggttttcaggctgggcacattcaggagtgataggatggcagggtgtgtgatgggttctctggggcagcagggccactactgagctggcttttgggccaggcatgcacacatcaccagactactgtgtggcaatgtctccagggagatgagtctgccaccagactcactattgggcccrtcagctgtgtggtagtctctacagcagacagagctgatgaaaaagtggttgttggtctaggtgcaggtgcacacagtgcagtgagcagattgcttatgtggtggtagctctaggagacagggcagtcgccgctctgttaggcttgttatgggtatgcattggcacagtgggctgactggctgttctgcagctgccttgctgtgcagatccacctgttctttggggatgggggtgcaggcttagtgaagccaggctcgtggtgctacaggcactca

SEQ ID NO: 36424 - DNA, 620 bp, Homo sapiens
atatggtacattggctttggaactaggtggactcaacagcatgggccccatgcagtttcttcagctgtaatttttgttggtgatgtctgtgattacctcagtgaactaacctctgaaagcttgtgacttcagtggtataatttttctgaaggtgggggtgcctagctggttttcaggctgggcacattcaggagtgataggatggcagggtgtgtgatgggttctctggggcagcagggccactactgagctggcttttgggccaggcatgcacacatcaccagactactgtgtggcaatgtctccagggagatgagtctgccaccagactcactattgggcccgtcagctgtgtggtagtctctacagcagacagagctgatgaaaaagtggttgttggtctaggtgcaggtgcacacagtgmagtgagcagattgcttatgtggtggtagctctaggagacagggcagtcgccgctctgttaggcttgttatgggtatgcattggcacagtgggctgactggctgttctgcagctgccttgctgtgcagatccacctgttctttggggatgggggtgcaggcttagtgaagccaggctcgtggtgctacaggcactca

SEQ ID NO: 36425 - DNA, 689 bp, Homo sapiens
atgagaaaagtttgtacaagtgattctctgaatcttgacgtaagagtgagtgttctctgtgcagaaaccaggatcaggctgaagctcaccagccatcaggctctgccagagccatggcatagaggcatgacycagctttgtgtgtttgtgaaactgcaagtgagctggcctgactggagcacagcatgttggagaatggaggaagagaggaaaacaccgtgaaagaatagacttactgggaagctatagaggaaggtttgggtctggtcaaaaagtccaggtatggtaggtaaggaattggattttatcctcaggacaatcaagacccatggaaggttttaagaagagtaatgtggtcaattacatgttttttacaccctttctaatggctagcgtagggaaggtgagactggaggtgaagccagttaggagactattgcctgagaccaggcgaggggtaacacagttacggtgggatagaggcagcattgtgcctgagctaactcagactggctcatgacaactgattgtcaaatcttaaggaattttgcaagctggttgttaagcccagtcattcttataaattaaattatataaacttacaattcaataaattatatttttcagcctgggtgcagtggctcatgcctgtaatcccagcagtttgggaggctgaggcaagtggatca

SEQ ID NO: 36426 - DNA, 575 bp, Homo sapiens
cattgcaaaatcaggaaatttcatgtatggatggatgcctggcttctttggggaagaaaaatcagatctggcaaccctggggcagctggcagcctggcaacccacaaggcaacagtcatctggggctgctgggcccgagttctcatgygctccccgctcaagttgctctcggcacttgtgctctgttttccttggcctgaaggtctttgagcttctggagtcttagcatgaactctaaagaaaccagtttggctcagtctctgcctgtggcagctgaagctaatgggaggcagatcctggaactggccggtggggccgagtgtgcgtgcgtgtatgtgtgtggtcagggaagtgggtagtcaggcttacaggccagaggtgggtagggtagcggaggcaagaacttagggcagtggccaagcagccacactccttggcaggtcatgtgctctataccctgcaggtagggtagtccaggcacagagggcgcaggcttggcccaagggtatgcagggggcagttagtggcagagatggtgaggacctggtttccatctccctgcctggcgggccact

SEQ ID NO: 36427 - DNA, 575 bp, Homo sapiens
cattgcaaaatcaggaaatttcatgtatggatggatgcctggcttctttggggaagaaaaatcagatctggcaaccctggggcagctggcagcctggcaacccacaaggcaacagtcatctggggctgctgggcccgagttctcatgcgctccccgctcaagttgctctcggcacttgtgctctgttttccttggcctgaaggtctttgagcttctggagtcttagcatgaactctaaagaaaccagtttggctcagtctctgcctgtggcagctgaagctaatgggaggcagatcctggaactggccggtggggccgagtgtgcgtgcgtgtatgtgtgtggtcagggaagtgggtagtcaggcttacaggccagaggtgggtagggtagcggaggcaagaacttagggcagtggccaagcagccacactccttggcaggtcatgtgctctataccctgcaggtagggtagtccaggcacagagggcgcaggcttggcccaagggtatgcagggggcagttagtggcasagatggtgaggacctggtttccatctccctgcctggcgggccact

SEQ ID NO: 36428 - DNA, 519 bp, Homo sapiens
cagccccatcgaaatggcctgatatcttctccaaatgaaaagtatttttggatctctgatgatttatcttttttttcctccctctcactttgatctatgacaaaacccatacccatcttggagaaatttagtgatttctcctgaaaacatttgtgcaatgatcagatagatacacttcaaatacgaaccttctttttagttatatcgtccttgggaaaaaatacagacagtaatttaaaaactcaaataggggtaatgcaaagatatcagagtaaatatgatttttaaacccttttatttatttatttatttatttctgtgcagtgggggatgggagagagactgctgtgtgcatgaaggccataaaagggatgtatgcatcccttccaggtcctkccaggtataattaaaatgaagcctttcacattctttgatctcatttaaaagcacaattcacagaaacaaatcacccttttgctcctagtaatatttcatttgcttcagaatattttcactatg

SEQ ID NO: 36429 - DNA, 716 bp, Homo sapiens
cgtaaagaaacaaagaacaagttcaacaagtagaaaagttacaaacgtagtagatatgaatccaattatatcaataatcactttgaatgtgaatggtctaaacataccattgaacatattgaaaccccgtctctactaaaatgcaaaaaattagctaggcatggtggcatgtgcctgtaatcccagctacttgggaggccgagacaggagaattacttgaacttgggaggcggaggttgcagtgagccgagatctcgccattgtgctccagcctggctgaaagagcaagactctgtctcaaaaaaaaaaaaaaaaaaaaaaagggagatkgtcagagcatattaaaaaaacagaaggactcatccatatgttgcctacaagaaggatatgaaatacaaaaggagagaatgggatttaagaagtgatggtaaccaaatacatagataaatgaacaataatctaaataggtttgtccaataaataatatcacctgtaaaagtaattcatagttttggaagtttaaaacaaagtaggaaaaaaggcaataataatatgtaagattgggaggaggctgatctaagttaaaacattctaagatttttgcatttcataggaggaagatagatatattgataaacgttaggctgtgttaggtcaaggatgccagtgagcaaattaaggataacaattaaagggtaaccattatggtaatagaa

SEQ ID NO: 36430 - DNA, 1286 bp, Homo sapiens
ctccctagtccaaaaagaagagcaaattataatttaaaagtaaaatctagtaaaaagaaratatttgctcaacataaaacaacagtgaccaaaacacacacacacacaaaaaccccaccaaaacaaaataaaaataaacaaatgtcatttggggtattacactttggaaagtcctttaataaataaatctgtttcacattagcttagtgttaccgagacttgtttcaccagggaattccaaaagaaacataaggtatctagtgtttctcagatagttctcactgcttttaaaaaatactcacttatgggccagatgcagtggctcacgcctgaaatcccaacactttggcaggctgaggcaagaggatcacttgagcctaggagtttgagaccagcctggataacatagtgaaacctcatttctacagaaaattaaaaaaaaaaaaaaaaaaaaaaaaagaggcaggagcatcacttgagcccaggaggttgaggctgcaatgagacgtgattgtgccactgcactcttacctgggcaacaggagtgagaaaacagaaactatacttatgaatatctcacaaaacacaagtgacccactgatgtgctctaggcaacattttaaaccagggcatagatcctaactctgctgccagctctgtgaatgaaactgggcaagtcctttcccttctttgggcctcagtttctccatctccaaaataagccagtggtatgagattctctctgacattccttccagctttgaaggtgagagattctccagcaaaaaaaatatatcaaaagtctcctccaaactaagcacgtgctttaagtagcaattggaggctggcagaggatgatgatacttgttaaagagaagttacaaacatacctgatgtaaacacgtttcccagcttctccaaaaacctgggggattaaaaaacaaaataaaccccagaaaacattccaggaggttataagaaaccaatgcatcatctttggttcacgacagttgatgatattaccaaagtctcagcacttccacttactcactgtccagcctattggggaaaaccctggtttgagactcagtttcctcagctataaaatgggtataataattgctttggcgctttcccaaattcttggtataggcacttaatttatgacagcaacagagataagagaatagagatcctgcgacaggcttgtcaagccatttgtcaaaatgaagtaaaaacattgcttatcaagttacatttcatttgttggtagatttcccttggtt

SEQ ID NO: 36431 - DNA, 1286 bp, Homo sapiens
ctccctagtccaaaaagaagagcaaattataatttaaaagtaaaatctagtaaaaagaaaatatttgctcaacataaaacaacagtgaccaaaacacacacacacacaaaaaccccaccaaaacaaaataaaaataaacaaatgtcatttggggtattacactttggaaagtcctttaataaataaatctgtttcacattagcttagtgttaccgagacttgtttcaccagggaattccaaaagaaacataaggtatctagtgtttctcagatagttctcactgcttttaaaaaatactcacttatgggccagatgcagtggctcaygcctgaaatcccaacactttggcaggctgaggcaagaggatcacttgagcctaggagtttgagaccagcctggataacatagtgaaacctcatttctacagaaaattaaaaaaaaaaaaaaaaaaaaaaaaagaggcaggagcatcacttgagcccaggaggttgaggctgcaatgagacgtgattgtgccactgcactcttacctgggcaacaggagtgagaaaacagaaactatacttatgaatatctcacaaaacacaagtgacccactgatgtgctctaggcaacattttaaaccagggcatagatcctaactctgctgccagctctgtgaatgaaactgggcaagtcctttcccttctttgggcctcagtttctccatctccaaaataagccagtggtatgagattctctctgacattccttccagctttgaaggtgagagattctccagcaaaaaaaatatatcaaaagtctcctccaaactaagcacgtgctttaagtagcaattggaggctggcagaggatgatgatacttgttaaagagaagttacaaacatacctgatgtaaacacgtttcccagcttctccaaaaacctgggggattaaaaaacaaaataaaccccagaaaacattccaggaggttataagaaaccaatgcatcatctttggttcacgacagttgatgatattaccaaagtctcagcacttccacttactcactgtccagcctattggggaaaaccctggtttgagactcagtttcctcagctataaaatgggtataataattgctttggcgctttcccaaattcttggtataggcacttaatttatgacagcaacagagataagagaatagagatcctgcgacaggcttgtcaagccatttgtcaaaatgaagtaaaaacattgcttatcaagttacatttcatttgttggtagatttcccttggtt

SEQ ID NO: 36432 - DNA, 1286 bp, Homo sapiens
ctccctagtccaaaaagaagagcaaattataatttaaaagtaaaatctagtaaaaagaaaatatttgctcaacataaaacaacagtgaccaaaacacacacacacacaaaaaccccaccaaaacaaaataaaaataaacaaatgtcatttggggtattacactttggaaagtcctttaataaataaatctgtttcacattagcttagtgttaccgagacttgtttcaccagggaattccaaaagaaacataaggtatctagtgtttctcagatagttctcactgcttttaaaaaatactcacttatgggccagatgcagtggctcacgcctgaaatcccaacactttggcaggctgaggcaagaggatcrcttgagcctaggagtttgagaccagcctggataacatagtgaaacctcatttctacagaaaattaaaaaaaaaaaaaaaaaaaaaaaaagaggcaggagcatcacttgagcccaggaggttgaggctgcaatgagacgtgattgtgccactgcactcttacctgggcaacaggagtgagaaaacagaaactatacttatgaatatctcacaaaacacaagtgacccactgatgtgctctaggcaacattttaaaccagggcatagatcctaactctgctgccagctctgtgaatgaaactgggcaagtcctttcccttctttgggcctcagtttctccatctccaaaataagccagtggtatgagattctctctgacattccttccagctttgaaggtgagagattctccagcaaaaaaaatatatcaaaagtctcctccaaactaagcacgtgctttaagtagcaattggaggctggcagaggatgatgatacttgttaaagagaagttacaaacatacctgatgtaaacacgtttcccagcttctccaaaaacctgggggattaaaaaacaaaataaaccccagaaaacattccaggaggttataagaaaccaatgcatcatctttggttcacgacagttgatgatattaccaaagtctcagcacttccacttactcactgtccagcctattggggaaaaccctggtttgagactcagtttcctcagctataaaatgggtataataattgctttggcgctttcccaaattcttggtataggcacttaatttatgacagcaacagagataagagaatagagatcctgcgacaggcttgtcaagccatttgtcaaaatgaagtaaaaacattgcttatcaagttacatttcatttgttggtagatttcccttggtt

SEQ ID NO: 36433 - DNA, 681 bp, Homo sapiens
ttagcctcccaactgctgggattacaggagtgagccattgcgccctgcctgtacattaattaataaactactggttgcaccatcttaaatgctctggcctattctagtttctctctcagaagaatgcccactggaaggctcctgagggtgggggttggtggagaatcagactgaacacttaggacttatctttctgagccttcttttctacagagtgaaattctttctgcaatttatagggtgtgtgtctgtgtgcgtgwatgtgtgtgtgtatatacactagagttcacctcattaatgcattatcgactgcaattttgtctcttcatttttcctttaggatctgagggtatttttctgcctttcagctgtggccagctgtgttttatcccagcaagtctagatctgacattgtcttttcagaattttagcagcagtaccatgacagctgttaaccttatggctctcagatgtgcttaaggtgaattttttgttctttgctttctctctttcagcgctggaaaaggatactttaaaaacaaacacaatttttcaacccatgagtactgtcggcctcttcctatacatacctacattcatacctcctgtccaatgctgggccattggctcctctaccaaaggagaaatgcatttaggttaccaaaaaaggttttctgccgg

SEQ ID NO: 36434 - DNA, 681 bp, Homo sapiens
ttagcctcccaactgctgggattacaggagtgagccattgcgccctgcctgtacattaattaataaactactggttgcaccatcttaaatgctctggcctattctagtttctctctcagaagaatgcccactggaaggctcctgagggtgggggttggtggagaatcagactgaacacttaggacttatctttctgagccttcttttctacagagtgaaattctttctgcaatttatagggtgtgtgtctgtgtgcgtgtatgtgtgtgtgtatatacactagagttcacctcattaatgcattatcgackgcaattttgtctcttcatttttcctttaggatctgagggtatttttctgcctttcagctgtggccagctgtgttttatcccagcaagtctagatctgacattgtcttttcagaattttagcagcagtaccatgacagctgttaaccttatggctctcagatgtgcttaaggtgaattttttgttctttgctttctctctttcagcgctggaaaaggatactttaaaaacaaacacaatttttcaacccatgagtactgtcggcctcttcctatacatacctacattcatacctcctgtccaatgctgggccattggctcctctaccaaaggagaaatgcatttaggttaccaaaaaaggttttctgccgg

SEQ ID NO: 36435 - DNA, 1195 bp, Homo sapiens
tttggtgcctcaaataatgtttttgctatcacgatgctttggagaggaaagagaagaagaatgatcacttaaaatcaaaccttggggacagtttcattggaaaaaaagggccatgagaaacaagcaccagctttctgcttgtatcatagtagaattgccatggatccatttgaatcgacaatgcacaagcgatgcaatcatttgtggtgccatagtgtttaccttctcggcttagttcccttgaagaaattaatgagccatctttatgtttcaggccctaggccaggcactggaaatatgcatgagtaaaacatcgtsccaacaccccatgataaatgttctgatgggtaaatgtgcaggatattagaaaaatccaaatgcagtgtgagtatgcataatctaggaagagaaaatacaagagaaatacagtacaacaagaacaccaaagtaaatgaaggaaaacctctaaggtggaagctgagaaaaattattggtcctagaaggaaatggggccagaagacatgggacatagttgctgctgtggtttggatatttatccccccaaaacctcatgttgaaatttgatccccaatgctggaggtggagcctagtgggaggtgtttgggccacaaggacagatccttcatgaattgcttggtgctgtcctgctgtcctggtggtaaagagttcttgctctattagtttctgtgagagctgattatgaaaaagagcctggcacctctcccatctctcgttctctctctggccatgtgatctctgcacatgctggctttcccttcaccgtctgccatgagtggaagcagcctgaggctttcaccagatggccaatcgtccagcaagcagaattatgagccaaataaatcttttttctttgtaaaaaccagtctcaggtatttctttatagcaatacacatggactaagacagttgccacagaaaaaagagccaggaagagcaagtctcagtagttaatggatctcatttcaaagaaatttatcagaggattctagactttaagagaaagggggtccttgaagcttattaacttgctcatagcacaaatgagtacacaaaatccaagatcacaaagcaggtttgtggcagaaacaagactggaagctagaaagtctgaccttaagctcatgtttcactgttttattatttaaattatttag

SEQ ID NO: 36436 - DNA, 503 bp, Homo sapiens
aaacaaaacaaaacaaaacaaaaaaacctgtctatgaggtttccagacaactaaagctacatttagccaaatgctgtgaagcagggcatgatgttttggaagctagtagatttgagtttgaatcatagtgctgccattttctacactgtttgacgttaggkattttacttaagctccctggcctctactcttctcatctctgaatgtacaggaacaaggctaactgaatcagattattgtacagattcaatgcgatatgtggagcccctggcccataacagaggcacagcaagacacttgaattctagagcaactgactaaggcccctgcaaaaataagcatatcagtggccttaaattctctgtggaatcagagtaagtatagataagtaaacacagaaactgaacttgtccttgggcaagtgtcagatataaaaacacaaaaacatcatgtggtttctatcaatgatttttctcaaaggtacttgagacatgagaatagca

SEQ ID NO: 36437 - DNA, 503 bp, Homo sapiens
aaacaaaacaaaacaaaacaaaaaaacctgtctatgaggtttccagacaactaaagctacatttagccaaatgctgtgaagcagggcatgatgttttggaagctagtagatttgagtttgaatcatagtgctgccattttctacactgtttgacgttagggattttacttaagctccctggcctctactcttctcatctctgaatgtacaggaacaaggctaactgaatcagattattrtacagattcaatgcgatatgtggagcccctggcccataacagaggcacagcaagacacttgaattctagagcaactgactaaggcccctgcaaaaataagcatatcagtggccttaaattctctgtggaatcagagtaagtatagataagtaaacacagaaactgaacttgtccttgggcaagtgtcagatataaaaacacaaaaacatcatgtggtttctatcaatgatttttctcaaaggtacttgagacatgagaatagca

SEQ ID NO: 36438 - DNA, 548 bp, Homo sapiens
gcctgataatgcagtgagatagaactgcaaatgtactttaggttatagccagaatttacagccttgtttcccctctattggacattgttccaagcaacactgttttcccggaaatactgcagactgtttatttaaggacaaaaggggaccatgtggctttttgaaatgtcactgtcaagcactgggccatgacaattctgaccaagtatggcagtgttctagtattaggtctccaggaattattcccaggaggcgagtagtcttcaaagataaaatgatggtgcagatggtcacacagcacgtatgagagagatataccaagagagacactccatctctacaaaaaaataatgagaaggtgggcgtggtggctcatgcctgtaatcccagcactttgggaggccgaggygagtggatcacctgaggtcaggagttcgagatcagcctgaccaacatggagaaaccctgtctctactgaaaatacaaaattagctgggcatggtggtacatgcctgtaatcccagctactttggaggctgaggcaggag

SEQ ID NO: 36439 - DNA, 620 bp, Homo sapiens
taaaataaaaagttcaaccaagctcaaaaaaaagttctatcttaagagtcaaaattcaaaagtttaacaatatccagttggcaaggctctgggtaaacaggcatttaagatccctgatgacagtaatttgggagctgttccagagtacagttgactgtgaggtagcagtcctttaaataataattattctacatgaattgagtacttactactctgtgccagtcactgttctaagcaatttctataacttgtataattatagaacccctttaatccttgcatatgatagttctgttactatccctgtctcattcacaaggaaaccaaggcacagagtggttaaggaacttgcacagctagaaatagctgacctggaattcaaacacaggtagtctgactcctgactccaaaaccagtattttctttttttattttatttattattattwtttttgagacggagtctcactgttgtcgcccaggctggagtgcaatggcactatctcagctcactgcaacctccgcctcccgggttcaagtgattctcctcccttaggaggagagctaggattagaggcacccgccaccacgcctggctaatattttgtatttttagtaga

SEQ ID NO: 36440 - DNA, 1001 bp, Homo sapiens
cccaggccttcctcccccagttcctcactccttctatccaaagacacccactccacaacgagacccacgagagagagaaagagaaaaggcagcccaaacctacaaggtagaaaccgagaagagaggcagccaggtgccatcacttggcccagagagggaagttgggaacctgaggtggaaagaaccctcctgatcactggggacccccagcccaggtcccagttctagagaagagacgtggggacatttgaacgtaagcctaagaggctgaggccgggtcccaaagcctgttttctccagctttcagttctctggactgaaaaaggcatcttggcacttcagagcgagacaataagaaccagctgacactgagttccccccacccctgggcaattcccagcagcctgtgtggggggcaggggaaaaagagcgctgaacaggggaatggctgagcasgggggaggcccgactccctgagcccagcccagcccgggctcctagcagaggagcagagctggagagcaagtgacagggcctatcacagaagctggcctggcccacaggcagccaaccccagcttccagctgcagctcccgcaacagcacccccatgcctgccacacctggacactagctctcacaggagccgttctgggcatgcgagggttggatctgccaagactgaccagggcctcctcccacacctttggccacagaaaacagagtatgttaggcacctcctggctggggtggaacaagacttatggcctcagagagagtaagagcctcactctgtggctgtgatcttaacctccaactaacttagagacaaacgggtgctatgactggcccaggttccctctcctcaaaaatcagctgtggaacctaagagggagaagcaccagggtgacgagtgggccaaagaggcgccaggaggggagggaaagaaggatggaaaccaagctcatggtggggtggggagcagagccctggccacagcca

SEQ ID NO: 36441 - DNA, 526 bp, Homo sapiens
accattccacatgtataataatagcactcactacccaggattgtttgaggattaaatgagatcatatatttaaagttacaaatttaatgtattaaaatacccgtgttagagtrgggcatggaataactctatacaatatgagatattattaaacacggccgaatgtggtggcccacgcctgtaatcccagcacttaaggaggttgaggtgggtggatcacatgaggccagtagttggagaccagcctgggcaacatggtgaaaccctgtctctactgaagatacaaaaaaaaaaaaaaaaaaaaaaaaaattagctgggtgtggcgcacacctgtaggcccaactaccctggaagtagaggcaggagaatggcttgaacctgggaggtgaatgctacagtgagccgagatcacaccactgcactttagccggggcgacaaagagagagtccgtcaaaataagtgtaagagtagagtaaatgtttctcaatgtataacacgacacgttgacacattcatttaactca

SEQ ID NO: 36442 - DNA, 920 bp, Homo sapiens
gttcagtcggaatctgacttctcaggcattcccacgttcttttcaaaggtgatattttgaaataacaaaaacaaaattcacattatctagacttcactgggtacttagtctctcggtcagcaggggataggtgatgctgcagtgaccagaacccctcacagctcagtagccgcatagaacattgattttcttgttcgggctgtaatgttccatgagggtctgttggggcattcttctgatygtggtcacacagtgaccctgaatgatggaggctttatcttgcatgctaccatgaccaccacagtagagggaagggtgtgtggtgagtctctcactggctctttaagcttcattggccgaaacaagtctcatggccaagacctactgcaaatggagctggaaagcacaattccgtcctgtgcctgaaggagaggagaaccagaatgcagccctaatggcccccacacctcctggcgtcagactctgcgttacatgcctcacatataccatctgtaatctttacctcaattatgcaaggcacaggcccctattcctatctgatagataagaaaacggattcagagaggtcaggcaaattgcccatggaaacacaaggctcagattggaatccagtctgtctgctaactaaatgagtgtgcttccctctctgttacactgcctttgatagcgtaggtgttccctttcttccccaactgaacaaatgaagaattggatagtaatgttgcccctcgtcctgtgatcattttttatgcagtgttgtatattgccctggaggctgggggtgacaattgctgatggccctgtgggagtggtccagctgggagctgatctattgagtcatgtctttagggatatgatatggacagtccagagcccagaagtgacagaagaagaattag

SEQ ID NO: 36443 - DNA, 920 bp, Homo sapiens
gttcagtcggaatctgacttctcaggcattcccacgttcttttcaaaggtgatattttgaaataacaaaaacaaaattcacattatctagacttcactgggtacttagtctctcggtcagcaggggataggtgatgctgcagtgaccagaacccctcacagctcagtagccgcatagaacattgattttcttgttcgggctgtaatgttccatgagggtctgttggggcattcttctgatcgtggtcacacagtgaccctgaatgatggaggctttatcttgcatgctaccatgaccaccacagtagagggaagggtgtgtggtgagtctctcactggctctttaagcttcattggccgaaacaagtctcatggccaagacctactgcaaatggagctggaaagcacaattccgtcctgtgcctgaaggagaggagaaccagaatgcagccctaatggcccccacacctcctggcgtcagactctgcgttacatgcctcacatataccatctgtaatctttacctcaattatgcaaggcacaggcccctattcctatctgatagataagaaaacggattcagagaggtcaggcaaattgcccatggaaacacaaggctcagattggaatccagtctgtctgctaactaaatgagtgtgcttccctctctgttacactgcctttgatagcgtaggtgttccctttcttccccaactgaacaaatgaagaattggatagtaatgtygcccctcgtcctgtgatcattttttatgcagtgttgtatattgccctggaggctgggggtgacaattgctgatggccctgtgggagtggtccagctgggagctgatctattgagtcatgtctttagggatatgatatggacagtccagagcccagaagtgacagaagaagaattag

SEQ ID NO: 36444 - DNA, 920 bp, Homo sapiens
gttcagtcggaatctgacttctcaggcattcccacgttcttttcaaaggtgatattttgaaataacaaaaacaaaattcacattatctagacttcactgggtacttagtctctcggtcagcaggggataggtgatgctgcagtgaccagaacccctcacagctcagtagccgcatagaacattgattttcttgttcgggctgtaatgttccatgagggtctgttggggcattcttctgatcgtggtcacacagtgaccctgaatgatggaggctttatcttgcatgctaccatgaccaccacagtagagggaagggtgtgtggtgagtctctcactggctctttaagcttcattggccgaaacaagtctcatggccaagacctactgcaaatggagctggaaagcacaattccgtcctgtgcctgaaggagaggagaaccagaatgcagccctaatggcccccacacctcctggcgtcagactctgcgttacatgcctcacatataccatctgtaatctttacctcaattatgcaaggcacaggcccctattcctatctgatagataagaaaacggattcagagaggtcaggcaaattgcccatggaaacacaaggctcagattggaatccagtctgtctgctaactaaatgagtgtgcttccctctctgttacactgcctttgatagcgtaggtgttccctttcttccccaactgaacaaatgaagaattggatagtaatgttgcccctcgtcctgtgatcattttttatgcagtgttgtatattgccctggaggctgggggtgacaattgctgatggccctgtgggagtggtccagctgggagctgatctattgagtcatgtctttagggatatgatatggacagtccagagcccagaagtgacrgaagaagaattag

SEQ ID NO: 36445 - DNA, 998 bp, Homo sapiens
tatgactcagaccctcatgggtttttgttgcttaatctttttatgcaggaatgacactaaagggagatgcattattttttggtagctattatataaaaaaaatgagcatccttaatgtgaaaccatttacaagactcagtggattatgttgaatccacagtaattcttgattatctcctgagatcactgatatgggcacagccccaaagtctgacgtgaaagctgcttttcttttctcaggaagctcttgccaaattgatttctgagttatgggattacaactcaagcctctcatttatcaataaatagttatttgaaactatttttcatggccaaactcatcaaaaagtagaaagaaatgcttttatgtttgatgcatacattgaatacacagaaaagaaacttcatggtatttggcctggtagtttacagtccttaaaaagggctaagatttaatcatttaaagcatttgtgtgaccttgctattctgaatagtcttgggcckgtcctcaaagtgaggtccctgggccagcaatgtcagcatcccctgggaacttgttataaatgcagattcttggtgtctgtccaagacctactgaatcagaaacctccggcagttgggtccagcaatctattttcataagccctccaggtaattctgaagcatgccaaattttgagaaccaccactctaagacaatttggattttcaaaatagtttattttgacagatattgaagtgtacagtttagtatgtgcacagatttgtgccactaacaccatgatctgattccaaaacattttcatcaccccagtaggaaattttgcacccaagtggtcatccagtattctcttttctcccaagttcctggcaaccacttatctgttttctgtctctatagatttgtccattctggttgtttcatataaatcaaagcatgcaatgtgtagccttttgggtctggcgtcttttcacttagcataatgctttcaaagttc

SEQ ID NO: 36446 - DNA, 998 bp, Homo sapiens
tatgactcagaccctcatgggtttttgttgcttaatctttttatgcaggaatgacactaaagggagatgcattattttttggtagctattatataaaaaaaatgagcatccttaatgtgaaaccatttacaagactcagtggattatgttgaatccacagtaattcttgattatctcctgagatcactgatatgggcacagccccaaagtctgacgtgaaagctgcttttcttttctcaggaagctcttgccaaattgatttctgagttatgggattacaactcaagcctctcatttatcaataaatagttatttgaaactatttttcatggccaaactcatcaaaaagtagaaagaaatgcttttatgtttgatgcatacattgaatacacagaaaagaaacttcatggtatttggcctggtagtttacagtccttaaaaagggctaagatttaatcatttaaagcatttgtgtgaccttgctattctgaatagtcttgggcctgtcctcaaagtgaggtccctgggccagcaatgtcagcatcccctgggarcttgttataaatgcagattcttggtgtctgtccaagacctactgaatcagaaacctccggcagttgggtccagcaatctattttcataagccctccaggtaattctgaagcatgccaaattttgagaaccaccactctaagacaatttggattttcaaaatagtttattttgacagatattgaagtgtacagtttagtatgtgcacagatttgtgccactaacaccatgatctgattccaaaacattttcatcaccccagtaggaaattttgcacccaagtggtcatccagtattctcttttctcccaagttcctggcaaccacttatctgttttctgtctctatagatttgtccattctggttgtttcatataaatcaaagcatgcaatgtgtagccttttgggtctggcgtcttttcacttagcataatgctttcaaagttc

SEQ ID NO: 36447 - DNA, 461 bp, Homo sapiens
ggacctgctgacttatgcgtgaagggttaagtctggatattgagtttgagaatcattcgcatctctgcatagaggtcagagttggagccagggggctgaatgagatccctgaacaaatggcagagacaagagacgaagacccaggaccaggataaagaataaggggcaaaatggaatccaagagagagagaaaaattgttaagaaggagaagactaataatctcccactcagcacctggcatcatgcacacattctcacagaagcctcacgaaggcccaggaagaagcatgattatctcarttttgtagatgaggaaacaggattaaatgatgagaaggtggcaaggacgtgggaccttgggacaggctgggctccttctacaaggtgggcagagaagggagtgggagagagagcttagtgcataagagcatatcagagtgaaagcaaagggcatttttaa

SEQ ID NO: 36448 - DNA, 960 bp, Homo sapiens
ccttatttttatttacctctttgtaatgtgaacactatgacccttcttggaacttccttcactcctctcttccttggttttctatatgtcttggtcttcttcccctgaacattccttaaatgttggtgttcccctgggcatcccacagaagattcttaaaataatttatgcactttctttgcaacattttattcagtccatggcttcagcttgctgactcccagatttgtgtttccattctaaatktcttcctggagcttcacatctgtatatgtaaatgtctgctagacacctcctcttggatatctgcaggcacttccaggtaaggggtgcaaagtcagactcactgttttcactctctatagaactgtttccatataggaaacataggaaaatataggactagcttagtaattttcaagctatgagtcatcactcattagtgagtctggaaataatttagagggttgtgatagcattaaaacaaacaagcaaataaacaaaaaataacacacacatagacacacacatacaggtgagtttacattagaatataagctccctgagagcaggcatggtttactcttttattttgtttactgttttatttttagcacctagaacagtgcttggcacatatactggatcaacatatatttgctgaaagaatgaatgtgtactcatttgggaggtaaaatgtatatcctactgtgggttgtggtcaagaaagctgttggaccaaaagctaatgatattttcaactcaaaaaattataaatatatgattgtgttatatttttcaatgctctattgttcaagtttactggtggttaaggtctacggcaggactcttgatatttttgcttgcgtggtgaacattggagaggcctgggtgaaaggagaaaggagtggaatttggtgaatgtggttgggaataagcagtgggctagatgaaacagtg

SEQ ID NO: 36449 - DNA, 677 bp, Homo sapiens
ggtcctttacaaaaaataaaaatttccaaaatagggaagggaatggaggttgcttaatggatgaagggacacaaatgcttttttttaaagacttcctggcccctcccctgatttgcgcagtgtttcttcttctggctgttatctctcttttgcccatccctgagaccctagaatacaaaaacatcatggctaaaggagtggaaaacactacagtgaaacaatgaagattttcttttttctttctttcttttcttttttttttgcactctgccacccagactggagtgcagtggcasgatctaggctcactgcaacctctgcctcccgggttcaagcaattctcctgcctcagcctcctgagtagctgggaatacaggcgtgtgccaccacacccggctaattttttgtatctttagtagagacagggtttcaccctgttagccaggacagtctcgatctcctgacctcaggtgatctgcccaccttggcctccgaaagtgctgggattataggcatgaaccactgtgcccagcggattttcttacatagattgatttccaaatggaaaaacatttttgagcgttcgtgatctacaggtttgttgatgttgttgttgctgttgtgtcatagatcttcttgaaactggaatggaaaccatgattattggcagctaaata

SEQ ID NO: 36450 - DNA, 1036 bp, Homo sapiens
  misc_feature (1)...(1036): n = A,T,C or G
attatgtcacttgtcgtcattcaagggattctttcattttttgaatatgaagaaattgttctgggcagggttttcaggtgaaagaaggaagaaactgaacatggacgacaaactagcaggcagcgtatctcttctttaactttcttctttttccctgcctccctgtccctttctccctctcttcctcccttcccattcctccttcccttggtccttttcttttccttcccctccctcttccatccttcaagggcaaactctgtctggttagtgaggaaggatggttcagattgcacaagtgcagcagtgggtgtggaaagtccagggaggccaggctgctggagcaaggctggaacagagttggggtggggctggagcagaattggggcaagagcggaagagagttgggatgtgcatccagatagaaataataggacgggccaggctcacgcctgtaatcccagcactttaggaggcgtgaggcaggcggatcaggaggtcaagagattgagaccatcctggccaacatggtaaaaccccgtctttactaaaaatacaaaaattagctgggtgtggtggtggttgcctgtagtcccagctactcaggaggctgaggcaggagaatcgcttgaactcaggaggtagaggttgcagtgagcagagatcatgccactgcattccagcctgggccacagaccaggactccgtttaaaaaaaaaaaaaagtaataagacaggggtcccaggaggctatgtagtatgatatgcaggataatgagaatgagctaaaatgcctgagaaaaaaattgctgattcctagcttttattccttaactacaaaatattgatatttttgtttatatatttgaaaatatttagactattttcartataacaaatggttctttgactttggttcttattaaataaatnnnnnnnnnnnnnnnnnnnnnnnnnnnnnnnnnnnnnnnnnnnnnnnnnnnnnnnnnnnnnnnnnnnnnnnnnnnnnnnnnnnnnnnnnnnnnnnnnnnnatttt

SEQ ID NO: 36451 - DNA, 1566 bp, Homo sapiens
atttatcagtgtaatattacaagtcggtagtgatcttataatggaagatcttggaagtcctgtagaatccccattggttgggtgagttctggatatttgaggcaaattagaacactccagaatcatgaacctcaaccagaattgcagcctacataggattttcccttcagggaaaccagaaagttataaaattgttttcttttcttttttttctttttcttctttctttttctttttctttctttytttttttttttttttgagatggagtttcactcttattgcccaggctggagtgcaatggtgcaatgtcagctcactgcaacctccgcctcctgggttcaagcaattctcctgcctcagcctcctgagtagctgggattacaggcctgtgccaccacacccagctaattgttttttttttggatttttagtagagatggggtttctccatgttggtcaggctggtctgacctcaggtgatctgcctgccttggcctcccaaagtgctgggattacaggcgtgagacaccacgaccagccgggcaacagtgtttattttcatacaggtgactgcctttatagatagataatactaaaaatctgcaaagtaggatctctgcatggctgactccatcttttaaaccttaattttaattcagagacaccatcattttgggaaaactagtcatgtgcagtgacatttttttttccacctcacaggctaaaaaaatcttttgtgagcccagcaacttgaatggtgcttatgtgcaatttgtttgtcacaaggggtgggaagaatcagaagagaagtgttctctggagctgtgtgctggagagaatgaaggaatgaaggcgagctgtgatgtggaaaaatgagctcactgactgggttgctggtattctacatttgctctgggagtcctgtcaagcattttctttgagttttgttgttgctgtcgctttgttttcttgggcatcatatctgcttcttccaaaacaatcaccccctcctggcccccactccccaggctagtctgtcaggctgcacggctgcctttcccgtgtgtgtttgaggccatggtcttttgctgcttttctcatgccttttctttatgatgtttcagctcatccaccatacaccatgtgctttagagtgaaattctacccacatgaacccttgaagattaaagaagagctcacaaggtattttttgtttgtttgtatgtttaacgtgcacctttaaccagccagaatctctttggtcttgcaggctagatgggcctcctgtctagagctgaccgtctcagtgttgcaagcttggaattcagcgtttttgcttggaatgcttctcttacactgaattgttttgggattttttaaaaaaacaattgtcattgagagtgtaattaactgcagaaaaaagcactggctatgatgggggaggtgttctctgaaaacatctgacagtggggtgctaaaaataaataggaggcgtctgtcttcgagacatgggcaaattcatacccagtacagtccctagtctatcttttggatctcagcttt

SEQ ID NO: 36452 - DNA, 606 bp, Homo sapiens
agaatgaatgtggtctcatgtgggagaataaacattttggattcaggcactaagcagtctgaggttatatgctggataatttaggaaggccttgggggaaaactaacatgctagaacctagaaactttgggaaatccattcctgtggaaagttgagctgtgtacagtttctacagtggggaagaatggtggtttgttaatttgttaactaatttgttaacaggcaaaacagagattgactttggtcatwcaccagaaaattcaattgctctctactgtctacagaatgactctgcagaatagataggaataaaaccaatgtttccaaaggtaaaaagtgtacaggtacaatgtttacagaaaaggacaggatttgtgttccatcagcagccaatcaaatattattattgcttttctttttgatttagcagtgtatacatgaaaaaaggaatttcatttctttcaattattatgttctttaatatattggcttaaatttcctgtttacctgtaacccatacatagatcaagagaaaggaattttaggttaaagaattatttaatctttgcatatatatttcttagggagatacagttttagacctgc

SEQ ID NO: 36453 - DNA, 606 bp, Homo sapiens
agaatgaatgtggtctcatgtgggagaataaacattttggattcaggcactaagcagtctgaggttatatgctggataatttaggaaggccttgggggaaaactaacatgctagaacctagaaactttgggaaatccattcctgtggaaagttgagctgtgtacagtttctacagtggggaagaatggtggtttgttaatttgttaactaatttgttaacaggcaaaacagagattgactttggtcattcaccagaaaattcaattgctctctactgtctacagaatgactctgcagaatagataggaataaaaccaatgtttccaaaggtaaaaagtgtacaggtacaatgtttacagaaaaggacaggatttgtgttccatcagcagccaatcaaatattattattgcttttctttttgatttagcagtgtatacatgaaaaaaggaatttcatttctttcaattattatsttctttaatatattggcttaaatttcctgtttacctgtaacccatacatagatcaagagaaaggaattttaggttaaagaattatttaatctttgcatatatatttcttagggagatacagttttagacctgc

SEQ ID NO: 36454 - DNA, 657 bp, Homo sapiens
aaaatgtggcacatatacaccatggaatactatgcagccataaaaatgatgagtttatgtcctttgtagggacatggatgaaattggaaatcatcattctcagtaaactatcgcaagaacaaaaaaccaaacaccgcatattctcactcataggtgggaactgaacaatgagatcacatggacayaggaaggggaacatcacactctggggactgttgtggggtggggggaggggggacggatagcattgggagatatacctaatgctagatgacgagttagtgggtgcagcgcaccagcatggcacatgtgtatgtatgtaactaacctgcacaatgtgcacatgtaccctaaaacttaaagtataattaaaaaacaaaaaaacaaaaaaacaaatatactggacccagatgatcaaggtataaatatcttcagactgaacagtatctgttcaggagcatattatatctttcacattcagtcatatgaatcctaaagattttactcactttgtaaaatgtttttttaaaattctgactttgttaaaattaattttaagttccggggtacatgtggggatgtgcaggtttgttacataggtaaatgtgtgccatggtggtttgctgcacctatcaacccatcacctaggtattaagt

SEQ ID NO: 36455 - DNA, 511 bp, Homo sapiens
ttgctgagggcagacattgttttaatcctccatttattcctacyttttgggttcaggttctagcacagagttagagctcaaaaatgcctgtttatctgaactaaagattgcacatgataccctgtgtggtttctcagaagacactgccagaggagtttgaccagctttggctctaggcttagatcatgatgctctctggaagtgctgaccaaacgcctcagcaatgcccggtgatttgtgaacagcattgcctccaggatgtttgaaagaccatgtatgtgagataaatagtgatctcggtgagtatggggttttctttgactaatattcaaggtcaggtctttctgagtggcagagaccaagaaaagtgaggcagtgactctttcatgcttttatagcatggttgtccggcaactgctaactatatagctctcatcccatggtagtgaaagaaaggtaaggagtaggagtgaggggcaggggttggtgggcgggctgggagggtaggggg

SEQ ID NO: 36456 - DNA, 511 bp, Homo sapiens
ttgctgagggcagacattgttttaatcctccatttattcctaccttttgggttcaggttctagcacagagttagagctcaaaaatgcctgtttatctgaactaaagattgcacatgataccctgtgtggtttctcagaagacactgccagaggagtttgaccagctttggctctaggcttagatcatgatgctctctggaagtgctgaccaaacgcctcagcaatgcccggtgatttgtgaacagcattgcctccaggatgtttgaaagaccatgtatgtgagataaatagtgatctcggtgagtatggggttttctttgactaatattcaaggtcaggtctttctgagtggcagagaccaagaaaagtgaggcagtgactctttcatgcttttatagcatggttgtccggcaactgctaactatatagctctcatcccatggtagtgaaagaaaggtaaggagtaggagtgaggggcrggggttggtgggcgggctgggagggtaggggg

SEQ ID NO: 36457 - DNA, 746 bp, Homo sapiens
gtgctaaactagagaaactgacaagcacaattccccccacaagaataatttgttaccaatgatgaaactgagaaattaaccagaatgaaagttgtgagatttatagtgaaagccctccgggtaaaattaatttctttataacaccgtttaaaggcaaacaaaaggaaattgcttgtgccagatggggtacggaaggcattgtgaatgaaaatgagcatctcttttctgcttacaaatatttgaattaagatgataccagcgtgtctagttaatggaaaacagtattgatggytgtacaacttttaaagatttcctcattccttttaaatggactttgtcaacacaacaaagtactttaagcaatatattaagcctgccacttactatcacagcacatgtattctccttgaattattgtttcaggcaaaacaggaagaatacaatggctagaatgctgggcttagagtcagagaaccactatgtagcttttcttcaggtcctattgctgagcagaaggagtctaagaaagtcaaccagtctctaaaggacaatttcttcattagtaaaattacaacagaaacacctgcccttctatcagctgagtctcatgaaaattaaattatataatgaaggtgaacatttcttgtaaaccataaagtatatgcatacaacctttcattttgtggtttatctttctggaattagtctagaaattgtctccaattttgcctcgtattttatctgaa

SEQ ID NO: 36458 - DNA, 584 bp, Homo sapiens
tggggccttatctcccagttagactattaatatgtataaggatttgctgaacggttgtgtgaataagctttcttaagtgatcaaggaaggcttcctgaaggaactgggaccctgaatgaggaggcagggagggcaatgacttttcctgtgtcatcctacacaggtatgtgacaacttgtaggcaggaagtccctcaycccacaccccacctgcattcaggtagaattgactcagggtcaggatatagaagcttgatctatggcccatctaatgaataaatgtcacttgtgttcttaatctatatggcttggactctttataaaagctccaagataaaggatggggactagaagctttcaagcctacaaggactccagggaaggacaaggaccatagttggaggcttgaatggggcaggaatggggagagtgaccaaggaacagaagagaaggaagacaaaggcagaagataaactgagaaacaaaaaacacttttgacaaaaatgaagtagctaaaaaagacaacaaaacaaaaccgaagacaagagatatgcaaaaaagacagcagcatgtgattagattgct

SEQ ID NO: 36459 - DNA, 720 bp, Homo sapiens
gaattacttgaacccgggaggcggaggttgcagtgaaccgagattgcacccctgcactccagcctgggcaacagagcaagactctgtctcaaaaaaaaaagagtgcagatgaaaatgtcatctgcagtgtaatttaactatgtgtactcgttctaatcctatgagagccacccctctctcacacatgcattttccaaagtgttctaaattcacttcagggaatcatgacagagtttggtggaggatgagtatgaaccattagaaaatcaggagatattagagatgtagagtgattagcacacttgctaaataaatgtttccaggacctcactaatacagcactatgaaaactcaaagcctttcatttgatgagggacacataaaaagtgaagagagagagaaaatgaatcacagaaaacattaggactscattcaagagagtcgtgaggctcagagcaaatcaggttttctggaacctttataacatcatgactctatgttacttaccatatgagcgagagtgtgtgtgtaaccaacctcagagttggtttcatgggacaaaaattcatccagtgctccatgaaaaggggattccatggataggtaagtttgggacattttgtagtatatccctctcttgaagagccataagacccattagtatagtaaatgctctacttattttaccacagaacttttttttaatcgaataccaactaa

SEQ ID NO: 36460 - DNA, 1114 bp, Homo sapiens
ctgagtagctgggattacaggtgtgcgccacaacccctggctaatttttgtatttttagtagagacagggtttcaccatgttgaccaggctggtctcaaactcctggcctcatatgatctgcctgccttggcctcccaaagtgctgggattgcaggcatgagccgctgcacctggccaaagtttcatatttcttgtgatgacactgaatttttagacaaaagagatatattgactttgtgtgttgatggtttcaatttagaaaagactatttgggctgggcgcagtggctcatgcctgtaatcctagcactttgggaggctgaggtgggcggatcacgaggtcaggagttcgagaccagcctagccaacatagtgaaaccccatctctactaaaaatacaaaaattagccaggcgtggtggcacgtgcctgtagttccaactacttgggaggctgtggcaggagaatagctttaacccaggaggtagaagatgcagtgagcccagactgtgccattgcactccagccttctagtctgggggacagagtgagactctgtctcaaaaaagactatttgggaatttgttcatcaaaatttatgcatccactttattttctcaaagttcctcttactggaaagcatttaagtattttgattctttttaaaaataatttcaacttttattttagatttggggggttcgttacatgggcatattgtgtgatgctgaggtttggggtacawattatcccatcacccaagtagtgagcttagtacccaataggtagtttttcagcctttactcttctttttctcccctctctagtggtcccaatgtctattatttccatctttatgtccatgtgtgcccagtgtttggctcacacttataagttggaacatgcagtattttgttttctgttcttgtgttcattcacttaggataatgacctctagttgcatccatgttgctaaaaaggatataattttattctttttcatggaggtatagtattccatgatgtatatttaccacgttttgtttattcagtcatctattgatggccacgtagatggattccatgtctttgctattgtgaatagaactatggtg

SEQ ID NO: 36461 - DNA, 583 bp, Homo sapiens
gcttattgcttccatccctgctcagatggttttgcatttccgtggcagcattttactccaccctccattgtgcatcctagattctctccagaacccctcccagcggaggcctgaggttagcttttgtgtgacatcgggtctctattcttccatgtatttaagctcaaaatgtttccttatggggaattttcttaaaagtcttcaatattgttaactctttgaaaccactgctgtgtgaaggcagctgattgttccattgtgggtcccataggaagaagttctatggttcctccttattgccttcttggtgggcatcccctatgaagcaatgcagggaggactccatgatagtgcaggcacttggcctttgatttccatccagggaactccctccacctgtctatgagagaactgtgttgtggaagctcaccgggaascctatggaagaccaacacatagaatgggcagaggaagacaaacctccaaaacacaccgactacaacaaatacaggacaacaaacagcaataacattgagaataggaagctcatcatggaggagaaccaggacagacatccacgaaa

SEQ ID NO: 36462 - DNA, 542 bp, Homo sapiens
tccaacccagtacacacataygtatgttattgaaaattaaagtttcatgaaaaaatactatgtgtgatatgctttgatacttttgcttctcttcaactctatctcatttatttaggaacaaaaaagcatcaaaactcattgaagagggccatttgattctcagttctaatcactatgagtatgcttcacacattgaggtcttcagatcatctgcaacaagtcacttgaaggtgtctggtcccaaaccctcccccagacctattgaatgagagtccgtattggcaacttctaggaatacatagtttaaccagttccttggtgtggttttaaaggttaaaaactagccccagatgttaacatcttaacattatctactcacaaaaagctatctcctttgctagttgatttttttttcttttgtatagctatcaatggctagagcaagggctctgatcactttttttcccccttctagagatagggtcttgctctgttgcccaggctagagtgcggtggcatgatcttggctcactgcagcctcg

SEQ ID NO: 36463 - DNA, 687 bp, Homo sapiens
agatacagcggcagctagcgtattttgataagcagtcygatatttgggaagatagagtgtacgtgttcaggaagccacaactctgcacgtccattcgagatagactacccggttcctcaggcccacggctccgaactgcccccgtggatggtgcttcgagtacgcctccaccagtgggcagtgtggtccacgaggatcaggccattctagccaacgggaggttcttcctgtggagccctgagcaaaacgggacggtttgagaagggttttatttctgggtctctgttctgcggtgttcggtgccttaactggatgcccccgcatcccagagccagccggccatcttctgcagtgatgctgttccccgggggaacggagcccagccctgaagctcagccgcaggaacaaacgccctggctcctgcgtgccatttctgccctctgctgctgcagtggcctgaggtcttcggatggccgcctgcactccgcctcttcttcctgccgcctcctctcctcaggcccttgcttcaaagtcctcctccccttcctttgcgctgataacatcgagcagagccggctccatttctgggctttttactgcctaactgatcctctacactgtgctaaggagaagctatttatttttttctcaggaaacctcaatatctaggtgggaaagggcaggttt

SEQ ID NO: 36464 - DNA, 555 bp, Homo sapiens
ccagtgcctagaacaatgcttgcacacagggaacccttaataaatattgctgattacatcagtatcttcatccctttgataaatgatgatcaatgatgacccaagatactgtgctctgtactgagagggatgaggaaggatatgatggcctcggtattaaacagtcactgcttgaacaccatgtatgayaagaattaggctggttaaacccaaatgtccaacaatgatagactggattaagaaaatgtggcacacatacaccatggaatactatgcagccataaaaaatgatgagttcatgtcctttgtagggacatggatgaaactggaaatcatcattctcagtaaactatcgcaaggacaaaaaaccaaacaccacatgttctcactcataggtgtgaactgaacaatgagaacacatggacacaggaaggggaacatcacactctggggactgttgtggggtggggggagcggggagggatagcattaggagatatacctaatgctaaatgaggagttaatgggtgcagcacaccagcatggcacatgtat

SEQ ID NO: 36465 - DNA, 1170 bp, Homo sapiens
aagattcaggtcggatgaagggaaggtggcctgtagaatagtcacggtgcttgagaaatgggaaatttaaagatacctgaaaagtgtgtgtgtgtgtgtgtgtgtgtgtgtgtgtgtgtgtattgagaagaccttggggcagttaccctctgagcctcagtttccatgttgataaaacaagggaatcggaataattgattcttcaaagttctttccttatttaacccactggggctctggactatattaaatgtgtaaaaattgcatctgctaggtgggcggcccatttcaaggaaaattctagaataagtaagccttacattgggtaaatacaagttttaaaaaagcacacacacacgcccctcgtcaagtwtcctaatacaagttttacttcacagtctgcttataattctaggtaggtgctgcacagcatgaagaaggtattatgtgttgagttttgttgtatttagtaacccattgctcatctgactgtaaagtctgtcttatatttcaaggtgttactaatcatgggttcacacacccctctgttgcctattgataggtgaaacactgcttcatttaacatttttctttgttgttcttcagtttattccattttggtatagtcagcttcatcctcactgagtttagcctttgcagatatccattcctccctggttacctctgcagcatctgaaagacccagtcagtgatacacagaggtctggaactcaatccagctcaactctgggcctgtgaaagcaaaacaatggggacaaatccagctggcccacgagcacttgctttataaagctgcccacacactcttcactctacttgctttttggtcccctgtttttagagttccctgatgctttagctagaggggctttttcatgttgtttcaaggctgtgagttctaacacgtaagctgcgttctggctttagccactctgtcctgccaagaagctgaccactgtttgaaatcaacttctcatctgcttctcgtcaggttttccagagcccagagaacagtgttgagtcaggccacagataggatacaaaggccaggacacaattccaaatcccagggggctggagagagtcagggccttcagtgtcaatcagttaaacaccgaggcaggaggaagggacattgggagacttgca

SEQ ID NO: 36466 - DNA, 1170 bp, Homo sapiens
aagattcaggtcggatgaagggaaggtggcctgtagaatagtcacggtgcttgagaaatgggaaatttaaagatacctgaaaagtgtgtgtgtgtgtgtgtgtgtgtgtgtgtgtgtgtgtattgagaagaccttggggcagttaccctctgagcctcagtttccatgttgataaaacaagggaatcggaataattgattcttcaaagttctttccttatttaacccactggggctctggactatattaaatgtgtaaaaattgcatctgctaggtgggcggcccatttcaaggaaaattctagaataagtaagccttacattgggtaaatacaagttttaaaaaagcacacacacacgcccctcgtcaagtttcctaatacaagttttacttcacagtctgcttataattctaggtaggtgctgcacagcatgaagaaggtattatgtgttgagttttgttgtatttagtaacccattgctcatctgactgtaaagtctgtcttatatttcaaggtgttactaatcatgggttcacacacccctctgttgcctattgataggtgaaacactgcttcatttaacatttttctttgttgttcttcagtttattccattttggtatagtcagcttcatcctcactgagtttagcctttgcagatatccattcctccctggttacctctgcagcatctgaaagacccagtcagtgatacacagaggtctggaactcaatccagctcaactctgggcctgtgaaagcaaaacaatggggacaaatccagctggcccacgagcacttgctttataaagctgcccacacactcttcactctacttgctttttggtcccctgtttttagagttccctgatgctttagctagaggggctttttcatgttgtttcaaggctgtgagttctaacacgtaagctgcgttctggctttagccactctgtcctgccaagaagctgaccactgtttgaaatcaacttctcatctgcttctcktcaggttttccagagcccagagaacagtgttgagtcaggccacagataggatacaaaggccaggacacaattccaaatcccagggggctggagagagtcagggccttcagtgtcaatcagttaaacaccgaggcaggaggaagggacattgggagacttgca

SEQ ID NO: 36467 - DNA, 1007 bp, Homo sapiens
actgtagaaaatgtgagggactgaggtagattaaaagggtaaaaacaaaggagaaagaaagagaaaaattacccactgatcttcatccaggaaaaaaattacatttctttcaaaaatttttgccattgacagatatatatcaaaatatttataattttgyctgactataatttgttcaaaaactcatttaaactgtttatcatatcactaacaactttaatgttcattattttaacggctacatacaaacatattgtgtatatatactgtaatttatcaaacgctcataacagaattggctagttagattgtttccaagtcttggcatataaatgatgatctcataaacatctctgcaataaaccttttcttatacctaaaagatttatgtatcttttagaataattacctgatggaacaattagtgaatagaagagaacacggctctctccacgttttagatacttatcatccagttgtttctgaagcgtcataattaatgaatggcattttcatggtacttgctagcgttagttgtcctccattccacttttgtcaaattcgtaggcccccaaaatacattcgcaatcaccccttatcaaaagaggatatatttcaggacctccctcaggtagtactgaattctatatacactattttttttcctatgactacatatttaggataaagtttaatttataaattaggcacagtaaaagattaacaacaacaataataaaagaataatgtagtataataaaatttatataaatgtggtctctttctataaatattatattgaagtgtactcagctatttttggactgatgtgcacttctggtaactgaaatggcagaaagtaaaaccgcagatgaggagggactacagcatactgtgttgttgactaatttgtgtttcttaaaaagttactgaggaatgcttcttcaaatagcataaattattatttaagcaatcacgattttatatttgtatttataatatttatg

SEQ ID NO: 36468 - DNA, 704 bp, Homo sapiens
tgaaaactgcatgtagcgcaatctgagggtttcaattctataaaacaaaaccagtttcttatcagggccactacagagcatttcacgtagaattttttagattattgcaaattttatacatctctaaagttgtaacatgtagtagtaatgtcaagtgaactgcataattttacttgatcagatagaaaattttatatctgaataaggagttttgtgtagaagtcagtagtatagtagaaagagcactgattttggaataggaatcttaaactctttctagcaatatattttaccttggtgaaaaaccacaaaactctcatccaagtactaaacaaacctgacccagtttagcttgtgagatcagataagatgcatgtagggtggcaaggtggggtgaagagtatacaggaactctctgtactatttttgaagtttttctgcaaatctaaaattagttcaaaaattttttttaaaaagtatttttaaaaaatccagagartcagtaagtttcagtttcttctataaatggaaatgtaataatagcttatctttctccctgacacagctgttgagtggataaacatgtaaataaggcagtatacataaaactttaaaatactgctgttctatgctgtgattcttccttacttgactttacccattttactgatcttcccttcctcttgctgccaaaatagtccttt

SEQ ID NO: 36469 - DNA, 2454 bp, Homo sapiens
ccattttatatacaaaaatggcattatttcaataccagtaagtagatactttatatatttatttttatttcttcttgtttttcatatcctttgccaattttcctactagaatgttcttactgattttaaaagagctatataaatgatactgatagttttgtcatatttttattcatttgccttttaataatttttgtgtttttgaaacagacataatttttataagatcaaatttaaaagtcacttcctttgtgattttttcacccccaaactgggctctgagtgacctttcagaatattttaatagagtctatttcctctcttgaaaaattcacaaaatttagcatacaaaaccctctgaaaattcctaaaagaaacttcttaaaagtttgaacttagcatttcacaaacttatttgaaaacagaccactccctactcccacagtgtatttgacaacatcttgaggaacagcatttctcaaaagctttgaaacaaaagcctagaaagtccttccatattacctgtggttatttgtattttttaaaaatggttttactttttataccaattttttaatattctggaatgtattttgatgcatgtgtaaggttaagagttatcattatgttttctttttcagtagttctataattgtcttggcatctttctcccactgatttctaataccatctttattgtgactaattcttctttatatttaattgtatcatttattctcttcacaggagtgcctgtgggttttacactagtaccacactattttgactgtcgtagtttcatggaatcttatattatttggtggtattaggttggtgcaaaagtaattgtggttttgccattaaattaaactcaatctcctactcttctttaatgaaaatttcttggctatcctaattttttataacttcagatgaagtctaatatcattttataaagttttttttaaatcctgctgagatttctgtttaaacaacattaagccaatacattaatgtggaaacaactgagctatttacaacatttagtctatttccaggaacatagtgctttttcatttatacactcatgtctcagtacattattaaaaatgagttacatatttcttttacattttttgttaatataaagttcatctccaaataatttttttcttgtattattctgattgacactgtcttttttctcaattctactattgaatattactgaatttattattgagtattactgaattatggaagaagctcctaattttggtcagtgtctatctgacttaatgaagacttttactggcttcagtactttttacattgatgctcaaggattaccaaaattaataaattatgttatctgtacataatgataaatttttgtctcctgccaatagcaatgccttttattgcactgcctagtgctccttgaactctcgcaaataaaagtggtaacagtgggcattccagaatttgacagaactcttaatatttttaaaactatcatgatgtctgttcatttaagtgagatattttttatcatgaagtagaaggacttttctatatctagtttattaagattttctaaaaagtctaggaagtgaattttgtcatatctctttttattaccaattaaaactatcatatggttattcttatttgacctagctatttgatatatgatagtaatatattttctaatattgaagcatactcgaactcaaggaaaaaatcctactcagttgtgatacatttttcattatatatactttcaaattaaaattgctaatactttaagatttatgcatctatattcctaaggaaggtattatgataattttcattcatttgagctctgtctgaagttatgcttgctttttaaaatttaatgacaagttctcytttttttttcttttctatgctctgagatagcttggatagcatgataattaactatttcatgaattaaagagctcttccataaactgggttagattcagagacttctgagcatacaactgtttaaaaaaatttgtcatttctttgagttactgatttatccaggtttagtacttcctgatgagtaaaaattacacatttatattttcttagaaaaacactcattcatcaagatttataaataaattggttactaaattatcgagcatctatggctatatcattattcactgctaatttttagtattgattggtgcaaaagtaattgcggtttttgcctttttaaatggcaaaatgataaattgtggtcttctgtcaatagctataccttttattgagagctccttgaactctggcaaataaaagtggtaacagtgggcattctagaattaaatttttagtggcaaaaactgcaattacttttgcaccaacctaatacttattttttatttttcttatttagaggtgacacagattcattct

SEQ ID NO: 36470 - DNA, 2454 bp, Homo sapiens
ccattttatatacaaaaatggcattatttcaataccagtaagtagatactttatatatttatttttatttcttcttgtttttcatatcctttgccaattttcctactagaatgttcttactgattttaaaagagctatataaatgatactgatagttttgtcatatttttattcatttgccttttaataatttttgtgtttttgaaacagacataatttttataagatcaaatttaaaagtcacttcctttgtgattttttcacccccaaactgggctctgagtgacctttcagaatattttaatagagtctatttcctctcttgaaaaattcacaaaatttagcatacaaaaccctctgaaaattcctaaaagaaacttcttaaaagtttgaacttagcatttcacaaacttatttgaaaacagaccactccctactcccacagtgtatttgacaacatcttgaggaacagcatttctcaaaagctttgaaacaaaagcctagaaagtccttccatattacctgtggttatttgtattttttaaaaatggttttactttttataccaattttttaatattctggaatgtattttgatgcatgtgtaaggttaagagttatcattatgttttctttttcagtagttctataattgtcttggcatctttctcccactgatttctaataccatctttattgtgactaattcttctttatatttaattgtatcatttattctcttcacaggagtgcctgtgggttttacactagtaccacactattttgactgtcgtagtttcatggaatcttatattatttggtggtattaggttggtgcaaaagtaattgtggttttgccattaaattaaactcaatctcctactcttctttaatgaaaatttcttggctatcctaattttttataacttcagatgaagtctaatatcattttataaagttttttttaaatcctgctgagatttctgtttaaacaacattaagccaatacattaatgtggaaacaactgagctatttacaacatttagtctatttccaggaacatagtgctttttcatttatacactcatgtctcagtacattattaaaaatgagttacatatttcttttacattttttgttaatataaagttcatctccaaataatttttttcttgtattattctgattgacactgtcttttttctcaattctactattgaatattactgaatttattattgagtattactgaattatggaagaagctcctaattttggtcagtgtctatctgacttaatgaagacttttactggcttcagtactttttacattgatgctcaaggattaccaaaattaataaattatgttatctgtacataatgataaatttttgtctcctgccaatagcaatgccttttattgcactgcctagtgctccttgaactctcgcaaataaaagtggtaacagtgggcattccagaatttgacagaactcttaatatttttaaaactatcatgatgtctgttcatttaagtgagatattttttatcatgaagtagaaggacttttctatatctagtttattaagattttctaaaaagtctaggaagtgaattttgtcatatctctttttattaccaattaaaactatcatatggttattcttatttgacctagctatttgatatatgatagtaatatattttctaatattgaagcatactcgaactcaaggaaaaaatcctactcagttgtgatacatttttcattatatatactttcaaattaaaattgctaatactttaagatttatgcatctatattcctaaggaaggtattatgataattttcattcatttgagctctgtctgaagttatgcttgctttttaaaatttaatgacaagttctcctttttttttcttttctatgctctgagatagcttggatagcatgataattaactatttcatgaattaaagagctcttccataaactgggttagattcagagacttctgagcatacaactgtttaaaaaaatttgtcatttctttgagttactgatttatccaggtttagtacttcctgatgagtaaaaattacacatttatattttcttagaaaaacactcattcatcaagatttataaataaattggttactaaattatcgagcatctatggctatatcattattcactgctaatttttagtattgattggtgcaaaagtaattgcggtttttgcctttttaaatggcaaaatgataaattgtggtcttctgycaatagctataccttttattgagagctccttgaactctggcaaataaaagtggtaacagtgggcattctagaattaaatttttagtggcaaaaactgcaattacttttgcaccaacctaatacttattttttatttttcttatttagaggtgacacagattcattct

SEQ ID NO: 36471 - DNA, 541 bp, Homo sapiens
cagggagaaagagcacagcacacccgtctgcccccaaaggagaaagagcccagcacagctggccaccctgttgtggccctttctgataatgcagttggcacctgtgcgcacccacacaatcaggttttccacctctcttgaggtgcaggagaggataatggatcccccggagaatggaatatttattaaagttccaccaggtgcctgtgtaatcctcacaaccaccctgcaaagtcacatcatcacccccagtttgttgatgaggccccagctcagagatgggcaaccacttagcgaagatcacacagctgctaagacttggggctgggaggtgaactcaggtctgactccgagyctaaagctcttttcatggctgaggaaggcaagacttttacagtgtcctacgaagggaaaggcaatggcttccccagggtgctcctcatcctccctgcatggagaggctcatggtaaaccctgtgtgccatggaacctgggtagagaacctgttgcagtgtggtgtgtgtccttgcagacaaggtat

SEQ ID NO: 36472 - DNA, 635 bp, Homo sapiens
tacatgtaccatcccgatacctcggtgcatacacataccccaaagataaccataatgagtcaactgccagtttccctcccaaatttcacaaattaaagattttataaacccaacttgcaacaaatctaacatttttttctragtaaactactttacaaagtagcaagttcttatattaaatttttattaaataagataaatttttataccatttatacaaatgtcagtttcaacattatctttttcacactccttatgcacagggcaataaggaatggaaagtacagagattaatttaggtaacaattaccataattcacaattgcattagcgcctattaaggttcattgttctgtggaaattttaatgatacattcctgagtgaataaaagcagaagatgattggaaataaaattgtttctatgtatgctgacaggactgctgagtgtaattatacattttggaggcgacctgtttggagtttactccataattttatgtaaatgttaaataacttcacgtgtcttcctcccaggttaaacgctaatttgtgttatttcaacaaggggagagcttcggggttattaacagacttactctgccgatgaagccaaagtagctccacattctttgaa

SEQ ID NO: 36473 - DNA, 1976 bp, Homo sapiens
cgttctgcccacctgtggccttgagacacctggccttgacagaaaaagaactataagtgcaggggagagcagggaagattgacgatgagtctccttctgttctaggtcccagcagatccctgcattccagccttcagctctgtgagggccttccaattcccccttttccttcttatattagggcgcattgatacgtggcacttgctccaaactcctagggattttgtacacccagagcatgagcttaaactgtatttgaaggtgacaggggccctcagaacgatttaaaaacaggtaagagaaagaggggacaaaactgtcttgtctgtaccaaagggtggagattacagggaggccaatctggactcataaaaaagaagaactccctaaattaatgctgtccaaaaacagaataacttgattcctgaattgtaagattccctggcactttcttggtgcaagcccagaataatcaaccatgtgacagaggaaattcaagcttcaggaggagcaggagtgaccagggatgacgtctggtgtggcttccacactgaggttttgtgatcctgtgactctggactgaggcctggacagttttcagccggctctttgtttctggtgaggaaggcatgcctggtgtagaacacacagttgtaccagctgcctatgcatgagaggggctgtgagaagatgctggctgcatgggccctgcactgtcagtgtggaggcaggagccagggcctttcttgtttcaataaacagtgtttcttcctcccacctgccatgatgagctggccagttccgtgggcatgttaatgagcttctctctggtgaccgagacacagcatacgacacagctcctctggcccctgaaggrcaattaagtcccagtagtgtctgagagcctgatggctggcttctgggactccacacactcttgcatacatattctccttctctccatccccacaaatattgtagctgtctcaggttctaaaagcaataatgacttcttagtaaagacattctgaaaaacctaaagaaaatagaaatgattcaaaatcctaccgctcagaaatagctagtactcactttttggtgaacccaaggcccctctctcacacacatctctcatttaatgatctcatccttggagctgttgtgtaacctgctttttcacttaatcacctctcccagacatgttgttatatgtcgataaacacagacagccctgatgctcctcacttccccctcttctcgcttcctgatggttttcctgcttcatgtggattgcctgtctagcccagccagccaaacaggcttccttccctgagacatcaataattgaacaaaagcctccacagactcggggctgggcaccaaggcacccgcccactgcccagaggctgctcaacccttctctgccacaaccttcctgctgaggctttgcagagaccggctgccagaaaatcacagtgaaagaaagtgacaacagaaatttcttttggctccttggctgccttgtcttgctccttctttatggaattcctggtttgtctctaattatctagcacccagagcttcagagcaaagccatgcttccaaccacttgtcaagggaatgtagacactatagaaaatggatgaacgtggctttggacccatagacgcttggcagatgagagctgtggctcctcagcaggaggaagggtgcctgattcacaggggagatgcctgatggcgggtggggggctgctgttggcatccccactggaacgtttgtcctaatgggggcctggctccctcatcagtggcttgtcccaaaacaacaaccagtgttcccaaacctatacttcctctttggatttttgtttttcatctagttggagggaataaaaatagcccatgatttctcaagcttgacactattgatatttggactgcataattctttgttgtgaggggctattgtatgca

SEQ ID NO: 36474 - DNA, 1349 bp, Homo sapiens
tcagcagcgtgaaaacagacaaatacaatgctccttgagggtctgtacaccctgcaagatagttatggagagtcacggtttgaggatttgtcctctcaacttcgtagcaatgctgagatagacatcccaaaatttctttgctccccgctctttgcttgacctttctgccttgacactagctagggtgatgagtaaaaaggctgacttcatgtataaggtcatgttcgttcagcttgttgctctgattgggctcaactgcattagctcctgtgggatgatgatggatttatcatcagttctcaggtgcaggatgttttccttctggctggtgctctgtttctgatggtgtaaataggcccagagctctctgatctctgtggtaatttggctggtgacccctgcattctagggtgatttttggtttgataccagtggatatactttatagtcttctgtttgtagagatacacatcaccttaaataaacatagtgcacagaagtcggtatttatgaagagaaaaaatccagtggttgtatgtgttacaaggagatgatcagttttcaaaaatatttatcacagcattcttttttgagtaggatccttatctgttctttatttattccacttatcagttaaaaccaatgttgctctcttactttttttgatttgccatctctttgttcaagtttttataaagataggttattttcaaaatataaacagcatggaatattgagacaatcatctaaataattcgagccaaagatgaccgcaaaatctctacaaaattgaaggaaaagtcatctgaatgcatattgtcatttacctgagtgcatattattatttacttataaaatatcttattcaaatattctcatacaggtttcaaactatcttcatcatcaattatgaaaactaatcaccgcaataattaaaaacattggccaagtttcagccatgttaaaactctagttttttttttttttttttttttttttttttttttttgagatggagtctcactgtctcccaggctggagtgcattggcgtgatctcggctcacagcaagctccacctcccagattcacgccattctcctgcctcagcctcccgagtagctgggactacaggtgcccaccaccacgcctggctaattttttgtatttttagtagagacggggtttcaccgtgttagccagtctggtctcgatctcctgacctcgtgatycacccgcctcagactcccaaagtgctgggattacaggtgtgagccactgcacccggcctaacaactctagtttttaaaataagcttttcattttagagcaatgttaaatttacagaata

SEQ ID NO: 36475 - DNA, 1349 bp, Homo sapiens
tcagcagcgtgaaaacagacaaatacaatgctccttgagggtctgtacaccctgcaagatagttatggagagtcacggtttgaggatttgtcctctcaacttcgtagcaatgctgagatagacatcccaaaatttctttgctccccgctctttgcttgacctttctgccttgacactagctagggtgatgagtaaaaaggctgacttcatgtataaggtcatgttcgttcagcttgttgctctgattgggctcaactgcattagctcctgtgggatgatgatggatttatcatcagttctcaggtgcaggatgttttccttctggctggtgctctgtttctgatggtgtaaataggcccagagctctctgatctctgtggtaatttggctggtgacccctgcattctagggtgatttttggtttgataccagtggatatactttatagtcttctgtttgtagagatacacatcaccttaaataaacatagtgcacagaagtcggtatttatgaagagaaaaaatccagtggttgtatgtgttacaaggagatgatcagttttcaaaaatatttatcacagcattcttttttgagtaggatccttatctgttctttatttattccacttatcagttaaaaccaatgttgctctcttactttttttgatttgccatctctttgttcaagtttttataaagataggttattttcaaaatataaacagcatggaatattgagacaatcatctaaataattcgagccaaagatgaccgcaaaatctctacaaaattgaaggaaaagtcatctgaatgcatattgtcatttacctgagtgcatattattatttacttataaaatatcttattcaaatattctcatacaggtttcaaactatcttcatcatcaattatgaaaactaatcaccgcaataattaaaaacattggccaagtttcagccatgttaaaactctagttttttttttttttttttttttttttttttttttttgagatggagtctcactgtctcccaggctggagtgcattggcgtgatctcggctcacagcaagctccacctcccagattcacgccattctcctgcctcagcctcccgagtagctgggactacaggtgcccaccaccacgcctggctaattttttgtatttttagtagagacggggtttcaccgtgttagccagtctggtctcgatctcctgacctcgtgatccacycgcctcagactcccaaagtgctgggattacaggtgtgagccactgcacccggcctaacaactctagtttttaaaataagcttttcattttagagcaatgttaaatttacagaata

SEQ ID NO: 36476 - DNA, 1496 bp, Homo sapiens
aaaattcaaagtatataaaaggatgtacactcaaaggacctccgcttcaaattttccctgccgttggtgcttcatgcccatgggatgtgtattaaagaggctgcctcactcagtaattgtagagaatagaaggaaaacaaatagttgttgatacaggtaatgttcatgtttccccattgtagcagcatatggcactagttgtaatggcctaacgtaaagcattcctgaacaatattaatgaccaactaggttaatgaccaaagactcagcctcaggccccaaacatagtctcctgttcattaatccctaggaaatgacctcagccatgttcattatggctcaattacattcacactccctcatgagaaaagaaagcattgcagtcctgataccaagctatatcccccccaccttttttttttttaccttgacacatgggcaataaagacacaaaacaagttattagtcccaaggccaagcatgtaaaggaaaaaaacattattgccttttcagctcccaatcatcaataagaactgaatttgggacctcagaggtcacagagcaggctgaccaggatttacacatcctctgagtgttctttgaaggtgtgacatgcactaagcacatgttagccccagatgttcagagtttggatgaaaatcggaaaactcaaaaggcagctctttgctagtatgcaaaaaaaaaaaaaaaaaatgactccttcagatatcaacctatcactcattcaatcaatatttatacaatgtttcctctgagtaaagtcccatagacagtttgtgagtaattcagaaaagagcatcaaggaacatagaatcaagttacatagaatgaacataccctgtggtggcttgaaacatgtcttgaaccacatcgacatgtccttcatcaagaggcagtctatatcctctcaccttggatctagccttaatgacttgtttgtaaccaaggaaatgcaacaggagcaagtctgcatgacttctgaggctaggttatgagcgatcatatggctctgcctggctagctcagatactcagttttggagcctgggtcactctgcaaatccacctaccttgaagcagccatattttgaggyggcccacatcatgtggggagactctaacgttatggttcacagaaccagctgtggtctagctaacaatagcatctacccatacatatgagtgaagacttatctccagaagattccaagaccagttgttgaatcaccccagccatcagctcttcccagctgaagctccagtgtggaacagagacaagccattcccactgtactctgttggaactcctgacccataacatttatgagtgtaacaaaatactgaattttgtacaaaaattacaaagtgtgggatagtttgttttacagcagtagtaactgaatatctctctctcctctctctctctctctctctctcacacacacacacacacacatgataaatacatacagccac

SEQ ID NO: 36477 - DNA, 609 bp, Homo sapiens
attcctggagtagtaaaggcaactatgtaggcagcatcagtaatgcatctattcacaggatcagcacaaaatatgctcaaaacagcaactgtagcataggttagttgtatttgaaactggctgctttatgagtagcctgaaaatcatccatggttgtattcattgtctactgctgctgtaaaaaattcgtacgagtttagcagcttaaacaacccgaccgtattatgttatggttctgcagttcagggtctcaaggggctaaaatcagggtgtccacwgggctgtgttccttctggaggccctaaaaagaacccatttccttgcctttcccagcttctagaggcccctgcattccttggctcgtggccccttcctctgccttcagagccagtggcgttaacatctctctgaccctactccattatcgcatctctttctctgaccccaacagagaaaagttatctgcgtctaagggacgccatgcaattaagggatgcattgccatgattagaccgggtccacctgcataattaggatactctccccatctcaaagcccttaagcttaatcccttttgtgaggtccctatgatggctgattttgggtgtc

SEQ ID NO: 36478 - DNA, 817 bp, Homo sapiens
catccaggctcccacattacatttagttgtgtctccttaggctccacctggttgtgacggtttcaaagactttccttgtttttgatgaacctcatagttttgaggacaactggtcaggtattttgtaacatgttcctcaatagggatttttctggtgattttcttgtgattagacaggggtgatgtgtttagggaggaagaccgcagaggtgaagtgtcaatgtcatcgcttcagatggggggacattctatcaatacgacttctcactgtggatgttgaccttgattgctggcacgtttctccactgcaaaatcactgtttctgtcctccattcaacgccatactctttggaagaaagtcactccatgcagcccgtgcttaagsagtgggagttatgttccacctcctggagggtgacgcacttaagctacttaagctaataagtattttttatgtagcaaaagctaacagataaacaaacccttttgtttcgtagatctatgttatttgggttttctattacatgcagtcaaacccaattttaaatggatgcagaatttatttctcagggaggttgtgataattgaatcagagaggcagggacagtacctacagcagtgtttgggtgaataaacagtaacaataatcatcgttggccaggtgtggtggctcatgcctataatcccagccctttgggaggccaaagccagtggactacttgagcccaggagtttgagaccagcctgggcaacttggcaaaaccctgtctctacaaaaaatacaaaagttacctgggcatggtggcacatgtctcta

SEQ ID NO: 36479 - DNA, 848 bp, Homo sapiens
tggggtcaggacctggggacagggaggccgagagagggcacagaggtggagagaagagagatgrgagccagggacagggaacgagggaaggctgcctagcatccctgtttcctgaagtcatgacttgggtgtcactgaccccactgctggtgccaggcatgatcatgagaccgaggtctggtcaagcagagtaagagtgataagcatagggatggacacaagaccaatcctggctgcagaaaatcattcctttactggaatcatggagacgagggagctccccgggtcagggatgctgagctgggaggacatgagcctggggctgccagagccttcttgtgaggaaagatcctggctgagaatgaagtcaacggggcagatggaggggctgagaggtggagctgacatcatttgagcctctggatctaacctcacttgcctttacccttagactttccagttatgtgagtcaatttattccttagggctagaatttctatcccttatacctgagtcctggcatggaagaggaaggaaggtaagaaagaaggatgaatatttaagaacaggtgtctgaggctgggtatggtggctcatgcctgtaatcccagcactttgggaggctgaggcaggtggatcacatgaggccaggagtttgagaccagcctggccaacatggtgaaaacccgtttctactaaaaatacaaaagttttccgggcgtggtggtaggcgtctgtaatcccattactcaggaggctgaggtaggagaatcacttgaaccaggaggcagagattgcagtgatctgagatcatgccactgcactccagcctgggtgacagagtgaga

SEQ ID NO: 36480 - DNA, 848 bp, Homo sapiens
tggggtcaggacctggggacagggaggccgagagagggcacagaggtggagagaagagagatgagagccagggacagggaacgagggaaggctgcctagcatccctgyttcctgaagtcatgacttgggtgtcactgaccccactgctggtgccaggcatgatcatgagaccgaggtctggtcaagcagagtaagagtgataagcatagggatggacacaagaccaatcctggctgcagaaaatcattcctttactggaatcatggagacgagggagctccccgggtcagggatgctgagctgggaggacatgagcctggggctgccagagccttcttgtgaggaaagatcctggctgagaatgaagtcaacggggcagatggaggggctgagaggtggagctgacatcatttgagcctctggatctaacctcacttgcctttacccttagactttccagttatgtgagtcaatttattccttagggctagaatttctatcccttatacctgagtcctggcatggaagaggaaggaaggtaagaaagaaggatgaatatttaagaacaggtgtctgaggctgggtatggtggctcatgcctgtaatcccagcactttgggaggctgaggcaggtggatcacatgaggccaggagtttgagaccagcctggccaacatggtgaaaacccgtttctactaaaaatacaaaagttttccgggcgtggtggtaggcgtctgtaatcccattactcaggaggctgaggtaggagaatcacttgaaccaggaggcagagattgcagtgatctgagatcatgccactgcactccagcctgggtgacagagtgaga

SEQ ID NO: 36481 - DNA, 630 bp, Homo sapiens
ttgtatccccattatacagaggtggaaactgaggcttagagaggataaataacttgtccataaccaaacagctagtaaacggcagaggcaggctctgaatccaagactgtcttacttaaaggttcacgttctttcactatatcatcttaggatgcagggcaaaaggagagacatgggtgtgggtcccgccctgtgatgtcttaagtttggcttgtttaaggaaaagaacatttaccaaaaatatttttacaactttgaaaatgggtgggaactccacagtggaaaatgacagaatatgttgcccaagaaaccccaaggaaaggaattgacaggaaacatgaaagctgggtctttttcacyctggcctcccaacacccacaactctgtacccagcatcctggccacatgaaacttacctgccacttcccaagcacttcacgaatatgcacatctccagtcctttgcccatgctgtgtcctctgcctggatctccttctctttgcatactccacttcacttctccccatgaaaatttgcctctccttcaaggcagtacctggattttccttcttttacaggattacagtcctacagataaagcacattgaacctacctctgtgttatatcat

SEQ ID NO: 36482 - DNA, 633 bp, Homo sapiens
gcccacgccaccaggcccggctaatcgttctatttttcagagagacggggtttcgccacgtcggccagcctggtctcgaactcccggccccaagcgatccacccgcctcggcctcccaaagtgccggagtgacaggcgtgagctagcgtgcccggcccagatcatctttttcatmaattgtagagaaggggtttcgtcagccaacgggtggagggtggggcgggttttactcagcctgcgtactgtgaaaaggggaagtgagtgtgctctgtgaactagatatggaaattgtgtgtgtgtgtgcgcgcgtgcgcgtgcgagagagagagagagagagagagagagagagagagagagagagaccaatcccaccacgaggacccggaaatagtgtttgatctgtgtccctgcctagtcacctgtcttgtgtgtcgatgactgaggattccacaaatgaaggtcagcggtatctattgagctgtttctccctctcgtgcgtctcatctgtgtgctggagaaagggaagagaagaggttccgatgggaagttgtcttcacgcctgaggcagctgaaggcagaccgaagggaaggagggcatcctaggtgacatttccatacccacgcaccctttac

SEQ ID NO: 36483 - DNA, 776 bp, Homo sapiens
ggatgagcccaaactgggttagaaaagaacaacaaatatgtttttaaaaatacaggtgaaaccttctgatacacacctatatttatgagtgactgtccacgtctgcacagaccagggaccagcagggcatgcatgaaactgccagctgtgggtccctcgaggagggaccacagacaccaggggacatcccttccgtgtaatacatttctgcaatctcagcattttggagcacatataattatatttatagtaaaagagggaaaaaaaaaagatttgagaagcatctgtcagtatccaaaacagacagctgctcccataacgaggcttcccaggtggtctctgcggaggtgctgtcaccctgggctgacaagggctgctgcgggaggggctcggaattagggtgggaaggccggacagtctctgcctgaccctaggagcacagatactgcactgggaatgggtggggcagggaggggcacctgaccacccctccacgtgccctggctgagggccccaaggtggcatccaggcaccagacatctcgcttcctgggccttccctctcctggcctggaggtaggggtggggtsgggggggtagtacatggagccaggcatgcaggctgccctgtggcacccaccggtccactgtctctccttcactgggccactccagggaggaaggtgtcttctctgggcctccgtggtgcagcacagctaatgggctggcagatgatggttctgagtgtgctgtctcaccacccggcctcaagcccca

SEQ ID NO: 36484 - DNA, 2097 bp, Homo sapiens
ccttgaggccaggggtttgagaccagcctggccaatatggcagaaccccattttttacagaaaaaaaaaaatagctggktgtggtggtgcacgcttgtagtcccagctactcgggagacaggatgcagggacctgggttgcagtgaccacagtacttcaacttgggtgacagagcaaagttaataccattggaaatctacattacacagattaaaatattgagataccatcattcacctatcaaattggcatttaaattaatctccagcatttgagaaggggccccgtgaggaaagaccatccagagaggcctttgggtagcaacacttaagagcatgggctttgcaataagcctgactcagttaaaaaaaaaccagccccaccacctgttagctttgtggcccacagaatgttatttcacatctttgagcctcagttcagatgcctctgaaagtggcagtaactgcaagggtaaccaagatgctgcatgtaaccacttagcagaacacctcgtgtaagtcagggctcagtagactcagcaactgtcactcttgccaacgaacatgtgtgcatggaatggtgtattagtctgttttcacactgtataaagaaatacccaaaactgggtaatttataaaggtaagaggtttaactgactcacagtttcccatggctggggaggcctcaggaaacttacaatcatggcagaaggggaagcaagcaccttcttcacatggcggcaggagagagaatgcttcaaagggggaacttccaagcacttttaaaaccatcagctctcgcgagaactccctcctatcactggaacagcatgggggaagccatccctgtgatccaatcacttcctacaggtccctccctcaacatgtggggatcatggggattacaattcgagatgagatttgggtggtgacacagagccaaaccatatcacatggtgatactttgaaagtccttttaacacatgttctcaagtggatgtccctgcaggccagggtcctatcagaaagggctgaaggaggtcatgtggttaaagttcttagctgtgcctgacatccagtaagtgtgcaataccttctagcaattacaggcaaattggaacaggtaatggaggctcagagagatgatgggatgaggccaaagttgcattggtaaatggtgaagcatggctttgatccacatttgcctagttctaaatctctttcccccataacgtgtttaggatcctggcaaggtcttaggttcttctgagaagtggatccagctcccagtcttgaaatgaagtcagcaatacaaccagtgctggatcatgtgcaaaggctggggagttaaccttcctgggttcaaatcctggctctaccactttccagctgtgtgtccttggcaagctacccaacctcactgagtctcagtttccccatctgtaatacgaggatgatattaatattacctaacagagctcttgtaaggattaactgagatgatcaatgtaaaaggctaagcacaatgcttcaaaacattaaataaatgtcgttgttgttttatcaccacattaatttaggcaccagtgtcactttgccatgcccccttccttcaatatgttggtgcaagttccttaagcctaactgctcgggcaagccttctgcattgcacagctccaagggcactgttcatatctattccatttgaatggtgtcctatggacttgtgcagtgcacaacctatactcctgtacatagcatactcagagcaaactatggggctacatagaggatctggatgtcagagtctctagtgggaaagcatgagcaccatgaggtcaacagaagtgtcccggttctggtgtcctccatcttaaagctagagtccaagctactcccaaaagtctgggggatatgcctcactgccagaaggaggagacagtgagaaatggtaggtgccctcaatacaggaatgcagcttgggaagctggactgctgggtagagaaacaggacttgggcaagcagtggtctctggtgtaattcaggatctccgagtagatgcaactcagagtcaagggagaggatctatgtattctg

SEQ ID NO: 36485 - DNA, 2097 bp, Homo sapiens
ccttgaggccaggggtttgagaccagcctggccaatatggcagaaccccattttttacagaaaaaaaaaaatagctgggtgtgktggtgcacgcttgtagtcccagctactcgggagacaggatgcagggacctgggttgcagtgaccacagtacttcaacttgggtgacagagcaaagttaataccattggaaatctacattacacagattaaaatattgagataccatcattcacctatcaaattggcatttaaattaatctccagcatttgagaaggggccccgtgaggaaagaccatccagagaggcctttgggtagcaacacttaagagcatgggctttgcaataagcctgactcagttaaaaaaaaaccagccccaccacctgttagctttgtggcccacagaatgttatttcacatctttgagcctcagttcagatgcctctgaaagtggcagtaactgcaagggtaaccaagatgctgcatgtaaccacttagcagaacacctcgtgtaagtcagggctcagtagactcagcaactgtcactcttgccaacgaacatgtgtgcatggaatggtgtattagtctgttttcacactgtataaagaaatacccaaaactgggtaatttataaaggtaagaggtttaactgactcacagtttcccatggctggggaggcctcaggaaacttacaatcatggcagaaggggaagcaagcaccttcttcacatggcggcaggagagagaatgcttcaaagggggaacttccaagcacttttaaaaccatcagctctcgcgagaactccctcctatcactggaacagcatgggggaagccatccctgtgatccaatcacttcctacaggtccctccctcaacatgtggggatcatggggattacaattcgagatgagatttgggtggtgacacagagccaaaccatatcacatggtgatactttgaaagtccttttaacacatgttctcaagtggatgtccctgcaggccagggtcctatcagaaagggctgaaggaggtcatgtggttaaagttcttagctgtgcctgacatccagtaagtgtgcaataccttctagcaattacaggcaaattggaacaggtaatggaggctcagagagatgatgggatgaggccaaagttgcattggtaaatggtgaagcatggctttgatccacatttgcctagttctaaatctctttcccccataacgtgtttaggatcctggcaaggtcttaggttcttctgagaagtggatccagctcccagtcttgaaatgaagtcagcaatacaaccagtgctggatcatgtgcaaaggctggggagttaaccttcctgggttcaaatcctggctctaccactttccagctgtgtgtccttggcaagctacccaacctcactgagtctcagtttccccatctgtaatacgaggatgatattaatattacctaacagagctcttgtaaggattaactgagatgatcaatgtaaaaggctaagcacaatgcttcaaaacattaaataaatgtcgttgttgttttatcaccacattaatttaggcaccagtgtcactttgccatgcccccttccttcaatatgttggtgcaagttccttaagcctaactgctcgggcaagccttctgcattgcacagctccaagggcactgttcatatctattccatttgaatggtgtcctatggacttgtgcagtgcacaacctatactcctgtacatagcatactcagagcaaactatggggctacatagaggatctggatgtcagagtctctagtgggaaagcatgagcaccatgaggtcaacagaagtgtcccggttctggtgtcctccatcttaaagctagagtccaagctactcccaaaagtctgggggatatgcctcactgccagaaggaggagacagtgagaaatggtaggtgccctcaatacaggaatgcagcttgggaagctggactgctgggtagagaaacaggacttgggcaagcagtggtctctggtgtaattcaggatctccgagtagatgcaactcagagtcaagggagaggatctatgtattctg

SEQ ID NO: 36486 - DNA, 2097 bp, Homo sapiens
ccttgaggccaggggtttgagaccagcctggccaatatggcagaaccccattttttacagaaaaaaaaaaatagctgggtgtggtggtgcacgcttgtagtcccagctactcgggagacaggatgcagggacctgggktgcagtgaccacagtacttcaacttgggtgacagagcaaagttaataccattggaaatctacattacacagattaaaatattgagataccatcattcacctatcaaattggcatttaaattaatctccagcatttgagaaggggccccgtgaggaaagaccatccagagaggcctttgggtagcaacacttaagagcatgggctttgcaataagcctgactcagttaaaaaaaaaccagccccaccacctgttagctttgtggcccacagaatgttatttcacatctttgagcctcagttcagatgcctctgaaagtggcagtaactgcaagggtaaccaagatgctgcatgtaaccacttagcagaacacctcgtgtaagtcagggctcagtagactcagcaactgtcactcttgccaacgaacatgtgtgcatggaatggtgtattagtctgttttcacactgtataaagaaatacccaaaactgggtaatttataaaggtaagaggtttaactgactcacagtttcccatggctggggaggcctcaggaaacttacaatcatggcagaaggggaagcaagcaccttcttcacatggcggcaggagagagaatgcttcaaagggggaacttccaagcacttttaaaaccatcagctctcgcgagaactccctcctatcactggaacagcatgggggaagccatccctgtgatccaatcacttcctacaggtccctccctcaacatgtggggatcatggggattacaattcgagatgagatttgggtggtgacacagagccaaaccatatcacatggtgatactttgaaagtccttttaacacatgttctcaagtggatgtccctgcaggccagggtcctatcagaaagggctgaaggaggtcatgtggttaaagttcttagctgtgcctgacatccagtaagtgtgcaataccttctagcaattacaggcaaattggaacaggtaatggaggctcagagagatgatgggatgaggccaaagttgcattggtaaatggtgaagcatggctttgatccacatttgcctagttctaaatctctttcccccataacgtgtttaggatcctggcaaggtcttaggttcttctgagaagtggatccagctcccagtcttgaaatgaagtcagcaatacaaccagtgctggatcatgtgcaaaggctggggagttaaccttcctgggttcaaatcctggctctaccactttccagctgtgtgtccttggcaagctacccaacctcactgagtctcagtttccccatctgtaatacgaggatgatattaatattacctaacagagctcttgtaaggattaactgagatgatcaatgtaaaaggctaagcacaatgcttcaaaacattaaataaatgtcgttgttgttttatcaccacattaatttaggcaccagtgtcactttgccatgcccccttccttcaatatgttggtgcaagttccttaagcctaactgctcgggcaagccttctgcattgcacagctccaagggcactgttcatatctattccatttgaatggtgtcctatggacttgtgcagtgcacaacctatactcctgtacatagcatactcagagcaaactatggggctacatagaggatctggatgtcagagtctctagtgggaaagcatgagcaccatgaggtcaacagaagtgtcccggttctggtgtcctccatcttaaagctagagtccaagctactcccaaaagtctgggggatatgcctcactgccagaaggaggagacagtgagaaatggtaggtgccctcaatacaggaatgcagcttgggaagctggactgctgggtagagaaacaggacttgggcaagcagtggtctctggtgtaattcaggatctccgagtagatgcaactcagagtcaagggagaggatctatgtattctg

SEQ ID NO: 36487 - DNA, 2097 bp, Homo sapiens
ccttgaggccaggggtttgagaccagcctggccaatatggcagaaccccattttttacagaaaaaaaaaaatagctgggtgtggtggtgcacgcttgtagtcccagctactcgggagacaggatgcagggacctgggttgcagtgaccacagtacttcaacttgggtgacagagcaaagttaataccattggaaatctacattacacagattaaaatattgagataccatcattcacctatcaaattggcatttaaattaatctccagcatttgagaaggggccccgtgaggaaagaccatccagagaggcctttgggtagcaacacttaagagcatgggctttgcaataagcctgactcagttaaaaaaaaaccagccccaccacctgttagctttgtggcccacagaatgttatttcacatctttgagcctcagttcagatgcctctgaaagtggcagtaactgcaagggtaaccaagatgctgcatgtaaccacttagcagaacacctcgtgtaagtcagggctcagtagactcagcaactgtcactcttgccaacgaacatgtgtgcatggaatggtgtattagtctgttttcacactgtataaagaaatacccaaaactgggtaatttataaaggtaagaggtttaactgactcacagtttcccatggctggggaggcctcaggaaacttacaatcatggcagaaggggaagcaagcaccttcttcacatggcggcaggagagagaatgcttcaaagggggaacttccaagcacttttaaaaccatcagctctcgcgagaactccctcctatcactggaacagcatgggggaagccatccctgtgatccaatcacttcctacaggtccctccctcaacatgtggggatcatggggattacaattcgagatgagatttgggtggtgacacagagccaaaccatatcacatggtgatamtttgaaagtccttttaacacatgttctcaagtggatgtccctgcaggccagggtcctatcagaaagggctgaaggaggtcatgtggttaaagttcttagctgtgcctgacatccagtaagtgtgcaataccttctagcaattacaggcaaattggaacaggtaatggaggctcagagagatgatgggatgaggccaaagttgcattggtaaatggtgaagcatggctttgatccacatttgcctagttctaaatctctttcccccataacgtgtttaggatcctggcaaggtcttaggttcttctgagaagtggatccagctcccagtcttgaaatgaagtcagcaatacaaccagtgctggatcatgtgcaaaggctggggagttaaccttcctgggttcaaatcctggctctaccactttccagctgtgtgtccttggcaagctacccaacctcactgagtctcagtttccccatctgtaatacgaggatgatattaatattacctaacagagctcttgtaaggattaactgagatgatcaatgtaaaaggctaagcacaatgcttcaaaacattaaataaatgtcgttgttgttttatcaccacattaatttaggcaccagtgtcactttgccatgcccccttccttcaatatgttggtgcaagttccttaagcctaactgctcgggcaagccttctgcattgcacagctccaagggcactgttcatatctattccatttgaatggtgtcctatggacttgtgcagtgcacaacctatactcctgtacatagcatactcagagcaaactatggggctacatagaggatctggatgtcagagtctctagtgggaaagcatgagcaccatgaggtcaacagaagtgtcccggttctggtgtcctccatcttaaagctagagtccaagctactcccaaaagtctgggggatatgcctcactgccagaaggaggagacagtgagaaatggtaggtgccctcaatacaggaatgcagcttgggaagctggactgctgggtagagaaacaggacttgggcaagcagtggtctctggtgtaattcaggatctccgagtagatgcaactcagagtcaagggagaggatctatgtattctg

SEQ ID NO: 36488 - DNA, 548 bp, Homo sapiens
tgaaatcctgccctgctcattacactaaaacttatgccaaatgttcaagcctttaaatgtaaaccattaaaatgagctattatttactaaaaaatgaaatggaagaacttttatcattatcacaggacaaaaaggctcttctacaaaaacaacactacaccaagtagccatgaaagaaaagatgaatacatttaactatatattgttgtggactatataaactttgttgtccctcaaaaaagacatgctcaaaacccagccatcaggacttatgaatgtgagctatttggacagagggttttggcagatataatcaagttaagttgagataatggtggaytgggatgcatcctaatccaatgactagtgtccctaaaagatggggggaatttgtgtatgcagttactcaggaaagaaggtctcgtggagacaaaggtagagattggagcgatgctgccgcaaaccaaggaaggccagggattgccagaaaccagcagaagctagaggaagcaaggaaagattttccctagagcctttggaaggaacat

SEQ ID NO: 36489 - DNA, 548 bp, Homo sapiens
tgaaatcctgccctgctcattacactaaaacttatgccaaatgttcaagcctttaaatgtaaaccattaaaatgagctattatttactaaaaaatgaaatggaagaacttttatcattatcacaggacaaaaaggctcttctacaaaaacaacactacaccaagtagccatgaaagaaaagatgaatacatttaactatatattgttgtggactatataaactttgttgtccctcaaaaaagacatgctcaaaacccagccatcaggacttatgaatgtgagctatttggacagagggttttggcagatataatcaagttaagttgagataatggtggacygggatgcatcctaatccaatgactagtgtccctaaaagatggggggaatttgtgtatgcagttactcaggaaagaaggtctcgtggagacaaaggtagagattggagcgatgctgccgcaaaccaaggaaggccagggattgccagaaaccagcagaagctagaggaagcaaggaaagattttccctagagcctttggaaggaacat

SEQ ID NO: 36490 - DNA, 561 bp, Homo sapiens
tgacaagtttgatagactggtgaaaatctaaaaaggccattattcaaatatttatggatccttttagctaatggattcaaatttataatgctgcacttgtcaacaagataattttgcaaaaacattaaaggctgagcagttcggtcccttctaaccctgaggcctcttcgccacagcaaatgagcagctgttctcaatgaaaatagagctcccgtgctcactgtgttctgagacccaatgcacgttgtgtgccagtttctaagctgtgctttggagaggaatttggcatgttatgagatgtccaggactaggctaaggcatccattttatyaaaagaagaaaaaaggccacatggtgttgccacaaatatcttggacaataaggtagattattgtagtcggaattgaatagtaaaccactattcatgatataagacactgactcttatcccccagggcatccagggtgatattaaaaaggatctgacatgatttttggtatctttgtattaaaaaagaggaagaatgctatgttataggtagtaatggttatggagcaaca

SEQ ID NO: 36491 - DNA, 866 bp, Homo sapiens
tagaaaggcagttattaacacccagatgttccaagtgagcaatctgagaagccacaccaagggccggcagtgcaggagctacaaatagtcaccagagacagggagaggactccagtcctctgactaccaattccatgttcttgatggataataactgccgaggtttcataaaggatcattatattgatacttgttttgatatattgctatattgattgatggcggcagcttcttttctactttcagagagacagcatcaagctgcattgtattgtatataaacatttagtttttgattctgtgccttcctcctttttatcatgccagctttaattatcctcaatttcagagttctttaaatcactccactttctttgatattaatgcaaaaaatagaacagtcctcttcttgttgttttctcaagtggttagtatcctttccatctctttaattcccagtccgctagtgcagattttaagggcttacattccactccatgctagtgtttcagtattttcattagataacactcaaacatggcttttgtctgattcatgtttctgttaaactgagattgggcttctattcctttgtaagtcacggcaataattcatgaagaaaaaagaaaatggttagtattcaaggttgacttcataaataaccaagaagagcttggttcaccacttttttggtcccttagtggcggaaaatktggtgggggagggggtctgggagtggtggattcctttttaaaattttaatacttggagcacagccgagataattaacagaattctaaaatgttcttttcacgaagatttcttttataatgtcccaagtgaaaatcattttttattactcacag

SEQ ID NO: 36492 - DNA, 1117 bp, Homo sapiens
tcagtttcacttattttatccttaatgatgctatgtctcataggaaaccatatcaactgaaaaatatgtcatcacacattcttctctggtttcaacttccaagtcttcttccacctccccttcaccaaccatgttccttagtaggaccaccttagtaggactcaagtatttcagtcagtggatttgtacctgayctttcaatgcatctttctctgcggcgtcgcccacgatgatcttgccgcctgatttgctagtcttccccaccggaaaggcgtctcgaagcccctgcaggtgctccccgaggccccagccttcccggaagctgcgcttctgcatgatgttgtgcaccaccgttcccaccacgttagcgaggaaggagctgctaggacggtttggagatctcagtctgtcctgttcctccttcactgggggaggaatggctgctttggaagaccgtgactgaggtcttgaatcctcttcataaggaaaatctcggggtgactcttggtctttctctaccagagaagtgggaggggcaatggcagctccaccctactacttttcctcctctctccctcctaatcttccccttcatcagaatctggatttggtcgccttgatcagaactcccctaatttcttgcctgtcttcaggcctcttttccctttcttctatttcctttcatatttctagctcctgctgtgtctgtcgttcctctctttggcacttcactactttctcataatcataagggaacataggatcatattcgtcagctaagggaatcagaacgtcccctgcaaaaacccactgggagcaggatccttcagcccacctgctgcatgccgtggtgtgtccccaatttgcaggtcatctgaggagccgcctggccttaggtcaatgactggcaagagctgcactgtttctaactttggctctttccctgagtgagagctgccttcctcacctgaagctgagactgcagaagtttgacgttttggaaccagccttatgcttttgagtcactggtctccactctcaggccatcgtatgggggcatctttttttttttttttcaatttaatgttgccctgctgactctacccatgggtagcca

SEQ ID NO: 36493 - DNA, 1117 bp, Homo sapiens
tcagtttcacttattttatccttaatgatgctatgtctcataggaaaccatatcaactgaaaaatatgtcatcacacattcttctctggtttcaacttccaagtcttcttccacctccccttcaccaaccatgttccttagtaggaccaccttagtaggactcaagtatttcagtcagtggatttgtacctgatctttcaatgcatctttctctgcggcgtcgcccacgatgatcttgccgcctgatttgctagtcttccccaccggaaaggcgtctcgaagcccctgcaggtgctccccgaggccccagccttcccggaagcygcgcttctgcatgatgttgtgcaccaccgttcccaccacgttagcgaggaaggagctgctaggacggtttggagatctcagtctgtcctgttcctccttcactgggggaggaatggctgctttggaagaccgtgactgaggtcttgaatcctcttcataaggaaaatctcggggtgactcttggtctttctctaccagagaagtgggaggggcaatggcagctccaccctactacttttcctcctctctccctcctaatcttccccttcatcagaatctggatttggtcgccttgatcagaactcccctaatttcttgcctgtcttcaggcctcttttccctttcttctatttcctttcatatttctagctcctgctgtgtctgtcgttcctctctttggcacttcactactttctcataatcataagggaacataggatcatattcgtcagctaagggaatcagaacgtcccctgcaaaaacccactgggagcaggatccttcagcccacctgctgcatgccgtggtgtgtccccaatttgcaggtcatctgaggagccgcctggccttaggtcaatgactggcaagagctgcactgtttctaactttggctctttccctgagtgagagctgccttcctcacctgaagctgagactgcagaagtttgacgttttggaaccagccttatgcttttgagtcactggtctccactctcaggccatcgtatgggggcatctttttttttttttttcaatttaatgttgccctgctgactctacccatgggtagcca

SEQ ID NO: 36494 - DNA, 1117 bp, Homo sapiens
tcagtttcacttattttatccttaatgatgctatgtctcataggaaaccatatcaactgaaaaatatgtcatcacacattcttctctggtttcaacttccaagtcttcttccacctccccttcaccaaccatgttccttagtaggaccaccttagtaggactcaagtatttcagtcagtggatttgtacctgatctttcaatgcatctttctctgcggcgtcgcccacgatgatcttgccgcctgatttgctagtcttccccaccggaaaggcgtctcgaagcccctgcaggtgctccccgaggccccagccttcccggaagctgcgcttctgcatgatgttgtgcaccaccgttcccaccacgttagygaggaaggagctgctaggacggtttggagatctcagtctgtcctgttcctccttcactgggggaggaatggctgctttggaagaccgtgactgaggtcttgaatcctcttcataaggaaaatctcggggtgactcttggtctttctctaccagagaagtgggaggggcaatggcagctccaccctactacttttcctcctctctccctcctaatcttccccttcatcagaatctggatttggtcgccttgatcagaactcccctaatttcttgcctgtcttcaggcctcttttccctttcttctatttcctttcatatttctagctcctgctgtgtctgtcgttcctctctttggcacttcactactttctcataatcataagggaacataggatcatattcgtcagctaagggaatcagaacgtcccctgcaaaaacccactgggagcaggatccttcagcccacctgctgcatgccgtggtgtgtccccaatttgcaggtcatctgaggagccgcctggccttaggtcaatgactggcaagagctgcactgtttctaactttggctctttccctgagtgagagctgccttcctcacctgaagctgagactgcagaagtttgacgttttggaaccagccttatgcttttgagtcactggtctccactctcaggccatcgtatgggggcatctttttttttttttttcaatttaatgttgccctgctgactctacccatgggtagcca

SEQ ID NO: 36495 - DNA, 686 bp, Homo sapiens
caggttgtgcatatagcctgcatttttttgcattcatgcctgaaatagagattgactgaaggtcaaattcttttaaacttacctttatggaatctttctgctattcaatgccatgcctccttccatgatattgagaatacaaaattgactgttgtgtcgccagtcctcacatccttcttgtaggaatctgctagaccaagaacttgtggcaacactgcattgaagtctgtcactgcaataacacacagtgacaattttcttgccaacctcatatgcttacacaagtgaaaataaccgggctaaaattttcatgggtcttaatatctttatttgtttgatttcatatccatgcagtactttatgattagaatttgtcctgaaagtttcataactttttgcgggacacctggatttattttagtttttttttttctaacagagttatcgaattcattttcttttaagaataacctggctgggygctgtggcttatgcctgtaatcccagcattttgggaggctgaggcaggtggatcacgaggtcaggagatcaaaaccatcctggctaatatggtgaaaccccgtctctactgaaaaaaaatacaaaaaaagaaattagcagggcatgatggtgcgtgtctgtagtcccagccactcgggaggctgaggcaggagaatgctgtgaac

SEQ ID NO: 36496 - DNA, 686 bp, Homo sapiens
caggttgtgcatatagcctgcatttttttgcattcatgcctgaaatagagattgactgaaggtcaaattcttttaaacttacctttatggaatctttctgctattcaatgccatgcctccttccatgatattgagaatacaaaattgactgttgtgtcgccagtcctcacatccttcttgtaggaatctgctagaccaagaacttgtggcaacactgcattgaagtctgtcactgcaataacacacagtgacaattttcttgccaacctcatatgcttacacaagtgaaaataaccgggctaaaattttcatgggtcttaatatctttatttgtttgatttcatatccatgcagtactttatgattagaatttgtcctgaaagtttcataactttttgcgggacacctggatttattttagtttttttttttctaacagagttatcgaattcattttcttttaagaataacctggctgggtgctgtggcttatgcctgtaatcccagcattttgggaggctgaggcaggtggatcacgaggtcaggagatcaaaaccatcctggctaatatggtgaaaccccgtctctactgaaaaaaaatacaaaaaaaraaattagcagggcatgatggtgcgtgtctgtagtcccagccactcgggaggctgaggcaggagaatgctgtgaac

SEQ ID NO: 36497 - DNA, 686 bp, Homo sapiens
caggttgtgcatatagcctgcatttttttgcattcatgcctgaaatagagattgactgaaggtcaaattcttttaaacttacctttatggaatctttctgctattcaatgccatgcctccttccatgatattgagaatacaaaattgactgttgtgtcgccagtcctcacatccttcttgtaggaatctgctagaccaagaacttgtggcaacactgcattgaagtctgtcactgcaataacacacagtgacaattttcttgccaacctcatatgcttacacaagtgaaaataaccgggctaaaattttcatgggtcttaatatctttatttgtttgatttcatatccatgcagtactttatgattagaatttgtcctgaaagtttcataactttttgcgggacacctggatttattttagtttttttttttctaacagagttatcgaattcattttcttttaagaataacctggctgggtgctgtggcttatgcctgtaatcccagcattttgggaggctgaggcaggtggatcacgaggtcaggagatcaaaaccatcctggctaatatggtgaaaccccgtctctactgaaaaaaaatacaaaaaaagaaattagcagggcatgrtggtgcgtgtctgtagtcccagccactcgggaggctgaggcaggagaatgctgtgaac

SEQ ID NO: 36498 - DNA, 1141 bp, Homo sapiens
atgttttcctactctgtctttctagaagagttgtgtctggtcctactcaagtctgcagagggtcagtttcctgttcacttgctcacagcagcttgcagtccttctcagtcccaacttctaattttattcattttcaccccaatgtagaatttgtttctcacagtactcatcaacgtaagccacggttcagtcttcctatgcaatgtatattaaatactgtattacattttaaaatacgagttatgagatgttagtcacattcattaatctgcatgtgaaaatacaactaaaatgtgggcacggtgagtccctggggccgcagttctcagggtttattgagcacatgatttctttcaaggtgaatgtgatttaacttaaaaagttttgctgtttttataaaggacaatcagacttctccgtattatttggcatcgctgcagggttcagactttgaatgaaggtagaaaattagccttcagcatacaaagtaaaatgtcaataataagaagtaactggtgactaaagctaaaatcaggaggaaaaaagcagaaagcaaaaccaaagcaaattcaatcccaaattaagtttaaatgggaagataaattaaaaattaaattttaaaatgacatagcaaattataaatagaaagaaatgagtctagtcgagttctgcagcctccagcctggagaagggtggggtgagatgaaaacattcagacttccttccttcccttccttccctccctccctccctcccccactcccctctcccactcctcccttctccctcccccttcccccctccccccttctgccccttcctcccttccttccttccttccttccttctggtgtgaactgcaccagcaccctgcccctcgcccctctcacctgcatctccttttcatcctttctccctctctcrgttggttctctgtttgtgatagtgttttaggaccaaccacttgggttcagatttctttagaggacaaaatgccagagggactagaaaggaggagggggttcctatgactcagagggaaaagaacttgggcctggaactaagtctcctgccccttctgcatgaaagtgccctggagtcctcagctgagcaaatccatattcctttaaaaggcaggaaa

SEQ ID NO: 36499 - DNA, 1141 bp, Homo sapiens
atgttttcctactctgtctttctagaagagttgtgtctggtcctactcaagtctgcagagggtcagtttcctgttcacttgctcacagcagcttgcagtccttctcagtcccaacttctaattttattcattttcaccccaatgtagaatttgtttctcacagtactcatcaacgtaagccacggttcagtcttcctatgcaatgtatattaaatactgtattacattttaaaatacgagttatgagatgttagtcacattcattaatctgcatgtgaaaatacaactaaaatgtgggcacggtgagtccctggggccgcagttctcagggtttattgagcacatgatttctttcaaggtgaatgtgatttaacttaaaaagttttgctgtttttataaaggacaatcagacttctccgtattatttggcatcgctgcagggttcagactttgaatgaaggtagaaaattagccttcagcatacaaagtaaaatgtcaataataagaagtaactggtgactaaagctaaaatcaggaggaaaaaagcagaaagcaaaaccaaagcaaattcaatcccaaattaagtttaaatgggaagataaattaaaaattaaattttaaaatgacatagcaaattataaatagaaagaaatgagtctagtcgagttctgcagcctccagcctggagaagggtggggtgagatgaaaacattcagacttccttccttcccttccttccctccctccctccctcccccactcccctctcccactcctcccttctccctcccccttcccccctccccccttctgccccttcctcccttccttccttccttccttccttctggtgtgaactgcaccagcaccctgcccctcgcccctctcacctgcatctccttttcatcctttctccctctctcggttggttctctgtttgtgatagtgttttaggaccaaccacttgggttcagatttcttyagaggacaaaatgccagagggactagaaaggaggagggggttcctatgactcagagggaaaagaacttgggcctggaactaagtctcctgccccttctgcatgaaagtgccctggagtcctcagctgagcaaatccatattcctttaaaaggcaggaaa

SEQ ID NO: 36500 - DNA, 1078 bp, Homo sapiens
agaggtagctacagmttactctgcccggtcacagcacacaaatgcagtttcctttcagaaataattttcgcaaaagattttgtgtcatagcttaaggaatttagctcagatgaagaaaaaaaatcttagtattaagattctaaatagaacaataaaagaaacccatagtacaaattaatgagatgtgatagggctaatttctctgtttagagatgttttaactgtgacttgacaatactgacatgcaagctcttcaggagaacctagttttcatttgagcttgcttaattaattaccgaagtaatgaattcattctgattcaagggtagacaattgactgttaatgtaaatttattggccgtttaactttttttattattttggagaagcaaggatggaaaaaataccaccagagtaaatttacattgtgttcttgggatatttttcagtaatttttgtaaacttccttacaataaatagaagccgttcctaaacctgaatttatttttcctttcagtcagaagtttagctaataaaacttttgccagcgtgtagcacaatagctcccttgggaactctttcaactgcgtaattttttctctctcttgtaaaaagaatgacatggtgtctttaaaatgttcaaggctctgaaagaaagacaagccatttgatatgaatgattaataagaacattaaggaatacaaaataagaggagtttaaatataaaaaaattctcattttcagaatgcagatcaaatctgacttctcttctatttttcctgtttcacagacaaaatcctgactgaggttaagtgctaatgtttttaatgcccatcttttattctcatgcttgacaccaatcggctacttcagaactagtgtcttgacacgtgaatcttttccacagcaccaaaggttattccacaaggacatctgcgaaaggaagaatatatttctaacgcaataaacaaaggattttatgcaaagcctatttagacaggaaatggaaacgcggatgagagagaagccatgttgttcaggtcctgctatttatgagggagagttttccttgagaaa

SEQ ID NO: 36501 - DNA, 1078 bp, Homo sapiens
agaggtagctacagcttactctgcccrgtcacagcacacaaatgcagtttcctttcagaaataattttcgcaaaagattttgtgtcatagcttaaggaatttagctcagatgaagaaaaaaaatcttagtattaagattctaaatagaacaataaaagaaacccatagtacaaattaatgagatgtgatagggctaatttctctgtttagagatgttttaactgtgacttgacaatactgacatgcaagctcttcaggagaacctagttttcatttgagcttgcttaattaattaccgaagtaatgaattcattctgattcaagggtagacaattgactgttaatgtaaatttattggccgtttaactttttttattattttggagaagcaaggatggaaaaaataccaccagagtaaatttacattgtgttcttgggatatttttcagtaatttttgtaaacttccttacaataaatagaagccgttcctaaacctgaatttatttttcctttcagtcagaagtttagctaataaaacttttgccagcgtgtagcacaatagctcccttgggaactctttcaactgcgtaattttttctctctcttgtaaaaagaatgacatggtgtctttaaaatgttcaaggctctgaaagaaagacaagccatttgatatgaatgattaataagaacattaaggaatacaaaataagaggagtttaaatataaaaaaattctcattttcagaatgcagatcaaatctgacttctcttctatttttcctgtttcacagacaaaatcctgactgaggttaagtgctaatgtttttaatgcccatcttttattctcatgcttgacaccaatcggctacttcagaactagtgtcttgacacgtgaatcttttccacagcaccaaaggttattccacaaggacatctgcgaaaggaagaatatatttctaacgcaataaacaaaggattttatgcaaagcctatttagacaggaaatggaaacgcggatgagagagaagccatgttgttcaggtcctgctatttatgagggagagttttccttgagaaa

SEQ ID NO: 36502 - DNA, 1078 bp, Homo sapiens
agaggtagctacagcttactctgcccggtcacagcacacaaatgcagtttcctttcagaaataattttcgcaaaagattttgtgtcatagcttaaggaatttagctcagatgaagaaaaaaaatcttagtattaagattctaaatagaacaataaaagaaacccatagtacaaattaatgagatgtgatagggctaatttctctgtttagagatgttttaactgtgacttgacaatactgacatgcaagctcttcaggagaacctagttttcatttgagcttgcttaattaattaccgaagtaatgaattcattctgattcaagggtagacaattgactgttaatgtaaatttattggccgtttaactttttttattattttggagaagcaaggatggaaaaaataccaccagagtaaatttacattgtgttcttgggatatttttcagtaatttttgyaaacttccttacaataaatagaagccgttcctaaacctgaatttatttttcctttcagtcagaagtttagctaataaaacttttgccagcgtgtagcacaatagctcccttgggaactctttcaactgcgtaattttttctctctcttgtaaaaagaatgacatggtgtctttaaaatgttcaaggctctgaaagaaagacaagccatttgatatgaatgattaataagaacattaaggaatacaaaataagaggagtttaaatataaaaaaattctcattttcagaatgcagatcaaatctgacttctcttctatttttcctgtttcacagacaaaatcctgactgaggttaagtgctaatgtttttaatgcccatcttttattctcatgcttgacaccaatcggctacttcagaactagtgtcttgacacgtgaatcttttccacagcaccaaaggttattccacaaggacatctgcgaaaggaagaatatatttctaacgcaataaacaaaggattttatgcaaagcctatttagacaggaaatggaaacgcggatgagagagaagccatgttgttcaggtcctgctatttatgagggagagttttccttgagaaa

SEQ ID NO: 36503 - DNA, 1078 bp, Homo sapiens
agaggtagctacagcttactctgcccggtcacagcacacaaatgcagtttcctttcagaaataattttcgcaaaagattttgtgtcatagcttaaggaatttagctcagatgaagaaaaaaaatcttagtattaagattctaaatagaacaataaaagaaacccatagtacaaattaatgagatgtgatagggctaatttctctgtttagagatgttttaactgtgacttgacaatactgacatgcaagctcttcaggagaacctagttttcatttgagcttgcttaattaattaccgaagtaatgaattcattctgattcaagggtagacaattgactgttaatgtaaatttattggccgtttaactttttttattattttggagaagcaaggatggaaaaaataccaccagagtaaatttacattgtgttcttgggatatttttcagtaatttttgtaaacttccttacaataaatagaagccgttcctaaacctgaatttatttttcctttcagtcagaagtttagctaataaaacttttgccagmgtgtagcacaatagctcccttgggaactctttcaactgcgtaattttttctctctcttgtaaaaagaatgacatggtgtctttaaaatgttcaaggctctgaaagaaagacaagccatttgatatgaatgattaataagaacattaaggaatacaaaataagaggagtttaaatataaaaaaattctcattttcagaatgcagatcaaatctgacttctcttctatttttcctgtttcacagacaaaatcctgactgaggttaagtgctaatgtttttaatgcccatcttttattctcatgcttgacaccaatcggctacttcagaactagtgtcttgacacgtgaatcttttccacagcaccaaaggttattccacaaggacatctgcgaaaggaagaatatatttctaacgcaataaacaaaggattttatgcaaagcctatttagacaggaaatggaaacgcggatgagagagaagccatgttgttcaggtcctgctatttatgagggagagttttccttgagaaa

SEQ ID NO: 36504 - DNA, 620 bp, Homo sapiens
ttgaaagtaatgtcctaagcaacacagcctcagtaaatgttttagttgttctaataaactgagtagtacctcactgctgttttaatttgcatttctttaacttataaacaaggttgaatattatctcatgaattttattattattattaytattattattatttgagacggagtcttgctctgtcgcccaggctggagtgcagtggcgcaatcttggctcactgcaagctccacctcccgggttcacagcattctccttcctcagcttcctgagtagctgggactacaggcgcccgccaccacacctggctaattttttgtatttttagtagagatggggtttcaccgggttagccaggatggtcttgatctcctgacctcgtgatctgcccacctcggccttccaaagtgctgggattacgggtgtgagccaccgcgccaagcattatctcataaatttatgaactattttttcttcatgtggaatgcttatcaatccttctcaattttacattgcttttcttaatctttatccattgatgtgtaagagcactttacaaaaaaactgtgtcatgtatattaaaatattatttcccatttataaattgatatcttctggt

SEQ ID NO: 36505 - DNA, 620 bp, Homo sapiens
ttgaaagtaatgtcctaagcaacacagcctcagtaaatgttttagttgttctaataaactgagtagtacctcactgctgttttaatttgcatttctttaacttataaacaaggttgaatattatctcatgaattttattattattattactattattattatttgagacggagtcttgctctgtcgcccaggctggagtgcagtggcgcaatcttggctcactgcaagctccacctcccgggttcacagcattctccttcctcagcytcctgagtagctgggactacaggcgcccgccaccacacctggctaattttttgtatttttagtagagatggggtttcaccgggttagccaggatggtcttgatctcctgacctcgtgatctgcccacctcggccttccaaagtgctgggattacgggtgtgagccaccgcgccaagcattatctcataaatttatgaactattttttcttcatgtggaatgcttatcaatccttctcaattttacattgcttttcttaatctttatccattgatgtgtaagagcactttacaaaaaaactgtgtcatgtatattaaaatattatttcccatttataaattgatatcttctggt

SEQ ID NO: 36506 - DNA, 620 bp, Homo sapiens
ttgaaagtaatgtcctaagcaacacagcctcagtaaatgttttagttgttctaataaactgagtagtacctcactgctgttttaatttgcatttctttaacttataaacaaggttgaatattatctcatgaattttattattattattactattattattatttgagacggagtcttgctctgtcgcccaggctggagtgcagtggcgcaatcttggctcactgcaagctccacctcccgggttcacagcattctccttcctcagcttcctgagtagctgggactacaggcgcccgccaccacacctggctaattttttgtatttttagtagagrtggggtttcaccgggttagccaggatggtcttgatctcctgacctcgtgatctgcccacctcggccttccaaagtgctgggattacgggtgtgagccaccgcgccaagcattatctcataaatttatgaactattttttcttcatgtggaatgcttatcaatccttctcaattttacattgcttttcttaatctttatccattgatgtgtaagagcactttacaaaaaaactgtgtcatgtatattaaaatattatttcccatttataaattgatatcttctggt

SEQ ID NO: 36507 - DNA, 620 bp, Homo sapiens
ttgaaagtaatgtcctaagcaacacagcctcagtaaatgttttagttgttctaataaactgagtagtacctcactgctgttttaatttgcatttctttaacttataaacaaggttgaatattatctcatgaattttattattattattactattattattatttgagacggagtcttgctctgtcgcccaggctggagtgcagtggcgcaatcttggctcactgcaagctccacctcccgggttcacagcattctccttcctcagcttcctgagtagctgggactacaggcgcccgccaccacacctggctaattttttgtatttttagtagagatggggtttcaccgggttagccaggatggtcttgatctcctgacctcgtgatctgcccacctcggccttccaaagtgctgggattacgggtgtgagccaccgcgccaagcattatctcataaatttatraactattttttcttcatgtggaatgcttatcaatccttctcaattttacattgcttttcttaatctttatccattgatgtgtaagagcactttacaaaaaaactgtgtcatgtatattaaaatattatttcccatttataaattgatatcttctggt

SEQ ID NO: 36508 - DNA, 620 bp, Homo sapiens
ttgaaagtaatgtcctaagcaacacagcctcagtaaatgttttagttgttctaataaactgagtagtacctcactgctgttttaatttgcatttctttaacttataaacaaggttgaatattatctcatgaattttattattattattactattattattatttgagacggagtcttgctctgtcgcccaggctggagtgcagtggcgcaatcttggctcactgcaagctccacctcccgggttcacagcattctccttcctcagcttcctgagtagctgggactacaggcgcccgccaccacacctggctaattttttgtatttttagtagagatggggtttcaccgggttagccaggatggtcttgatctcctgacctcgtgatctgcccacctcggccttccaaagtgctgggattacgggtgtgagccaccgcgccaagcattatctcataaatttatgwactattttttcttcatgtggaatgcttatcaatccttctcaattttacattgcttttcttaatctttatccattgatgtgtaagagcactttacaaaaaaactgtgtcatgtatattaaaatattatttcccatttataaattgatatcttctggt

SEQ ID NO: 36509 - DNA, 550 bp, Homo sapiens
gcattatttaacctctcattaagataatgttaaggtacattaagaactgaaaagacaggtgatgaaatgggaagaatggaatagcgccgtatccagatgaacatccagacgtggcctgaagaaggtatgggcacccccttccctgtttgtgattcgattcccgaggcygtgctccctgctgactcaatatgtggaaccagagagaagcctgctgtggagttagtgaatttgacctaatcgagacagtctgagaaaggacaggaatctttttttttttcttttttctttttttagaacaaagaggttttctgtacatctgtgataacacagtaaccatctgttgaactctttaataataggctttgtgtttttctgataattcgaagcttgttaaggtgccgtcccctcatattagcaattcggtggccccttcccctctccttccatcgttaggttccgccgacacagtgcttagctcctttcacagtgaggagcaagtgcagccgcaagcatggggagagccacagcctggcagagtggcttagcatca

SEQ ID NO: 36510 - DNA, 550 bp, Homo sapiens
gcattatttaacctctcattaagataatgttaaggtacattaagaactgaaaagacaggtgatgaaatgggaagaatggaatagcgccgtatccagatgaacatccagacgtggcctgaagaaggtatgggcacccccttccctgtttgtgattcgattcccgaggctgtgctccctgctgactcaatatgtggaaccagagagaagcctgctgtggagttagtgaatttgacctaatcgagacagtctgagaaaggacaggaatctttttttttttcttttttytttttttagaacaaagaggttttctgtacatctgtgataacacagtaaccatctgttgaactctttaataataggctttgtgtttttctgataattcgaagcttgttaaggtgccgtcccctcatattagcaattcggtggccccttcccctctccttccatcgttaggttccgccgacacagtgcttagctcctttcacagtgaggagcaagtgcagccgcaagcatggggagagccacagcctggcagagtggcttagcatca

SEQ ID NO: 36511 - DNA, 550 bp, Homo sapiens
gcattatttaacctctcattaagataatgttaaggtacattaagaactgaaaagacaggtgatgaaatgggaagaatggaatagcgccgtatccagatgaacatccagacgtggcctgaagaaggtatgggcacccccttccctgtttgtgattcgattcccgaggctgtgctccctgctgactcaatatgtggaaccagagagaagcctgctgtggagttagtgaatttgacctaatcgagacagtctgagaaaggacaggaatctttttttttttcttttttctttttttagaacaaagaggttttctgtacatctgtgataacacagtaaccatctgttgaactctttaataataggctttgtgtttttctgataattcgaagctkgttaaggtgccgtcccctcatattagcaattcggtggccccttcccctctccttccatcgttaggttccgccgacacagtgcttagctcctttcacagtgaggagcaagtgcagccgcaagcatggggagagccacagcctggcagagtggcttagcatca

SEQ ID NO: 36512 - DNA, 550 bp, Homo sapiens
gcattatttaacctctcattaagataatgttaaggtacattaagaactgaaaagacaggtgatgaaatgggaagaatggaatagcgccgtatccagatgaacatccagacgtggcctgaagaaggtatgggcacccccttccctgtttgtgattcgattcccgaggctgtgctccctgctgactcaatatgtggaaccagagagaagcctgctgtggagttagtgaatttgacctaatcgagacagtctgagaaaggacaggaatctttttttttttcttttttctttttttagaacaaagaggttttctgtacatctgtgataacacagtaaccatctgttgaactctttaataataggctttgtgtttttctgataattcgaagcttgttaaggtgccgtcccctcatattagcarttcggtggccccttcccctctccttccatcgttaggttccgccgacacagtgcttagctcctttcacagtgaggagcaagtgcagccgcaagcatggggagagccacagcctggcagagtggcttagcatca

SEQ ID NO: 36513 - DNA, 550 bp, Homo sapiens
gcattatttaacctctcattaagataatgttaaggtacattaagaactgaaaagacaggtgatgaaatgggaagaatggaatagcgccgtatccagatgaacatccagacgtggcctgaagaaggtatgggcacccccttccctgtttgtgattcgattcccgaggctgtgctccctgctgactcaatatgtggaaccagagagaagcctgctgtggagttagtgaatttgacctaatcgagacagtctgagaaaggacaggaatctttttttttttcttttttctttttttagaacaaagaggttttctgtacatctgtgataacacagtaaccatctgttgaactctttaataataggctttgtgtttttctgataattcgaagcttgttaaggtgccgtcccctcatattagcaattcggtggccccttcccctctccttccatcsttaggttccgccgacacagtgcttagctcctttcacagtgaggagcaagtgcagccgcaagcatggggagagccacagcctggcagagtggcttagcatca

SEQ ID NO: 36514 - DNA, 1246 bp, Homo sapiens
  misc_feature (1)...(1246): n = A,T,C or G
gcatctgtcttgtcaaagaaacagagctcatattgtgtatgtgaaatatcacctagtgtctatttcaatcgtatatattttctgtttgtatcttagaaaaattatttcacctcaacaagcatattgcttgttggaattatctggatgtagtgataaaataattattttcatcaacatctgaagaaaatgcctatgtatctgttgggatgggaggtgggatgaagaggtgtncagttgtctagcaccacttgtggctgggaaggtatgtgtgtccacagtaacagaaaaaatctattgttaccacaaagattccccatagctcctttaaaaataaacctgccatcttgatctccatctgcctgaatctttgcttatctctcccttagttcaaaattctgacagagaatataagcatatttatcaatccttcaagccccagtagaaacatcagggggagaaaacttacctattttgaaatggttgaccaattctcagtgacaaaggtagttacagtctgattttcttgtccattgccaagaaaaaatgattcagtctgactccaatttataagggcatgttgaaagcaagaatcctgcttgtagagattcttcttctaggcatgaggaatggttattccaggtaatggattcctaatttgcccttctgtggaactagatttgcatgacagatgacagaatatttgtcaccttaagatccttgaaaaattaatttaaagccatgctatttctaattgttttggcttatgctctgaagtgttttttttgttttttgttttttgtttttttttgagacagagtctcgctctgtcgcccaggctggattgcggtggcgcaatctcggctcactgcaagctctgcctcccaggttcacgccattctcctgcctcggcctcccgagtagctgggactacaggcgcccgccactacacctggctaattttctgtatttttagtagagagggggtttcaccgtgtttgccaggatggtctcgatctcctgacctcgtgacccgctcgcctcggcctcccaaagtactgggattacaggcgtgagcyaccgcgcccggccctgaagtttttctaaggctgccaaaattgtggtcaccaacataataggtaccatttatccattatccagtgtaaaatatgtataatatgttatataatataaaacaatatatctgctggtgcatatagctttattatcatataagctatatgaaagc

SEQ ID NO: 36515 - DNA, 1512 bp, Homo sapiens
aaaggtggtgctggggctaaattctgctgcccttaaccagttttgaggtcttgggcaagatacttaaccagtgtacaaaatacaaatgctaatacatttcttgtgaggctaatatttataatgtgcttgcacagtaccacatggagtggctgctcactattaaatggcggccttgattatttcacttcctcttgctttttttttttttttttgaggcagagtctttctctgttgcccagggtggagtgcagtggcgcaatctkggctcactgcaacttccgcctcccaggttcaagcaattcttgtgcctcagtctcccgagtagctgggattacaggtgcacaccaccacacccagctaatttttatatttttagtaaaggcagagtttcaccatgttggccaggctggtcacaaactcctgacctcaagtgatctgcccaccttggcctcccaaagtgctgagattacaggcatgagcctccgctcctggcccctcttgcattctttaatatagaagctagtagcctacagtacatggcagagatggcccacagtagaacatggaaggccaaccagcactgctaaggagctcccacctcctcctatctgtcatcatgattggaggccaatgcttgttgtcttatctttctctgcagtttgaacatctctggacaacaagccattagtatctcttactaggctccttgtctggggtaccatgcaggaggaaagggggtcccatggtacacagatgttcagaggctgctaactcccacctctcacccttagtcagctcctgcctggctcagctctccactgagacccatgatccatctttgactacccaggtgaaactttaaagacacaacaacagccagctttttccgtaacttacagtttacaatgcctgttcacgtatgttttatttcagtttcagaacaactttatgagttaggcatgccaggtatttaaaaaaaaatccccaatttacagatgaggaaacagactcagtgcagttaggtgagttactgtaggccacccaacaagtaagttgtcataaaacagcttgtaaatggcaggaacccactaatctagcttttactgaaagccagttcaatacctgaggactcgtaccccagtaagagcatccccatcattttctaaagttttttccccctctttctgttcacaacaccgtcctggattatcttttcctattgattgacttttctatctaatttttcagttgtttttgctgaagtacgtggcattttcctatcaacatgtattgggggagggggcagtgagcagctcttctcagaatatctttgtgtttatattaaatatcatgctcactcgcctcactttctttcacattctgagcctctcatcagactctgtctcccaccctacctacttctgtagagtagtgagataaaaaaaaatagttgaatttgtgcaggcaatggtctcaaatcattttcatacactgttgctaatctgaccctta

SEQ ID NO: 36516 - DNA, 1512 bp, Homo sapiens
aaaggtggtgctggggctaaattctgctgcccttaaccagttttgaggtcttgggcaagatacttaaccagtgtacaaaatacaaatgctaatacatttcttgtgaggctaatatttataatgtgcttgcacagtaccacatggagtggctgctcactattaaatggcggccttgattatttcacttcctcttgctttttttttttttttttgaggcagagtctttctctgttgcccagggtggagtgcagtggcgcaatctgggctcactgcaacttccgcctcccaggttcaagcaattcttgtgcctcagtctcccgagtagctgggattacaggtgcacaccaccacacccagctaatttttatatttttagtaaaggcagagtttcaccatgttggccaggctggtcacaaactcctgacctcaagtgatctgcccaccttggcctcccaaagtgctgagattacaggcatgagcctccgctcctggcccctcttgcattctttaatatagaagctagtagcctacagtacatggcagagatggcccacagtagaacatggaaggccaaccagcactgctaaggagctcccacctcctcctatctgtcatcatgattggaggccaatgcttgttgtcttatctttctctgcagtttgaacatctctggacaacaagccattagtatctcttactaggctccttgtctggggtaccatgcaggaggaaagggggtcccatggtacacagatgttcagaggctgctaactcccacctctcacccttagtcagctcctgcctggctcagctctccactgagacccatgatccatctttgactacccaggtgaaactttaaagacacaacaacagccagctttttccgtaacttacagtttacaatgcctgttcacgtatgttttatttcagtttcagaacaactttatgagttaggcatgccaggtatttaaaaaaaaatccccaatttacagatgaggaaacagactcagtgcagttaggtgagttactgtaggccacccaacaagtaagttgtcataaaacagcttgtaaatggcaggaacccactaatctagcttttactgaaagccagttcaatacctgaggactcgtaccccagtaagagcatccccatcattttctaaagttttttccccctctttctgttcacaacaccgtcctggattatcttttcctattgattgacttttctatctaatttttcagttgtttttgctgaagtacgtggcattttcctatcaacatgtattgggggagggggcagtgagmagctcttctcagaatatctttgtgtttatattaaatatcatgctcactcgcctcactttctttcacattctgagcctctcatcagactctgtctcccaccctacctacttctgtagagtagtgagataaaaaaaaatagttgaatttgtgcaggcaatggtctcaaatcattttcatacactgttgctaatctgaccctta

SEQ ID NO: 36517 - DNA, 593 bp, Homo sapiens
  misc_feature (1)...(593): n = A,T,C or G
agcaatatggtatagtgcacaggtgtgaggttcctttagttatggtggtcaggaaatgtgtaagaggtgatatctgagaaatgaatcatgaagataaccatggaaagatctgccaaaagagcatatttggccatgggaagagacaggtacaaagactatacgggtggaacaagcttggcaagttccaaggatgaaaagaagagaattgtgggtagagagtgaggaagagggatgggagggtcaaatcatatcatgaagagccttgaggactaggggagaggttgcattctacttgcaatgaaaagccaccagatggcttagagcagggtagttgcctgatgaatgttctaaaaataccactctagctgtggtacgaagaatggaatatggaggggacttacattcatggaggctggaaaatctttaggagctgtttctgtagmgcatgttcaaaatataatttggaagtagaaccagtaggacttattgaggnnnnnnnnnnnnnnnnnnnnnnnnnnnnnnnnnnnnnnnnnnnnnnnnnnnnnnnnnnnnnnnnnnnnnnnnnnnnnnnnnnnnnnnnnnnnnnnnnnnna

SEQ ID NO: 36518 - DNA, 707 bp, Homo sapiens
gatccaatcacctcccaccaggcccctcctccaacactgggcatcacaattcgacatgagatttgggcggggacacaaatccaaaccgtatcaacatgtaagcaaactaaggcccagtgaagttagataaattgctcacatcacacagctagtaagtggcaaagctagatcttaagattttgcaagccagacatgacatcaggccaaatatcctacacctgtaccagtcaagccttcattatatagtattttataattacatatgtgttcagttttctccaacagcctttgaggtattaggaggaggacctggtattttattcatttktatagtcccagaacccagtacaaggattcgcacatagaagatacttaacaattatcatggaattgaattgaaagcagtgtgcatggagtcgaggcaagagaggccaatatggaaaaatatttagtgaatctccagcatgtccaatggagaagggtctctgtccatccagcccacatgttcctaccacctgtcagatctattcctcctatgtgagtgcatcagtcatgtagcttgttgacactagtcattaaaatcattctagccaccaccaccatccttcaccccatctatggtctatgcttactgagaaacctgagtataatttgacttcttatatagggttttctataggaatagactttttaaagcaacttctgat

SEQ ID NO: 36519 - DNA, 1217 bp, Homo sapiens
tttggggttacagatacacttgtcattgctgtcatggctctggatcgctatgtggccatctgtgaccccctgcactatgctytggtaatgaatcaccaacggtgtgcctgcttactagccttgagctgggtggtgtccatactgcacaccatgttgcgtgtgggactcgtcctgcctctttgctggactggggatgctgggggcaacgttaaccttcctcacttcttttgtgaccaccggccacttctgcgagcctcttgttctgacatacattctaatgagctggccatattctttgagggtggcttccttatgctgggcccctgtgccctcattgtactctcttatgtccgaattggggccgctattctacgtttgccttcagctgctggtcgccgccgagcagtctccacctgtggatcccacctcaccatggttggtttcctctacggcaccatcatttgtgtctacttccagcctcccttccagaactctcagtatcaggacatggtggcttcagtaatgtatactgccattacacctttggccaacccatttgtgtatagcctccacaataaggatgtcaagggtgcactctgcaggctgcttgaatgggtgaaggtagacccctgattagcctgctgtgggccatattgaataggtgagaaaagtcatgggcatattctgagcagagttggttttggggagatcagaggggtggagggcctagataacttaaggaactccagatttggctcttgtcaatgttgtgctttgatggagccatgaacattccacattcatagacacataagatcagggctcccttatcagcatacctctgggcaccctccatcaggccttttattttatcaaagtggatgaaaaagaattaccaagtctgggtagttttaattttagagttctgagggaatatgaggataggattgtgaaactatgaactaaacgaagagcagtagagttaatcatcatcatcacatttaggttggtgtgtgttcttgtgggagtgtgtttgtgtatatcagaaagtaagggaagatgacagtttagacaaatagggctaagttcgctacctgttccattcaatgagcaaaaatatgtcccagagtgagtatgaaatgataatcatgattctactgttccatgagttaggattaagttccatgggtttcttatagtgtgagcatctaactctg

SEQ ID NO: 36520 - DNA, 1217 bp, Homo sapiens
tttggggttacagatacacttgtcattgctgtcatggctctggatcgctatgtggccatctgtgaccccctgcactatgctttggtaatgaatcaccaacggtgtgcctgcttactagcctygagctgggtggtgtccatactgcacaccatgttgcgtgtgggactcgtcctgcctctttgctggactggggatgctgggggcaacgttaaccttcctcacttcttttgtgaccaccggccacttctgcgagcctcttgttctgacatacattctaatgagctggccatattctttgagggtggcttccttatgctgggcccctgtgccctcattgtactctcttatgtccgaattggggccgctattctacgtttgccttcagctgctggtcgccgccgagcagtctccacctgtggatcccacctcaccatggttggtttcctctacggcaccatcatttgtgtctacttccagcctcccttccagaactctcagtatcaggacatggtggcttcagtaatgtatactgccattacacctttggccaacccatttgtgtatagcctccacaataaggatgtcaagggtgcactctgcaggctgcttgaatgggtgaaggtagacccctgattagcctgctgtgggccatattgaataggtgagaaaagtcatgggcatattctgagcagagttggttttggggagatcagaggggtggagggcctagataacttaaggaactccagatttggctcttgtcaatgttgtgctttgatggagccatgaacattccacattcatagacacataagatcagggctcccttatcagcatacctctgggcaccctccatcaggccttttattttatcaaagtggatgaaaaagaattaccaagtctgggtagttttaattttagagttctgagggaatatgaggataggattgtgaaactatgaactaaacgaagagcagtagagttaatcatcatcatcacatttaggttggtgtgtgttcttgtgggagtgtgtttgtgtatatcagaaagtaagggaagatgacagtttagacaaatagggctaagttcgctacctgttccattcaatgagcaaaaatatgtcccagagtgagtatgaaatgataatcatgattctactgttccatgagttaggattaagttccatgggtttcttatagtgtgagcatctaactctg

SEQ ID NO: 36521 - DNA, 1620 bp, Homo sapiens
  misc_feature (1)...(1620): n = A,T,C or G
ccccagtcagtgtgttaagaaggagaagagacccccagtgcaagtgaatgtatccccttgagtaactgcctgatgccagacactctgctggacacttaaacttgggccagtccctgtagagagaaagtgtgaactgagatatccaacagactggagttcattcaaatcctagcctcagagcctacttgctggttgacttcagacagattatttaacatttctcaagcctcactttccttatctgcacagtaggcctgatgatacccatttcacacagaattaaatgaggtaacattaataagccacttagcrcagtgcctggcacaaagtaggcactgaataaattgtagctgctattagtccccatgttaatataatcttcacagtgatactttgattgtgagaattaagggattatctctgttttttccagataagagagcatactgataaagcttaaatgacttaaccaaggttatacagcaagtagttttgaaccacacacacattgatacatgcagtaacaaccattcatctgaccctttcttgggtgtgtttgggtagatttaagcctgctgaaagcaagaaagacctctcagaatgggcagtgaaggagtcccaggatatggagttggctgcaattaacctagtatgtggattactgccatgcaggtaattttgaggtgactggggattttatcatgcactttcagaacaggatttcagcctgaactaggggttctaacttccataaaaattccttactcaactcagaagttttcaacagcagctacccatctggctgcctcctcaggggctttgtagatgaggggagtaactgttcggtttctggagaatgatggtttttaaaaagcgaaagagcaaggtgtgcagattggcagtgcagaaatgctgaggttctttctggccagcttctctactgcagccatcaaccataaggatgtcaggatcagaataatctccaggatcctaaaggcaaggaaaagctacgtctatccagaatggctgggaaaataaggggttataaccagctatgctctcaacactttctagagattaaatataacaaaaatgcttaacacaaactactggagataatttactctttcacagcagattccaaaagcctctgatacatttcagggtctcagaatcattgttattataataacattttagttcaaatggagtaactagttgtggcagagagtacaggatttgaagtcaaatgatctagatcggaagataacaatctacagctcatgggccaaattgggccactactgcctgtttttctagaaaaagttctattggaacacagctacactcatttgtttacatactgtctatggctgctacacaatggcagagttgtcagggaccctaagacctaccaagcctaaactacttactgtcttgccctatacataaaaaagttttctaacccctgatccagactatgatctagctctgtgatcttaggcaaatcaccatttnnnnnnnnnnnnnnnnnnnnnnnnnnnnnnnnnnnnnnnnnnnnnnnnnnnnnnnnnnnnnnnnnnnnnnnnnnnnnnnnnnnnnnnnnnnnnnnnnnnntaa

SEQ ID NO: 36522 - DNA, 928 bp, Homo sapiens
agcccacggagggatcgtggcttctcagtgaggaaggcttaggggccggcggtccccaccagcacttgcataaggcgggctcagcgtcttccagttcacacttgggccatattggtcccgccatcaggggcacctgcccctctcaagacctgtccttctcctctgcttgaagtgagggggtgggacaggtgcatcagaatcaccgccatgagggtggggacatgtcccaggtgtggctcccaggccccaacctggagagtctaactcaggaatctgggacagcctccaagaggtgttgacaggagccagttggaaccctctactcaagggtccctgggtccctcctagtctaaatcccactgactttgacatgatccaaaccctagtttgtttggaagcagtgaattcataccaaagcagccaccaagaaggcctggcagggctggttgtgaagcaccccttcctccgggtgctgcctgttgggtctcccactaaccaaaccagggagccccttcttagcaaggatggaaccaggcccagctcccttgtcctgggccgaggggaccactggagcccggcctggtgggtcctagggccaccctacatccackccagtgtgcctgggcccaagaggctgcagctgtggctaccttgccacatggccatatggccagaactggcctccagcttgctccctggtggccaggggccctgcaggcacacccagaaactgaccagtggtggggacaggccagaccctctcacctcgtagctgctctcgtcctgaggctgggtccacattcacatttccatctcaggctcccacttagactaacgagggtcacccatcagagtaacccactccccgctcagacccctgtggcatctggcaccctaccctctcagacagggcctgggcagcttttcc

SEQ ID NO: 36523 - DNA, 928 bp, Homo sapiens
agcccacggagggatcgtggcttctcagtgaggaaggcttaggggccggcggtccccaccagcacttgcataaggcgggctcagcgtcttccagttcacacttgggccatattggtcccgccatcaggggcacctgcccctctcaagacctgtccttctcctctgcttgaagtgagggggtgggacaggtgcatcagaatcaccgccatgagggtggggacatgtcccaggtgtggctcccaggccccaacctggagagtctaactcaggaatctgggacagcctccaagaggtgttgacaggagccagttggaaccctctactcaagggtccctgggtccctcctagtctaaatcccactgactttgacatgatccaaaccctagtttgtttggaagcagtgaattcataccaaagcagccaccaagaaggcctggcagggctggttgtgaagcaccccttcctccgggtgctgcctgttgggtctcccactaaccaaaccagggagccccttcttagcaaggatggaaccaggcccagctcccttgtcctgggccgaggggaccactggagcccggcctggtgggtcctagggccaccctacatccacgccagtgtgcctgggcccaagaggctgcagctgtggctaccttgccacatggccatatggccagaactggcctccagcttgctccctggtggccaggggccctgcaggcacacccagaaactgaccagtggtggggacaggccagaccctctcacctcgtagctgctctcgtcctgaggctgggtccacattcacatttccatctcaggctcccacttagactaacgagggtcayccatcagagtaacccactccccgctcagacccctgtggcatctggcaccctaccctctcagacagggcctgggcagcttttcc

SEQ ID NO: 36524 - DNA, 832 bp, Homo sapiens
tgagggctctgttctcctccattggtctatatctctgttttggtaccagtaccatgctgttttggttactgtagccttgtagtatagtttgaagtcaggtagcgtgatgcctccagctttgttcttttggcttaggattgacatggcaatgcgggctctcttttgattccatatgaactttaaagtagttttttccaattctgtgaagaaagtcattggtagcttgatggggatggcakggaatctataaattaccttgggcagtatgaccattttcctgatagtgattcttcctacccatgagcgtggaatgttcttccatttgtttgtatcctcttttattttgttgagcagtgttttgtagttctccttgaagaggtccttcacatcccttgtaagttggattcctaggtattttattctctttgaagcaattgtgaatgggagttccctcatgatttggctctctgtttgtctgttattggtgtataagaatgcttgtgatctttgcacaagaattttgtatgctgaggagtcatttttaaaataaatatattgcaaatgaattttcccagtcagtgaaaagtctgactgaaagctgtcaactgaaaaatcacacaatttataaatttagaagggagattttattttttataaatggttacagcctgcaaggtggccattccgacagacagggaggcataccctcctgctgaaacctgaaaagtacgtttccagggaggggaggggggaacagggatttatgttgatgtggtgggccacatatacatattcaacagggaataggaggagctctgaatattcatgaagg

SEQ ID NO: 36525 - DNA, 832 bp, Homo sapiens
tgagggctctgttctcctccattggtctatatctctgttttggtaccagtaccatgctgttttggttactgtagccttgtagtatagtttgaagtcaggtagcgtgatgcctccagctttgttcttttggcttaggattgacatggcaatgcgggctctcttttgattccatatgaactttaaagtagttttttccaattctgtgaagaaagtcattggtagcttgatggggatggcagggaatctataaattaccttgggcagtatgaccattttcctgatagtgattcttcctacccatgagcgtggaatgttcttccatttgtttgtatcctcttttattttgttgagcagtgttttgtagttctccttgaagaggtccttcacatcccttgtaagttggattcctaggtattttattctctttgaagcaattgtgaatgggagttccctcatgatttggctctctgtttgtctgttattggtgtataagaatgcttgtgatctttgcacaagaattytgtatgctgaggagtcatttttaaaataaatatattgcaaatgaattttcccagtcagtgaaaagtctgactgaaagctgtcaactgaaaaatcacacaatttataaatttagaagggagattttattttttataaatggttacagcctgcaaggtggccattccgacagacagggaggcataccctcctgctgaaacctgaaaagtacgtttccagggaggggaggggggaacagggatttatgttgatgtggtgggccacatatacatattcaacagggaataggaggagctctgaatattcatgaagg

SEQ ID NO: 36526 - DNA, 832 bp, Homo sapiens
tgagggctctgttctcctccattggtctatatctctgttttggtaccagtaccatgctgttttggttactgtagccttgtagtatagtttgaagtcaggtagcgtgatgcctccagctttgttcttttggcttaggattgacatggcaatgcgggctctcttttgattccatatgaactttaaagtagttttttccaattctgtgaagaaagtcattggtagcttgatggggatggcagggaatctataaattaccttgggcagtatgaccattttcctgatagtgattcttcctacccatgagcgtggaatgttcttccatttgtttgtatcctcttttattttgttgagcagtgttttgtagttctccttgaagaggtccttcacatcccttgtaagttggattcctaggtattttattctctttgaagcaattgtgaatgggagttccctcatgatttggctctctgtttgtctgttattggtgtataagaatgcttgtgatctttgcacaagaattttgtatgctgaggagtcatttttaaaataaatatattgcaaatgaattttcccagtcagtgaaaagtctgactgaaagctgtcaactgaaaaatcacacaatttataaatttagaagggagattttattttttataaatggttacagcctgcaaggtggccattccgacagacarggaggcataccctcctgctgaaacctgaaaagtacgtttccagggaggggaggggggaacagggatttatgttgatgtggtgggccacatatacatattcaacagggaataggaggagctctgaatattcatgaagg

SEQ ID NO: 36527 - DNA, 832 bp, Homo sapiens
tgagggctctgttctcctccattggtctatatctctgttttggtaccagtaccatgctgttttggttactgtagccttgtagtatagtttgaagtcaggtagcgtgatgcctccagctttgttcttttggcttaggattgacatggcaatgcgggctctcttttgattccatatgaactttaaagtagttttttccaattctgtgaagaaagtcattggtagcttgatggggatggcagggaatctataaattaccttgggcagtatgaccattttcctgatagtgattcttcctacccatgagcgtggaatgttcttccatttgtttgtatcctcttttattttgttgagcagtgttttgtagttctccttgaagaggtccttcacatcccttgtaagttggattcctaggtattttattctctttgaagcaattgtgaatgggagttccctcatgatttggctctctgtttgtctgttattggtgtataagaatgcttgtgatctttgcacaagaattttgtatgctgaggagtcatttttaaaataaatatattgcaaatgaattttcccagtcagtgaaaagtctgactgaaagctgtcaactgaaaaatcacacaatttataaatttagaagggagattttattttttataaatggttacagcctgcaaggtggccattccgacagacagggaggcataccctcytgctgaaacctgaaaagtacgtttccagggaggggaggggggaacagggatttatgttgatgtggtgggccacatatacatattcaacagggaataggaggagctctgaatattcatgaagg

SEQ ID NO: 36528 - DNA, 585 bp, Homo sapiens
gagttcccagacgcctagttttctgtctagttcttctggaagatgttattcttggggagcaataggtcctcgagtttggggctctttcaggttctctctccatttccccattctgctacaataaacaaacaaaaacaattctcacttccagaagatcccgcctgtgcctctgcatgcgcctttcaggaggtctggatgtctggtccaccgctcccgggcttctttcccagcttttgcttttccctttacctgctctcgccctacggccccagggccggaccacggcccagctgagmccccgcggctccaccgcgcagaaggtgcgccggaggccctgccagtttcccgccctgcagggtactgagaaatcaacgatttgtaaaaagaacttccccatggaaaaaaatctgttgatttccgctctcagggctcttcaaaggactaaaagctaaaggcgacaatgaattcattcgacaagtcctagtcgtgcgccctggtgagtgccagaccctgctccccccgaggggacccacgagcgaccctcaccaccatccctgccctggtggagcccccgtgcggaacaca

SEQ ID NO: 36529 - DNA, 585 bp, Homo sapiens
gagttcccagacgcctagttttctgtctagttcttctggaagatgttattcttggggagcaataggtcctcgagtttggggctctttcaggttctctctccatttccccattctgctacaataaacaaacaaaaacaattctcacttccagaagatcccgcctgtgcctctgcatgcgcctttcaggaggtctggatgtctggtccaccgctcccgggcttctttcccagcttttgcttttccctttacctgctctcgccctacggccccagggccggaccacggcccagctgagcccccgcggctccaccgcgcagaaggtgcgccggargccctgccagtttcccgccctgcagggtactgagaaatcaacgatttgtaaaaagaacttccccatggaaaaaaatctgttgatttccgctctcagggctcttcaaaggactaaaagctaaaggcgacaatgaattcattcgacaagtcctagtcgtgcgccctggtgagtgccagaccctgctccccccgaggggacccacgagcgaccctcaccaccatccctgccctggtggagcccccgtgcggaacaca

SEQ ID NO: 36530 - DNA, 585 bp, Homo sapiens
gagttcccagacgcctagttttctgtctagttcttctggaagatgttattcttggggagcaataggtcctcgagtttggggctctttcaggttctctctccatttccccattctgctacaataaacaaacaaaaacaattctcacttccagaagatcccgcctgtgcctctgcatgcgcctttcaggaggtctggatgtctggtccaccgctcccgggcttctttcccagcttttgcttttccctttacctgctctcgccctacggccccagggccggaccacggcccagctgagcccccgcggctccaccgcgcagaaggtgcgccggaggccctgccagtttcccgccctgcagggtactgagaaatcaacgatttgtaaaaagaacttccccatggaaaaaaatctgttgatttccgctctcagggctcttcaaaggactaaaagctaaaggcgacaatgaattcattcgacaagtcctagtcgtgmgccctggtgagtgccagaccctgctccccccgaggggacccacgagcgaccctcaccaccatccctgccctggtggagcccccgtgcggaacaca

SEQ ID NO: 36531 - DNA, 633 bp, Homo sapiens
actaggtaaatggggaagattttatcttcccgaagtcccaagccactaatttatgactgatccatgtcaagggccgcccacctccccgaccagattcttaaccggctatctcctgaaatgccgggtttacacctgtgtaacttaggaatcctgaaacagagacctaggaacccacttctggtgtgataaaattctaattcagtcccttatacgcttaaacaagtaattcacgtgcctccattttttcatattttagtaataggagtccagtattacctccaggatgtgcctggktttcctgattgctctatcaataatgtgaccagtggaatctttcatcatgatagtgatcctctccatcatttttgaaaacagtatttttcctcagtctgtgcatgatttatttaacccttttcaaaatgtttttgttagccaggcatggtggcacacacctgtaatcccagctactcaggaggctgaggcaggagaatcgtttgaacttgggaggtggaggctgcagtgagctgagattgcaccactacactccagcctgggtatcagagtgagactcccatctcaaaaaaaaaaaaaatgtttttgagatgatgttggtttcatggttttaggattaca

SEQ ID NO: 36532 - DNA, 596 bp, Homo sapiens
gcacacacgtgaacatgtttgcacatatgctccccacgcatacacacatgctcagcgcctccgccttccagaggtgagcgtccgccagcccagcttggctgctttcttgccaaaccccggggttcccactcgagcacagcggtcttggcctggccccgaacaggcctctgacgccaaggagccagccagaaaccagcggtggtgagcacgggctcccccgggagcggtttcctttgtgagcraggccaggatgggccgcccaggctagctgctcccagagccacaacaaagggaggacacgccctgccagcctgccgggccaccgcgaggctcagactggtgggaacagagggctgcctggcgcccaggaccctccaagctgggagtgtccaccaggcagcgccctcctgttagcaagggaggtgttcctttaaggtcacagagccctcggctgctgggccaagcctccagccaggcccctgcactcacccggaggtgggaagcgggggcggaggctgcgagggttcaggcttcggcagggctttgtggaacctgccacaggcactgcccaggcactggggactttcactacctct

SEQ ID NO: 36533 - DNA, 610 bp, Homo sapiens
taatccacttgacttccccttgctctgatttcaggctgggaaagccagtttcagattataccttagctccctatgtggattgatagcagcgagacaacatgagacccargctactttatatttttattataaattaatatattgctattctggattagtacattcgtctcttgtgacttcatatgttgttaaactggatctgtctgctgtctacatgctaatccaaatatgggaatctagtagaggtgctgcactttagcatacctgttagagtacatggtcaaccaggcctcctttaccctctcagtctaccctttctacctgcgacaggtttctttgtacaaagcaaaaatttcaaaatcggactcaacatcgtggctcacgtacaggattcttacactggtctggagggtaataatttgatgcttaaaaacaaaactttcagaatatcttttcctttttttatttggaaagtgctttccatacttaaagaatgttctctttttgttttaaaaccacatacgaaattatgccacaatcactttgggattctagggcagaaagagttaattaaattgtaatcctaggctaggcgcagtggctcacgcct

SEQ ID NO: 36534 - DNA, 502 bp, Homo sapiens
atttttgagagcttttttttttcctgagttcaatacattcttttttcatttctctgattttttgccctaactgttgaattcctaaatcggggtgtttttccatayccttgaatgctgtttgcgtgtgcccggttctgtttgaatgtacaggtttcttctgccttgtgttttttcttttttaaaagtgggggaggtctcactatgctgcccaggctggcctccaactcctgaattcaagtgatcctcccaccttggcctcccaaagtgctgggattacaggagtgagccacccttcccagccctatggtggtttttaacagggagggaatttgtatcagttctttttcctgattttcttccatagtcttctgtgacgtttttgttttggctatttttgatattgggatattttacaaggttcccagcttaatgaatcccttttctgtcagcctggcgatgtccacacattttagtgaggtttttttgtttcgttttgatgatg

SEQ ID NO: 36535 - DNA, 502 bp, Homo sapiens
atttttgagagcttttttttttcctgagttcaatacattcttttttcatttctctgattttttgccctaactgttgaattcctaaatcggggtgtttttccatatccttgaatgctgtttgcgtgtgcccggttctgtttgaatgtacaggtttcttctgccttgtgttttttcttttttaaaagtgggggaggtctcactatgctgcccaggctggcctccaactcctgaattcaagtgatcctcccaccttggcctcccaaagtgctgggatyacaggagtgagccacccttcccagccctatggtggtttttaacagggagggaatttgtatcagttctttttcctgattttcttccatagtcttctgtgacgtttttgttttggctatttttgatattgggatattttacaaggttcccagcttaatgaatcccttttctgtcagcctggcgatgtccacacattttagtgaggtttttttgtttcgttttgatgatg

SEQ ID NO: 36536 - DNA, 1288 bp, Homo sapiens
tgcatatttgaaaataaaataagaattttaatgttcaagtccaaaagggaattcatcttgacccaattagtatattcccatttgtccctgtaatattgtaatattcctctgtacccgctagttaatcaggtgggtaatttaatgattttcaaccaactaagaggacaggactccacgttctcctgctagagctcaatagtttgttagtctgtcacccacccttggggaagacaacttcctttcagggcaaggacactcataattagacccactataaataacacaagtgctcagagcaatgccacttggattatttaacatgtgagcagggtaagaacttccgcctgctctcccactggacagtgaccatcacccgcttgggaacaccctcaaataatgttcttctccaaagggctgtcctctggctgaaaacaaatcacagccaagcactataacatacaagctgcaaaaagtgacaaaaactcaaccttttccatcccccttttaaggcctgatttttaattaaagaaagactggcatagatcagtttcagctataagctcaagagcatgcaaactgtcttagtgaaaattagttaccaagaaagaaaaaacaaattaggagaggaagaatattaaaacttcaagaaatgctgtatgttctaagttggctttaatagtcagagaaagctgagtttgaaagccagctgtccttctactgtgtgactttgggcaaacacattctctaactcctcttggtctcagtttttcctattgaataatgaaggaaatacaaccaacatcttcatagctaccccacagtatggttccaggagagaaggcaggtcctgaggcatacaataggctgtttcagtgttagtcacagctaatagattttcctaaaatcagataattcgagaggagcctgtggtcagaaaagcagagttaggagtttccaggaactgttcagtttcaaagggtaagtcctgctcatgttcattgcattctaatgggccatttawcagcatatatctgtttatgttgtcaagtgaaccacgctgattctgagaacaaaggggcaaagtgagaaacatcccgagttggatctttacctgaagctaagctgcccctcacttcatccttctttcgcattaacacccttctgtttctccaatcccagacttccccagcacaatctttctcccctcctccaccacactacttttctcccctcagccttccatcatctcacagtgggagggcataaacgttgggctagaactgggaga

SEQ ID NO: 36537 - DNA, 407 bp, Homo sapiens
ttgtcgatctctcagcttcaccatacttaacactggcttccatcaacatcacatgaccataaccatcacattttcactgtagttctagtcatcacatctgtattccaggcagcagaaargagaaagggagttagggaaaaacaggtacgtgtcccagttttgtcagccccttctacagaacattttccagaagtcctaccaatagcaatcattttagattttgtcacctgtatctgcaagggagactgtgaaatgtagaatttcagttaagtactttgccatccccaataatattaagatcctattagaaaaagaaaaagggtagataaatggtgtttaggcaactagcatcccacccatctatacactataaaactagccatataggtagaaataatccttatttg

SEQ ID NO: 36538 - DNA, 513 bp, Homo sapiens
actgaaccatgattcacttgtgcttgggagtttggcaaagaatggcaggacgaggaaggatgttgttcctctgtgccccaggattctgaatcatcaggtgtctttccagccccatttgtctcctgggaatgattgtgctctctggtgtatgaagctctattgtttgaggcatgttaataaaattggtctttcagacaccaattattggacccatctgtaaagttcaggatgagctaagttatgctgcagtaacaaaaacaaagaaaactcagtgggctaaaacatcaaaggtttaatttattgctcatgctacatgtccatcatgggtcagctgggggctgagttcagcactgtcttcatgctgggaaccaggctgacaaaagagcctctatttggaatattgctggccactgtggcaaatggaaagacagagaatggtgaatctcacacygactctgaaagctttctcctataggtaacttggaataacttctcatgtccttggctaaagca

SEQ ID NO: 36539 - DNA, 540 bp, Homo sapiens
ccaggctggagtgcagtggcaccatctatgctcactgcaccctccacctcatgggttcaagtgattcttctgcctcagcctcccaagtagctgggattacaggtgtgcactgccatgcctggctaatttttgtattgttttttagtagagatgaggtttcaccatgttggccaggctgctggaactcctgatctcaagtgatccacctgcctcagcctcccagattgctgggattacaggcatgagccgccacacctggcctacayattttaataccctcagacaatacagctgttgaaactgtgtatttactaaagttcaacctcccccaagcccactgaaaatgtacccaagtggcaagaaaactatgagttgcctttatgccaacacagtttaaatatcatcaggctgccacccagccaaactagaaagatgatgataaatagtgaaacataatcagttcattttttttcctacgggtcatttgaaaaagtggattagatagctgatttattcagatatttcaacgatttttttaaa

SEQ ID NO: 36540 - DNA, 1065 bp, Homo sapiens
tgtatgaatccagtactgggattgacttcagagtactcagcctttgtgatgctcaacccttatgaccctcaacatttatgaggcacttccttccagaggatttaatttagtaagtactaagtaaaaggcattcactatttcagttatcactaatggtaatgatagttatgagtggaagtgtgatcaataaaaactgttaattgtaagattaatcctggcccagtgcagtgtctccttgcctgttatctcaacactttgaggggccaaggaggaagaataacttgagcccaggagttcgaggtcagcctgggcaacatagtgacatgtcaattctaccaaaaaaaaaaaaaaaaaaaagccaggcatgttggtgcaggtctgttgtcccagaactttgggagacaaggcaggtaaatcgagcacaggagtatgagaccagtctgggcaacatggtaaaacccatctctacaaaaaatacgaaaaactaaccaggcattgtggcgcacgcctgtagtcccagctgcttgggaggctgtcggagaatcactgagcccaggaggttcagggactgcagttagttgtgatcgtgccactacactccaaccatggtgaacaaatctttctggtgtttaattttatatctatatctatatctatatctatagatatgtatatatagatatgtatatatctctcacatatatcattgcagatgttatatataataattacatatatatatatatatatatatatatataaaattgcagaagtctgggcaataacagataacccaaatttattagataaataattgaatggatgaatgccttaataaataactcttaatatgcgttttcattattatatatcattttccttcgtatcgtcacaatatgtgccttgtgttcaggttacctcttttcactatcacttagayatatgcaagggctgaatggtacaatttatcctgccatctttgaaagtgagacatgatacaatatattaatgtgctttttagaaaaaaataacctcggatttattttttgtcattatactgatgca

SEQ ID NO: 36541 - DNA, 619 bp, Homo sapiens
ggtttacatgtaatagcaaagaagaaatgtaactctgtgtgagaaaacaggaattagggaggagtagggaagagaagttggtccgtaggaagcaggtgatcagttaggcagtcataacaggtgagggatctggcatctcattgtatagatgaagtggtctgttaagtttcacttccttgatactatctgagaggcctgatgattgatttccagagaaaggaactcggataacacaaatgtaagttgctcaagttttaagattgggaaggtcaatttctaccttcatttaacaaactgtacacaytagttctgtggaacaattggcccagtttcaaattgacagactaatcttcctataacacaaatataagcattccagcatcttgtgtaaatttgtttaatagctcccattgtcattgacatgaagttcaagtgtcttaaggagcaccataacaccctttttgatccaactcctaccttcatttatgtagctgaagctcccttcccttccaacgtacacaagatattacatcctttgttgctttctcttgcctctgggttcataggcttgtgatgctttttaacaggaacaggctgactctccatatatccttgaaaa

SEQ ID NO: 36542 - DNA, 619 bp, Homo sapiens
ggtttacatgtaatagcaaagaagaaatgtaactctgtgtgagaaaacaggaattagggaggagtagggaagagaagttggtccgtaggaagcaggtgatcagttaggcagtcataacaggtgagggatctggcatctcattgtatagatgaagtggtctgttaagtttcacttccttgatactatctgagaggcctgatgattgatttccagagaaaggaactcggataacacaaatgtaagttgctcaagttttaagattgggaaggtcaatttctaccttcatttaacaaactgtacacactagttctgtggaacaattggcccagtttcaaattgacagactaatcttcctataacacaaatataagcattccagcatcttgtgtaaatttgtttaatagctcccattgycattgacatgaagttcaagtgtcttaaggagcaccataacaccctttttgatccaactcctaccttcatttatgtagctgaagctcccttcccttccaacgtacacaagatattacatcctttgttgctttctcttgcctctgggttcataggcttgtgatgctttttaacaggaacaggctgactctccatatatccttgaaaa

SEQ ID NO: 36543 - DNA, 619 bp, Homo sapiens
ggtttacatgtaatagcaaagaagaaatgtaactctgtgtgagaaaacaggaattagggaggagtagggaagagaagttggtccgtaggaagcaggtgatcagttaggcagtcataacaggtgagggatctggcatctcattgtatagatgaagtggtctgttaagtttcacttccttgatactatctgagaggcctgatgattgatttccagagaaaggaactcggataacacaaatgtaagttgctcaagttttaagattgggaaggtcaatttctaccttcatttaacaaactgtacacactagttctgtggaacaattggcccagtttcaaattgacagactaatcttcctataacacaaatataagcattccagcatcttgtgtaaatttgtttaatagctcccattgtcattgacatgaagttcaagtgtcttaaggagcaccataacaccctttttgatccaactcctaccttcatttatgtagctgaagctcccttccyttccaacgtacacaagatattacatcctttgttgctttctcttgcctctgggttcataggcttgtgatgctttttaacaggaacaggctgactctccatatatccttgaaaa

SEQ ID NO: 36544 - DNA, 1096 bp, Homo sapiens
aatattaaagagattaacaagaaaaaaattcagtccttgtagcatgtatttcctacgttgttactattaaattattctgaaatttggaaaattaataaataaaccctgtagtgaatctacgctcttgggtgaggttaagaatttacatgtcaccacaattttatcactaaagagatgagctaacatctttattaattcacttaaaaccattatttcacttcaaagagatctacatacatttcaaaatatgttgctttaacacattttcagtacattttcatcaatattttattttgctatcacccagccttacccctcatcacaaataataaagcagggtagccaggcagtttaacacagcttgaattcagcaaccgccttccactactatcttaattcaaataccaaaatacactccaagggacaaaagaagttatctgcagtcagaaaacatgactctgtaaatcgctcagagtttataaaagctccaaccacactcactatatatgatttcttagattccatgttctatttggctcaaaacctatatttgtacagataacattgctattcatgaagagtaaaaaggaggctgtcacaagtggaaatccacttaaactgcctttctgttgaggttgaatgctgcccatcaactcattcattcatccacacaatacaattatgagagtgcgctatacacacagtgttctgcagtgctctatcctcagactcttaaaagaaaatacatcctaagttctcccacccacaggcattgtacaggcaatgtaaagagtgacracaagccttacatttctgccattagttctcttcagggttaagacctatgcctttgctaaaagacagtgatagccattaaataccatagcatgattttgattatcagaaaaaccagcagaaagagatgcaccatggaacagaagtcaggactcataactctcagcagcatgacagagcaccaggcaaaatataaagtaagtgaatttcatggggagtacttagaacagcagagagagcaggtgtctggagtcaaggacatgtgttgactgctagcatcactgtcactagctgtatgatg

SEQ ID NO: 36545 - DNA, 1289 bp, Homo sapiens
atcctataaataacaaaaacaacaaaaaacacattttgattaacaatgctagaggaaagactaaattatctttccagtatctatatagaaaataataccataaaaatcttgttataaaaagtgattttaaaatgtgaagtcaaaaaatgtccaaaaaagtattgcagaagtatttcaggcagttaataaaaataatgtcatattttaaattgttatggtgtttgtgatatttgccagattaaatatttttctcattcacaatattcatttttataacaaatttttatatttttaattcatttttcttataaaggagtccaaaattgcataagctttacatccccataaaatcactctgggcttcacagtttgtgattcaaaggaatttatgtttgtaagaaaatcatgtgtgtgtgtgtgtgtttataaaatatatgaatctaaccttttcttttctcttacaccaagctcatccagactagatcctcctcaacccttggactcttatggtcgcctctagattggtcttcctgaacccagatggtgctcctggaaattagtctttcctgcaatcttggcccactgaacctttgtaaagtgctactgtgtacatatcacacagccatgaacaaagaggaagagccctgggctagcagacaggaatgctcccttggcagcctgcacatccctccatactggccttatcaccacagggtcttgtaatcatcttcccttctataccataaagtcctgagacgacacaggattggcctttttcttcagcacctgccttggtacctgtcccagagcactgtcaataatttggtgtagctacttcctggatttttgtgtacatgtaaaatcataaatgcatacatacttttaagcaattgaatcttgctgtacagtgtcctgcaacttcatagctgcaattgaagagtctgctgcattttgcaattgagcccattatagatacagctggcttaaggctggtatctgctcaaagagaaaggaagcacagagcctcctgatggctggccaggctggccatctcggccattgtttctcagtccccaacaagacatccctaaagcaattttgtcctcccaactaatgatgactccamcactgctcatcagtaacagctgttgggccattggctgtcatccagattctgcccttgtgaaacctgcagagccatgctgggaggagaatggctcctgtgggggcagatgggcaatgtagggaaatgtctgggtatttaaggtagtatcagggaaaagaggagg

SEQ ID NO: 36546 - DNA, 565 bp, Homo sapiens
gcaatatgaatataatttgaacagtgtttactctcacaggtaaatacataaatcctaaactaagattgaacacaaaggtgattgtctcaactctgatgataccttgcaaaaggaaatggctgatttttcttttcgttatccaataagagcatgtttaaaatgtgctttcggctgggcgcggtggctcatgcctgtaatcccagcaatttgggaggtcgaggcgggcagatcacaaggtcaggaratcaagaccatcctggctaacacacggtgaaaccccgtgtctactgaaaatacaaaaaaattagccaggtgcaatggcgggcgcctgtagtcccagctactcaggaggctgagacaggagaatggcatgaacctgggaggcagagcttgcagtgagccgagattgtgccactgctctccagcctgggcaaaagagtgagactctgtctcaaaaaaaaaaaaaaaaaaaaaaaaaaagtgctttctcttttgagatatctcttttcaagcactggttccccacttttctaaacctattcaaatatgtaaattgactttggga

SEQ ID NO: 36547 - DNA, 572 bp, Homo sapiens
cctatttattaaggacattgtgtaatgtttccactttgttttaaacaattacaaacatgtggcttaaaataatgtacagatcaatgtaacaagtttgaaaaatgggcgatgagaatatgaagtctgccttctttctagcaataatcataaacactccaacttaatggatcatatgtttttcttttgaaattctaagtttgtttaagaacaaaattctaaaggagttcaacatgcaatggatatatatatcattcagaatcactagcttccatgcttacactgaactcaacataaggcaaaagcccaataattacactgcatctttggctcagtgtgttaaaaaagcaaagcaaaatggtaagcctagtgaaaacaatcctttgtgtttgccagtttcagattgccaatatggttgcaataaaattcaaccattatctctgatgagatatgcagctttgattagtaggacagtttgttttctgaatgcaagatacaagcatgaatctgttyctctaattgttctcatagcttaggaaaatgaggcagaagcaggtttgtttgaataaagcata

SEQ ID NO: 36548 - DNA, 1255 bp, Homo sapiens
tcatgtgtgtgtgggagggggagagagagagagagagagagagagagaaattttttattaagaattgattcacatgcttatggaggttggctaccaagtcccaagatctgcaggtggcaagctggagacccaggagagacctacccgaaatccaaaggcaggaaaaaaggcaacggctgacaggctaggggaagtctctcttcctcaggggagggtcagcctgtttgttctatgcagagcttcaactgatgggatgaggcccacccgcgttaggaaggaccatcttcttcacccagcctgcacattcacatgttcctctcttccagaaacaccctcacagacacmtacagaataatgttgaccaactctctgggtaccccatggctcagtcaagttgacacataaaattaaccatcatcatcacatagacaggggccaggtcagcacagccacagcagcaaggcagaaggaggcaagactgagtgaggaggctgcagggttgctgggaaagctagcttcaagagaggaacatgggacattctcagtgagaaatggagatgagagacagacaggggtaccagagactgggagcctttccagtgcacaagattcccctttatccttccactccccagttctaaactgaactgctttgagtgggtttctcttttggataactgaacaacctctgattagaacaagaacatcgtggatctccttgaattttattctctaactttagcccaattctctaattttagaccagccatttatcaagcaataaactatactgcatgtcatgtactgccaggttaaataccacatactcttcgttcttagatcatttacatttatggttttgacttcttgcaagcaaccacgtgcttaaaatatttccatgagggtttgataaagtattttgatctgtaaggcttaggtttaatgagtgagctactcaattcctgaggggtcccatccatctgcccagcatccacatcatcatgccttttttgttttctactcactgttctttcagcattttctgggggatgtcaaatgttaagaggttttccttaatttgagaatgtgtgacggcccagtctgaattccttgcaaaaagcataggtctactatacaatgttactgacataacttttagaaatctctgtctcttctcctatgagctctttgaaggacatgacccatgccttacacaattttgtggcccttataccttgaatacagtacctgggac

SEQ ID NO: 36549 - DNA, 1706 bp, Homo sapiens
aaatctcaacagagaatgcaacacgaaaggcagagtatatatgttacagagagacaaacagcagatgtgcagagcaagccttggggtcatgagcaaaataggaagacagcagtttrcagcatgttttctagggatgccaaactccgtagaaactactgatcagaattgtgtttgaagttaaatatgagcatttcctgatgtcaagtctagaagtttctgtacacaaaacaagcatcctgcatgaaagagtctgtcaaccctagctctgaccagaagggacaaggagagtatgaagcacagaagatgatccaccaagcctgggagaagaggctaagaagttgaggagtgccagtttctccatgaacaggaacaggagctattatttatttttgcatatttttatgaatttatgttgaagacaatgggtagaattcctgaatgtagttcctgtcatttgcaataagtcatttttttgggccttgtaaagtccaaaagtaaagatctcctccaggtcagatcaaatatagatagagcctgttgacccccctgtgatggttagggcttctcacactgaaagctgtgggagctataaagagaaaaaaggcatccctgaccttcagtgttaatgtgaattaaccttactatactgctacttaaaaatataccaacataaatctgggtataaactcttcatgctgacagctctgatataacttgaaaagtaacacaaactcacaaattaaatgaaaaacaaaccttcaaaggtcaataaaattcaaatcaaccacattaagctaataacaccagtaatgttattttgttgaaactaatttgcaacacacataccatgctgacattgttaagatgttggcatttttgagtgtggcatgcctatgctaccccgtgctgtgggatgactcaattctcccaccactttcctcagtttaatttggtgctacacctccctccattcatgccaagcttcaagatgtcacttgcccttcattggagggaatacaaccatacatgtgagcactgaaattgtacctgcatactagcgataacttggtcaccccgttgcttcaattattgcattaaatatataattttaagtcatatttataaggttaagctaaaataagattataaaatttgcatcgagattctgtggatcccagtttgagaaacatgctgttagaccagccatcacccctgagagcattcccctatctctttaaccagtttaatcaacgtttgtgccaaaggaaagaaaaactcaccccaggacaatgccagtatttaaaacacagagatagatactttcacaacgggttgtcctctgtaagtcatagatggagggaagaattcccaggaaggcgaaggtcataagaagacccaactccctcctcaataagccctccccagggcaactgatcttcctggcttgaaaccccctcacctgatcccgctctggctggccatgtgtggctgtgtctccaggaagtccaagctaccagttaacaaagctctgtcaatccgtgaattgttttaccaagggcttgttttgccttattttgtgtttttgttttttaatagtggtaaaatacacataacataaaattgaccatcttaatcatttttcactcttcatttccccctccatcgtggcaaccaccatacttatttttgtctcgatgaatttgact

SEQ ID NO: 36550 - DNA, 1706 bp, Homo sapiens
aaatctcaacagagaatgcaacacgaaaggcagagtatatatgttacagagagacaaacagcagatgtgcagagcaagccttggggtcatgagcaaaataggaagacagcagtttgcagcatgttttctagggatgccaaactccgtagaaactactgatcagaattgtgtttgaagttaaatatgagcatttcctgatgtcaagtctagaagtttctgtacacaaaacaagcatcctgcatgaaagagtctgtcaaccctagctctgaccagaaggracaaggagagtatgaagcacagaagatgatccaccaagcctgggagaagaggctaagaagttgaggagtgccagtttctccatgaacaggaacaggagctattatttatttttgcatatttttatgaatttatgttgaagacaatgggtagaattcctgaatgtagttcctgtcatttgcaataagtcatttttttgggccttgtaaagtccaaaagtaaagatctcctccaggtcagatcaaatatagatagagcctgttgacccccctgtgatggttagggcttctcacactgaaagctgtgggagctataaagagaaaaaaggcatccctgaccttcagtgttaatgtgaattaaccttactatactgctacttaaaaatataccaacataaatctgggtataaactcttcatgctgacagctctgatataacttgaaaagtaacacaaactcacaaattaaatgaaaaacaaaccttcaaaggtcaataaaattcaaatcaaccacattaagctaataacaccagtaatgttattttgttgaaactaatttgcaacacacataccatgctgacattgttaagatgttggcatttttgagtgtggcatgcctatgctaccccgtgctgtgggatgactcaattctcccaccactttcctcagtttaatttggtgctacacctccctccattcatgccaagcttcaagatgtcacttgcccttcattggagggaatacaaccatacatgtgagcactgaaattgtacctgcatactagcgataacttggtcaccccgttgcttcaattattgcattaaatatataattttaagtcatatttataaggttaagctaaaataagattataaaatttgcatcgagattctgtggatcccagtttgagaaacatgctgttagaccagccatcacccctgagagcattcccctatctctttaaccagtttaatcaacgtttgtgccaaaggaaagaaaaactcaccccaggacaatgccagtatttaaaacacagagatagatactttcacaacgggttgtcctctgtaagtcatagatggagggaagaattcccaggaaggcgaaggtcataagaagacccaactccctcctcaataagccctccccagggcaactgatcttcctggcttgaaaccccctcacctgatcccgctctggctggccatgtgtggctgtgtctccaggaagtccaagctaccagttaacaaagctctgtcaatccgtgaattgttttaccaagggcttgttttgccttattttgtgtttttgttttttaatagtggtaaaatacacataacataaaattgaccatcttaatcatttttcactcttcatttccccctccatcgtggcaaccaccatacttatttttgtctcgatgaatttgact

SEQ ID NO: 36551 - DNA, 1706 bp, Homo sapiens
aaatctcaacagagaatgcaacacgaaaggcagagtatatatgttacagagagacaaacagcagatgtgcagagcaagccttggggtcatgagcaaaataggaagacagcagtttgcagcatgttttctagggatgccaaactccgtagaaactactgatcagaattgtgtttgaagttaaatatgagcatttcctgatgtcaagtctagaagtttctgtacacaaaacaagcatcctgcatgaaagagtctgtcaaccctagctctgaccagaagggacaaggagagtatgaagcacagaagatgatccaccaagcctgggagaagaggctaagaagttgaggagtgccagtttctccatgaacaggaacaggagctattatttatttttgcatatttttatgaatttatgttgaagacaatgggtagaattcctgaatgtagttcctgtcatttgcaataagtcatttttttgggccttgtaaagtccaaaagtaaagatctcctccaggtcagatcaaatatagatagagcctgttgacccccctgtgatggttagggcttctcacactgaaagctgtgggagctataaagagaaaaaaggcatccctgaccttcagtgttaatgtgaattaaccttactatmctgctacttaaaaatataccaacataaatctgggtataaactcttcatgctgacagctctgatataacttgaaaagtaacacaaactcacaaattaaatgaaaaacaaaccttcaaaggtcaataaaattcaaatcaaccacattaagctaataacaccagtaatgttattttgttgaaactaatttgcaacacacataccatgctgacattgttaagatgttggcatttttgagtgtggcatgcctatgctaccccgtgctgtgggatgactcaattctcccaccactttcctcagtttaatttggtgctacacctccctccattcatgccaagcttcaagatgtcacttgcccttcattggagggaatacaaccatacatgtgagcactgaaattgtacctgcatactagcgataacttggtcaccccgttgcttcaattattgcattaaatatataattttaagtcatatttataaggttaagctaaaataagattataaaatttgcatcgagattctgtggatcccagtttgagaaacatgctgttagaccagccatcacccctgagagcattcccctatctctttaaccagtttaatcaacgtttgtgccaaaggaaagaaaaactcaccccaggacaatgccagtatttaaaacacagagatagatactttcacaacgggttgtcctctgtaagtcatagatggagggaagaattcccaggaaggcgaaggtcataagaagacccaactccctcctcaataagccctccccagggcaactgatcttcctggcttgaaaccccctcacctgatcccgctctggctggccatgtgtggctgtgtctccaggaagtccaagctaccagttaacaaagctctgtcaatccgtgaattgttttaccaagggcttgttttgccttattttgtgtttttgttttttaatagtggtaaaatacacataacataaaattgaccatcttaatcatttttcactcttcatttccccctccatcgtggcaaccaccatacttatttttgtctcgatgaatttgact

SEQ ID NO: 36552 - DNA, 1161 bp, Homo sapiens
aaatgctctgcctttcctaaagcactgcaagccggtcgggactcagggaggtgaatgcatgcggggcctgcaaggcaggcttctagacagctcaaagcatgaaggacagtgagggggagcaagggaataccaagacgtatcaggatttctgcatgaagctactcactaatgcccaggtattggtatttactaaagagagggtgggtcacttccaccaattaaaataaaakttgggtaagccaaacattacctagtaattgcagaaatttaaaatgtgatatctagcacgagatttgccactctttactcaaggtgagtcaattcttatttcttgggtatccagagaatgcctaggtacttattcctggccaataaaagttcttaaagcccccaagaattcttttgaattttacaatgaggttgaattatgatctttaatttaagacagatatctgaattatactaagggcttttctaaaaatcactgagtaaaactagtatttacaattactggttccttcaatcttctcaaatgcatgacaaattgctctaagcaagtggattgccacattgtgtcaggagctacctgcactccctcttccctctttgcaagctgggtggtgagtgatccagcttcacaaccccaccttattgcctgctttcctgaaccactcctggtaccaactcctgcagttcagtggtgattctggattctccagaagcaacctctgagatagaatttgatgtacagagtatttattggagatcgacagctgtggaagagacggggaggaggattttccagaggggaaaacaaaccaatgctggcacagcaaaatcttggccagccccacaagcagctcactgtggagggcaaataacctatcaaggttgtctcacatggggctgaaatggataggcttgcatactcacctcaatcagtcactggatgtgggctgccctcggaggaagcagctttctgcagctcaggcaaaccctaaaggagccaacagcttgaagatacatgctgatgagaagggcaacaagccattccttgaagggaggctctgagcaatgcaattttgtatccaccacagtccacctcttgcactgctctgatccactatagcgtatccatttgggggacaaccacaacccctt

SEQ ID NO: 36553 - DNA, 1161 bp, Homo sapiens
aaatgctctgcctttcctaaagcactgcaagccggtcgggactcagggaggtgaatgcatgcggggcctgcaaggcaggcttctagacagctcaaagcatgaaggacagtgagggggagcaagggaataccaagacgtatcaggatttctgcatgaagctactcactaatgcccaggtattggtatttactaaagagagggtgggtcacttccaccaattaaaataaaatttgggtaagccaaacattacctagtaattgcagaaatttaaaatgtgatatctagcacgagatttgccactctttactcaaggtgagtcaattcttatttcttgrgtatccagagaatgcctaggtacttattcctggccaataaaagttcttaaagcccccaagaattcttttgaattttacaatgaggttgaattatgatctttaatttaagacagatatctgaattatactaagggcttttctaaaaatcactgagtaaaactagtatttacaattactggttccttcaatcttctcaaatgcatgacaaattgctctaagcaagtggattgccacattgtgtcaggagctacctgcactccctcttccctctttgcaagctgggtggtgagtgatccagcttcacaaccccaccttattgcctgctttcctgaaccactcctggtaccaactcctgcagttcagtggtgattctggattctccagaagcaacctctgagatagaatttgatgtacagagtatttattggagatcgacagctgtggaagagacggggaggaggattttccagaggggaaaacaaaccaatgctggcacagcaaaatcttggccagccccacaagcagctcactgtggagggcaaataacctatcaaggttgtctcacatggggctgaaatggataggcttgcatactcacctcaatcagtcactggatgtgggctgccctcggaggaagcagctttctgcagctcaggcaaaccctaaaggagccaacagcttgaagatacatgctgatgagaagggcaacaagccattccttgaagggaggctctgagcaatgcaattttgtatccaccacagtccacctcttgcactgctctgatccactatagcgtatccatttgggggacaaccacaacccctt

SEQ ID NO: 36554 - DNA, 1179 bp, Homo sapiens
gtggggcttaaaacccagatgatgggttgatgggtgcagtaaaccaccatggtgcatctacacctatgtaacaaacctacacgttctgcacatgtatcccagaacttaaagtataattaaaaaaaaagaaagaaaaagcaggggggcggggctgaaaactgtgctataaagtacttttcctcctcagttgagaatacatatttttaaatccagaactcacatattccataatagtgaaaggaaacaggtctgccccgcaccctccgcctgagttggggcatcatggagtaagagaatgttaaagctgagggcactgccaccagggatgagccaacccacatcttcagttcatggatggagagcaggggccccaggaagaagaagagactttgctcaggccatagcacacggtgacagtgaggtgaggatgagctttggggtctttcaacgttcagtccaggagtctaactcttctttttcccctgtcgatattttcaagtcaccaatcattcagagattgtttgtgttttctctgaagacctcctcttggcagaccacctgcctgcccatctccgtccaggaggctgtggggctgcggccctcggagaaagctcctggtgttctgctggcttctgcccccaaggcctccagtgcagtggcccactcctgccacaagcagcacgcttgccctggtttccctgcagatcgggggcagactagcaaggctggtgcacagcccagatccacccttgctggctggacctgcgttccctagagctgctggtagaactgtccccctgcagcctgctgtgtgggctgctccagctgtgttcttccaccatggaagggtcccagcctcatgagaggctgccaccaattttccctcactgtgggctactgggggatttccccaaacaggtgccttgggtcagtgtctgctgtaagaagcaaggctccttctcatatttccatccctgtggccatggcccatgactttatcactaccgcatatttagcacttacatataggataaccaacttgtcccaygttgcctggactgccctggttttacaactgcaaattcccacattctgggagctcctcagacccagccaaaccagatttgttggtcaccctacttacatgctttatagacaatttcaggtcctttacatgca

SEQ ID NO: 36555 - DNA, 823 bp, Homo sapiens
aacaggggcctgcttagtcatagccacaggagtcttggaacatagcccccttttcaaaaaagaaacctcctaagtctccgggggggtctcagtttccacagatgcagctcagccctttgcctttagggtttctttactgtcctgttaaattgcaaattcccctaggagtctatttaaagctcttatcagccttttcactttaagataaatacaatacatttcagtctttcctgagggtctgatgggaaaatgagaggagtctggactgtgtaccttccctaccaaaagacaaatgagtctgggaagggagagtggagaggagtaaaaggcaactgcacctcccacatgttgaggttgcatcctggctgctgtgtgcggcaggtctgcagagatatccaggaggatggcccagtcagggtttttggtttgcaaacaacmgaaaactcactgagctaaactaagcagaaatggggcttgttagaaggctactggcaagaagactagagaacagttagtctgggaagctgggcacacagccaagaacccaccaaggggatgatccaattaggagccagttctgcagtcacaggaggccccacgcctctgaaaacagccctccctgctgctgctgctgcctccagccaggacatagtgcagcagagaattaccccaaaagaggaaggcccgcgagtgacaggcagctcccacccatctcactccccacctactccctgcaaatgtcccctgcagacaagatacagagaggaatggctgcccttagctctgtctaacagaagaagcttcactgaataaacgttttgct

SEQ ID NO: 36556 - DNA, 523 bp, Homo sapiens
gagtagaatgtaactggctgctagccctataggtcactgaaataatgccatattgctttattagtattttgggggagaaaggaaggaataaaattagtatttctgaaaatcatcaaggaataattttagtctctcaagtgccttaacgtgtctctttagaattaatgcaaacatcagggttttgactttgtgagcatgagaatgatttttggtgcrtgtttctgtctgtgtgataaacaaaacagtgtctgtgagatgctggggagccctttggaccaggtgcagtcatttgtgtggtcctccctttgcagagaggaactttcagccccacaggtccaggatgtgagaacacgagatgctcagtccctgggaggagagctttccttagggcatctcacatttcaaagcagggtagggtcggggcagcttagtgacgctagcatcaaagcaaaaggaagggaggtgctcgtgaaactgtggtcatcgttcctggacagtccagagcttcctctccctcgaaagt

SEQ ID NO: 36557 - DNA, 649 bp, Homo sapiens
accagtttctctggaaaatcctgctgcactggtttttgaaacacccctctctcctggcttccctctcactatgactcagtcccctccatagccccttctaggcttgtccctttgtcccagcattgcataatctggccctgtcctctactcatcttcatcttctcctgagtggggatgacacccacatacgtgtctggggcccacccccctgccaggaccccatggggaccatcctacctgcctagtatacagttcctttggaagagtacgatcgctgctgtcagtctggccccctccagcccagctttctcccagacacagatctggtcatgcctttccccgaaatccatggctttagcatacagtggcattagaatttccatgatcccacctcccccatgtggcccagccgaggtccaccttcagaacctgcctgcatgatgaggrggccaaggttgccttctcacccacatttcagtccaattatgaacctttaaaatactccctctcaaactgctaggcatgttgcccctggaaatctttgtttcttccagatttgaccctcttccagcctggcaaaggcaatggctgccactctagatttctgcttgacagacatgacctcaagacctgcagacttgaccaggca

SEQ ID NO: 36558 - DNA, 984 bp, Homo sapiens
atgtggaatagacttgtaacatttgttattgaaaggatctttttctctctttttctaggattgtcaattcaaatccctgcaaaagtcaggcagacaatttgaatgaattgtattgtccaggtggtattttttaaaagacacttttgcatattaaacacatagggatatcattcatttccaccaaaatatatttccctatatttcatgtggccctctccaactacctggtttcccacacttcacctccccatcttttacagagtacaagggaaaaacaatcaacagttacacacactatgatgaaagggcaacagatacttggtctgagtttgagagaagctggagtgagaagagagaactggactgaagggatgctgaactgacaacatgtcactatgtcaaggtaacaaccactacacacccctaggcacttcatcctcacatgaatatgagtttccagatcactgggcttttcagaaggccaaatatgtaagttttagataacttacatgtttcaaatagatttaaaagagctttgcagacatttggttagactgtggccaatacacaaccttcattctgcattgtgatgagcatctacaacaaatgttatcgggggaaattcagccagatatcgggtgaaattcacccccgatatttcacttgggttcttttctattttccctaagtgtcggccggtctgagaaataaagggacagagttcaaaaagagagaaattttaaagctgggtgtcctgggaagacatcacatgtcggcaggttccatgatgccccctgagccacaaaaccagcaagtttttgttagtgattttcaaaaggggagggagtgtatgaatagggtgtggaccacagagatcacgtgcttcacaaggtaatagaatatcacaaggcaaatggaggcagggcgagatcacaggaccacaggactggggygaaattaaaattgctaatggagttgcgagca

SEQ ID NO: 36559 - DNA, 633 bp, Homo sapiens
tagcacaatacaccagaggctagaaagtaaagctttaattaacctttagaggattttctaagatcagaggtttaaaaaaattagaggtgggaaggtcccttacaaaggtaatacatgcattttctcctgactttttgatgtacccacagagcaaggggggacctctgatgtacctgcataaggcagattatccatttaaaaatgtattcatggaatgtcagttccaagaaaaaaatatactcatatattttattttatttatttatttagatggagtcttgctcttgtcgcccaggctagagtacagtggcgccatctcagctcactgcaacatctgcctcccgggttcaagtgattctcctgcttcagcctcccaggtagctgggattacaggtggccaccaccacacccrgctaatttttgtatttttagtagagatggggtttcaccatgttggccaggctggtcttgaactcctgacctcaggtgatccgcctgccttggcctcccaaagtgctgggattacaggcatgagccaccatgcccagcctactcatacactttaaatggcccaatacatacctgccctgctgaaaccagtgaggaacatcaataaatgtgacacaatgatta

SEQ ID NO: 36560 - DNA, 1118 bp, Homo sapiens
atttgcctttacaatcagcctctgctttcaggaaccttgtcttgattgtctttgcatccccagcatcttgcacatggtatgacacttaatagatattaagtaaatgcttgctgaattattaaatgaaagtgataatatatcaaaagagggctacatcatgagtccatcaagaattaaaacctaacttggccaggtgcaatggcttatatctgtaatcccagcacgttgggaggccaaggcaggaggatcacttgaggccaggaatttgagaccagtctgggcaatataccaagaccccgtctttacaaaaaacaaacaaacmcaaacaaaaaaccaaacccaactgttactcttttaagtgaattctatagcagttgaagacgacttttctgtcaatcacaaatgtattgatgaaagacagttggtgattttcagccatggctttgggagtaatatgtacttttttgatggagagagagagagagtgtgtgtgtgtgtgtgtgtgtgtgtgtgtgtgtgtgcgcgcgcgcgcacgtgcacatgcatgtgatgtacagtattagttacatttagtgaaataggcatcaaaataatctacttaagtttgaaattgtagaaatggtacatataacctatgctaatttctttagacattttagtttttcttgataaggttagagagttttattaaactttggccaagggaaattatgaaggaagaaattaataggaaagaaattagtctaatggaagaagattcagtcattcttaataatctaattttcaggccatattcttattaatcatgatcttaaattatatctttgtttgcatcttccaaataaagagtaaggtactaagcaaaaacctagacttatgagctttatatattatttgttggcgttccatatagataatataaacaaaagagaaataatgacatttccctctcagcttatcaggtagcggaagttattacaacattggtaaattgtgctttacttgctgtacttactatctgctctatctatagacagaaaacctgtataccttctgatactgtgttcaatgcatattctgtctactaccaatttagaatgctgaagtaccatatcaat

SEQ ID NO: 36561 - DNA, 948 bp, Homo sapiens
cactggatggcgggtggtgctgaccagtgctcaggccccaggccagaggacagatgagaaaagccaggctgacatcacatgaaaccacagctgcttcaagaacccagacaggcatagcattatacatggactctggagtcacacagacctgggtttgaatcttgcccctcttgcttcttgtgtggccttgggcaggttgcatagcctgcctggcactccgtttcctcatctgtgatacagggatgggttgtaatgccacttacagagtctttgtgaacattaaattagataatagacacaaagtacccagtatggttttggcacatgatacctgctcaggaaattaactcttagaatagcatgtgaatcccctagttcrccttcccagtgattctaaaagttaacaacttcagagtttacatctgttatctccttaggagcagagattcttataatcctcattttacaagccaggaaacggaggctcagggaagtaaatgtttttgaaccagggtattcagctaaggtaagggcaatggttagcatgggctccatcttggactctggggggatagtgtgtggagggaaggggcaactccctggcagctgccaccacagtgacctgctcccagtcctcttttgctgacattctgccctgggagttaagtttcagctgactctgggtagaccctgacttcctgccaggccaggctgggattcacatgagtagccaatcccagggcctggcccagggccactgccaagcctgctgcatgcctttgttccatctgctctgcccctcttgcctccagtggagcacagtcagcaatggctaagggagggcgcataaggggtaggggtggggagggcctgagaatgagcgaggcagcagcaagaccaccggcatgcgagagatgcaaggagtccaatgcaggaaatgcacgtgac

SEQ ID NO: 36562 - DNA, 513 bp, Homo sapiens
gtagctgggattagaggtgtctgccaycatgcctggctaaatttttattattttattttattttattttattttgagacggagtctccctctgttgccaggctggagtgcagtggcaccatctcagctcactgcaacctctgtctcccgggttcaaacgattctcctgcctcagcctccagagtagctgggactacaagcacacaccgccatgcccagttaatttttgtatttttagtagagacagagtttcacctgttggccaggatggtctcgatctcttgacctcgtgatccacccacctcagcctcccagagtaattttgtatttttagtagagttgaggtttggccatgttggccaggctggtctcaaactcctgacctcaggtgattcacccacctcagcctcccaaagtgctgggattacaggcgtgagccaccgcacacggcctggattgtaatctgtagagttgtgtgaggtaggattgaggttgagagtaaggatgcgcagga

SEQ ID NO: 36563 - DNA, 513 bp, Homo sapiens
gtagctgggattagaggtgtctgccaccatgcctggctaaatttttattattttattttattttattttattttgagacggagtctccctctgttgccaggctggagtgcagtggcaccatctcagctcactgcaacctctgtctcccgggttcaaacgattctcctgcctcagcctccagagtagctgggactacaagcacacaccgccatgcccagttaatttttgtatttttagtagagacagagtttcacctgttggccaggatggtctcgatctcttgacctcgtgatccacccacctcagcctcccagagtaattttgtatttttagtagagttgaggtttggccatgttggccaggctggtctcaaactcctgacctcaggtgattcacccacctcagcctcccaaagtgctgggattacaggcgtgagccaccrcacacggcctggattgtaatctgtagagttgtgtgaggtaggattgaggttgagagtaaggatgcgcagga

SEQ ID NO: 36564 - DNA, 620 bp, Homo sapiens
ttgggcacagtggctcacgcctgcaatcccagcactttgggaggccgaggcagacagatcacctgaggtcaggagtttgagaccagcctgaccaacatggagaaaccccgtctctactaaaaatacaaaattagccgggtgtggtggcgcatgcctgtaatcccagctactggggaggctgaggcaggggaactgctagaacctgggagggaaakgttgcagtgagctgagatcatgccattgcactccagcctgggcaacaagagtgaaactccgtctcaaaaaaaagaaaaagaaaagaaaacaaaagaaaaagacagaaaacagctagttctaaggagaatatggagcaaccatcaaacacggttgagaagcatataaaccaagtacaacaattttgaaaacctgtgtatatatacacacacacaccgtaggagaggaattgctagggaataaagtacttataactttgtaagtaatgtgtgtgtgtgtgtgtgtgtgtacacataccctagaagacctatatatatgtgtgtgtgtatatgtatatgagacctataagactggggaggtgtgtgtgtgtatatatatatataggtgtacataggtatgtatatagt

SEQ ID NO: 36565 - DNA, 1173 bp, Homo sapiens
tacatatgtttattgtggccctgttcacaatagcaaagacttggaaccaacccaaatgtctttcaatgatagactggataaagaaaatgtggcacatatacaccatagaatactatgcagccataaaaaaggatgagttcatgtcctttgcagggacatggatgactatggaaatcatcattctcagcaaagtacacaaggacagaaaaccaaacaccgtatgttctcactcataggtgggaactgaacaatgagatcacttggacacagggcagggaacatcacataccagggcctgccagggggtggggggctggggagggacagcattaggagaaatatctaatgtaaatgatgagttgatgggtgcagcaaaccaatatggcacatgtatacctatgtatcaaacctgcacgttgtgcacatgtacccaggacttaaagtataataaaaaaaattaacttgaaacagaaaaaagaaaattattcagacaagcatccaactcaaaacattagaaaaagaacacaaaatctaaagaaaataaaaaggaaggaaaatataaagaacattaattaaatttaaaaaatctaaaagggaaagaattaataatttgtgcaagcatctcaggtattagatagtatgcaaaggagacccctaccctaaaagcctattattggggcttcaaacwttccatgagcgttctcagtttccgacgtcagttgagaataccaggctattctcatgtcttgttttttatttgattttatgtggcagttagaaggtagccctgaagagtcaaggaagttgttaccaagcccaggaagagttgtagccatagaaaaagtgttgtgtaatagggactgtggccataggaggtggaactcagccactaccaaaatgcaaccaccctccagtctcctgctagagtctcccaccagccaatcagtcagggggcaagcaagccgagatgtgactggccagagaaatcaggctcccagggcatagagcaggttgagggacgaacaagagatatataagtgtgagcagagaaaaaccagcaaagaatctttaaatctcttaatgatttttctcatgttagagcattatctaggaacttcagtactgaggattgtgatacctttgttttgatcttaattagaatgaatgcaaagt

SEQ ID NO: 36566 - DNA, 1173 bp, Homo sapiens
tacatatgtttattgtggccctgttcacaatagcaaagacttggaaccaacccaaatgtctttcaatgatagactggataaagaaaatgtggcacatatacaccatagaatactatgcagccataaaaaaggatgagttcatgtcctttgcagggacatggatgactatggaaatcatcattctcagcaaagtacacaaggacagaaaaccaaacaccgtatgttctcactcataggtgggaactgaacaatgagatcacttggacacagggcagggaacatcacataccagggcctgccagggggtggggggctggggagggacagcattaggagaaatatctaatgtaaatgatgagttgatgggtgcagcaaaccaatatggcacatgtatacctatgtatcaaacctgcacgttgtgcacatgtacccaggacttaaagtataataaaaaaaattaacttgaaacagaaaaaagaaaattattcagacaagcatccaactcaaaacattagaaaaagaacacaaaatctaaagaaaataaaaaggaaggaaaatataaagaacattaattaaatttaaaaaatctaaaagggaaagaattaataatttgtgcaagcatctcaggtattagatagtatgcaaaggagacccctaccctaaaagcctattattggggcttcaaactttccatgagcgttctcagtttccgacgtcagttgagaataccaggctattctcatgtcttgttttttatttgatkttatgtggcagttagaaggtagccctgaagagtcaaggaagttgttaccaagcccaggaagagttgtagccatagaaaaagtgttgtgtaatagggactgtggccataggaggtggaactcagccactaccaaaatgcaaccaccctccagtctcctgctagagtctcccaccagccaatcagtcagggggcaagcaagccgagatgtgactggccagagaaatcaggctcccagggcatagagcaggttgagggacgaacaagagatatataagtgtgagcagagaaaaaccagcaaagaatctttaaatctcttaatgatttttctcatgttagagcattatctaggaacttcagtactgaggattgtgatacctttgttttgatcttaattagaatgaatgcaaagt

SEQ ID NO: 36567 - DNA, 1173 bp, Homo sapiens
tacatatgtttattgtggccctgttcacaatagcaaagacttggaaccaacccaaatgtctttcaatgatagactggataaagaaaatgtggcacatatacaccatagaatactatgcagccataaaaaaggatgagttcatgtcctttgcagggacatggatgactatggaaatcatcattctcagcaaagtacacaaggacagaaaaccaaacaccgtatgttctcactcataggtgggaactgaacaatgagatcacttggacacagggcagggaacatcacataccagggcctgccagggggtggggggctggggagggacagcattaggagaaatatctaatgtaaatgatgagttgatgggtgcagcaaaccaatatggcacatgtatacctatgtatcaaacctgcacgttgtgcacatgtacccaggacttaaagtataataaaaaaaattaacttgaaacagaaaaaagaaaattattcagacaagcatccaactcaaaacattagaaaaagaacacaaaatctaaagaaaataaaaaggaaggaaaatataaagaacattaattaaatttaaaaaatctaaaagggaaagaattaataatttgtgcaagcatctcaggtattagatagtatgcaaaggagacccctaccctaaaagcctattattggggcttcaaactttccatgagcgttctcagtttccgacgtcagttgagaataccaggctattctcatgtcttgttttttatttgattttatgtggcagttagaaggtagccctgaagagtcaaggaagttgttaccaagcccaggaagagttgtagccatagaaaaagtgttgtgtaatagggactgtggccataggaggtggaactcagccactaccaaaatgcaaccaccctccagtctcctgctagagtctcccaccagccaatcagtcagggggcaagcaagccgagatgtgactggccagakaaatcaggctcccagggcatagagcaggttgagggacgaacaagagatatataagtgtgagcagagaaaaaccagcaaagaatctttaaatctcttaatgatttttctcatgttagagcattatctaggaacttcagtactgaggattgtgatacctttgttttgatcttaattagaatgaatgcaaagt

SEQ ID NO: 36568 - DNA, 1173 bp, Homo sapiens
tacatatgtttattgtggccctgttcacaatagcaaagacttggaaccaacccaaatgtctttcaatgatagactggataaagaaaatgtggcacatatacaccatagaatactatgcagccataaaaaaggatgagttcatgtcctttgcagggacatggatgactatggaaatcatcattctcagcaaagtacacaaggacagaaaaccaaacaccgtatgttctcactcataggtgggaactgaacaatgagatcacttggacacagggcagggaacatcacataccagggcctgccagggggtggggggctggggagggacagcattaggagaaatatctaatgtaaatgatgagttgatgggtgcagcaaaccaatatggcacatgtatacctatgtatcaaacctgcacgttgtgcacatgtacccaggacttaaagtataataaaaaaaattaacttgaaacagaaaaaagaaaattattcagacaagcatccaactcaaaacattagaaaaagaacacaaaatctaaagaaaataaaaaggaaggaaaatataaagaacattaattaaatttaaaaaatctaaaagggaaagaattaataatttgtgcaagcatctcaggtattagatagtatgcaaaggagacccctaccctaaaagcctattattggggcttcaaactttccatgagcgttctcagtttccgacgtcagttgagaataccaggctattctcatgtcttgttttttatttgattttatgtggcagttagaaggtagccctgaagagtcaaggaagttgttaccaagcccaggaagagttgtagccatagaaaaagtgttgtgtaatagggactgtggccataggaggtggaactcagccactaccaaaatgcaaccaccctccagtctcctgctagagtctcccaccagccaatcagtcagggggcaagcaagccgagatgtgactggccagagaaatcaggctcccagggcatagagcaggttgagggacgaacaagagatatataagtgtgagcagagaaaaaccagcaaagaatctttaaatctcktaatgatttttctcatgttagagcattatctaggaacttcagtactgaggattgtgatacctttgttttgatcttaattagaatgaatgcaaagt

SEQ ID NO: 36569 - DNA, 571 bp, Homo sapiens
gactgatcattgtacaaaaatgatgactagctccctgccctcagctcccattactaatgtctataattcttatttgttcatcagggtagattcccctaaatgtagtaacttcatcaaacaatctgacttttctacagctcttgaagcagagcctttacttttcaaaaaattcatgctagcaactcagggaagsacagtattgtgccctcctgagcactgagttttttcgttactcaccgccatttgaacagtttaaaaattattctttatttttgttgcagtctcaccaacgcaccttaacgtagcagtttctcattgtctgaactagtaccctgggttctttgtcctcacgtccaagaaaattaaggaacgtggacacaaaggtggggttggagcaaaagtttaataagtgaaagaaagaaaagaagctctctgcattagagaggggagtctgactggactgccaagttgtagtaaaaacgtcagggtttttataaatggactagtgaggaggggtgtcttatcttcccagggcctgaagatttagttgggaccaggtgtgctatcggca

SEQ ID NO: 36570 - DNA, 531 bp, Homo sapiens
gaattagagtcaaatttcgaagtagtactcaactgcatgaattaactcctcatcatcaaagtggaggtgaaagaagtgtttctaccatgttatacttgatggcacttcaggagctaaatagatgtccattcagagtagttgatgaaatcaatcaggtatggtgattgttctgttacttggatcttcttatatcctgtaacaggaataaatgtaatcattattgttgccattgtttagggaatggacccaatcaatgaacggagagtgtttgaaatggttgtaaatactgcctgtaaagaaaatacatctcaatactttttcataacaccaaaggtaggtaaaaagtaacctaaaagtggtcatatactcagaaatctcctgtgrcataatcatacagtttttgtcccaacatgcacatattagcaggaacactcccaaaaaaggaatttaaaaggttaacagtaatatttacattattaaagggacaaattccagtgtcatgcttaatcagaggaagaaaggtaggaggca

SEQ ID NO: 36571 - DNA, 1243 bp, Homo sapiens
aaaattacatcagtgatcactttggtttgtggcagacggaatgagaaaaaatgtgggggagcagagctattttattttattatatttatttatttatttttattatttatttatttttgagatggagtcttgctctgtcacccaggctggagtgcagtggcaccatctcggctcactgcaacctctgcctcctgggctcaagcaattctcctgcctcagcctcctgagtaactaggattacaggcacctgccaccacccccagctaattttgtakttttagtagagacaaggtttcatgttcagaaaggcctgtgctgggccctgtgtgactgcatggttgcatacacacgatgacagtcataaatcttcatcatggttcttggaactaaagaggaaagtttggagtaacgtattacatggaatatcttttgttgatactacttcctgggagtcaccataaggctcttttaatatagagtaagcaaaaacccagacccaaaaatcctctagaaaatatcctcgcctttaaaattctaaatgactcatttgtcatcattgtagagggaggagaacaatttctcagctgatcataacccatagttgttgtgaggttagagccaaagtctagtcttacaaatcattcctctctgactacataaaccggggaagaagaatgccgagattaatgaattaattaccatgtgtctcctcatggagatcagaaagttaattgcttctttttgtccttcttatcagaatgtggaaatataaaactactctgtataagattggattcagtttacaaaaataagcctgaagcctttgaactcagggggcccaggtggagagattctgttcattatctgtcctcctgcctccagcctgtgccatagactccaaatggatgaaagctctgtatagagaggttgtattaccatggagtacaatatctgtcagatttgagtagaggtgaacacagtggaggagaataaagagagagctgagttctgtctcagtgagcacgacaaaaggccgatgaacctgtcagagggcagaagtggaccccaaaggcttgttcccgcggactttgctggttgactgttctttgcattaatctggaatcatggcgcaccattactcttttcatgttgtgatattctcttcacattctcttccttgctcctcaatgccaaatgtgtgacttttcagaaacaaaatattgaggaatttaaagtgagcatg

SEQ ID NO: 36572 - DNA, 622 bp, Homo sapiens
tgtctggatctcacccccagagatttggatttaattggtctggggccgggcgcggtggctcacgcctgtaatcccagcactttgggaggctgaggcaggcagatcacctgaggtcagaagttcgagaccagcctgggcaacatgaggaaacccttctctactaaaaatacaaaaattagctgggcgtagtggtacgtacctgtaatcccagctactggggaggttgaggcatgacaatcatttgaacttgggaggtggaggttgcattgagctgagatcatgccaccgcactccagcctgggtgacagagtgagaatctgtctccaaatgaaaaaataaaaattggtgtggtgtgtggcttggacatacaggcrctgtaataagtactatcactcttgctcattcatactcataaatactttgttcagttggagaaaagggggtgtagttgcagctagaactctggaaacacattaagtagttaattcattcaatcaacgttggttttgcagcctgcctttctagacatgggtagtgaacaagacaagggcccttccctcatggaacttccattccattggtggaggcaataaacaggcaattcaaaaacaagatgatttca

SEQ ID NO: 36573 - DNA, 629 bp, Homo sapiens
gagcggtccttatttattattcatgcggctgcgtgatttaggggcgagcgggtccgcggaggctcggctcggcagcctctcccctcgctgcttccccttcctaccgctccccacctcctcgccccctacacctgcccgcacgcgcagacgcatcttcctgcccggccctggggtctagggtggggctgcggccacgcctcctacaccccttctgggccctgcggcggcactggaatctcctaataccaggaagaaggtycgggtgcagaggcctctccctagctctgtggccaaccctgattgggggtccatcttttgctccatcacttccttctgtcttccttccctcctctttccccggtcgggaacctcagaaagtaaggagaatggaatctcaggtgggtgcagttcagtggacagattgggagagttgggaggggaaggggctatgcctgccccaacttgccgcgtgaccctaggcagactccttgccttctgtggctctcagggacctctctaaaactaaaggttggagtgaatcccctgaaagttcctcagctttttaaagggggttggggaggaagtaaaatgtccatatagtgaaatgtacagatcttacctatacaagg

SEQ ID NO: 36574 - DNA, 576 bp, Homo sapiens
atgaaagtgtagccttctgggagtttcagaacccgggttacagagtctaacctgcccctcctccactgcgtctcctcctacctctgtattcctgacacagatgcctggggcactgtcacaggaggtcctgggcccgggacctctatcctcgtgcattcttcttaaggaactgtctgctgtaagcaccaagtgtccctaaaaaaggcgccatctcagcagctggaatggtgcagcactggcacaagcacccccagctcagccagacgaggggaccccgtcgtccctgtggcttgaatacttccccatacaccatggatggtgctaggacttaattatgttctccacaaattcatatgtcraaattctaattcccaataggacagtatttggagatggggcctttgggagacaattaaagtgataccagatattactggatcagtgctgaacttcttgggttgaccgtggtactgtggttatgtaggagagtgtccttgctcttagaagatactctgaagtattttgaaatgaaatgttgtgatgtctgcaaataactcccaaatgaggctgggtagg

SEQ ID NO: 36575 - DNA, 513 bp, Homo sapiens
gatatatgccgagagagagcaagagatagagatcacaatgataaaaccagtgaggtaaartaagacttggtaaatcggaataaaaagtatataggtattctctgtactattcttgcaatttttctataaatgtgaaaatatattttaaaatgaaggcttaagatgataaataaatgtataactcaatcaataaagtgactatcgagaggaacgtggggcctggagaaacatggagctctatgtacctggacagaaagaaatttggatgaagaggagaagagaacagggtgggtgaggccagaagcactgtgtaaacctgggccggtgtactcctccataaaatgggtacagtagcatgtccatcctggagttcatgtgaggattcagtaagatacagcaggtacaatgctaggcttagtgcctggcatgtggttaagcgctcagtaaattattttagtggaacagttatgcaaataaatttatgacagttacagaacacttgcacagtactta

SEQ ID NO: 36576 - DNA, 513 bp, Homo sapiens
gatatatgccgagagagagcaagagatagagatcacaatgataaaaccagtgaggtaaagtaagacttggtaaatcggaataaaaagtatataggtattctctgtactattcttgcaatttttctataaatgtgaaaatatattttaaaatgaaggcttaagatgataaataaatgtataactcaatcaataaagtgactatcgagaggaacrtggggcctggagaaacatggagctctatgtacctggacagaaagaaatttggatgaagaggagaagagaacagggtgggtgaggccagaagcactgtgtaaacctgggccggtgtactcctccataaaatgggtacagtagcatgtccatcctggagttcatgtgaggattcagtaagatacagcaggtacaatgctaggcttagtgcctggcatgtggttaagcgctcagtaaattattttagtggaacagttatgcaaataaatttatgacagttacagaacacttgcacagtactta

SEQ ID NO: 36577 - DNA, 731 bp, Homo sapiens
gataatcacagaagagatgaggtagagacaagacctgaactgcaccagaggccagggaattgcctcccgtgccaactccctcgcctggctgggcagggaacggcgctaccaggtggcgcgacttcgctggaaattgattttggagatgctgacctaattaatcaggaaacgatcctagaaaggccctcagatttggaggcttcgcactattattggcagtgacacacttacacatcggcgggcaggattttcccaggcggagccagtgtggtggcggctgacagaggtggaccatgtagggccagagacctgcccttcagtccgggaggggagagaggagcggggagcatacaacccctggggacagaaatcagaaggaggcagctctgagctcaggatgaagaggaacattctcctccagggaaagagtctgactgaggtagtgagcaccttgacaacagaggcatttaagttggatgacccagtggtagggatgcagaggaaccagccgtaaggaagaaccatacgcctccgagggactgtaagaacaactcctgtctcrgaccacacagaggacaggggtctggagggatggtgggggacaaaggaactcttcacatcagaggaccatctctgccaccgaccccttgaattacaggacttgcactgtgaacacccagcccttcatgtgggactgcaatggaaatgctccttctctaattatatctttt

SEQ ID NO: 36578 - DNA, 731 bp, Homo sapiens
gataatcacagaagagatgaggtagagacaagacctgaactgcaccagaggccagggaattgcctcccgtgccaactccctcgcctggctgggcagggaacggcgctaccaggtggcgcgacttcgctggaaattgattttggagatgctgacctaattaatcaggaaacgatcctagaaaggccctcagatttggaggcttcgcactattattggcagtgacacacttacacatcggcgggcaggattttcccaggcggagccagtgtggtggcggctgacagaggtggaccatgtagggccagagacctgcccttcagtccgggaggggagagaggagcggggagcatacaacccctggggacagaaatcagaaggaggcagctctgagctcaggatgaagaggaacattctcctccagggaaagagtctgactgaggtagtgagcaccttgacaacagaggcatttaagttggatgacccagtggtagggatgcagaggaaccagccgtaaggaagaaccatacgcctccgagggactgtaagaacaactcctgtctcggaccacacagaggacaggggtctggagggatggtgggggacaaaggaactcttcacatcagagraccatctctgccaccgaccccttgaattacaggacttgcactgtgaacacccagcccttcatgtgggactgcaatggaaatgctccttctctaattatatctttt

SEQ ID NO: 36579 - DNA, 731 bp, Homo sapiens
gataatcacagaagagatgaggtagagacaagacctgaactgcaccagaggccagggaattgcctcccgtgccaactccctcgcctggctgggcagggaacggcgctaccaggtggcgcgacttcgctggaaattgattttggagatgctgacctaattaatcaggaaacgatcctagaaaggccctcagatttggaggcttcgcactattattggcagtgacacacttacacatcggcgggcaggattttcccaggcggagccagtgtggtggcggctgacagaggtggaccatgtagggccagagacctgcccttcagtccgggaggggagagaggagcggggagcatacaacccctggggacagaaatcagaaggaggcagctctgagctcaggatgaagaggaacattctcctccagggaaagagtctgactgaggtagtgagcaccttgacaacagaggcatttaagttggatgacccagtggtagggatgcagaggaaccagccgtaaggaagaaccatacgcctccgagggactgtaagaacaactcctgtctcggaccacacagaggacaggggtctggagggatggtgggggacaaaggaactcttcacatcagaggwccatctctgccaccgaccccttgaattacaggacttgcactgtgaacacccagcccttcatgtgggactgcaatggaaatgctccttctctaattatatctttt

SEQ ID NO: 36580 - DNA, 570 bp, Homo sapiens
cccccatgacagcatcccacggggcaacaatctagtctggagttggaagcaaggacataaggaaatgccttcctgaaaaactggtatttaacctgaaaacatggtttggcttaaaccaagcaaagagagatgagggaagggggcataatccacacaatgggaacagcatgtgtgagggctcagaggctggaaggtgttgggcacgtgggaggaaggaacagaaggccagcctggcaggacagagtgaggtagggagacaggggatggggctggaaagggaactgggctggtagattcaccctgaggagaatggagagctgatcacgacacgatcaaatgagtcattctcattaacaggttcacaggtggcctgcacactgcttcatatctgcggaatgtcacttttttatgtgcatctgttacagycacactgtccaacatggttgccactagccccctgtggctactgagcttttgaaatgcggctaatccaaactgagatgggctgtcacgaggaaaacacacactgatttcaaagactttgtaaaaaatcaaaaatgtgtaatacct

SEQ ID NO: 36581 - DNA, 570 bp, Homo sapiens
cccccatgacagcatcccacggggcaacaatctagtctggagttggaagcaaggacataaggaaatgccttcctgaaaaactggtatttaacctgaaaacatggtttggcttaaaccaagcaaagagagatgagggaagggggcataatccacacaatgggaacagcatgtgtgagggctcagaggctggaaggtgttgggcacgtgggaggaaggaacagaaggccagcctggcaggacagagtgaggtagggagacaggggatggggctggaaagggaactgggctggtagattcaccctgaggagaatggagagctgatcacgacacgatcaaatgagtcattctcattaacaggttcacaggtggcctgcacactgcttcatatctgcggaatgtcacttttttatgtgcatctgttacagccacactgtccaacatggttgccactagccccctgtggctactgagcttttgaaatgyggctaatccaaactgagatgggctgtcacgaggaaaacacacactgatttcaaagactttgtaaaaaatcaaaaatgtgtaatacct

SEQ ID NO: 36582 - DNA, 582 bp, Homo sapiens
caaaagaaatgaaattagtatgtcaaagaggtatctgcacttccatgttcacwgctgcattatccataataaccaggatatggaatcaacctaactgtccatcaacaaatgaatggataaagaaaatgtggtaagaaaatcaccaagagagtagattttaagtattctcaccacaaaaaaagcatgtgagataatgcatatgttaaatagatcaatttagccactccacatcatttcaaaatatcatgctgtataccataaatatatatacatgttattaaaaataaattgaaaaaaatttttaaatctaatccttctaacaaccttatgacgtatctatctgttttacaagggaggaaatggagacacaaaaaggtaaagtaacttgctgaagaacatgaagctcataaatgaatctgggttttggacccaggagcccaactctggagcctgtacttctatttacgttactctgctgaatctcactgatgtggatcccctacctacacggtggaagtgtttgagtctccttagtgaggttccctccttctctgtttatcactgtttccagagtccctggga

SEQ ID NO: 36583 - DNA, 566 bp, Homo sapiens
aagtcctcccctgcacatggggactggtgacatccccacctcttatggtagttgagaacattaaatgaaatgatgcatgctgtaccctgagccagggctggcacacgggaggtgcccagtggatgctggccacttctagattgctaggattaccttcatttgaagccctttatgytgagttgatgatactagctggcactacatagatggaaagaccctgttccaagcacaactagctcatttaatcctcacaatggctctgtgaggtgggcagtgggatctccccattttacagataaaggaacggaggcactgagagatcatgatgcatccagcgtcccattcacacgtttgtgcccaggctgattcccgtaaacactaccctgttgttgctgctggcttctttcttcctggtgtactgctggagcctgggggcattttgcttgctggtccctgggagggagaccaggcttcgccttgccttagctcagacctcagccaaccctccctggactttgacatctacccccaactggtcttggtgtctgtcattgccctaaccagca

SEQ ID NO: 36584 - DNA, 834 bp, Homo sapiens
catacccactcagataccctctccaccacctcatgctgcaggggcacctcaagttactgagcatcagaccccttcacggccaccatcaaactgaacctggaaaggaggcagagagggtcattaatactcttgattgtgcagagtaagaatctgaggcccagaaaactgcatatggaccccacctgtggcatacacagatgggaactctgatcccagccctgcagtcttctccaccatgctgcccctagcggagatggcctcctggttccttgttgctgactgcagaactctgggctggcccttctgatcctactgccagccacgtggctggagctctgctcagaccagactgtccatctaagattccccaccagctgcctgatccacgttgcactgacacccagggctttctagggctgggactagggtgaagcgagtgagccatcagggtacaaaactcaaggaggtgctcacactcagggttgtgcaaatgccatcgctttcttgtgaagattaaagtaaagtactgcatataaagtgcttaggtgctgtaaaagtatctgatattgtttttagtaatagktgcactagtaatagcagtactgagaggagctctgttttttcttctacgtggagattaaattaactttttcggtgaataagctaagaaatttgtagttacatgaatgtgagctattgttccagaagaatttgcatgtctttaagggctcaaatgttcctaatgaggactgttagttttgtaccatttcatggcccaagtgaccctgtgatcccgccctgcctttcttacatgctaagaagtttggattccac

SEQ ID NO: 36585 - DNA, 602 bp, Homo sapiens
  misc_feature (1)...(602): n = A,T,C or G
aaacgtaatgtaattgtactccatggcttcctccatgcagatagatatcagctcgtggctacatgtaactacagctttgggtccagaccatcaccatccaggccccgagtcttcaaagaagcccaaggggccacagagccctgcccagctcactgtccaaacaaagtattctcctgccccgtctcctgctccccgctcgccagtacctgccagcttaagggtggatttgtgcagtgactacaactcccacattgagccctaagttctcagatctgttatctcttgggctggggtccactgtggttcctctttggcctctccaaccaggacagggccccgtaccacatgctccctataatctgaccctgacatttcccaactttcctgatggccacagtttgtaatacctcaaccccaaataaacactttaaaaatagagaataataaacactttaaaaataaagaataatgtcagagygagactccgtctcaaaaaaaagnnnnnnnnnnnnnnnnnnnnnnnnnnnnnnnnnnnnnnnnnnnnnnnnnnnnnnnnnnnnnnnnnnnnnnnnnnnnnnnnnnnnnnnnnnnnnnnnnnnnaa

SEQ ID NO: 36586 - DNA, 657 bp, Homo sapiens
gcctataactctgtgacctggagcaaagcacatatctctgaatctcttgtccctcttccataatatgagaataatgatgatacaatcttacctatttcccgtgttcattgaaygaataaattgatatgtgatgtggaagagcttttataaacattaagccctgcttatacttatttttgaaactatttcagaatgaaaactgagaactactctttgacgaggttaaatctgaatgacttatacccctgttaatctctaattattcattcattccagaattgacatagaaaatatttaatacttattttctctgtgataacaagagtattccagagtaaacagggaagcctatgagaaatgaagctagtttaaattttaaaggtatttttcggaagggtcgatccatcctctcttcccctgataacatgccagatatcaactactagcacatttctcagcctcaggtgtcttcggtcaattatctgaatctttgagcaacttggggaaagttgagtccaaacgttaaaacaaaaaacaaaataactaagagcgaaaacgataagaatttgatgcagatgtttattttcagttgttttcaaaggaacttcatgttaggcatcacagtatgttagagatttattttttactatcggataa

SEQ ID NO: 36587 - DNA, 657 bp, Homo sapiens
gcctataactctgtgacctggagcaaagcacatatctctgaatctcttgtccctcttccataatatgagaataatgatgatacaatcttacctatttcccgtgttcattgaacgaataaattgatatgtgatgtggaagagcttttataaacattaagccctgcttatacttatttttgaaactatttcagaatgaaaactgagaactactctttgacgmggttaaatctgaatgacttatacccctgttaatctctaattattcattcattccagaattgacatagaaaatatttaatacttattttctctgtgataacaagagtattccagagtaaacagggaagcctatgagaaatgaagctagtttaaattttaaaggtatttttcggaagggtcgatccatcctctcttcccctgataacatgccagatatcaactactagcacatttctcagcctcaggtgtcttcggtcaattatctgaatctttgagcaacttggggaaagttgagtccaaacgttaaaacaaaaaacaaaataactaagagcgaaaacgataagaatttgatgcagatgtttattttcagttgttttcaaaggaacttcatgttaggcatcacagtatgttagagatttattttttactatcggataa

SEQ ID NO: 36588 - DNA, 657 bp, Homo sapiens
gcctataactctgtgacctggagcaaagcacatatctctgaatctcttgtccctcttccataatatgagaataatgatgatacaatcttacctatttcccgtgttcattgaacgaataaattgatatgtgatgtggaagagcttttataaacattaagccctgcttatacttatttttgaaactatttcagaatgaaaactgagaactactctttgacgaggttaaatctgaatgacttatacccctgttaatctctaattattcattcattccagaattgacatagaaaatatttaatacttattttctctgtgataacaagagtattccagagtaaacagggaagcctatgagaaatgaagctagtttaaattttaaaggtatttttcggaagggtcratccatcctctcttcccctgataacatgccagatatcaactactagcacatttctcagcctcaggtgtcttcggtcaattatctgaatctttgagcaacttggggaaagttgagtccaaacgttaaaacaaaaaacaaaataactaagagcgaaaacgataagaatttgatgcagatgtttattttcagttgttttcaaaggaacttcatgttaggcatcacagtatgttagagatttattttttactatcggataa

SEQ ID NO: 36589 - DNA, 657 bp, Homo sapiens
gcctataactctgtgacctggagcaaagcacatatctctgaatctcttgtccctcttccataatatgagaataatgatgatacaatcttacctatttcccgtgttcattgaacgaataaattgatatgtgatgtggaagagcttttataaacattaagccctgcttatacttatttttgaaactatttcagaatgaaaactgagaactactctttgacgaggttaaatctgaatgacttatacccctgttaatctctaattattcattcattccagaattgacatagaaaatatttaatacttattttctctgtgataacaagagtattccagagtaaacagggaagcctatgagaaatgaagctagtttaaattttaaaggtatttttcggaagggtcgatccatcctctcttcccctgataacatgycagatatcaactactagcacatttctcagcctcaggtgtcttcggtcaattatctgaatctttgagcaacttggggaaagttgagtccaaacgttaaaacaaaaaacaaaataactaagagcgaaaacgataagaatttgatgcagatgtttattttcagttgttttcaaaggaacttcatgttaggcatcacagtatgttagagatttattttttactatcggataa

SEQ ID NO: 36590 - DNA, 657 bp, Homo sapiens
gcctataactctgtgacctggagcaaagcacatatctctgaatctcttgtccctcttccataatatgagaataatgatgatacaatcttacctatttcccgtgttcattgaacgaataaattgatatgtgatgtggaagagcttttataaacattaagccctgcttatacttatttttgaaactatttcagaatgaaaactgagaactactctttgacgaggttaaatctgaatgacttatacccctgttaatctctaattattcattcattccagaattgacatagaaaatatttaatacttattttctctgtgataacaagagtattccagagtaaacagggaagcctatgagaaatgaagctagtttaaattttaaaggtatttttcggaagggtcgatccatcctctcttcccctgataacatgccagayatcaactactagcacatttctcagcctcaggtgtcttcggtcaattatctgaatctttgagcaacttggggaaagttgagtccaaacgttaaaacaaaaaacaaaataactaagagcgaaaacgataagaatttgatgcagatgtttattttcagttgttttcaaaggaacttcatgttaggcatcacagtatgttagagatttattttttactatcggataa

SEQ ID NO: 36591 - DNA, 1319 bp, Homo sapiens
ggtcaattttctaaattcatgttatctttcttagttattaattagtttctcccagattttggcattaggcggtgtgacagccttaatttctactggctttgtgaattgtgtttttaaaatatattatcattaatatttctttgaaagattgagaaatacggcataagtaaatgctaacaagacactcctttgaatgagaaatctcatatttacatatattacaataaatgcttactagagtttgtcttrttagttgaacacaatgtatagcagtagggatttttgatttcatgtgttttaaactttactcatcagtaatattattttctattatgtgattaaaatatctgtgacaaataactgtaagcttgctttgtacatgctataaatatctagcttaaaattatttttgaagcaccacttcaactttatatgccaatcttgaagaatattgctgccaaaaattatgacgaagtaactcaaagcatacatattcatggccattgcttcatatctctccttagaattcatgattacatccaatgtagtgacagaaactcaggggaagatatccaagaaagcaaaacctaagccgcagagaatagatccccatctttaacaggtattaaaaacataagcatgagaatgattgacatgcaggtggatattataaaagtgcaagactttgaaggctttttctgacatggtgaaaatgaaaaaggaaatccagactttaaaattcatatgcttattcttctgaagtttaaattttggccctgccacctgtgattaagattaatggtagattggaaggcctaggcgggtgtatcacgaggtcaggagattgaggccatcttgggtaacatggtgaaacctcatctctactaaaaatacaaaaaattagctgctggacgtggtggcatgcacctgtaatcccagctacttgggaggctgaggcaggggaattgcttgaacccaggaggcggaggttgcagtgagctgagatcacgccattgcactccagccagggagacagagagagtctccgttttcttgtttttgtttttttttttttttttaaaaattaacagaacaactaaacttttcataatataaataaatacgtatctagatcaaatatcaaatgttgctgagttattgatgagtagaaaaatctgtacctttagttatttgtgagggtgtgctagtgtgactttcatgggaaccagagaccaattgttttcatctcttccaaattctgcgctcagtgacacaacactgacagcttgaaacacagcacgtttggagcatttatgtca

SEQ ID NO: 36592 - DNA, 1319 bp, Homo sapiens
ggtcaattttctaaattcatgttatctttcttagttattaattagtttctcccagattttggcattaggcggtgtgacagccttaatttctactggctttgtgaattgtgtttttaaaatatattatcattaatatttctttgaaagattgagaaatacggcataagtaaatgctaacaagacactcctttgaatgagaaatctcatatttacatatattacaataaatgcttactagagtttgtcttgttagttgaacacaatgtatagcagtagggatttttgatttcatgtgttttaaactttactcatmagtaatattattttctattatgtgattaaaatatctgtgacaaataactgtaagcttgctttgtacatgctataaatatctagcttaaaattatttttgaagcaccacttcaactttatatgccaatcttgaagaatattgctgccaaaaattatgacgaagtaactcaaagcatacatattcatggccattgcttcatatctctccttagaattcatgattacatccaatgtagtgacagaaactcaggggaagatatccaagaaagcaaaacctaagccgcagagaatagatccccatctttaacaggtattaaaaacataagcatgagaatgattgacatgcaggtggatattataaaagtgcaagactttgaaggctttttctgacatggtgaaaatgaaaaaggaaatccagactttaaaattcatatgcttattcttctgaagtttaaattttggccctgccacctgtgattaagattaatggtagattggaaggcctaggcgggtgtatcacgaggtcaggagattgaggccatcttgggtaacatggtgaaacctcatctctactaaaaatacaaaaaattagctgctggacgtggtggcatgcacctgtaatcccagctacttgggaggctgaggcaggggaattgcttgaacccaggaggcggaggttgcagtgagctgagatcacgccattgcactccagccagggagacagagagagtctccgttttcttgtttttgtttttttttttttttttaaaaattaacagaacaactaaacttttcataatataaataaatacgtatctagatcaaatatcaaatgttgctgagttattgatgagtagaaaaatctgtacctttagttatttgtgagggtgtgctagtgtgactttcatgggaaccagagaccaattgttttcatctcttccaaattctgcgctcagtgacacaacactgacagcttgaaacacagcacgtttggagcatttatgtca

SEQ ID NO: 36593 - DNA, 1319 bp, Homo sapiens
ggtcaattttctaaattcatgttatctttcttagttattaattagtttctcccagattttggcattaggcggtgtgacagccttaatttctactggctttgtgaattgtgtttttaaaatatattatcattaatatttctttgaaagattgagaaatacggcataagtaaatgctaacaagacactcctttgaatgagaaatctcatatttacatatattacaataaatgcttactagagtttgtcttgttagttgaacacaatgtatagcagtagggatttttgatttcatgtgttttaaactttactcatcagtaatattattttctattatgtgattaaaatatctgtgacaaataactgtaagcttgctttgtacatgctataaatatctagcttaaaattatttttgaagcaccacttcaactttatatgccaatcttgaagaatattgctgccaaaaattatgacgaagtaactcaaagcatacatattcatggccattgcttcatatctctccttagaattcatgattacatccaatgtagtgacagaaactcaggggaagatatccaagaaagcaaaacctaagccgcagagaatagatccccatctttaacaggtattaaaaacataagcatgagaatgattgacatgcaggtggatattataaaagtgcaagactttgaaggctttttctgacatggtgaaaatgaaaaaggaaatccagactttaaaattcatatgcttattcttctgaagtttaaattttggccctgccacctgtgattaagattaatggtagattggaaggcctaggcgggtgtatcacgaggtcaggagattgaggccatcttgggtaacatggtgaaacctcatctctactaaaaatacaaaaaattagctgctggacgtggtggcatgcacctgtaatcccagctacttgggaggctgaggcaggggaattgcttgaacccaggaggcggaggttgcagtgagctgagatcacgccattgcactccagccagggagacagagagagtctccrttttcttgtttttgtttttttttttttttttaaaaattaacagaacaactaaacttttcataatataaataaatacgtatctagatcaaatatcaaatgttgctgagttattgatgagtagaaaaatctgtacctttagttatttgtgagggtgtgctagtgtgactttcatgggaaccagagaccaattgttttcatctcttccaaattctgcgctcagtgacacaacactgacagcttgaaacacagcacgtttggagcatttatgtca

SEQ ID NO: 36594 - DNA, 1319 bp, Homo sapiens
ggtcaattttctaaattcatgttatctttcttagttattaattagtttctcccagattttggcattaggcggtgtgacagccttaatttctactggctttgtgaattgtgtttttaaaatatattatcattaatatttctttgaaagattgagaaatacggcataagtaaatgctaacaagacactcctttgaatgagaaatctcatatttacatatattacaataaatgcttactagagtttgtcttgttagttgaacacaatgtatagcagtagggatttttgatttcatgtgttttaaactttactcatcagtaatattattttctattatgtgattaaaatatctgtgacaaataactgtaagcttgctttgtacatgctataaatatctagcttaaaattatttttgaagcaccacttcaactttatatgccaatcttgaagaatattgctgccaaaaattatgacgaagtaactcaaagcatacatattcatggccattgcttcatatctctccttagaattcatgattacatccaatgtagtgacagaaactcaggggaagatatccaagaaagcaaaacctaagccgcagagaatagatccccatctttaacaggtattaaaaacataagcatgagaatgattgacatgcaggtggatattataaaagtgcaagactttgaaggctttttctgacatggtgaaaatgaaaaaggaaatccagactttaaaattcatatgcttattcttctgaagtttaaattttggccctgccacctgtgattaagattaatggtagattggaaggcctaggcgggtgtatcacgaggtcaggagattgaggccatcttgggtaacatggtgaaacctcatctctactaaaaatacaaaaaattagctgctggacgtggtggcatgcacctgtaatcccagctacttgggaggctgaggcaggggaattgcttgaacccaggaggcggaggttgcagtgagctgagatcacgccattgcactccagccagggagacagagagagtctccgttttcttgtttttgtttttttttttttttttwaaaattaacagaacaactaaacttttcataatataaataaatacgtatctagatcaaatatcaaatgttgctgagttattgatgagtagaaaaatctgtacctttagttatttgtgagggtgtgctagtgtgactttcatgggaaccagagaccaattgttttcatctcttccaaattctgcgctcagtgacacaacactgacagcttgaaacacagcacgtttggagcatttatgtca

SEQ ID NO: 36595 - DNA, 1319 bp, Homo sapiens
ggtcaattttctaaattcatgttatctttcttagttattaattagtttctcccagattttggcattaggcggtgtgacagccttaatttctactggctttgtgaattgtgtttttaaaatatattatcattaatatttctttgaaagattgagaaatacggcataagtaaatgctaacaagacactcctttgaatgagaaatctcatatttacatatattacaataaatgcttactagagtttgtcttgttagttgaacacaatgtatagcagtagggatttttgatttcatgtgttttaaactttactcatcagtaatattattttctattatgtgattaaaatatctgtgacaaataactgtaagcttgctttgtacatgctataaatatctagcttaaaattatttttgaagcaccacttcaactttatatgccaatcttgaagaatattgctgccaaaaattatgacgaagtaactcaaagcatacatattcatggccattgcttcatatctctccttagaattcatgattacatccaatgtagtgacagaaactcaggggaagatatccaagaaagcaaaacctaagccgcagagaatagatccccatctttaacaggtattaaaaacataagcatgagaatgattgacatgcaggtggatattataaaagtgcaagactttgaaggctttttctgacatggtgaaaatgaaaaaggaaatccagactttaaaattcatatgcttattcttctgaagtttaaattttggccctgccacctgtgattaagattaatggtagattggaaggcctaggcgggtgtatcacgaggtcaggagattgaggccatcttgggtaacatggtgaaacctcatctctactaaaaatacaaaaaattagctgctggacgtggtggcatgcacctgtaatcccagctacttgggaggctgaggcaggggaattgcttgaacccaggaggcggaggttgcagtgagctgagatcacgccattgcactccagccagggagacagagagagtctccgttttcttgtttttgtttttttttttttttttawaaattaacagaacaactaaacttttcataatataaataaatacgtatctagatcaaatatcaaatgttgctgagttattgatgagtagaaaaatctgtacctttagttatttgtgagggtgtgctagtgtgactttcatgggaaccagagaccaattgttttcatctcttccaaattctgcgctcagtgacacaacactgacagcttgaaacacagcacgtttggagcatttatgtca

SEQ ID NO: 36596 - DNA, 727 bp, Homo sapiens
ggtaatgatagcatttacagtggagcttaaaaagaaatataaagtttagaaacagaacaaaggaaatcaaaagcatgaaggcaaacaatctaaatactatgtcaggaatagtgaataatttgggttgccaggaattaggaacatagagcccagggtagggtgtgtaatgagaggcaaacttgtaaacacaaatggaaatcgtagaaagccaggtgaaggaatttcaactgtgagattctgtaagaggttagcttggaacagaatagaaatacagcaactgtctrttcagtgtatctatgaatcatttttgaatgggggtaatagttggaacgtggtgtttggagaagatacacatgatttcagtatggacaatgggatagagagagaagaagctgggagatgaggctattttagtagtgtattagttagatagcctatttactgtgtcagatatccctacagtctagcgtcaatactgtaaatgtttgcctctcatttttgcaaatccactgcagatgtttctggttgggtggctcatttgtacagacagctctcctccaaattgtgactcaagccctggtcttccttatgtgttgcggcttagccctcctctaggtctttggagtctctcctccatccagctcacaatttggaaaagagaaaggaaggtattctcaaaaggattctatggaccatccagaaagagcatataacacttctgcatgca

SEQ ID NO: 36597 - DNA, 663 bp, Homo sapiens
cctattaaaaaaggtacaaaaacatgaatgggaaggctacttagcaacttcatgaggattgttaacactgaggaggcagggaatttggatgattaagtgttgattttgaatgtaatattttattttttatagaaagatctgaagcaaaaatggcaaaatcttgatacatgattaacctgggtgcaggggtctataggtaattgttatctatgcacaggtgactggtatctaggtactctgggtagaattttttgtgttgaagtagttttcaattaaaactaaaaaagacaaatattgtgataaacatccccatatcccagcttttgtggtccctattaattactacctctgaataaatctcttacagtataatttttagtttaaagcatgaacacatttttctcttaattcatttttaaacacaagttattcatttttactatggaaaaactagaatgtagaattaaggaaaaaatacatccataattctgtgatccagggattatcacttttaagatcttgttgggtgtaattccaaacataccacatacttaggggtacctccctctctctctctctctctctctctmtagagagagagagagagagagagagagatttttatatatatattttttaatatatattatatatatatttata

SEQ ID NO: 36598 - DNA, 547 bp, Homo sapiens
aagccccagaagaccttttccactgccaaacccgttcgaccttcacctgtctgattcttctttcacctcccagactcctgtcaagaaataccaacastgccatttgtgtaagaaaagaaaaagagctctatgtatgtacacccgtgtatgtttgtatgcttgtttatgtgtagctttttcgctatactcctaccaggctttgatgaggggaactgggaagtcatcagagaagggttgaaggaatcttaattttcactgtatgcctttttaaaaaaccttaaaaatattttccttgtccatataactcttattcatataagtaggtaattaaatcaatgataggtaaatacaagacattaaaactaaaaaggaaatacctccttctctaaatctagtaagagtctcccaagcaatgttagttttgggatcatttgtacctcactgtacatagtgtacatagctttcacttctctgtggcatctgccagtctgtttcctaaattatttttatgagtaagttttcttctattggacttttagctcttata

SEQ ID NO: 36599 - DNA, 547 bp, Homo sapiens
aagccccagaagaccttttccactgccaaacccgttcgaccttcacctgtctgattcttctttcacctcccagactcctgtcaagaaataccaacactgccatttgtgtaagaaaagaaaaagagctctatgtatgtacacccgtgtatgtttgtatgcttgtttaygtgtagctttttcgctatactcctaccaggctttgatgaggggaactgggaagtcatcagagaagggttgaaggaatcttaattttcactgtatgcctttttaaaaaaccttaaaaatattttccttgtccatataactcttattcatataagtaggtaattaaatcaatgataggtaaatacaagacattaaaactaaaaaggaaatacctccttctctaaatctagtaagagtctcccaagcaatgttagttttgggatcatttgtacctcactgtacatagtgtacatagctttcacttctctgtggcatctgccagtctgtttcctaaattatttttatgagtaagttttcttctattggacttttagctcttata

SEQ ID NO: 36600 - DNA, 628 bp, Homo sapiens
acactcttaaatttttttaaaaaaccacattttaaacatgtttaacaggttaagctataaaaggagatgaacgatacttgccttatttattaacttatccatggggcctaccacaatgagtgggagacagaaaataaagtcttgttgaaagaataaatcaaggaatcaatggacaaatgaaccaggaattattgcatgaaatcaagtgtttttgaagggactcaactctttatgtaaatacyatactgctcaaagcctggggaatacgtcaatgacttcacagcattcctcctgcccttccctgactgctgtccctcagttttaaataaactcaatatcaaataatcctaatttcaataggacaagttgtagtttccaaaagaatcagttttaccaaaacagcatggtactggttaaaaaacataaagccgaaaaacagacacattgaccaacagaacaaaataaagatctcagaaataacaccacacatctacaaccatctgatctttgacaaacctgacaaaaacaagcaatggagaaaatttttttatttaataaatggagctgggaaaactggctagccacatgcagaaaactgaaactggaccccctccttacaccttataca

SEQ ID NO: 36601 - DNA, 628 bp, Homo sapiens
acactcttaaatttttttaaaaaaccacattttaaacatgtttaacaggttaagctataaaaggagatgaacgatacttgccttatttattaacttatccatggggcctaccacaatgagtgggagacagaaaataaagtcttgttgaaagaataaatcaaggaatcaatggacaaatgaaccaggaattattgcatgaaatcaagtgtttttgaagggactcaactctttatgtaaatactatactgctcaaagcctggggaatacgtcaatgacttcacagcattcctcctgcccttccctgactgctgtccctcagttttaaataaactcaatrtcaaataatcctaatttcaataggacaagttgtagtttccaaaagaatcagttttaccaaaacagcatggtactggttaaaaaacataaagccgaaaaacagacacattgaccaacagaacaaaataaagatctcagaaataacaccacacatctacaaccatctgatctttgacaaacctgacaaaaacaagcaatggagaaaatttttttatttaataaatggagctgggaaaactggctagccacatgcagaaaactgaaactggaccccctccttacaccttataca

SEQ ID NO: 36602 - DNA, 628 bp, Homo sapiens
acactcttaaatttttttaaaaaaccacattttaaacatgtttaacaggttaagctataaaaggagatgaacgatacttgccttatttattaacttatccatggggcctaccacaatgagtgggagacagaaaataaagtcttgttgaaagaataaatcaaggaatcaatggacaaatgaaccaggaattattgcatgaaatcaagtgtttttgaagggactcaactctttatgtaaatactatactgctcaaagcctggggaatacgtcaatgacttcacagcattcctcctgcccttccctgactgctgtccctcagttttaaataaactcaatatcaaataatcctaatttcaataggacaarttgtagtttccaaaagaatcagttttaccaaaacagcatggtactggttaaaaaacataaagccgaaaaacagacacattgaccaacagaacaaaataaagatctcagaaataacaccacacatctacaaccatctgatctttgacaaacctgacaaaaacaagcaatggagaaaatttttttatttaataaatggagctgggaaaactggctagccacatgcagaaaactgaaactggaccccctccttacaccttataca

SEQ ID NO: 36603 - DNA, 1046 bp, Homo sapiens
tgcttggttctttttctgtgaactctcggcccagaagcaagagccggagctagttttcacagccttccctgcgtgggttaaggatcacctgtgttactaataattgttgtctttggttacctcttcttgaacagtaacaaaaggtataaatcacccccaaggctcttaattactcccattaacagttgctttgttatcccggatgcagagcagtttcactgcactgtgagtacacacagtgagttcagaggtacaagcctggcattgagccaggagttaaaataagttatgctaagtggatggctcaattgttcccctggactccctctcggtctggggggatgtgggcctgagcgaatgctataggagtctaaggtctgtgcatcttctaggagttccttgggrtgttaatgctgccttttgtcacagtcattttatttttctcttcttctttagttttgcttctagcatcggtgttttcttcctccctccctctcctatcctgccctatgcctctacaaatctttctcccttttcttccatgcattctgtatggaactggcaaaagctatagttgtataactatagcttgttacaactggcaaaagctatagttgtaacattttttgacctaaaaggaagaagctgaggtaaaattaatctaagtagagagtttatttgggccaagcttgagggctgcaacccaagagcatagattcaagttgccctgaatacgcactgcaattagcagcagtgacaagtggatttgtaaaggcaaagaaaaggggaccgggagtggggtgatacaaagttgtttgtcagaaattctcattggtttacaaaagtaacattgattagtgattggctatacacctttaggctatagggtgtgggttacagggttcagtgtgacttcagtaggttaatttatagctatctgtgacaatagcaagccgtttcaagagatgaacacagagctcaaaagtagggaggtagaatgtgtttgctgtctcattttaatgcctctctgatcattaaaaggatcc

SEQ ID NO: 36604 - DNA, 1046 bp, Homo sapiens
tgcttggttctttttctgtgaactctcggcccagaagcaagagccggagctagttttcacagccttccctgcgtgggttaaggatcacctgtgttactaataattgttgtctttggttacctcttcttgaacagtaacaaaaggtataaatcacccccaaggctcttaattactcccattaacagttgctttgttatcccggatgcagagcagtttcactgcactgtgagtacacacagtgagttcagaggtacaagcctggcattgagccaggagttaaaataagttatgctaagtggatggctcaattgttcccctggactccctctcggtctggggggatgtgggcctgagcgaatgctataggagtctaaggtctgtgcatcttctaggagttccttgggatgttaatgctgccttttgtcacagtcattttatttttctcttcttctttagttttgcttctagcatcggtgttttcttcctccctccctctcctatcctrccctatgcctctacaaatctttctcccttttcttccatgcattctgtatggaactggcaaaagctatagttgtataactatagcttgttacaactggcaaaagctatagttgtaacattttttgacctaaaaggaagaagctgaggtaaaattaatctaagtagagagtttatttgggccaagcttgagggctgcaacccaagagcatagattcaagttgccctgaatacgcactgcaattagcagcagtgacaagtggatttgtaaaggcaaagaaaaggggaccgggagtggggtgatacaaagttgtttgtcagaaattctcattggtttacaaaagtaacattgattagtgattggctatacacctttaggctatagggtgtgggttacagggttcagtgtgacttcagtaggttaatttatagctatctgtgacaatagcaagccgtttcaagagatgaacacagagctcaaaagtagggaggtagaatgtgtttgctgtctcattttaatgcctctctgatcattaaaaggatcc

SEQ ID NO: 36605 - DNA, 1046 bp, Homo sapiens
tgcttggttctttttctgtgaactctcggcccagaagcaagagccggagctagttttcacagccttccctgcgtgggttaaggatcacctgtgttactaataattgttgtctttggttacctcttcttgaacagtaacaaaaggtataaatcacccccaaggctcttaattactcccattaacagttgctttgttatcccggatgcagagcagtttcactgcactgtgagtacacacagtgagttcagaggtacaagcctggcattgagccaggagttaaaataagttatgctaagtggatggctcaattgttcccctggactccctctcggtctggggggatgtgggcctgagcgaatgctataggagtctaaggtctgtgcatcttctaggagttccttgggatgttaatgctgccttttgtcacagtcattttatttttctcttcttctttagttttgcttctagcatcggtgttttcttcctccctccctctcctatcctgccctatgcctctacaaatctttctcccttttcttccatgcattctgtatggaactggcaaaagctatagttgtataactatagcttgttacaactggcaaaagctatagttgtaacattttttgacctaaaaggaagaagctgaggtaaaattaatytaagtagagagtttatttgggccaagcttgagggctgcaacccaagagcatagattcaagttgccctgaatacgcactgcaattagcagcagtgacaagtggatttgtaaaggcaaagaaaaggggaccgggagtggggtgatacaaagttgtttgtcagaaattctcattggtttacaaaagtaacattgattagtgattggctatacacctttaggctatagggtgtgggttacagggttcagtgtgacttcagtaggttaatttatagctatctgtgacaatagcaagccgtttcaagagatgaacacagagctcaaaagtagggaggtagaatgtgtttgctgtctcattttaatgcctctctgatcattaaaaggatcc

SEQ ID NO: 36606 - DNA, 1046 bp, Homo sapiens
tgcttggttctttttctgtgaactctcggcccagaagcaagagccggagctagttttcacagccttccctgcgtgggttaaggatcacctgtgttactaataattgttgtctttggttacctcttcttgaacagtaacaaaaggtataaatcacccccaaggctcttaattactcccattaacagttgctttgttatcccggatgcagagcagtttcactgcactgtgagtacacacagtgagttcagaggtacaagcctggcattgagccaggagttaaaataagttatgctaagtggatggctcaattgttcccctggactccctctcggtctggggggatgtgggcctgagcgaatgctataggagtctaaggtctgtgcatcttctaggagttccttgggatgttaatgctgccttttgtcacagtcattttatttttctcttcttctttagttttgcttctagcatcggtgttttcttcctccctccctctcctatcctgccctatgcctctacaaatctttctcccttttcttccatgcattctgtatggaactggcaaaagctatagttgtataactatagcttgttacaactggcaaaagctatagttgtaacattttttgacctaaaaggaagaagctgaggtaaaattaatctwagtagagagtttatttgggccaagcttgagggctgcaacccaagagcatagattcaagttgccctgaatacgcactgcaattagcagcagtgacaagtggatttgtaaaggcaaagaaaaggggaccgggagtggggtgatacaaagttgtttgtcagaaattctcattggtttacaaaagtaacattgattagtgattggctatacacctttaggctatagggtgtgggttacagggttcagtgtgacttcagtaggttaatttatagctatctgtgacaatagcaagccgtttcaagagatgaacacagagctcaaaagtagggaggtagaatgtgtttgctgtctcattttaatgcctctctgatcattaaaaggatcc

SEQ ID NO: 36607 - DNA, 1046 bp, Homo sapiens
tgcttggttctttttctgtgaactctcggcccagaagcaagagccggagctagttttcacagccttccctgcgtgggttaaggatcacctgtgttactaataattgttgtctttggttacctcttcttgaacagtaacaaaaggtataaatcacccccaaggctcttaattactcccattaacagttgctttgttatcccggatgcagagcagtttcactgcactgtgagtacacacagtgagttcagaggtacaagcctggcattgagccaggagttaaaataagttatgctaagtggatggctcaattgttcccctggactccctctcggtctggggggatgtgggcctgagcgaatgctataggagtctaaggtctgtgcatcttctaggagttccttgggatgttaatgctgccttttgtcacagtcattttatttttctcttcttctttagttttgcttctagcatcggtgttttcttcctccctccctctcctatcctgccctatgcctctacaaatctttctcccttttcttccatgcattctgtatggaactggcaaaagctatagttgtataactatagcttgttacaactggcaaaagctatagttgtaacattttttgacctaaaaggaagaagctgaggtaaaattaatctaagtagagagtttatttgggccaagcttgagggctgcaacccaagagcatagattcaagttgccctgaatacgcactgcaattagcagcagtgacaagtggatttgtaaaggcaaagaaaaggggaccgggagtggggtgatacaaagttgtttgtcagaaattctcattggtttacaaaagtaacattgattagtgattggctatacacctttaggctatagggtgtgggttacagggttcagygtgacttcagtaggttaatttatagctatctgtgacaatagcaagccgtttcaagagatgaacacagagctcaaaagtagggaggtagaatgtgtttgctgtctcattttaatgcctctctgatcattaaaaggatcc

SEQ ID NO: 36608 - DNA, 771 bp, Homo sapiens
aaattagccaggtgtggtggcacatgtctgtaatcccagctacttagggaggctgaggcaggagaattgcttgaacccaggaggtgtagattgcagtgagccaagattgtgccactgcactctagcctgggtggcagagcaacaatccatctcaaaaaaaaaaaaaaaaaaagctaacccagggaaacagtgccaggatccaaatggctatcagccactttgccacctgggtactaaccagctgtatctatttgaggatgtcttccctggaagccagttgagagaggctgtgcttgccagtacagatgtctgctcttcagagctttagcccccagcagggaggcagcaccccagaaggggagagccagaaagtctgattctctagcctgaggcccttgcaaggctgattggcaattgaccttaaagaaggtgactggaccaggctctctgctccttgtaatcattgtgattggcctaagtgactctgctgatctgccaagggcctacggcaaccgacattcccctttwatgtgttcttgttttcaggatcttgattgttagtgatagcaatggcctggctgctcagtacatgcctgtggttccaggcattcatgaatgcttccaacacccacctgaggcagacatagctccttcaggacctctcattgggccactcagaaggcagagataaaaaggctctctcaaaaggagcttcattttggagtacagatggtacctccctgggtggcagggcagttatcaaaaatgcat

SEQ ID NO: 36609 - DNA, 771 bp, Homo sapiens
aaattagccaggtgtggtggcacatgtctgtaatcccagctacttagggaggctgaggcaggagaattgcttgaacccaggaggtgtagattgcagtgagccaagattgtgccactgcactctagcctgggtggcagagcaacaatccatctcaaaaaaaaaaaaaaaaaaagctaacccagggaaacagtgccaggatccaaatggctatcagccactttgccacctgggtactaaccagctgtatctatttgaggatgtcttccctggaagccagttgagagaggctgtgcttgccagtacagatgtctgctcttcagagctttagcccccagcagggaggcagcaccccagaaggggagagccagaaagtctgattctctagcctgaggcccttgcaaggctgattggcaattgaccttaaagaaggtgactggaccaggctctctgctccttgtaatcattgtgattggcctaagtgactctgctgatctgccaagggcctacggcaaccgacattccccttttatgtgttcttgttttcaggatcttgattgttagtgatagcaatggcctggctgctcagtacatgcctgtggttccagkcattcatgaatgcttccaacacccacctgaggcagacatagctccttcaggacctctcattgggccactcagaaggcagagataaaaaggctctctcaaaaggagcttcattttggagtacagatggtacctccctgggtggcagggcagttatcaaaaatgcat

SEQ ID NO: 36610 - DNA, 771 bp, Homo sapiens
aaattagccaggtgtggtggcacatgtctgtaatcccagctacttagggaggctgaggcaggagaattgcttgaacccaggaggtgtagattgcagtgagccaagattgtgccactgcactctagcctgggtggcagagcaacaatccatctcaaaaaaaaaaaaaaaaaaagctaacccagggaaacagtgccaggatccaaatggctatcagccactttgccacctgggtactaaccagctgtatctatttgaggatgtcttccctggaagccagttgagagaggctgtgcttgccagtacagatgtctgctcttcagagctttagcccccagcagggaggcagcaccccagaaggggagagccagaaagtctgattctctagcctgaggcccttgcaaggctgattggcaattgaccttaaagaaggtgactggaccaggctctctgctccttgtaatcattgtgattggcctaagtgactctgctgatctgccaagggcctacggcaaccgacattccccttttatgtgttcttgttttcaggatcttgattgttagtgatagcaatggcctggctgctcagtacatgcctgtggttccaggcattcatgaatgcttccaacacccacctgaggcagacatagctccttcaggacctctcattgggccactcagaaggcagarataaaaaggctctctcaaaaggagcttcattttggagtacagatggtacctccctgggtggcagggcagttatcaaaaatgcat

SEQ ID NO: 36611 - DNA, 591 bp, Homo sapiens
tatataactttcttataagaaacaaaatttctttstttgctgagataactcaaagtttgtcaatacagttgtgttgatttctatatagcaaaatttaaaatgtacatgattgtacaaacacctcaggaagtcaaagctttgtttttaggtaaccaaatgggttcttccttcactttaatttacgtgtgcatctttattttatccaaaaccatctttcttcagcctcaacaatgtgatcagcactgtgtgaggcactgacgagaactagagaaggaaatacattcagttcctgtcattttgaaggtcccagcctgatgtgataaacaaaaatgcagagcacaacctggtaagtgttataatagaggagggtacattatattatgaaagcagaaacacaagagtaactgtcaaatgtctgtttttggaactggaaaataattgtgaattatgctaatagtgaaatctaggtccctgctattatagctgccttccctttcaaatgcctttactttaatggctttgtgaaataaaggctgtgactattgtagacaagctctgaaaagcaaacattgattttgaaaaaggaaatgc

SEQ ID NO: 36612 - DNA, 684 bp, Homo sapiens
tttccaccttagagtgaatgatattactaaccacttttgtaccaaaatctgaaataaaagtttttctcttgattcatcyctttcctttatctcatcatactgcaatagtcaccaagttccctttctcctacctctaaatatatctcaaagcaattctttattttgccttcatccatactgctcttctcccagcttacattatttcttacctaggtctatattatatgttttattaaggaatttattaggtaaaaataatcaaatagcctcaggagtgtaatcacatatatgaaaacctaactatcattcactgtactcccagattccatgagaccggtcacatttcttctgggctactatattttaggccttcatcatgcaggaagactgcttaagcctacactaaataccaaacttgagtgaatctgaataaatgagagccatcaaccaacttattaattatgtttttctttacagccccacagatagtgtgggttaacggagtcacatctgaaggaggaaaaggaaagtagcatatactgttactgattaaatgtctgactatcctgggtacattacttgtattattttgctacactacacagtttttgaggacaaagtttgtgtcctgttcagttctatagccccaccgcaatgtttttgatgtaataaatattcaataaa

SEQ ID NO: 36613 - DNA, 684 bp, Homo sapiens
tttccaccttagagtgaatgatattactaaccacttttgtaccaaaatctgaaataaaagtttttctcttgattcatctctttcctttatctcatcatactgcaatagtcaccaagttccctttctcctacctctaaatatatctcaaagcaattctttattttgccttcatccatactgctcttctcccagcttacattatttcttacctaggtctatattatatgttttattaaggaatttattaggtaaaaataatcaaatagcctcaggagtgtaatcacatatatgaaaacctaactatcattcactgtactcccagattccatgagacsggtcacatttcttctgggctactatattttaggccttcatcatgcaggaagactgcttaagcctacactaaataccaaacttgagtgaatctgaataaatgagagccatcaaccaacttattaattatgtttttctttacagccccacagatagtgtgggttaacggagtcacatctgaaggaggaaaaggaaagtagcatatactgttactgattaaatgtctgactatcctgggtacattacttgtattattttgctacactacacagtttttgaggacaaagtttgtgtcctgttcagttctatagccccaccgcaatgtttttgatgtaataaatattcaataaa

SEQ ID NO: 36614 - DNA, 726 bp, Homo sapiens
aataaatgcaaatgctcaagaaaccaaaagaatgtcagagtggcaggtcctagtgggtatgaaaagagtggaatctgataaagtcctattcataacttgatttaaaaaaagaagaagagtagaatctaattcaaaaggccatgttgttataggtcaattcaacagccatataaaatcttagtgtaaaattttatttatcttcttggaaaacagacttatatacttrtggttattttgcatcctggagttgtaaatgtcaaaatagttatcctaatgaagtaaactcacagagcgagcagacaaacagtaacttatgtccaattttaaacataaaaaatcttgaaaattgaaatcatttgtgtgtgcatgcacatataaatctttaccataaaatatataaaagattaatatctgtgtatacagatatttcatagaaataatttccaaagcctacattttctttcaagagtcatgtgaatttagaaatgttatgttattttaacatcccctagtggttctttgataaaactgggggattgcttgacaaatttaaaatgtaagtctaagtaaatacattttcttctcagaataaagtgtatattcaatttaccccaagcaaaaaggtaaaataaaataggacaaaataaagtaactgtttattcttataagacaacaaggtattaaaagagataaagcaactttccttcaaaatatacaatatttcac

SEQ ID NO: 36615 - DNA, 537 bp, Homo sapiens
tgagtaatttggaacccaaagtgaagatctttgataaagatttttttgtggttcgactggactgtgctgagtgcgggcactgggcttttcttctgatgttcattatggtgctgggaagctctgtctttgatttaaaataaaatagctaaaggctacacaattaagagttcagaataacatcttatttcagtttatgaattgatatgaattgtctaatttaaaaaatatttccctcacattaaaagcaaatttttaayatcaggctcgaagagcaaaatgattattcctcatgttttagctgaaattaattttaaaacatattaaacagaaaacctgctgacatgcctgtgaaactgatactcgaacttgctgttatgtaccagttttaattagtagcttaatgggttgcaattcttttcatggattatagcttcagatttgctttgggaggaatgaaggctacccacagaatttttttttttttgagacggagcctagctgtcacccaggctggagtgctatggcgcggtctcagct

SEQ ID NO: 36616 - DNA, 665 bp, Homo sapiens
ttgtttccaccaaggaactgctcttaaaattagttcatcccttgaatagctagtatttaccagagggaaaaacttcaaacagtacacagtgccaaataagtctctttcatcataaaccctttagtaccttttaaattataagccatgtaaatgaattgttttagaaaattcaatattaaaagtaaaaaagaaagcttccctctcattccaaccctaggggacccacactgacgctggttccttatatattctgccaaggatattcaaagcatataagaagcatggccggccgggtgcagtggctcatgcctgtaatcccagcacttcaggaggccaaggtgagcgaatcacttgaggccgggagttagagatgagcctggccaacatggcgaaaccccgtctctacaaaaaaaatgcaaaaataagctgggtgtggtggtgcatgcctgtagtcccagctactcgggaggcagaggcacaataatcgcttgaacccgggaggcggaggttacagtgagctgagatcatgccactgcactccaatctaggtgacagagtgagacyctgtctccaaaaaaaaaaaaaaaaaaaaaaaggagcatggccaagtgtggcttacaccttaaacccagcacagcactctgggagggtacaatgggaggatc

SEQ ID NO: 36617 - DNA, 672 bp, Homo sapiens
  misc_feature (1)...(672): n = A,T,C or G
tgggaacatgcacgttgggcaactcaaattttgttgcctttttccggtctgagaatgtctactaatgaccacaaagtgcatcaagnnnnnnnnnnnnnnnnnnnnnnnnnnnnnnnnnnnnnnnnnnnnnnnnnnnnnnnnnnnnnnnnnnnnnnnnnnnnnnnnnnnnnnnnnnnnnnnnnnnnccatcaaaccaattattatctgttaaaaattctttgtattacgtattaattttgacttgcaaataaatcgtagcaagtgggtgaatttacaaacacagaatccggaaataataaggatcaactgtatttgtcaactattgaaaaagaattctgtttcctgtggggctgttctttactattccactgcacttgcctgttcttttttgtccctatccttagttcaaaaccctgctcaggaaccaacctccccaccacaccattacctctgcttcttataatcatttcttttttgcaaaaatcagatgatactgaatttattgatattattctccttttctgccctatggagctccttgaggtcaatggccatgtcctaatacatataactaactgtcaggcctctgagcccaaactaasccatcatatcgccggtgacctgcacgtacacatctagatggccagttcctgccttaactgatgacattcc

SEQ ID NO: 36618 - DNA, 672 bp, Homo sapiens
  misc_feature (1)...(672): n = A,T,C or G
tgggaacatgcacgttgggcaactcaaattttgttgcctttttccggtctgagaatgtctactaatgaccacaaagtgcatcaagnnnnnnnnnnnnnnnnnnnnnnnnnnnnnnnnnnnnnnnnnnnnnnnnnnnnnnnnnnnnnnnnnnnnnnnnnnnnnnnnnnnnnnnnnnnnnnnnnnnnccatcaaaccaattattatctgttaaaaattctttgtattacgtattaattttgacttgcaaataaatcgtagcaagtgggtgaatttacaaacacagaatccggaaataataaggatcaactgtatttgtcaactattgaaaaagaattctgtttcctgtggggctgttctttactattccactgcacttgcctgttcttttttgtccctatccttagttcaaaaccctgctcaggaaccaacctccccaccacaccattacctctgcttcttataatcatttcttttttgcaaaaatcagatgatactgaatttattgatattattctccttttctgccctatggagctccttgaggtcaatggccatgtcctaatacatataactaactgtcaggcctctgagcccaaactaagccatcatatcsccggtgacctgcacgtacacatctagatggccagttcctgccttaactgatgacattcc

SEQ ID NO: 36619 - DNA, 998 bp, Homo sapiens
tttgtaagtgccttataatttgggcttttaaaaattgcctgcgctttcttcccttaatttagcccatttactcccaaaataaagaggctgtgtttctttttttttttttaaggcattgtttatctgtaacgtttgtatctaactttactgtatctaattacactttcagtattatacaaaaatttttttgtttttcttgtccaaacttaagatcggttgtaattttattggccaacatctacttcattaaatacattgactttgtttatgtagaaatatttagccagaaggagttgaggatgcagtggtgagatgtggattttgttactgtatgatgtgaataggtaccttctctcagcctcagtttcctcttgatcttgtgaggctgatgaaaacaggaaaatcacctcacacagtggtacttagttgccactcaataaatattagaccttccctgaatctctgtgttcctcaccaaaaatatattggacaaatgattggtgaatatgaagcactttataaacctggataatactatataaatgctgtttgtatggttgagtattagataatcatattggattctctaaaactgaaaacttgacctagggatagtctttaacttagtgtatggaccctgtgctaatgtagaagacaacagtttataatgtaaayagtcacgttaaaattaatcttatccagcaagttattgttttttctattaaatattgaactcactgtttatgaagtgttgtgggtaccatctttactgtgtgaaatagaagtttaaaatacagttcttgaacccaaggcactaacagaaatttctgtaatggtggaaattttctgtgtctgtgctgttccatatggtagccactagccatagtagctattgagcaattgaagtgtccctaatatgaacagggaccacattttaaattttatttaatttaaatggatttgtacgtagtggctccatgtgcctagtgactactgtg

SEQ ID NO: 36620 - DNA, 590 bp, Homo sapiens
aacaactgcccagttggtcccagtcaatccacagaactgccagaaataataatattgttttaagccactaagcttgaggtttatttgttacacaacaatacataactagcatacctaatttttgaccaatgaactcattttaaaacaaaaggagcacaggaatagggttcatacccatgggattcactgaccataacataccccaccattctaaagcagtttacttaattaggcagcagaatgacctactgaagtctcaaatacagtgctagattgggcagcacaatgtgggttgtggtgctgtcttacaagatcgatatgcaatctgaagcaccatccagtgcattatgtcatattttccatacctagaatacatgtatccagggaccaagrgccagtggcttctcttaccattacccctaatgaacctcacaatttttttcactcaccaaagcaaaatgagtgaactgtactgaattgtctgttggcaacttgggattgtcacccaggcattatcattacccctttctaaattctccttcataacatagcagagtttgctagtaagaacacaagatttggaaagcaga

SEQ ID NO: 36621 - DNA, 639 bp, Homo sapiens
ttgtatggtatatatgaaattaggattatattgtattgtatttgtatttggtacttgttttggtcattacatatccacattttcctctatcatcaattagtcttctaaaataagaaacgtgtggtttttgggagtgggtaggaagattgtcaaaatatatycacaaccatgtaaatgataataatagacatggtcacttaaaaaaatcaatatatctgtaagaaaattagtatgcacataatatatttggctaattaacaaacaaatatatcagctccttattaatatataatttaaaaaacttttcttaggccaggtgcagtggctcaagcctgtaatcccagcactttgggaggccgaggtgggtggtcaggagttgaggtcaggaattcgagaccagcctggccaacatggtgaaacccagtctctactaaaaatagaaaaattagccaggtgtggtggcgtgtgtctgtaataccagctactcaggaggctgacacaggagaatcgcttgaacctgtaccactgcactgcagcctgcacgacagagtgagaatccgtctcaaaaaaaaaaaaattcttaaattacaaatgttactttgctctttacattacatagtcaaattgtcctatgaaaat

SEQ ID NO: 36622 - DNA, 1836 bp, Homo sapiens
ctgacatgcacaaatccttgcacaagacaggaagaaaataaagtatacctgttgtttcaaaccgtgtataaagttgaagtcattaacctatgtgtagcaggaggtaactaaagggcattaagcacaggcattacatacttagatatgcattacaaaagaaagaaagccttcctgctgcgatgtagagaaaagaagtgagagtaggaacaatgagacttcttaagatgttattgcaatgacctaattatatgagatttactgtttacaatactgttaacctttgtattagtttgcattaagatttggaaagataggatagaaagaaatgagtgagtcaaagcagtgattttcaataacatcaacatttcttagagttttaaaattattattattaattccgtgtctgggatttacaccagcctaattgaatcaggatctctggagatgggactcagagaagtatgtattttgttaacctctctatactattctaatattcaggagaaatgaaaactactagataaatacttagaaggaagaatagataagacttgattgattaaatgtggaatttagaaagaggtaggaattaaagatgagtcccaagtttctaattttttctctggacagatggtaggaacatttaatgagacaaaaatgcttgagagagagcccatttttggtgaaaagatggattcatcttggtcatgttgagtttcaggatcctaatatacatccaaatgcagaggtagggtagaaaattgggtttgagatttgggactcaaaaaaaataatctgggttagaggtgtcaaactagggaacattatgcatagatggatggtacctgatatttggggagtgtatatagactgcagaaaatgttaacagtgagaagaayatcttagattaaataatgaggaattccaacactgaatatttggatagagtagcaggagcctggaaggaaaactgaaaatgaatgttgtgtgctcaaagccaagggaacagatttcagaaaagaagtctgtggtcaaatatgtttacttctactaagagacacagtaatacaagtactgaatatgtctacatgttcatctggaaaaacccaggtctagtgcaactcagcctctacttatctctaatctatactaaaacagcaaaaagtgcctacagaaatgttttttaaaataaaaattaaaaaagaacaatcctaccaaatttcccttggaaattttatttctcatgctctcacattttctcttcaatttcacatctcttcatcttgtagtcctgcagccttcattttccacttgttattctcaactgatggactgattcttttttattaagaaaatagaagcaaacagaagacagctattttatcctcccaattctttgtctatttcctatctgcatcagtactcacaatcttctcttttcttcttgttgccatggagaaatgtccttatccctatcttatgccaacccctccagttttaaactgaatcttgttttatcaaatattactgttgaccaaagctccctcaatcctttcatgaacatttcttcctctctattgtactctctcctccatccctttaatgttcttctgtattcaaatatgcaaacaaatcttctgcctgaaaaaatctcttttgacctccaactgcctttatctacctcatcatttctttttcctctttattacaaaatgttttaaaagagttattatttcttctatatctgcttgtccaaactcccattttacctgtttttggaatgcaaatgcaggttgtgttaatcctattccccaatttgtgacacaccatcaacat

SEQ ID NO: 36623 - DNA, 1836 bp, Homo sapiens
ctgacatgcacaaatccttgcacaagacaggaagaaaataaagtatacctgttgtttcaaaccgtgtataaagttgaagtcattaacctatgtgtagcaggaggtaactaaagggcattaagcacaggcattacatacttagatatgcattacaaaagaaagaaagccttcctgctgcgatgtagagaaaagaagtgagagtaggaacaatgagacttcttaagatgttattgcaatgacctaattatatgagatttactgtttacaatactgttaacctttgtattagtttgcattaagatttggaaagataggatagaaagaaatgagtgagtcaaagcagtgattttcaataacatcaacatttcttagagttttaaaattattattattaattccgtgtctgggatttacaccagcctaattgaatcaggatctctggagatgggactcagagaagtatgtattttgttaacctctctatactattctaatattcaggagaaatgaaaactactagataaatacttagaaggaagaatagataagacttgattgattaaatgtggaatttagaaagaggtaggaattaaagatgagtcccaagtttctaattttttctctggacagatggtaggaacatttaatgagacaaaaatgcttgagagagagcccatttttggtgaaaagatggattcatcttggtcatgttgagtttcaggatcctaatatacatccaaatgcagaggtagggtagaaaattgggtttgagatttgggactcaaaaaaaataatctgggttagaggtgtcaaactagggaacattatgcatagatggatggtacctgatatttggggagtgtatatagactgcagaaaatgttaacagtgagaagaatatcttagattaaataatgaggaattccaacactgaatatttggatagagtagcaggagcctggaaggaaaactgaaaatgaatgttgtgtgctcaaagccaagggaacagatttcagaaaagaagtctgtggtcaaatatgtttacttctactaagagacacagtaatacaagtactgaatatgtctacatgttcatctggaaaaacccaggtctagtgcaactcagcctctacttatctctaatctatactaaaacagcaaaaagtgcctacagaaatgtttttyaaaataaaaattaaaaaagaacaatcctaccaaatttcccttggaaattttatttctcatgctctcacattttctcttcaatttcacatctcttcatcttgtagtcctgcagccttcattttccacttgttattctcaactgatggactgattcttttttattaagaaaatagaagcaaacagaagacagctattttatcctcccaattctttgtctatttcctatctgcatcagtactcacaatcttctcttttcttcttgttgccatggagaaatgtccttatccctatcttatgccaacccctccagttttaaactgaatcttgttttatcaaatattactgttgaccaaagctccctcaatcctttcatgaacatttcttcctctctattgtactctctcctccatccctttaatgttcttctgtattcaaatatgcaaacaaatcttctgcctgaaaaaatctcttttgacctccaactgcctttatctacctcatcatttctttttcctctttattacaaaatgttttaaaagagttattatttcttctatatctgcttgtccaaactcccattttacctgtttttggaatgcaaatgcaggttgtgttaatcctattccccaatttgtgacacaccatcaacat

SEQ ID NO: 36624 - DNA, 1836 bp, Homo sapiens
ctgacatgcacaaatccttgcacaagacaggaagaaaataaagtatacctgttgtttcaaaccgtgtataaagttgaagtcattaacctatgtgtagcaggaggtaactaaagggcattaagcacaggcattacatacttagatatgcattacaaaagaaagaaagccttcctgctgcgatgtagagaaaagaagtgagagtaggaacaatgagacttcttaagatgttattgcaatgacctaattatatgagatttactgtttacaatactgttaacctttgtattagtttgcattaagatttggaaagataggatagaaagaaatgagtgagtcaaagcagtgattttcaataacatcaacatttcttagagttttaaaattattattattaattccgtgtctgggatttacaccagcctaattgaatcaggatctctggagatgggactcagagaagtatgtattttgttaacctctctatactattctaatattcaggagaaatgaaaactactagataaatacttagaaggaagaatagataagacttgattgattaaatgtggaatttagaaagaggtaggaattaaagatgagtcccaagtttctaattttttctctggacagatggtaggaacatttaatgagacaaaaatgcttgagagagagcccatttttggtgaaaagatggattcatcttggtcatgttgagtttcaggatcctaatatacatccaaatgcagaggtagggtagaaaattgggtttgagatttgggactcaaaaaaaataatctgggttagaggtgtcaaactagggaacattatgcatagatggatggtacctgatatttggggagtgtatatagactgcagaaaatgttaacagtgagaagaatatcttagattaaataatgaggaattccaacactgaatatttggatagagtagcaggagcctggaaggaaaactgaaaatgaatgttgtgtgctcaaagccaagggaacagatttcagaaaagaagtctgtggtcaaatatgtttacttctactaagagacacagtaatacaagtactgaatatgtctacatgttcatctggaaaaacccaggtctagtgcaactcagcctctacttatctctaatctatactaaaacagcaaaaagtgcctacagaaatgttttttaaaataaaaattaaaaaagaacaatcctaccaaatttcccttggaaattttatttctcatgctctcacattttctcttcaatttcacatctcttcatcttgtagtcctgcagccttcattttccacttgttattctcaactgatggactgattcttttttattaagaaaatagaagcaaacagaagacagctattttatcctcccaattctttgtctatttcctatctgcatcagtactcacaatcttctcttttcttcttgttgccatggagaaatgtccttatccctatcttatgccaacccctccagttttaaactgaatcttgttttatcaaatattactgttgaccaaagctccctcaatcctttcatgaacatttcttcctctctrttgtactctctcctccatccctttaatgttcttctgtattcaaatatgcaaacaaatcttctgcctgaaaaaatctcttttgacctccaactgcctttatctacctcatcatttctttttcctctttattacaaaatgttttaaaagagttattatttcttctatatctgcttgtccaaactcccattttacctgtttttggaatgcaaatgcaggttgtgttaatcctattccccaatttgtgacacaccatcaacat

SEQ ID NO: 36625 - DNA, 582 bp, Homo sapiens
ctgagcattcttcaggaactttcattcacatatacacgaaaattatgtctctaaagtacctcaaacaccatatattgtctacaatcaatagtaatagcttgttaaaagcttttagtagttcaaccaaaacaatgcaaatatttcttaatagggttgtgctattgtcagtgtctatttctttytatgtttcattaaaatgtatataaatactcatgaatattattctttcattttgtaatagatcttttgttaatatgaattttcttcttaggcccaattcatgttgtttgcatttagttcaaatttatctgatattaatattactcttgctttattttttcatattagcttgtatctttgctcatagtcttattttagccattttaatacatttcttgcttcaaaattttttcatagaaatggagctttgttttctgatacatcagaaggatttttcaatttcctaaggaaggtgattcaatttacatttcttatggtagatttatttatttgtttatttatttgcttctgagattttctatgttttcctgtttggccattttcctctctctgttttctatc

SEQ ID NO: 36626 - DNA, 582 bp, Homo sapiens
ctgagcattcttcaggaactttcattcacatatacacgaaaattatgtctctaaagtacctcaaacaccatatattgtctacaatcaatagtaatagcttgttaaaagcttttagtagttcaaccaaaacaatgcaaatatttcttaatagggttgtgctattgtcagtgtctatttctttctatgtttcattaaaatgtatataaatactcatgaatattattcyttcattttgtaatagatcttttgttaatatgaattttcttcttaggcccaattcatgttgtttgcatttagttcaaatttatctgatattaatattactcttgctttattttttcatattagcttgtatctttgctcatagtcttattttagccattttaatacatttcttgcttcaaaattttttcatagaaatggagctttgttttctgatacatcagaaggatttttcaatttcctaaggaaggtgattcaatttacatttcttatggtagatttatttatttgtttatttatttgcttctgagattttctatgttttcctgtttggccattttcctctctctgttttctatc

SEQ ID NO: 36627 - DNA, 647 bp, Homo sapiens
caacaaatatggtacagtgtattgctcaggtgatgagtacaccaaaatttcacaaatcgccactgaagaacttatgttaccaaaaaccacttataccccaataatttatggagaaaaataaaatttaaaattattttttaaatttttcgtgggtacacatagtagttatgtatgtttataaggtatatgagatgttttgatacaaacatgcagtgtgaagtaagcacatcatggagaatggggtatccatctcctcaagtatttatcctttgagtcacaaacaatccaattacactctttaagttactttaaaatatacaattattaactatagtcaccatattgtgctattgaatagtaggtcttattctttttttttttcagtacccattaaccatccccacttcccccacgaagggatttaatataggtatttgggacttacacaatcattacaccataagaagaatggggggaaggaagggcaagctacttctgaatggttttatccattaaaggaattggttgtatgcaacagaaatggactgtggctggttgaagcagaaaaagactttawtgtgtacagtgtcgaagtaataggaggatcttctggatatcattactgagccaaggattgttcagatgca

SEQ ID NO: 36628 - DNA, 609 bp, Homo sapiens
cctggccatgtgtgtttttatctttaaattttattttaattgatggatagtatagaaagatgagttcttcagcctatctcttgacactgtcggacagattgaaggagattgtgcctgtgtattagcttttggctaatagtgaatgcattgttgttactgtgtaaattacttttactagcttgtggtggccaagcacataaaaattagacagaatttttttctgaaattttcacatatcttgaaaaattaaatattatttacctaaaaacagttttataatttttccctaaaataaggaatctaaagaacacagaaaattttggaacaakataactatgtttttctttttatctttcttaattcgccttctgtaatacatctgtttctcaaaacaaataagaaaatgataatatcttcaacagtgacttgtgctttctttcagaagtgtgttagtgaatatttacagggaaaaaaacagttcatgaacttgctttttttttctcctcccttgttctcacttgggtgtggtgtgaactggatgcccctacatattttcgagaccttctttattccgctgctgcggttaacttagcatctgcttaggcagca

SEQ ID NO: 36629 - DNA, 555 bp, Homo sapiens
gtggatgaacagttgttctccatttcacagatatcaccactgcaaaaactgaggccacggggaaagtaaggggatcaggtgactacttaaggtgatggaaattcttgctatgtatttcttttttttagttragacagagttttgctctgccacccaggtcggagtgcagtggctcgttattgcctaactgcaacctccacctcccaggttcaagcaattctcctgcctcagcctcctgagttgctgggactacagtcctgtaccactacacccggctttttttttttttttttttagtagaggtgaggtttcaccatgttggccaggctggtctcaaactcctgacctcaggtgatcggcccgcctcggcctcccaaagtgctgggatgagccaccacgcccagcctatgtatttatttacgaaagaatggatgcaggctgggcgcatccattcttgagtaaatcagtgaaccaagcttgcaccattgcactccagcctgggcaacagagccagatgctgtctccaaaaaaaaaaaaaagtatgcaaaaataaaa

SEQ ID NO: 36630 - DNA, 551 bp, Homo sapiens
tagttctccctccatccaccatcacctgtgatcttgagtcagtcatctcagagccctctctagactttactcctattagctgtaaaatgaagaacggggaaacaaaataattttcctaagtcggcctggtgctagcattctagaattctgaaaacagcatgatgtgcatgaaagagtatggactctggagccacgctgcctgagtttaaatcccagctctgccagaattagctgtctgtcactgggcaagttacttgacctctttgtgcctcaatttcctcacttgtaagagacaagaatracatgctttacatcatggagctatcctgatgatgaaatgatctgttagctgaagttacggtagtgggcttattctatatccggtaccttttgagtgtatttttgtggtgaatcacctaaagagggtaactactctggccaccgcttcctacagtgcttcccctcctaggcaaaaggtagataatattttctttcttctttgtagagacgagggtctcactttgttgcccgggctggtcttgaacttcttg

SEQ ID NO: 36631 - DNA, 551 bp, Homo sapiens
tagttctccctccatccaccatcacctgtgatcttgagtcagtcatctcagagccctctctagactttactcctattagctgtaaaatgaagaacggggaaacaaaataattttcctaagtcggcctggtgctagcattctagaattctgaaaacagcatgatgtgcatgaaagagtatggactctggagccacgctgcctgagtttaaatcccagctctgccagaattagctgtctgtcactgggcaagttacttgacctctttgtgcctcaatttcctcacttgtaagagacaagaatgacatgctttacatcatggagctatcctgatgatgaaatgatctgttagctgaagttacggtagtgggcttattctatatccggtaccttttgagtgtatttttgtggtgaatcacctaaagagggtaactactctggccacygcttcctacagtgcttcccctcctaggcaaaaggtagataatattttctttcttctttgtagagacgagggtctcactttgttgcccgggctggtcttgaacttcttg

SEQ ID NO: 36632 - DNA, 523 bp, Homo sapiens
atttttgtagtgcatcaagggattatggcttttggatatttccttgatgtgtttctatgaaactgagcccctgattaggctgtcagcagatactgtattacattgattgttttagttggtacagacacacgtgtcagctagagcagtttctcccttttgctgagaagggtgaagcttttagataatatttagttatggaggatgtttgtgccactgtttaaagtgatttgaccctgtgtcctcctccaaccttaagttagaaggcctattttcctctattggtctaagggcatgtaatgaagtcttcagcacacaagctttctccctccctgtaggtgagtggttattattttttcttttgtcacgggcttggatatcatgttcttatgtgtaaacactggaccatatagtactcamaatactttggcaaaaaccaaactaactgaaaactgaaggcatgcctttatgtcttatttccaacttggaccatgatcttgccccttgaaatcttcaggctgttttg

SEQ ID NO: 36633 - DNA, 523 bp, Homo sapiens
atttttgtagtgcatcaagggattatggcttttggatatttccttgatgtgtttctatgaaactgagcccctgattaggctgtcagcagatactgtattacattgattgttttagttggtacagacacacgtgtcagctagagcagtttctcccttttgctgagaagggtgaagcttttagataatatttagttatggaggatgtttgtgccactgtttaaagtgatttgaccctgtgtcctcctccaaccttaagttagaaggcctattttcctctattggtctaagggcatgtaatgaagtcttcagcacacaagctttctccctccctgtaggtgagtggttattattttttcttttgtcacgggcttggatatcatgttcttatgtgtaaacactggaccatatagtactcacaatactttggcaaaaaccaaacyaactgaaaactgaaggcatgcctttatgtcttatttccaacttggaccatgatcttgccccttgaaatcttcaggctgttttg

SEQ ID NO: 36634 - DNA, 1301 bp, Homo sapiens
  misc_feature (1)...(1301): n = A,T,C or G
gtacatacatgccaattttgccaataaattatgtacagtatagttatacatatgaaaaacaaatctgctcttcctcccagtttcttcttgattgcacttgcattccttgtcttcctctcttcacctgactatgctgttaccttaggccttttctatcctttccctctctgttttatggctctgctcacttcgttgtggcttagtggaactgaaggaggccttggggctggtggagctgggtatgccagccctgagggctgtgtcttcagccagatcatttaatctctgctcctcagtttactcatccataggaaaagctaacatttttcaggtgcttactcaggccaggcatgttacatatattagttcatttaatcctcacagtaacactacgaggttggtaacgttagccccacatgcacacactgaggtacagaaaaattaaatcacctccccaggatacacaatgacagtagctcctctactttttccagtcttgtggcttcagagtctgtccttttagcactatgctatgctgtttctttggggaagacaaaaaagcctcaaactgaattccacatacctgtgtaacagtactcttttgttgattagagataacatgggaggtggaggttggacatacagaatgcctggcacatagtaggtgtagctgtcatcaaactcctctaatgagtgtcaccctaagcttcctccgcacagctccattaactctggcaagtgtgtctgcctccatagcccacagggatcnnnnnnnnnnnnnnnnnnnnnnnnnnnnnnnnnnnnnnnnnnnnnnnnnnnnnnnnnnnnnnnnnnnnnnnnnnnnnnnnnnnnnnnnnnnnnnnnnnnngttgtctgtcttctccatttcccaatctgtgaatggtactggtgtttctcagtaggagatgccaagtaaatgaagctgcccagcaggaaaccctgtttggcaattctaacaaggcttgaagaattggtttcctcattagaaacaacaaaagttttctatctgatgaattcgcaagttcctgatctggtgctctcctgaacaaaatattgatgtgtaagaaatacaaatgaaaagtaaatcctyagtaatgatggtattaagcattcacctagattataggagataaaaattccatttccttgcaatgtattgtctctattgatagactttaactctgggagtggaaggatttttatctcctgagtggggattaccacatgatgaaatcctaccatgtgtctatgtccttcatgcgtactatctcactgaaatc

SEQ ID NO: 36635 - DNA, 1265 bp, Homo sapiens
atcttgcatatgtaagcacccatgcaaataccatccagatcaagatgataacatttccatcacactctcatgccccttctttgtcattactcactccactattcagacatttatccctattaatttagcctattttttgaattttatataaatggaatcctayggtgggtactctgtgtctgggttctttcactgaacatgtttgtgagactattgttgttatcacttttttctttcctatcactgtgtattccatgtcattatcattcttaaaataatactttaacagggcatagaattctgggtcgacggttattttttctcagattttgaagttgttattccaatgtgttttaggcttcactgttgttcagagaatgctgccagttgaactgctattcctttgatagcaatttgaccatttcctctggttatttatttttcccatttttggttctattaaaaatgttctattcatctttagtgttctaatacttccataggttatatcacagtgtgggtttgattttagcaatgctaaaagaattgatagaagtcaatgtgcttcatcaatccaacatacatctttccattgagacaatctcccccaagcatctgcatcactagagtagttttggcccccacaccagtataccaggacatggaaagagcttgatgggtggagtttctcaagtccccttcttgcgaaaggggcagcccttgaggaggtcagcaatatatggggattaagttttagctccctgcttgcccaggtttagtcacatcaactgcccctgcatgcgtggacattaacacaagggactctccaaatcaaacagctgccaaggccatgccttcagctttcttctctggttcttttgaactgccacttcttttttcatactttggtgatttctctttctttcttttgatctttattatgactttttaaaaagtatattttaaccaatttttctatttgaggttaaaggagactctgcatggactttgtccaccatgtttccagaatctaaatttgtttcactccttatctgccagatgcccatgcccacaccacacttagtggctcttaactaagagcaagagccctgaagttatggagacctggatttgaatcactgcttcactactggctagctttttgaagctggataggttatttaacttctctgaaccttggtttcttcatctccaaaaaggggatgatcaaaattcttacctcacagcattgttgtaaagatgaa

SEQ ID NO: 36636 - DNA, 1434 bp, Homo sapiens
agtttcagctttctacatatggctagccarttttcccagcaccatttattaaatagggaattctttccctatttcttgtttttgtcaggtttgtcaaagatcagatagttgtagatatgcggcattatttctgaggactctgttctgttccattggtctatatctctgttttggtaccagtaccatgctgttttggttactgtagccttgtagtatagtttgaagtcaggtagcgtgacgcctccagctttgttctgttggcttaggattgacttggcaatgcaggctcttttttggttccatatgaactttaaagtagttttttccaattctgtgaagaaagtcattggtagcttgatggggatggcattgaatctataaattaccttgggcagtatggccattttcacgatattgataatattttatgcttaaataataatagtaataattgggccgggtgcagtggctcacacctgtaatcccagtactttgggaggctgaggccagtggattgcttgagcccaggagtttgcaaccagcctgggcaacatgttgaaaccctattgctacaaaaaaatacaaaaattagccaggagaggtggtgcacacctgtagtctgagctacttgggaggctgaggtgggaggatcacttgagcccaggaggttgaggggctgcaatgagctgagattgcaccactgcactccagcctaggcgacagaatgaaaccctgtcacaataataataattgtgtaaagttctatacactggacactcagagtaatgaatagaccgtgggcatttcatagtctccctgtgctgctctaccctgacttggcttccctcctgtctccagaggtgaccactatccataatattgcaaatagtctttttggcttattatttatcacgaagcagtatttttgcttgttttgctgctttttcactttctatgaaagaaaataaatggatccatgtttcaaaaaactacttgtaaagtttttgtgaatgctttttatattacctaaaataagagcaaaaccagcacaccaactacaaaaaattaggaggacccttatgctgtttaaacatttgttccctagaaacctcacaggatctctttctccagagttccaaaaagagatcagtacattcatttgctttatggggcaggctatgcatatatagagaggattttttttaatgtgaatttattaatccaagtctattctgctgaccaaaattttcagcctggagtgaagcaagtaaagttgtttgcgaagaaaggtccacagaaggaggggaaactggttggagaagcaatcactgcattagagataggacaaaatgaggctctgtcgtaatagttcacaaacttgggcatgctcagaactattctgggaactttttcaaaatacagatccctgtgcct

SEQ ID NO: 36637 - DNA, 1434 bp, Homo sapiens
agtttcagctttctacatatggctagccaattttcccagcaccatttattaaatagggaattctttccctatttcttgtttttgtcaggtttgtcaaagatcagatagttgtagatatgcrgcattatttctgaggactctgttctgttccattggtctatatctctgttttggtaccagtaccatgctgttttggttactgtagccttgtagtatagtttgaagtcaggtagcgtgacgcctccagctttgttctgttggcttaggattgacttggcaatgcaggctcttttttggttccatatgaactttaaagtagttttttccaattctgtgaagaaagtcattggtagcttgatggggatggcattgaatctataaattaccttgggcagtatggccattttcacgatattgataatattttatgcttaaataataatagtaataattgggccgggtgcagtggctcacacctgtaatcccagtactttgggaggctgaggccagtggattgcttgagcccaggagtttgcaaccagcctgggcaacatgttgaaaccctattgctacaaaaaaatacaaaaattagccaggagaggtggtgcacacctgtagtctgagctacttgggaggctgaggtgggaggatcacttgagcccaggaggttgaggggctgcaatgagctgagattgcaccactgcactccagcctaggcgacagaatgaaaccctgtcacaataataataattgtgtaaagttctatacactggacactcagagtaatgaatagaccgtgggcatttcatagtctccctgtgctgctctaccctgacttggcttccctcctgtctccagaggtgaccactatccataatattgcaaatagtctttttggcttattatttatcacgaagcagtatttttgcttgttttgctgctttttcactttctatgaaagaaaataaatggatccatgtttcaaaaaactacttgtaaagtttttgtgaatgctttttatattacctaaaataagagcaaaaccagcacaccaactacaaaaaattaggaggacccttatgctgtttaaacatttgttccctagaaacctcacaggatctctttctccagagttccaaaaagagatcagtacattcatttgctttatggggcaggctatgcatatatagagaggattttttttaatgtgaatttattaatccaagtctattctgctgaccaaaattttcagcctggagtgaagcaagtaaagttgtttgcgaagaaaggtccacagaaggaggggaaactggttggagaagcaatcactgcattagagataggacaaaatgaggctctgtcgtaatagttcacaaacttgggcatgctcagaactattctgggaactttttcaaaatacagatccctgtgcct

SEQ ID NO: 36638 - DNA, 582 bp, Homo sapiens
gttgacaaaatcttagaatctcttccatatcttgtccttcaaatgtcagtgtgggtgatctatttaaaacagaagcccaaaatgctcttctcattttaatgaaattcccagaatgaattgcccaggtgattaggtctatttcaagaaaacatgaaaactccactgtctcccccagcaagctggctaatagagaaactatgtttcatatatttcttgacttggaaaagagcttggatacctacttggtccaactctttattttacagctaaagaaactggctgaaaggggaaagtggcttgccaaggccacataacaaggtcacagacggagcccagcatagcagcccagcttgcttttcctctttgcccggctgcccatcacagtgatatggaagaaaagatgctaaaggactttctggaaagttctttgrtatgaattcaccactaggatccttggaaacaaccacagcagcccaagggtgctgtgtgttcaacaatcaaataaataaataaagcctttaagtcaaaccactgtcatatgacataataccttagttttggagagcaagggaaaggaacagt

SEQ ID NO: 36639 - DNA, 1164 bp, Homo sapiens
tacagtccagtgggagagacagatattaagcaaataattacatttaattatgttgaaataagtgtcatgaaggaaaagtacaaagtttattagcatattaaaggccctgaggagttctgcagtaaataagcctggttagcattgtttagggcaacatctccttattttatttgaccaagaaacttcatggtaaacctattagcacccagcagagttagcgtgctacatagtagtgcattgtgcaaatggaaaagggaagtcattgaagaaatgtgagctgggggacttggagtgtgagcatttgccatgttcctccagtagcatccagtgggttacgggcatcttagctccaggattccagtcataggatcagctgacaattctccttgctcttttttttttttttttttttgagacggagtcttgctctgtcgcccaggctggagtgcagtggcgcgatctcggctcactgcaagctccgcctcccgggttcacgccattctcctgtctcatcctgcctcctgagtaggtgggactacaggcgcccgccaccgcacccggctaattttttgcatttttagtagagacggggtttcaccgtgttaaccaggatggtctcgatctcctgacctcatgatccgccckcctcggcctcccaaagtgctgggattacaggcatgagccaccgcgcccggcctctccttgctcttattctagccccatgaggcacctttctggtcatcactgacttactgagtaaatttccctatagggagaggatgctctcattcaccagcacagatgttctggtctacctggcagtttctttctcattatagagcaaggtttcttgacctaggtctttagagggaccattcaccccttaagactatctgcaaaatgtgtgtgtgtatgcatgtgcgcgtgtgggtgcacgtgtgtgtgtgtgtgcatgcattggacatttttctggcaagagggtccgtatcttttgatattcctagtgggagtgtgacttcagaaaaggataagtttaggaatcactgcattaaaggaaaatgttctattatttgtgtattgatctcctgtgagtttggtcactgtaaatgggttcttctcagtctgatcagccttgtgttgactcaccaaactgaggttctggat

SEQ ID NO: 36640 - DNA, 2444 bp, Homo sapiens
ttttttttttttttttttttttgagacggagtctcgctctgttgcccaggttggagtggaggtagtggcacaatctccattcactgcaagctccacctcccgggttcacaccattctcctgcctcagcctcccaagtagctgggactacaggcgcccaccaccacacccggctaattttttgtatttttagtagagacggggttttaccatgttagcgaggatggtctcgatctcctgacctcatgatttgcccacctcggcctcccaaagtgatgggattacaggcgtgagccaccacgcccagccagaaatatttctatttttaaaaattcctttctggattgtgtataatcactgcctaattaatatgtttggtaaatctggtaagttcttacatcatatctgtatttacagagaccctttgctgaccacctcctgcctttatcccacccctgaatcagaaagtgagacctccagcagaagcctttttacctttgacagttctcccaggtcaggccgcacccagcccagtttgtccagcacacactcgtcaaactttgcctgctgtttgcgacagtgacgaaataactgctggccagtataatcaatgcaagtccaatattctgtaaaaggctctgcacagtgacgttttatctgcctggaaaagaaagctgggttaggggcatctctttgcaaaacaatgaaaaacagaaaagtgagaaaaaaataggtacagatctcaaatacatagccttgctttttgaaaggtatgtgagtacatattcttatctcacttacaagacaacttcaggatcctcaagttgagaacaagttagtaaacaaaaaagatttctgaggtagaaaacctaatttctttatatagtaagaagaaaagagtgtagcctaatgcacgcctattttactcagagaggaactccttacttggggcctatttattcttttctttagatccaattcctctaagggtatcagcttagcaaatttagaagaggaggaggcataattaaataatggacatgctgatagaagtcaaacgtgacagacaatggcaaaggaagagacagaattataaaaagcaaatacacaaactaacaagcagaagatcctgggatcattcagtataaagacaaactgtactccactcctcaaaagctcaaggtcctcattttatttacgcattgaacaaaaatagatattaatccttgctatcaagaacaaagttatattatatttggtattctctgctaagaagcagggtagcatataattcattctgtggccatcaaaaatggctagagaaaatttaacttcygtgtataaaaagaataagtttcagttttttgcaaaatcctccttatcttatcattcaaccctactagtatgcatgttcaagcaagaataaaatatcatcattttatgtaaaagccatacttgaggcagtgaaattcagaacacctctttctcccaatgaaataataattttattatttaagtgcttacctgtcatactccagaaatctagctacactctcacatgaatcttgtttaacatggatcaggaaggaaggatctcagagatggcttaaggaagtatacagtgaaaaatctgctttccaccctgcccaataagccactcagttgctctcctagaggtccaccaatgtcaccagcttcttaggtttcccttccgggtatactaagcataacctgcacccacataacttctactcaagaatcactttggtagaaagcaaccatttccaatgggagttttatattcctccaaaatgcagcagcagcagacgggctgcaagccactactctagtagcatggatccctgttctggaccctgttacccatacctaacaattatctactaatgcctacaaccagcaacttcagcagtgagaaattcctctatggattcaccttgggaatttgtgaaatccaaacattccccgcttaaaatgtactaccactggaccatggaaaaaatgctttgcaaaagttctcttagaaaataaaaattgtttaggctggatgctgtggctcatgcctgtaatcccagcaccttgggaggccaaggtaggcggatcacttgaggccaggagttcaagaccagcctggccaacatggcgaaaccccatctctactaaacatacaaaaattagccaggcaggtggcacacacccgtaatcccagctactcaggtggctgaggcacgagaatcgcttgaacccaggaggcagaggttgcagcgaacaaagatcacgccacagcactacagcctgggtgacagagtgagactctgtctcaaaaaaaaaagaaaaattgtttaaataaacacacacacagactcaatctcgctggcaatcaaatcaatgcaaattgaaacatccaaaaatatttgcacctcccaaa

SEQ ID NO: 36641 - DNA, 774 bp, Homo sapiens
acaggcctcctctctagaaaataaaaataaagcgagaaacagaggccagattatcaaggacttgcaatagaagccatatgtttggctgaacttattttgtaaagggtacaaataaaatcacctttacaattccaatgttaatttccctatcagaagaaagagtatctttcttaccctctcacaccaagttaaatctgagatccccaacaggagtcagttgaggttactgctatctcacagagaggagcagaaaatccaatctgtccaccagagggagggcctgtgttcctggctgctggcttstctgcctttcagtgtcacagctgaaaacagacccgcccaaaacaagcagcataaaagaaacaattgatagacctccccacgctaaaatgtaacacttctaaatgacctaaatgaccgcagacaccataaacaagctaaaaacaagctataacctgggagaaaatatttgcaatttatataacagataagggattagcatccagaatatataaagaattctagcaaatcaataagaaaaagacaaatggcccaatagaacactcagcaaatgataaaaaacagtcgatttatagaaaaggaaattcaaatggccaataaacttgaagaatgttcaatttcactagtaatcaaggaaataaaacattaagtgaataatgaactatatttcactcatcagattggaaaaaagaaattaaagcattaaagcttgatatgaaatgttagtgagagtgtgtggaattcgggactctt

SEQ ID NO: 36642 - DNA, 1047 bp, Homo sapiens
gtctcctgacttgttattactaaaaaatcgatacatgtcaatcattcccagagccttattttgyacccggctcagtgacagggcccgcgcgggcgcatccacaggtggttcagcggcaggtcctatccttggggagcatgtgagctggtgacagtcaactctgggcaaagaacttccactctcctgcccggaagtgctgatttaaggaatttatccaagaaaaacaaggacgagggtctataaaggtgtttgcatcagactaataataaagatttcatgcccttcagtgaggaataaatgcattatgatatatcagtccagtggaacattatgtatctattaaaactggtggcaagagcattcctttattgatgtggaaagatggctacactttgttattcagatttttaaaaaaataggtcatataacagtattcatagagatttccattttgaaaaacatagataatacatgcatatattttctttattctaagatgcacattttttaacatttgaacatttctaaaatcaggatgtgcattgcaattaatggatatgtttaatgcatagttcttttctccaaaagagccgtgtaattaaatcagtgatgcatcccccagtcagtgttgtcccagaatcaagaaaaacatatatatacgtacacacataggacaaattccagaaagacagcaaccaaaatgctaaaagtcattaaatctaggtgatttccactttcttcatcaaccttctgtactgtctgggttttataaactgaacacgaattatttttataattagaaaaaaatcccccatttccatattgaaaaacaaaacaaagtctcaggtcaaaaaaagtccaagcttctcatacacagcaggccagaatactcgctaaacagagccccagaagcaggggacgggaaccaaggggacttggcagcctggttgtaaaggagctgggcttcctaacacaggagggatctgggtagatggggaacaggtttagaccctgcaagccgaggagacagtctaaaaggaggcctgg

SEQ ID NO: 36643 - DNA, 1047 bp, Homo sapiens
gtctcctgacttgttattactaaaaaatcgatacatgtcaatcattcccagagccttattttgcacccggctcagtgacagggcccgcgcgggygcatccacaggtggttcagcggcaggtcctatccttggggagcatgtgagctggtgacagtcaactctgggcaaagaacttccactctcctgcccggaagtgctgatttaaggaatttatccaagaaaaacaaggacgagggtctataaaggtgtttgcatcagactaataataaagatttcatgcccttcagtgaggaataaatgcattatgatatatcagtccagtggaacattatgtatctattaaaactggtggcaagagcattcctttattgatgtggaaagatggctacactttgttattcagatttttaaaaaaataggtcatataacagtattcatagagatttccattttgaaaaacatagataatacatgcatatattttctttattctaagatgcacattttttaacatttgaacatttctaaaatcaggatgtgcattgcaattaatggatatgtttaatgcatagttcttttctccaaaagagccgtgtaattaaatcagtgatgcatcccccagtcagtgttgtcccagaatcaagaaaaacatatatatacgtacacacataggacaaattccagaaagacagcaaccaaaatgctaaaagtcattaaatctaggtgatttccactttcttcatcaaccttctgtactgtctgggttttataaactgaacacgaattatttttataattagaaaaaaatcccccatttccatattgaaaaacaaaacaaagtctcaggtcaaaaaaagtccaagcttctcatacacagcaggccagaatactcgctaaacagagccccagaagcaggggacgggaaccaaggggacttggcagcctggttgtaaaggagctgggcttcctaacacaggagggatctgggtagatggggaacaggtttagaccctgcaagccgaggagacagtctaaaaggaggcctgg

SEQ ID NO: 36644 - DNA, 1047 bp, Homo sapiens
gtctcctgacttgttattactaaaaaatcgatacatgtcaatcattcccagagccttattttgcacccggctcagtgacagggcccgcgcgggcgcatccacaggtggttcagcggcaggtcctatccttggggagcatgtgagctggtgacagtcaactctgggcaaagaacttccactctcctgsccggaagtgctgatttaaggaatttatccaagaaaaacaaggacgagggtctataaaggtgtttgcatcagactaataataaagatttcatgcccttcagtgaggaataaatgcattatgatatatcagtccagtggaacattatgtatctattaaaactggtggcaagagcattcctttattgatgtggaaagatggctacactttgttattcagatttttaaaaaaataggtcatataacagtattcatagagatttccattttgaaaaacatagataatacatgcatatattttctttattctaagatgcacattttttaacatttgaacatttctaaaatcaggatgtgcattgcaattaatggatatgtttaatgcatagttcttttctccaaaagagccgtgtaattaaatcagtgatgcatcccccagtcagtgttgtcccagaatcaagaaaaacatatatatacgtacacacataggacaaattccagaaagacagcaaccaaaatgctaaaagtcattaaatctaggtgatttccactttcttcatcaaccttctgtactgtctgggttttataaactgaacacgaattatttttataattagaaaaaaatcccccatttccatattgaaaaacaaaacaaagtctcaggtcaaaaaaagtccaagcttctcatacacagcaggccagaatactcgctaaacagagccccagaagcaggggacgggaaccaaggggacttggcagcctggttgtaaaggagctgggcttcctaacacaggagggatctgggtagatggggaacaggtttagaccctgcaagccgaggagacagtctaaaaggaggcctgg

SEQ ID NO: 36645 - DNA, 1047 bp, Homo sapiens
gtctcctgacttgttattactaaaaaatcgatacatgtcaatcattcccagagccttattttgcacccggctcagtgacagggcccgcgcgggcgcatccacaggtggttcagcggcaggtcctatccttggggagcatgtgagctggtgacagtcaactctgggcaaagaacttccactctcctgcccggaagtgctgatttaaggaatttatccaagaaaaacaaggacgagggtctataaaggtgtttgcatcagactaataataaagatttcatgcccttcagtgaggaataaatgcattatgatatatcagtccagtggaacattatgtatctattaaaactggtggcaagagcrttcctttattgatgtggaaagatggctacactttgttattcagatttttaaaaaaataggtcatataacagtattcatagagatttccattttgaaaaacatagataatacatgcatatattttctttattctaagatgcacattttttaacatttgaacatttctaaaatcaggatgtgcattgcaattaatggatatgtttaatgcatagttcttttctccaaaagagccgtgtaattaaatcagtgatgcatcccccagtcagtgttgtcccagaatcaagaaaaacatatatatacgtacacacataggacaaattccagaaagacagcaaccaaaatgctaaaagtcattaaatctaggtgatttccactttcttcatcaaccttctgtactgtctgggttttataaactgaacacgaattatttttataattagaaaaaaatcccccatttccatattgaaaaacaaaacaaagtctcaggtcaaaaaaagtccaagcttctcatacacagcaggccagaatactcgctaaacagagccccagaagcaggggacgggaaccaaggggacttggcagcctggttgtaaaggagctgggcttcctaacacaggagggatctgggtagatggggaacaggtttagaccctgcaagccgaggagacagtctaaaaggaggcctgg

SEQ ID NO: 36646 - DNA, 641 bp, Homo sapiens
atccccctgttcattattgtcagagtgagactgttaagtcttgatttccctggacaacttcactgcataacttttaatatgattttttaatattccctttactggacaataaattatatagttatctgagtaagagatatggtcaggaagaggcattgcctcattcagcttttctctttggtgaactcgcatatgttctcctcacccgccagtcacctctaaaccgtattgttccaagacaacaaagagaactcgagtgtgtatctttcaccactggatttgtgtttgctccataaagcttcatgcttaatagggtttctgttagcattttctctgtttattttcccataaaatatcacaggcctttttcatatggaattatgggtgatttccttcaatttgcatcatatcaagttgaggttcatgttgatgaaaagtaaaacatacattgaaaatatcagtaatgatgttttcccctcctttttagcacmcgtgcttgtgatacaagcacattttaatacaactgtagtctcatgctttgatcattcctatgatgaaaataacatttttagataaaatatctgagttttatgaggcctttagtatgtgatgtgatagaatatcagaagaccatacttttt

SEQ ID NO: 36647 - DNA, 641 bp, Homo sapiens
atccccctgttcattattgtcagagtgagactgttaagtcttgatttccctggacaacttcactgcataacttttaatatgattttttaatattccctttactggacaataaattatatagttatctgagtaagagatatggtcaggaagaggcattgcctcattcagcttttctctttggtgaactcgcatatgttctcctcacccgccagtcacctctaaaccgtattgttccaagacaacaaagagaactcgagtgtgtatctttcaccactggatttgtgtttgctccataaagcttcatgcttaatagggtttctgttagcattttctctgtttattttcccataaaatatcacaggcctttttcatatggaattatgggtgatttccttcaatttgcatcatatcaagttgaggttcatgttgatgaaaagtaaaacatacattgaaaatatcagtaatgatgttttcccctcctttttagcacamgtgcttgtgatacaagcacattttaatacaactgtagtctcatgctttgatcattcctatgatgaaaataacatttttagataaaatatctgagttttatgaggcctttagtatgtgatgtgatagaatatcagaagaccatacttttt

SEQ ID NO: 36648 - DNA, 641 bp, Homo sapiens
gttataatgaacttaaccaatgtttgtcgattactcagagcaaaatacttcaatgtaatacatgtgtgaaagtcttaaggaaattttcaaattcaaatagacttaggagaagacatactggagagaaacctttcaaatgtaaagaatgtggccaattctttcacaggttctcacacctaagacaacatcagataattcatactgaagagaaaccctaccaatgtgaagaatatggcaaagattttaagcagtcttcaggtcttactatacatgggagaattcatactaaagagagaccctacaagtgtgaagaatgtgacaaagcctttaaacaatcttcaagactgaataaacataagaaaatttatactggagatamaacctacaaatgtgaagaaatagtcttcaaacctgactatacataagattattcatatgggagagaaaccctacaaatgtgatgaatgtgtcaaagcctttagaaaatcctcaaaactgaaagaacataaaagaattcatacttgagagaaaccctataaatgtgaagaatgtggcaaagctttttactattcctcaggccttactcaacataacatagttcatactggagacaaaccctacaaatgtaaagattgtggcaa

SEQ ID NO: 36649 - DNA, 652 bp, Homo sapiens
tattctgttaaaatagcttgtcctctcttaactgctgctatgtgggccaaaaaggctagtattgcattgccaaccaagagggctaagccaaggcaaggcagtttaggccatccctttcagcgaagaaataacattttgtcttgaagatggtcctgccagtgctttccccaaccataagaataaaacatgcagagggcaggtaggagcagggtttgaaaagctagtactstctctttagcaagaaagaaggctcctggtctctgagatccttctaatagatttgttgagatacagatcagatgggattatggaacttcctgcccataggccaattcatcagtggcaagaatgttgctattgttaagaagaaaaacacacacacataaaaatactgaggacacccaagccacaagatctgcagaaaagatcagaagtggtgggtgattactttgccttctgggaagggatggtttatgggtctcagaaaaaggaggtccgggtgccttcagagtagcctcggctgcaaattctaggcatttcagggtcaccgtcctggcagtggttgcctgtgctttatgtttctttatctcagtgaaaattagtgaaatgactgaggttaaaatgcagagctatgctcttgctagattcaact

SEQ ID NO: 36650 - DNA, 586 bp, Homo sapiens
tgagtggcgcctggcaggcttctgctattaagaatccagtgatacagagctggaaggttcttgcttctgatggttgaacctaaaactctgcaacatttcaggacttatagccacatggctccttcacccaagagctctcrcttttcctgttttctttcttcctctatgcttaccaaggtcaggtgcctgggcttctacttctttagctattccatttaacacatctatgtttgcctcttatgtctctgtccaaaagcgtcttcccattgtaagcctttcctgattctctgaagttagatccagtgtctcctgagcactggctgcaccctctgtaccctcgatcgtagtgagcagaatgttatctcagtgtctgtttgttcgctacacagtgagttccttggaattaaatacccgtcttctttgctctagtaaccccagaacttagcacagagcatggtgatagtattttattgactgagtgaatgcagaaggctttaaaagttagaattcaaggagggaaagaagcgtctgcttcaccttaaatgaaacatatatattttttcctgtggagaaagggatgggggaa

SEQ ID NO: 36651 - DNA, 586 bp, Homo sapiens
tgagtggcgcctggcaggcttctgctattaagaatccagtgatacagagctggaaggttcttgcttctgatggttgaacctaaaactctgcaacatttcaggacttatagccacatggctccttcacccaagagctctcgcttttcctgttttctttcttcctctatgcttaccaaggtcaggtgcctgggcttctacttctttagctattccatttaacacatctatgtttgcctcttatgtctctgtccaaaagcgtcttcccattgtaagcctttcctgattctctgaagttagatccagtgtctcctgagcactggctgcaccctctgtaccctcgatcgtagtgagcagaatgttatctcagtgtctgtttgttcgctacacagtgagttccttggaattaaatacccgtcttctttgctctagtaaccccagaacttagcacagagcatggtgatagtattttattgactgagtgaatgcagaaggctttaaaagttagaattcaaggagggaaagaarcgtctgcttcaccttaaatgaaacatatatattttttcctgtggagaaagggatgggggaa

SEQ ID NO: 36652 - DNA, 586 bp, Homo sapiens
tgagtggcgcctggcaggcttctgctattaagaatccagtgatacagagctggaaggttcttgcttctgatggttgaacctaaaactctgcaacatttcaggacttatagccacatggctccttcacccaagagctctcgcttttcctgttttctttcttcctctatgcttaccaaggtcaggtgcctgggcttctacttctttagctattccatttaacacatctatgtttgcctcttatgtctctgtccaaaagcgtcttcccattgtaagcctttcctgattctctgaagttagatccagtgtctcctgagcactggctgcaccctctgtaccctcgatcgtagtgagcagaatgttatctcagtgtctgtttgttcgctacacagtgagttccttggaattaaatacccgtcttctttgctctagtaaccccagaacttagcacagagcatggtgatagtattttattgactgagtgaatgcagaaggctttaaaagttagaattcaaggagggaaagaagcgtctgcttcaccttaaatgaaacatrtatattttttcctgtggagaaagggatgggggaa

SEQ ID NO: 36653 - DNA, 588 bp, Homo sapiens
atttgcaaactggatgattacaaaagttaagtgaacttgaacattgccattaactcattagggccacccccagcctctctctttcaagtatggtcaatgtggctttataattgccataagaccaagttccgtttagtgggggaaacccacatatccagctcattggcaactagggctagcaaatgctcctgccacagttttaaaagtctgaacagtctgtctgaccataggtgagaacaggtgaatttttcacatctgcacttcacaacagaaaagaatccactccaaactctgtgaaagaagagctcttgtagcatttccttttggggggtggggattttccaatagatcaggctccagactactgaatggaaactatttcctcactcttccctccatccccccaacatacacacacacacacacacacacatacacacacacacacacacacacacacacagatgtctaaaratttttctgaaatcagggattgactcaaggaaaggatgtgtttcattagctgttccatcaaaggaaagagacacggagtctgctaaaggtcaagagagaagaagagaaggagcc

SEQ ID NO: 36654 - DNA, 541 bp, Homo sapiens
gaatgtgactaaacgaaaccccatctgctgcgaggtttccctgggttcccaggagggacctgagcaggatatgaggcggcggcggtggtgaggtgaggggtctgcaaggaaatggtgcgatcccccatgtgtaatgtgtctcaccgcaggccagcgtgggtctcccccagcatgacatcatcttggagctcacccgggctccggtctgctagccgctataaaccagggtttctcaatctcagcactattgacatttttcagctggataattctttgttgagaagtgtggggggaactgccctgtgcattgtaggaggtacagcagcatccctgacctccattcactagttgtcaatagcatctccacccagcctagttgtgacagcccaaaatgtctccagtcatttccaaacaatgggggacaaaattgccccccgtcgagaaygagaaccactggcaccgaaaaagtggaacaaatcagactccctttctattaaaagcaagggaaaaaaatccagaaaaaaatagaatacagtaagtt

SEQ ID NO: 36655 - DNA, 519 bp, Homo sapiens
tttggactggagttagcacaccagatgagatgaatcccgggaagaggaggaggaaggttgggaacagtgaaggagtatgtaatcagagtaggaagcaggggattccatggggaagtggacactcagcttcctcagcactagtcctggccaaaattccactcattgtctgttctgtctggaagaaaaagtattacatttaacagacctttaaagaaatgagaatgatctcacctgaggcaaaccatgacattcctctggtctctaaaccacagcctccaccagcaactcctgaataagaactgcaaacaagcaacaacaaaatcagtctttggcaggaagctctgtgcaggggtggtgtttacatgcattcattctaccctctcaagtggaaaaaagtgcttatgcttctcagaaggatgcaaccatgagggatyagatgccaagaggtatggcctctgccaaacaggaggaaaaatggttcttcatttccataaacttcctctgctgtaatgtctagtg

SEQ ID NO: 36656 - DNA, 767 bp, Homo sapiens
taaatcatctcttctctatgttatcagaatacacttatatgatagttgttaacttaacccataatagtattcttgtttgtcacctctgctagccttttcctgctttgagggccagcctggtcatatttggcttagtttccctgtgattgaccataccacttgtggtagacactaatcaacgattgtagaatcctaaagaactggggagaggagttcgagtttgagacattccccgaaaaagccatatctatctagttttctagcatgcrctcttgtcttatttaaaaactcacatagaattataaatatattgattatatgttctatacaaatatagtttatataccatatgacatatattgtacactattctaatattttaatccctaacccaagagattaactcagtaggaaccactcactgctggttgagacacagcttcatgctactgaaatatcctttggctaaagcacagaatttaaaacttcccaaacaaccaacatttgaatcagccaaaatggatcaaaagttcaaatgagcggttttatgacatgactatttatgggctttcttgctgtctgggagggtcactttagcagagaatcctaaaatactacagccaaagcaaccgtaggatgacctaatcgtgtcttgctttttttttcagatggggaaactgaggcccacagcaacaataataactgtggggatgatatcatttaatattgaaaataagtggataattgagacctccattattagtagt

SEQ ID NO: 36657 - DNA, 524 bp, Homo sapiens
tacctcctccctttatttcagcttgtgaggatatstcactaattgacttcattaatttgattcaaactgtgcactagaagtgggatagaaacacatgaagtataccggaaagaaattatactcgaaaaaaaaaaaaagagctgaaggcagtgggaagtagacaacgggatccaaactcaacaaaatgcaacctatttgtataaagaactacatggcctttggagtcaaacctgactaaaatcttcgctctatctcttcttacaagcttgtaactttagctaagtcaatcaacttctttgaaactcagtttgctcacgtgtgaaattagaataatacctacctcatgggctattaagagaattgcacaagataacactatctggcacccaataagttcttactgaattttcattttctaagcatataacacaaattgaatgatggacttgggtatctattggtgttcttggaaacgtgtgctatcctgacagagtcagtgctgctaacctgagttattttcactc

SEQ ID NO: 36658 - DNA, 593 bp, Homo sapiens
gcagtctggatgagagaaaaccaatgcatatagctacttgccatctctgacaggcataggcatgacatttgccaaaacctctcctttttgtctaaagatagatattttatattgttaagttttcaggacctaataagtggcaagaaatcacccatgtaaaaataataatcagtatttgtaggcttggagaaaatgctagaatccaggcagcaacctagtaagagggaaaaaycctgtttcttattaacagggacaccctatcctgggatgcaggtctcagtctcctcctccctgtggctgcccataaaacgactccagatcagaggcagagccttgattttgatcttggtttataaacagtgttcttcgaagtttacttcttctgatcattgatttgttttgctgatcttttttttctagaagccctgcagttctaaagcaaaaaagagaatgaataatcatgaattgaattttttttaagaacaacaaaaaaaaaaggcaaggcagaccctgctcttttggaaagccctctctttgattttcttctctagagcctagtagcttatagccaaagagaggtgcccatgcgcgtg

SEQ ID NO: 36659 - DNA, 631 bp, Homo sapiens
agtttcatcatggctctacctcaattccttcatctggaaaatagaatttaactcaaaggtcagccacgaggtttacataagatcatgaatgtcaagtatttagcagaatttctttacccacagtaaccatattagctattaatgtgtttggccataagatacacctactaaaatgtacctacaccaatgaggttttcagtcaaagcaatagtgcgagtacaccaggttggcagagggaagtcctcagtgcctgagtttatacacctcactgttttttgtttgtttgtttgtttgttttttcccagttagactcatctcgatctttcctaggggacaccttaaagtctagtatggcccatggaggaaagagggacattggaaagaaaataaagagagggcaatcatatttactgaattctcactgcatgccagatgctgtgctgggagtttcacatttgttatctctgctaatcctcaaaacatcccygtgggtgggtaccacttttccctctggacagatggagaaactgaggttcacagaagtgaagggacctgcccaaggtcacccagcctctcagtggtatttggacaatgaagctctttcaggctccagagacccatgtggtttctg

SEQ ID NO: 36660 - DNA, 1035 bp, Homo sapiens
acatcaaacacttatcacagtttctggcatatgccagcacttttataagtgtttctcatgtaaaaactcacttaatcctcacaaaaatcatatcaggcaagtagtattataatctccattatacaaagaaggaaactgtgacacagagaggttagttaattttaaaactacatcattgaggacgtgcaccacttaatacaattaggattaaaatggagcgctttcatttagaaccccattatcttggagctgtgaagatggctatgagcgtaatcaatacactgttaatggtgcaaaaagtcagcccacacagtctggatgcctacagtaatgataaggagtaaatcccattttccttctatcatggaaattccaccatcagaaactgcagaacctgaccgcagcaagaaaaaaagctgagaagagagatcatttcatgttgcaattctgcttgaaggagaaacaaacctacaggatgaaaggacaagcaacctaatgtcttctctgcctacaagccaggcacatcattctgcagacttctcctgaagaatggagatttttttttttctgcagcatgggggaattgagacagggattatgaggtcactgtaaagggaaacctgcagcctcagctcctgaccacagtctggagagtgactcacactgtattcagccgagtaggtcttgctgagctggcctgatggagaaaaggctctctcactagcagcttggaaactagtccacagaaggcataccctgctgttctccagtctggagtctcccaattcccagggccactgaaagctgcatacgaagtgtctacagaagccatttttctttgcagcaagactcagaagagcctatttccaggtccgagaatctcgctgccttcagagtttggaaacaaactgcaascagatggacatatatcttcattgaggtgtgtaaggaagtggtcacttctcctatccttccatggccacactgagggagcaaaaccccatacagagaagcgctgttacataggcctaaacc

SEQ ID NO: 36661 - DNA, 1212 bp, Homo sapiens
cctggacatccgcctggagtaccaacccctgtcactcagagaccccagaaagatgaaaaacggggtggaaaatgcattggaattgtttacagggaggctattctgtggctagaacatttcaataaacctcttttttaggggggaaggggtaagaaggcgctgagggttgtgcttgagtaataaactgcctcagaggaaagcgggttcagtagctgcagggtttgtggtttgctaggaggtggtgtatatttggagagagagctcaccttgtcagcaagaaaaggagaagctgagctgagggccattaccagcaatcctcctccaaaccaagcttggcctctttaaagtgtagctgtttggtacagcatcatttatgtgaaaatggagagggggctacatgcatggttggatatatgtgtttatgtacatatgaatgcattcatgcatgcatgcctgtatgcatttgttagtttatgcatgaaatatccctggaagaatccagcaatatggttacattggttgcctccaggaaggtgagctgaatagcccagagattatatcaattagcagacagactaggctgtctgtcataagaagtgaccccaaaatgcaaggcttaaacaagatagcatttcaattctgtctcacaaagcagggcaggtataatggtgacgaagtgtcagggacycaggatcattccattgtgtggctctgccatcactacagtgttgccttcctctgcagggaggaggatggctcaccatcacctctgcaatccagccaataagaaagggggagtaaagaaagtgaaaggcacatccacgccctctaggagagccactgaacgttaagcacatggcctccactcacctcccactggccagaactcagtgacttggacacaactaggaaacgccctccttagctgagcattcatgagtatagctaaaattggagattttgtttctaaagaaagaagggcagaataaatataagaggacaacctgtagtctttatctgggataggatgaaagggacattttcactttatatatccttttagtacctttaaaaattttttcctgtaccctcttgatagacctttcagtatcttctgaaccatgtgaattaggaaaaaaaattaagtttgaaaaatatattagtttggaagtcacaaattgagcacatgcatccacctctccactacaccat

SEQ ID NO: 36662 - DNA, 821 bp, Homo sapiens
catcattctgagcaaactgtcgcaaggacagaaagccaaataccgcatgttctcactcataggtgggaattgaacaatgagaacacttggacacagaatggggaacatcacacactggggcctgtcacgtggtggggagaggggggagggatagcattaggagatatgcctaatgtaaatgacgagttaatgggtgcagcacaccaacatggcatatgtatacctatgtaacaaacctgcacgttgtgcacatgtaccctagaacttaaagtataatttaaaaaaagagtaaaataaataaataaaataaaaccacaatgagataccatcaaaaaaaaaaaaaagaaaaagaaaatgtgtcaggttaaagggcaaaaaaaaaaacccaccacccccaaaccctacattgcttaatgccactgttgcttaacaccttgatattcatcctattaacactgcttttcattgttacaaaactctttttgtgtttggttttttcattttttwaaaaaaacagacccaaagcttacaaaacttcttttgttttgatattcactctaattagtctactcacatgtgaacccattccagttagactttggctctaaactctactcctaccttaccaaaaaagctctggtcaaggtcatcaatttcttccatgttctaaatatttaaagtttttacatttttgtctttgatttatctgtatattatttttgtatttttgtggggataaattttaacttttttccatagaaacaaccaattgtatgagcaggttttgctgtgtcttttacactttttttttggtagaagtc

SEQ ID NO: 36663 - DNA, 1233 bp, Homo sapiens
tgcattatattatatcacacatcatatcattaaaattttaaaaaactgatattattttctaatttaagtaatttaccttttaactttatatatagataggaatgtctatcagtgattgtctgatagacattacttacacaaaagtttaggtaaataatatagattatgctagagcaaatagcactttttaccattaaaaaagtctaatttgatataaaccataaatggtgtttctaatttggaagatggagaaaattgagaccacctgaatacaagaggatctcttttgtcatagcatatgtctattatagttcttctaagccaggaagaaataatacccgccagtaaagaaaaaaagaatggaaatcaaatggagaaactctttattagctatgagaccatagcaagcaattttacttgcctgtaccttagtttcttcatctgtaggacagaaataataatatgtactccatggggtttccgcaaggattcaggaacattatgtacaaaagtatttagcagagtgactattataaagcaaatgctcgttaawcaatgatttttagtcttcaaatcaatcactcactctataaatggtgaattggttctaatccaggcttctataaaaaatgtgaaatagtgtcaaaaagaagacttcagagcaagtattcttactaataaattaagaacaactaaaaagcattatataacctactcaagacaagacaatttttaaagaaaatatgtaattatgctcaaaataacccttttattttgtctgtaaataatttttcaaattaaaaaaataactttatttggataattagagacaaaataaacttcagcatatatcatacttcctaatctagcttcatgtttagaatgtctttcagatgatggcggtggctcttctggagcagctgctgtgagtatgccagctacagtggggaatcacagttgggctgtggagccgatgggggccgggaacagatgggagcccaccccttacccagttggtggggtgggagcccaatgttcctgggcacagctgcagcccagccatggctctggacatccctgcgctctcaagggcccaggaagccccttgccccctcaggcttggaagtgcctactcccactccctggccacttcctgctcccagcacctgctctggtgtggagcaaagctgtggaaaagcctgggtactgttacaactcagctgggtgtgcaca

SEQ ID NO: 36664 - DNA, 1288 bp, Homo sapiens
caagagtgatataaagagttttcacatttcttgtctattttcccctgggcaaggcttttatgtagtggtgtaggttggtgcctgggtggtactatttaaggaattccaggaagggccctctatgtctttaagctctcccaataggcctcacaatgggctttgtccccttaaagtgcaaataaacgtctgctaaatcaacaaacacccatctatatactgtgttataattgaaaagcattcaatctcttgtaaaagagctcttcctggtacctgtggaacttcagcaacccataggttccagtcaacctgattccgaagatctagagtacttttttaaaaaaagtgtgacccaggggaagttgtgggtttttttggtggggggaaagggagagttccctggaatgacaagaaggtaagccatagcccttcacacacaaaggcacaagaaccatcaatgtctgttaagtttaacccatgaatagaatccagggtccttcaggctttccagatgacaactgggggttactttacaggcaggtatgaccacaaggaatgcctgaccctggcaaccgaggcaagggctgccctaaagtcagagttctccaccagggctcccagacacaagggtcgggtttcccaagtatgaattcaaggaagtttgcagccataaatgggtatgtcttcctcacatgaagaagacaggcaggaatgtgagagttccatctcagcagttggttctgaccagatccccacaagccttcctgactggtcaaagtaactgctcacaccagccccgcaggcaagagccagaagacgctagcaactaagactctttttccttgtagagttgccaaattttcctatcgggtaatttaaaaaaaatctcaggcactattaaaagcctgcctggttacttggttctgtctgaaaacccttccaacagccccatgaccttcctccatactgacactgacctcttctcagactgcgaagggtgaactccatcaaatggccagacttcaggggctaggatcagggaagctcacttattagaagcttttcttacaagagcttccaggggcccatmgcttcagtccagctggatggtgactgtctctggtgtaaagcagatccaaggctttttgtgggtggctctgccctgacctggtcttagggctatcaagactgaaaagatcctgctcattatgatccacactctaaggacctctatggaagacatgatgaaatagtgacaattcttttagggtcagaaaaatgctataatgca

SEQ ID NO: 36665 - DNA, 667 bp, Homo sapiens
tttgctgagtattcttcccaacctattgtttatgccaggacgtgggtcctattaaatgaaaaaaaaaaraaagaaagaaagaaagaacctcctttgtttctccttgcattttagccatagcttccctttccttgtgggcagtggaggccaaggtctagtttgagagagggtaaaggagggtgacacattaaagaaaggaacacctacacacacacacacacatacacacattttatatcttgacactccactatctccattgttggtgctttttctaatcccctaattatgggaacccaagcctctgtcctctatcttctattactacttataaaactctggcctgtcatatgtggtccaattaagaaattcatggaacagataataagaggccgtgtcaggcacttaggtgataataacattaacatagtatcctgtccctccaggagtttactgtttggtggggataaatgacatgctaacagctaatttacattcaccctaaatcaaatcctcctcttgtgttctctttcttgatggttggaaccaacactacccatttacaaccccagaagccttcctccctcttctttcatcaattcccccataccctgaaccaatcagtcaccaagtatactaactttgcctctaaagtatgtctcaaatg

SEQ ID NO: 36666 - DNA, 628 bp, Homo sapiens
aaaaggagaccagttagaaagctgttgtaacttatacatgcagtggttagtgcttggaagtttgaagctccttttgsgaggttttgacattgtcaatgtcctgttcggaacagaatcccacaacagggattgctcttttatccttatgaagtaggtattattattgtcatcatttcacaaaaaggaaaatgaaacttagtaaaaaacttcaactttataagcttgtacgtagaagggccaggatttatatatttattacaaatatatattatatatataatatggtcattttaaaaattgggattatacgttatatatggttttatcactttttcttttcttttttttttttttttttttttttttgggacagagtcttactctgtcgcccaggctggagtgcaatggcgatggcgtgatctcagctcactgcaacctctacctcttgggttcaagcgattctcctgccacaccctcccaagtagctgggactaccaatgtgcgccactatgcctggctaattttgtatttttagtagagatggcatttcaccctgttagccaggctggtcttgaactttgacctcaggtgatccacacaccttggcttcccaaagtgttgggattat

SEQ ID NO: 36667 - DNA, 552 bp, Homo sapiens
ggagatatttttgytcggcaaagtcctgatagctagaagacacagctgttcactgggtgatgcttcaatctattttaacatgtgatattgtattattcagagatttgactcgagaacagcataggactgcatttctaagagatgacacatggacatgcacagacacagataataattttgccttgtaaagcctcatctcataaaaggcctggctcagatgataagattgctcatgaagtcctgatgtaattgacacaggtgccatctaggtgatcgctgacttcccagactcatgggcttcaccaccttcgggtgcctttccccactcggtgcagtccttcctccttccctgttccaccaatgccttccttgtcctaattaactccaagactctttccgaacatggcttaggtgtgagcccttctgggaagatgccttgggatccaagctgagttaagtctccttcaaagtactccctagcatcctctgccaaccttggttctaaggttcattctcatcttcgttctagtcatttgcctgtgtccctcatta

SEQ ID NO: 36668 - DNA, 552 bp, Homo sapiens
ggagatatttttgttyggcaaagtcctgatagctagaagacacagctgttcactgggtgatgcttcaatctattttaacatgtgatattgtattattcagagatttgactcgagaacagcataggactgcatttctaagagatgacacatggacatgcacagacacagataataattttgccttgtaaagcctcatctcataaaaggcctggctcagatgataagattgctcatgaagtcctgatgtaattgacacaggtgccatctaggtgatcgctgacttcccagactcatgggcttcaccaccttcgggtgcctttccccactcggtgcagtccttcctccttccctgttccaccaatgccttccttgtcctaattaactccaagactctttccgaacatggcttaggtgtgagcccttctgggaagatgccttgggatccaagctgagttaagtctccttcaaagtactccctagcatcctctgccaaccttggttctaaggttcattctcatcttcgttctagtcatttgcctgtgtccctcatta

SEQ ID NO: 36669 - DNA, 552 bp, Homo sapiens
ggagatatttttgttcggcaaagtcctgatagctagaagacacagctgttcactgggtgatgcttcaatctattttaacatgtgatattgtattattcagagatttgactcgagaacagcataggactgcatttctaagagatgacacatggacatgcacagacacagataataattttgccttgtaaagcctcatctcataaaaggcctggctcagatgataagattgctcatgaagtcctgatgtaattgacacaggtgccatctaggtgatcrctgacttcccagactcatgggcttcaccaccttcgggtgcctttccccactcggtgcagtccttcctccttccctgttccaccaatgccttccttgtcctaattaactccaagactctttccgaacatggcttaggtgtgagcccttctgggaagatgccttgggatccaagctgagttaagtctccttcaaagtactccctagcatcctctgccaaccttggttctaaggttcattctcatcttcgttctagtcatttgcctgtgtccctcatta

SEQ ID NO: 36670 - DNA, 1176 bp, Homo sapiens
tactgctcttgggttgtatgttattaaacttatcccatattttcatgaggattcacttacatatatattcctgccactgctttgtgagaattttgaaggtttggatcgtatcatttttagcttcacatctctccacgagcatctcgtccgtgtaagttatcagtgaactttaagtgaaattattattgctttagagtatggatttctttcctgacttaaatcactacagagtatttccttaatggttaaaataatattctgatacccattaaaataattttcaaactcttaagataaatgtcagttttaatgtaagcaccaataaacaggctagtggttttccactctcaaaattcagagatctctttcccttccactcaaaaatgtaaattcttacaatgacagatccactcaagctatagtcaaaagaataaaacagttccctacatggatatgtccccttccacaggctgcccagtctataatcaaaaatgttgccatgactcaatagaaatttatattttagtatctactctgtatctggcaatgggcaaatatatgaagaaaatagaaacctcaactttgttcagtattcagttgggaagaatagatagacaactaaatatcaaagagctacacatcaaagtgctgggagtataytcaggaatgctttgcttgacctaactggctgttgtccctcagaactaataatttgcaatttggaactgctcaccttggatagttagcccaactatgctgccaatattcaaacacaactgaaattcattccttagtattacattacctttatggaagttttcaaactacacactatgagtctctcttgctactttgtaatattgataccccaaatttcagttgccttggtattcacaattcatatgggctattccctttaatattcaatgctaaacacacataaatttctattaagtgaatattaatggtgatatttaatatttagttctattaaaatagcttatccccaccctatatgtagggaaaaccaaatctctcgatatttttcttacttcttctactcatttccttttgttttgctttgttttcattctttttttcattagaggtgaaaacaatatcccatttttcattcgtataaatatgaggtgtacaagtacagttttgtacaatgca

SEQ ID NO: 36671 - DNA, 532 bp, Homo sapiens
tgagaaaccagttaccaacgactaaaacattttttagaagtcaaaattgcaagtgaaatctaaggtgtcrtaaatttattcgattcaaaaaatgcatactaggaaatcagtttctcaacgagaaggacggactggtttccaggtggtgttaatggggcagtcactgtcgctcagctgcagaaggtgtgggtcctgggcaggaaggcagcgctggttcctcctgccccagccatgctcaccatcgtgggtgcgggcatggggcacgcgtgggaatggggtgcgggcccagggtgcgcgtgggaacggggtgcgggcacagggcatgtgtgggaacggggtgcaggcaggaggcatgcttcttcagggttagagactatcctcagctgtgctatggaccaggcactgtgccaacagccctacagctattcatcaagctccagcgaccatcccgtgaggctggtgctatgatcctctccaggcacagagagctttagtcacttgcccaaagtcacatagctgtgagcacggacag

SEQ ID NO: 36672 - DNA, 532 bp, Homo sapiens
tgagaaaccagttaccaacgactaaaacattttttagaagtcaaaattgcaagtgaaatctaaggtgtcataaatttattcgattcaaaaaatgcatactaggaaatcagtttctcaacgagaaggacggactggtttccaggtggtgttaatggggcagtcactgtcgctcagctgcagaaggtgtgggtcctgggcaggaaggcagcgctggttcctcctgccccagccatgctcaccatcgtgggtgygggcatggggcacgcgtgggaatggggtgcgggcccagggtgcgcgtgggaacggggtgcgggcacagggcatgtgtgggaacggggtgcaggcaggaggcatgcttcttcagggttagagactatcctcagctgtgctatggaccaggcactgtgccaacagccctacagctattcatcaagctccagcgaccatcccgtgaggctggtgctatgatcctctccaggcacagagagctttagtcacttgcccaaagtcacatagctgtgagcacggacag

SEQ ID NO: 36673 - DNA, 532 bp, Homo sapiens
tgagaaaccagttaccaacgactaaaacattttttagaagtcaaaattgcaagtgaaatctaaggtgtcataaatttattcgattcaaaaaatgcatactaggaaatcagtttctcaacgagaaggacggactggtttccaggtggtgttaatggggcagtcactgtcgctcagctgcagaaggtgtgggtcctgggcaggaaggcagcgctggttcctcctgccccagccatgctcaccatcgtgggtgcgggcatggggcacgcgtgggaatggggtgcgggcccagggygcgcgtgggaacggggtgcgggcacagggcatgtgtgggaacggggtgcaggcaggaggcatgcttcttcagggttagagactatcctcagctgtgctatggaccaggcactgtgccaacagccctacagctattcatcaagctccagcgaccatcccgtgaggctggtgctatgatcctctccaggcacagagagctttagtcacttgcccaaagtcacatagctgtgagcacggacag

SEQ ID NO: 36674 - DNA, 589 bp, Homo sapiens
tcgtgaccttgggagccccatggtcccccacccatgtgggcagacagcccactggcctgcgggtgcaaccacagctcactggacaggagcagagcgtgagggatggtctgcaagcagaggctggctcctctctaccagtggggcggggaggccccagcaccacgttcccccagtgcctggacatctgcctctgctgcgtggacatggtgggggcgaggaggatgctttgtcccagggcaggggcaggtggaggccaggacacgggaggagcagtgcttgcagagggcagcagaccttaggaatcaacagtgcgtggccaggaggcgctgaggggacgtgaggcctgggtgggaggaaggggacccttggtgtctttgcttytcaaacgtcaacctgcacccaagatgagaagaggagtctgggagaagggtccctgcacagcagggtggctgtgtcctcaggaaaagaaacacacacacacacacacacacacaggaaggccctccctgcacagtgcgactcggttaccttggcccatctgggatagagtaggtggcacctaagttcttttccttggaggacaccattc

SEQ ID NO: 36675 - DNA, 2609 bp, Homo sapiens
agatttctaaaacatctgatctgaggcaaatattgaaaatgagacgtgctctttaaagttgaattatctttcaggatacattttattttattattcagataaatggaatccttttaataccctaaaatgaaaatagtttaacaatatgaattgtcttttttgttacgagtcatgtgattttaattggcaatatttcaatgactgttttacttttagcatctaagtrtctcctttttttctatttttaacggttatttgaataatctgccatagccatgaatgttaactgactgtgtaacaagtcacaattttagaattgtattctaaacttttgctgagcaacgattttgtctgtgctacacaccagaagaaacataaaacttgattaatgatcctcatgtttctaagtatttatagtcaccgctctaagaaagacaaatatacacacaaaattacaaataagccaaaatattaaactttcataatggagatataaacatgtattacagattcatgagggagggagaatatgttggatgaaatatcacattaaaagtgagtcactggaatctagccacaaaagtagtcaagttggtcagtatgtgaaggatcagggacactacaggaagagggacaaacatgaacacagctgctgaaatgtacaaaggtgtgatatatgtacgtaatggcaaataaactagtattgtctggggtcttgggaagcttggcaaaaacagaggaaaaataagatttccctcaccttgtaatagtcttcagatactgttttaaaacaactgagaaattacttatagaaaatgtgtataccagcaaagctcttaaataggggggtcatagagccagaagacatcttttggaaaacaactgtagtggctgtatgaagagtaggtggctggcccagcagattggaggaagggagatacctttggatgcatctggaatgtttctagggaagcataagctttccagatgcaatgttaaagaaaagggggaaacagctgccaaagtaaaatgtagctcctgttgcggtgacttgatcactaactggtataagaagtaagagagcatatgaaggattaaagatgaatgtgaacaccaagccttcaaggttcagtggcttcagggatagttatgcctttaatagataaagaacacaggatgaggattgggtctgtgaacaaaactattttaggtatgggaaaataatgtatatttgagagttttgcgtttatctgatgtgaagtctcatggtagatgagattttaccaggacaggaggtaaaggataagagaatggaacagatgctccagcaaagtgcagtgagaaagaatgaaagggatgtatggaaaatgatatgaaaatcttattttagagattttgtaagaacagagtttaaggaaaaggagtggtaatcaacaaatttggaaattacataaagtcgaagaaggatgaagattgaaaagaggttgatggatttgaaaagcagatcatcatgagtttgtttttagctttgattccctgaaagctgagattggaattcttgtgcatgtgtgctctctgcggaaacttctaaccttactagggaatcaagacaaggaggggaacaagatcagatggagatgaggttcagcctgattccagggagacctctagagtgtgaattgcacccgagtcttctcttgagccaaaggcctgggctgtagaaccgtacagcaactaggcaatggctatgaacaaactctgcagtggccactgagtgggaatctagacctcagggaggcagttctctgcattcaagggtaaccatccactgaagggtgcacatgtgaattaaaaagtcctggaaatttaaccatcacctctatattggaataacctttgatccttgtgtgttttttattttgttctgtttttgtttttgtttttttttagacagagtctcactcactctgtcaccctggctggagtgcagtggtgctatctcggcttgctgcaacctccacctcccaggttcaagcgattctcctttctctgcctcctgagtagctgggattacaggtgcccgccaccatgcccagctaattttgctgtgtgtatttttaagttaatttgtgttagaaaaatatcaagtgtaattttctggaaacccatgtcttttaatattgaagagttgtaataaaacatttctggggagaagatctgaaaaacacgggacttattcatataacctagcaaaatatggaattgtcattttagggtagctctaataattactatacagtgattctccaccacaaaagaatgctagtaataagctcatggattccttttttatactgtaataattaatgcctttaatttttgaacactgagattctttatgtttctatttttgttttaagtatagtgcaactttttaattcattggcttcttagtgtcacatcttgacacacaactgttagatttgcctttaacctaaaaatcagtaaggtttttttttaatcgtttagtcttttttcagctttattaaaatataattgacaaaactgtacatatttaaagtgtactgcttaatggcttgatacacata

SEQ ID NO: 36676 - DNA, 2609 bp, Homo sapiens
agatttctaaaacatctgatctgaggcaaatattgaaaatgagacgtgctctttaaagttgaattatctttcaggatacattttattttattattcagataaatggaatccttttaataccctaaaatgaaaatagtttaacaatatgaattgtcttttttgttacgagtcatgtgattttaattggcaatatttcaatgactgttttacttttagcatctaagtgtctcctttttttctatttttaacggttatttgaataatctgccatagccatgaatgttaactgactgtgtaacaagtcacaattttagaattgtattctaaacttttgctgagcaacgattttgtctgtgctacacaccagaagaaacataaaacttgattaatgatcctcatgtttctaagtatttatagtcaccgctctaagaaagacaaatatacacacaaaattacaaataagccaaaatattaaactttcataatggagatataaacatgtattacagattcatgagggagggagaatatgttggatgaaatatcacattaaaagtgagtcactggaatctagccacaaaagtagtcaagttggtcagtatgtgaaggatcagggacactacaggaagagggacaaacatgaacacagctgctgaaatgtacaaaggtgtgatatatgtaygtaatggcaaataaactagtattgtctggggtcttgggaagcttggcaaaaacagaggaaaaataagatttccctcaccttgtaatagtcttcagatactgttttaaaacaactgagaaattacttatagaaaatgtgtataccagcaaagctcttaaataggggggtcatagagccagaagacatcttttggaaaacaactgtagtggctgtatgaagagtaggtggctggcccagcagattggaggaagggagatacctttggatgcatctggaatgtttctagggaagcataagctttccagatgcaatgttaaagaaaagggggaaacagctgccaaagtaaaatgtagctcctgttgcggtgacttgatcactaactggtataagaagtaagagagcatatgaaggattaaagatgaatgtgaacaccaagccttcaaggttcagtggcttcagggatagttatgcctttaatagataaagaacacaggatgaggattgggtctgtgaacaaaactattttaggtatgggaaaataatgtatatttgagagttttgcgtttatctgatgtgaagtctcatggtagatgagattttaccaggacaggaggtaaaggataagagaatggaacagatgctccagcaaagtgcagtgagaaagaatgaaagggatgtatggaaaatgatatgaaaatcttattttagagattttgtaagaacagagtttaaggaaaaggagtggtaatcaacaaatttggaaattacataaagtcgaagaaggatgaagattgaaaagaggttgatggatttgaaaagcagatcatcatgagtttgtttttagctttgattccctgaaagctgagattggaattcttgtgcatgtgtgctctctgcggaaacttctaaccttactagggaatcaagacaaggaggggaacaagatcagatggagatgaggttcagcctgattccagggagacctctagagtgtgaattgcacccgagtcttctcttgagccaaaggcctgggctgtagaaccgtacagcaactaggcaatggctatgaacaaactctgcagtggccactgagtgggaatctagacctcagggaggcagttctctgcattcaagggtaaccatccactgaagggtgcacatgtgaattaaaaagtcctggaaatttaaccatcacctctatattggaataacctttgatccttgtgtgttttttattttgttctgtttttgtttttgtttttttttagacagagtctcactcactctgtcaccctggctggagtgcagtggtgctatctcggcttgctgcaacctccacctcccaggttcaagcgattctcctttctctgcctcctgagtagctgggattacaggtgcccgccaccatgcccagctaattttgctgtgtgtatttttaagttaatttgtgttagaaaaatatcaagtgtaattttctggaaacccatgtcttttaatattgaagagttgtaataaaacatttctggggagaagatctgaaaaacacgggacttattcatataacctagcaaaatatggaattgtcattttagggtagctctaataattactatacagtgattctccaccacaaaagaatgctagtaataagctcatggattccttttttatactgtaataattaatgcctttaatttttgaacactgagattctttatgtttctatttttgttttaagtatagtgcaactttttaattcattggcttcttagtgtcacatcttgacacacaactgttagatttgcctttaacctaaaaatcagtaaggtttttttttaatcgtttagtcttttttcagctttattaaaatataattgacaaaactgtacatatttaaagtgtactgcttaatggcttgatacacata

SEQ ID NO: 36677 - DNA, 807 bp, Homo sapiens
tacttgccttgtcactctccgcaaggctgaaatgagtgttctgtgtatgtgtgtgtgtgtaagtgtgtgtgtcagtgtgtactttaaaaaatgatatttacatactttgtgtcaatgaagtaatatatcatccactggaaactacagggcacatacaactttaaagcacaaaaattacactcacaatcccaaccctgagaaggaccctyggtgattattttcaggtgtgtgtccagccgttttcccatgtgaaatacacacaagcagacatatacacatatatgcctgcatacataattacgtgtgtgtacctaccacacatacacatgctattaatatagttacaaacgtaatatccttgtcaagataacaagcaaaacttgactcagatgaagacactgaaattccaccctgggacccagtgtcgcctcctccccacagcagccagcactggggactccgcagacgcgtttccatgggctcaggcccccgtgtccctgtccagagcgaggctggctcaggcccccgtgtccctgtccagagcggggctgggtctgcccgtctcagaggagcagctggccctgcacagccccttcccgggctgcagcgtggcccccagtctgtgctggtgcatggagagctctgcccactggtttaacggccactggcgctggccatcctgggcaaagctgacagtggtgagaccacactccctacagaattcgtatcctgctttgattaacttaatttcctttgtaaactttcctttgtaaacatttttaggaagttgtttttgatgccaaacga

SEQ ID NO: 36678 - DNA, 600 bp, Homo sapiens
tgcttctcatacaatgtaaatacacaactaatcaacaattaaagtttcttaaaaagtcttgatttttctccctctccctctccccacggtctccctctccctctttccacggtctccctctgatgccgagccaaagctggactgtactgctgccatctcggctcactgcaacctccctgcctgattctcctgcctcagcctgccgagygcttgcgattgcaggcgcgtgccaccacgcctgactggttttcatgtttttttggtggagacggggtttcgctgtgttggccgggctggtctccagctcctaaccgcgagtgatctgccagccttggcctcccgaggtgctgggattgcagacggagtctggttcactcagtgctcaatggtgcccaggctggagtgcagtggcgtgatctcagctcgctacaacctccacctcccagccgcctgccttggcctcccaaagtgccaagattgcagcctctgcccggccgccaccctgtctgggaagtgaggagcgtctctgcctggccgcccttcgtctgggatgtgaggagcccctctgcctggctgcccagtctggaaagtgaggagtgt

SEQ ID NO: 36679 - DNA, 600 bp, Homo sapiens
tgcttctcatacaatgtaaatacacaactaatcaacaattaaagtttcttaaaaagtcttgatttttctccctctccctctccccacggtctccctctccctctttccacggtctccctctgatgccgagccaaagctggactgtactgctgccatctcggctcactgcaacctccctgcctgattctcctgcctcagcctgccgagtgcttgcgattgcaggcgcgtgccaccacgcctgactggttttcatgtttttttggtggagacggggtttcgctgtgttggccgggctggtctccagctcctaaccgcgagtgatctgccagccttggcctcccgaggtgctgggattgcagacrgagtctggttcactcagtgctcaatggtgcccaggctggagtgcagtggcgtgatctcagctcgctacaacctccacctcccagccgcctgccttggcctcccaaagtgccaagattgcagcctctgcccggccgccaccctgtctgggaagtgaggagcgtctctgcctggccgcccttcgtctgggatgtgaggagcccctctgcctggctgcccagtctggaaagtgaggagtgt

SEQ ID NO: 36680 - DNA, 847 bp, Homo sapiens
taagtacgttttccttgcatcctttcctttctccctggatgattctgcaatagcactcagcagtgggaagcaagaagcggtaagtggagggcccaggggcctggaaccagcatccccctggagtgcagacatgcagtgcaaccttctctgaagacctgggctttgatcctacagcagtgaagctcccaggctgcttaaccttgggtgtgccatttcacctctctgaccccagtctctttttctctcatggggctgggggaatgtacacaggaggagttgccctggacagcagtggccagcaggtgctggcagcctggacaacccagcaccatcagactccacagcatgcacatgggccccagtggtgagcacgccccacgacagcctccagcaggggcagctggttccacagggcactgctttggcttctaaaatctggattcaccgtgtgttctcagggtcatgtgcagagggttttgtgcttccttttccaggcaggtgcatcctctgyggcttcggggcagcctgggctaaattccccctgcctgcacatgcatgtgcgtgtctgtctgtcaatagagggataaacatccacccacatgcacacacccatttgcacctacagcttccagctcctcccgctagataaatacacactaacacatgggcgcacacagcataaaagctcggcttccctgggatgatacccaacctgacctctggaggagaatagggcttttcttctcttagggttggagaatttaaaagatagcagggacctaacaaattaggaatgctcactcttttcaatatagaagcacttagcatctctctggtcttagaagcc

SEQ ID NO: 36681 - DNA, 569 bp, Homo sapiens
tgaaagatttagcttcagtaatgcctctggtaagatcccatgggggcctgtggctgccccatctgtgctgtggtctggctaaccaggtgggagagagcagggccactctggatcagggtatccagagccttctgtacacttggattgtcaaagttgatacctgtggaagacacaggcctctggctagtcatgttgctagcaggtgccaggcgactggaaggctggccaaaaagcccttgggaaggagccccaggtctggggcccatgttctgagcagatcctccctgtcccaaaatgcttggaggctgattgccagaagcctgtgatctttgttgaggctggctgtttgctgctgtggaaaaattctggtttggggtgtttccggcagcaaccgagggggatgcagagctgctattggccgtcackgtgccactattgaagaggctgaggattttggcctgaagctcttgctgggaggtggggggtgcagatggagtgggtgtagcagaggggagcacttggccgctctggagcggttgggagcttggctgtgtcttcagcgaggcacc

SEQ ID NO: 36682 - DNA, 566 bp, Homo sapiens
aggcttctcccatctgtgtctctgcacccactagggctttggaaccctctgcttccatcttgtgagtgatacagtcttgatgtgagatgtgtctcgtaaggtgtatcttgcaggtgaaacaaaaaagaaaacgaagaagtgccaattacttcttaaaagcctcagtctggaagtggtacatgtcacttctgcttatattccattgacaagagctagtcacatgagctatccctggatgtayagggagccgggagtatccctggatgtatctagctgggtgcatgtcttctagaatcaactttatatgacaaaaaagggagcaggaggtttagtggacagttgatcccatctgcatagttcctcatggatttccatgcctcagtcccagttccagaagacctcacatggtcccagaagacctcacattgccacacatgatctcgtcataaaccacctccccctttatgtgagtcacattgagacacatcggtcctagccaccaaatcctttgatgaaggcatgaagccacactcatttaggataaggtgttgcaatgtaacaaaaaa

SEQ ID NO: 36683 - DNA, 566 bp, Homo sapiens
aggcttctcccatctgtgtctctgcacccactagggctttggaaccctctgcttccatcttgtgagtgatacagtcttgatgtgagatgtgtctcgtaaggtgtatcttgcaggtgaaacaaaaaagaaaacgaagaagtgccaattacttcttaaaagcctcagtctggaagtggtacatgtcacttctgcttatattccattgacaagagctagtcacatgagctatccctggatgtacagggagccgggagtatccctggatgtatctagctgggtgyatgtcttctagaatcaactttatatgacaaaaaagggagcaggaggtttagtggacagttgatcccatctgcatagttcctcatggatttccatgcctcagtcccagttccagaagacctcacatggtcccagaagacctcacattgccacacatgatctcgtcataaaccacctccccctttatgtgagtcacattgagacacatcggtcctagccaccaaatcctttgatgaaggcatgaagccacactcatttaggataaggtgttgcaatgtaacaaaaaa

SEQ ID NO: 36684 - DNA, 566 bp, Homo sapiens
aggcttctcccatctgtgtctctgcacccactagggctttggaaccctctgcttccatcttgtgagtgatacagtcttgatgtgagatgtgtctcgtaaggtgtatcttgcaggtgaaacaaaaaagaaaacgaagaagtgccaattacttcttaaaagcctcagtctggaagtggtacatgtcacttctgcttatattccattgacaagagctagtcacatgagctatccctggatgtacagggagccgggagtatccctggatgtatctagctgggtgcatgtcttctagaatcaactttatatgasaaaaaagggagcaggaggtttagtggacagttgatcccatctgcatagttcctcatggatttccatgcctcagtcccagttccagaagacctcacatggtcccagaagacctcacattgccacacatgatctcgtcataaaccacctccccctttatgtgagtcacattgagacacatcggtcctagccaccaaatcctttgatgaaggcatgaagccacactcatttaggataaggtgttgcaatgtaacaaaaaa

SEQ ID NO: 36685 - DNA, 806 bp, Homo sapiens
agtgggagataaaagaatcatggaggtggtttcccccacactgttctcatggtagtgaataagttttataaggggaatggttttataaggggaaacccctttcacttgactcttattttctctcttttctgctgccatgtaagatgtgcctttcgccttccactatgattgtgaggcctccccagccacttggaactgtgagtccattaaacctctatttctgtataaattactcagtctcaggtaygtctctatcagcagtgtgaaaatggactaatacatctgatatgcacttttacccaggatacgcaaagtattataaatcaataataagaaatagtcaactaactttagaacgtcagtgaaagtggaacagaaaaaaaatgaacattgttactaaagaagaaacatggatggcaaatagcacatgaaatatattagatcacatgtagcactgaaacttttaacaatttgaaaggcaagaaagtatattcttttataattgaatacttggcaatgtttttaagtaattttttaaaagtttttatattaatgtattctctagcaatattacattattcttgtttattatcttattctttgtatcaattttggcaaattgtatttccttaaaaactgataatatgcactgtttttcaagtttatgacgaaaaattgtataaattatttttagtttaaaaatatctaacattatttatttatttcaagcctttttattttatacatgtgccttacaatcaatatatccaaataaggccaggtgtggtggctcactcctgtaatcc

SEQ ID NO: 36686 - DNA, 790 bp, Homo sapiens
ggatccgggttgccccggggactcattcakgggtgagcacaccttgtacttttccctcgttgtttccctccttcccctcctggaaatgcctcctgcggaaaccactcaaacccttgtctcaggaccatggcaggggtctcctttcttacagggctggctgcttcctcagtcaaggcttctttggctatttacttatctaaaatgaaaactccagccatattctcagtatttcatagcctccttttccatgttgttctcattctttaaagtactacctatttcacctacttgtagtgttctctgtatccctctcctaccagaatgtgacatggacggtaatgtcagccttcttcactcctggttaagcagacttgagaaaagggcctggcatacagtaggcattcagtaaatgctttgtgactctgtcgagaggtgacagcatgctggcagccctcacaggccttgctcgctctcggtgcctcctcggcctcggcgcccattctggccgcgcttgaggagcgcttcagcccgccgctgcactgtgggagccccctcctgggatggctgaggcaggagccggctccctcagcctgcggggaggtgtggagggagaggcacgggcgggaaccagggctgggagcggcgcttgcgggccagctagagttccgggtgggcgtgggcttggcgggccccgcactcggagcggccgggcagtgaggggcttagcacccgagccagcagctgcggagggtgcgccaggtcccccagcagtgccggcccaccggcgctg

SEQ ID NO: 36687 - DNA, 790 bp, Homo sapiens
ggatccgggttgccccggggactcattcaggggtgagcacaccttgtacttttccctcgttgtttccctccttcccctcctggaaatgcctcctgcggaaaccactcaaacccttgtctcaggaccatggcaggggtctcctttcttacagggctggctgcttcctcagtcaaggcttctttggctatttacttatctaaaatgaaaactccagccatattctcagtatttcatagcctccttttccatgttgttctcattctttaaagtactacctatttcacctacttgtagtgttctctgtatccctctcctaccagaatgtgacatggacggtaatgtcagccttcttcactcctggttaagcagacttgagaaaagggcctggcatacagtaggcattcagtaaatgctttgtgactctgtcgagaggtgacagcatgctggcagccctcacaggscttgctcgctctcggtgcctcctcggcctcggcgcccattctggccgcgcttgaggagcgcttcagcccgccgctgcactgtgggagccccctcctgggatggctgaggcaggagccggctccctcagcctgcggggaggtgtggagggagaggcacgggcgggaaccagggctgggagcggcgcttgcgggccagctagagttccgggtgggcgtgggcttggcgggccccgcactcggagcggccgggcagtgaggggcttagcacccgagccagcagctgcggagggtgcgccaggtcccccagcagtgccggcccaccggcgctg

SEQ ID NO: 36688 - DNA, 599 bp, Homo sapiens
tggctgatttgttaaataactaaatccatgctcaccaaccacctgctaaaaatgccccttcaatattttctgcctttatcttcaacctcagcttttactcaatttttgactactggcacctaatattcaaaaatcactcttattaaaaaaaataagtggcagcctccacagacagctactgactcatcttattcccttcatagtcaaaggtcttaaaagacttaacgacacgtagctctactggaargggacattttgggggtggttggagactgggttatttgctgattgtgacaatttgacaagaaactcagaaattagataaccaaataacagagatatgaaaagctttactcacatcttaacttactaaagtcttgattactataccagtgaaatggttctcaccaaaggcactaataatttctctgtttttaaaagtagtaggtgcataatattcatattacttgatctgtctacagtatttgataacagcaatcacttacaacttaatattctcctggctttcatgatctaatacttttacaggatttcagctaccactacaggtactcttccttagtctccactgtgtgctg

SEQ ID NO: 36689 - DNA, 601 bp, Homo sapiens
gctttttagagagatgtgtgtgtatacatgtatatatatatttaaacacagtattatatctttgccattctgcttctatgtctatagggagtcattttataattaaatatgttaaaacacttgttataaatccgttatttctgtattgatatgtttgatcttaattccaacttttaaaatttaaattggcttataagaaaatttaaatttgacagggtaacttaaattagaaggtttgcaaaaggagaaagagtaggagtatattgaaatctggaataaagtgaaaaatgagaaaaaacaattatattttttccccagccctgaaagatctctatattagcctaytcccttccatttagactctgtggatttgacattcttctaacatcttagacaaaggcaaaaatagcaatcctaactactcaccccatcatcccaggaacttacaacattgaatgtaagttgtgtgagaaactatgaggtcttgaaggaagccttgcaggctgcggcaataatgaccctcctgtcatgagcataccatgaatttggctctaagttttccagtttatacagttcccaagttcatgagaggaaaacaaac

SEQ ID NO: 36690 - DNA, 1202 bp, Homo sapiens
cattaaagcacatggcgagtacctagatattcttactaacaaacttaatttattccaatttaaggaaagcaatatgaagaacatacattaaatattttcccctccatgttaatgtttcagttaagtagacgaaggaattcagatttagtcttcatgtaaaacaggtaactttgctcaggaaaagaaaaacctacctgttttctatgactcgtgacatatattctctggtagtccttgtgatcagacatacacataccacatattgattacaaatagggtattaaacaaagtaagtaactctagaccctaccaccacttcagtgacccgaaatccactatttaccaacaatagctagtaatagcaatttttggtcacataattaagcagcattttctttccctgattatttaagaaaaactaagtaaatttatctcactgaagaatattttaagccttaagtcaacattaaatttcttgttattgattataaaccagtatacttcaagaggatatatttctgtatataaaagtagtctttcataactgtctgtatttctaagttaatatataagtttatctagataaaaaatacttaagaaacataaaccaaaatattttatgaaattgtttttatattagctaagtataaatttattgctrtataacaaattaccacttggtggtaaacagtgaacatttatcttaacagtttctgaggttcaagaatttaggagcaatttacctgagtgattctatcttagattctcttataaggctatatttaagattttggttatagttgcagtgatccgaaggcttcactggagcaggaggacaagcttctaagatgactcacttacatgccactgcaggagtcctcagtgtttcactggcttttagcagagtgcttcattccattgccacatagacctgtttttggtgttacttaagtgccctcacaacgtggcagcttcctttttccagaacaagggtaaagagataaagactgagccacaatgtcatttataatctagcctcaaaagttacacacagtgttttctgtttgttgagcaaataacttctattcagtatgaaaggtgctttacagggcatgaataccagagatggggatcgttggggccatcttggagactagctaccacgttaagaataaataatacttcttaaattaagcattttt

SEQ ID NO: 36691 - DNA, 2614 bp, Homo sapiens
  misc_feature (1)...(2614): n = A,T,C or G
gatccattcacaaaatattatttttgtttttgagatttccacatttttaaaaaggtttccccttcataggatgtgacaaaaggggttgggtcctgatttacagccaagtcttggcgtttctggttgctcaacactgaacacaagggccacagaaaacagaagtaagatgtgaattattagggttctctttagttttcggagttgctttataagcttattcaaaactacccatgttagagggggaaaaaaaaattagctttctttcctacaagccgaagaggtgtgcgtatgttattgtgcagagaaatttccaaaatagattctttcttccactttgtgtcttattccttttgcctgctccttcggcccgactcttccgcaccctacgcaacacatgcacacacattctctacccctcctcactctctgaagctgagggccctcctgacaaatcaaatccccctctcccagtttgagaaaacaagatgccacaacctgcaggggcccatctgagcacagcgagcctgcccactccagagcagcaatcaaatcccttgtaatcctctaagctgtgataagtctctagtgttcacataataggtcagatcctcttggggcagatagggcaggacagccctccagggagctggcttgctcatctgcgtggccaagtccccagctcttaccaccggccatatcagattctgcactcaatgattccagggctgcaccgctgcagtgcttgaagtgggggaggcaatggggaaggccagcacactctaacgactgacaggttttattctggatctgcggctctcacattcttctagaccctcactaggctgctagtctctggctctcaagtcaaggtcttgccccatctcctgaatctttgattactttttccttccactcatgtttacctaccattcttttctttgaaagactctcacttttttcccccacaatatatgtcttccgtctttgcttcttctctatttacttcagagtcttttcctgactgccactgacaacctctatggcactccattggggccacctgtgattcattgggagaacaggcaaacataccaggaacctgttcccaataagtgnnnnnnnnnnnnnnnnnnnnnnnnnnnnnnnnnnnnnnnnnnnnnnnnnnnnnnnnnnnnnnnnnnnnnnnnnnnnnnnnnnnnnnnnnnnnnnnnnnnngaatttttctgctatctcgcattctacgaactttcagcaggatagtatgataggatgcacttagaggaaagaaccgtcctagaagctctttgctcaatctaagccttgccggtggtggcttaatggaagtcttcactgaagctcagggatctgagtgggcactctcatgtgtgtagtggaaaggaggacgccagtctccaagagcagtctgcacggcatcctcgttgtgctgcggcacattcagtgacaggactggacgccctgctgcagctctggtggccggtgaggacagccccagttatccaaggacaccctgaggtaccaaaggcaggtgagcaagaccatgttcctgcctgaggtctggcagagggaggagaaagggtcaccaaaacgttgtggagagcactgtcccagcctgggatgggaggacttggctccatcggcagcaggtcgccatccctgaggacagtgcagtgctgacctctacttggggcttgaacacactcccctccccgctttaccaaggcaattagcaaagccagaagagaccagagttaactctggggatgaaggggaagtaaaagaacccctgaaggaattttcaagggtctgcgaccaatacagacacgaactgacaggcttatcccttaactggacagagacacctgctgtgactacttccagtctgtgtatcagccagaattccagctcctactagaaagctttctgggttatggagaaatgaagttacattttccctcatgagtttgtgatttaaaaatttatacctgcagaatgattctgacggatttgctcaagtggcttttgtcagggttatagtccgtatcttctctagcctcaaattaatgtgatgttgttgaggatgacttaaaattttctttgaaagtctgaaacatgatgcagaatgcttgcaccaaaagagttttacatttyccccacgcttgtacttactagagccaagtacatcaaaggtgtggattaaaacccgtgatgcagggaactctgacacttgtgataacatggatgaacctggaggacattatgttaagtgaaataaaccaggcacagagagacaaataccatatagtctcacttacatgtggaatttaaagacagtgctcacaggagtagagagtagcatggtggttaccagaggctagaggagagggtggatagggaagggggagatgttggtcagtaggtacatagttttgggtagataggaataataatttctgttgttcttttgcacagcatagtgaatgtagttaataagtgttgtctgttttgaaatatatgagaggattttaactattcttaccgctaaaagaatgatacatatttgaggtgactgatatgctgattagcctgattcgat

SEQ ID NO: 36692 - DNA, 512 bp, Homo sapiens
tgtcctgaaccccaacactaatatatttgggattggtgaggactctacctttgagcaaaagcaacagaaagttttgttcaagattttttattgttcctctttgtcagagcaactttgccagctctattttctgcaaggtgtttctaagtgcacgtttttaggaactcaggagtgataccttagctttttcttctcattggtctggagatatggtcttcaagtctactgaggggtataaagggttatgcaaggatatggaagatttctggggtctttacagctgggtaatatggccatatgtgggcattgtctacataggtttgtcatcacacgaacaggctgcctgagtatgctgaaacagagaaaaatctctgtgttcatcaccagtgttattaaaaaatgtttcctcttttccttctggatctggatgttgggtatagtcrtatattatctgctttagccaaggacatgagaagttattccaagttacctataggagaaagctttcagag

SEQ ID NO: 36693 - DNA, 536 bp, Homo sapiens
tatattggagaatacatccattttaaattaagaatttccctcagaactggaaagttggttaacacaatactgactccgtttataatatctcagatactgacactgacggatactgaaaagggaataaaaataatatgcaaaggtcctaaacgttgggttaaatggataatcataggcagtcatgatgagtgccattgtagacctactggaagatgacagagctagtgcagaggttcccaagtattctgttcatggagtcccaagtgtctgtatcagccaaggttctccagaaaaacaggaccaattatatgtaagaacatatatattttacatatatatttacatttatatattataatgatatataatatatatgatagagggagaaaaggctttattttaaggaattggctcatgtggtgtaagactgtgagactggcaagtctgaaatctgcagggcagactggcagactcaaaccttatgcaagagttgatgctgcagtgttgargaagagtttcttctccaggatgcctca

SEQ ID NO: 36694 - DNA, 637 bp, Homo sapiens
ggtcctccatttcacttatttatgaggtggccctgtgactgcaacttatggtctcgactaaatatgctggggctcaggctcttcacagggtagagggagaacatgacttatgatgcagctgaagagtgcacatgcagatggactaataaygactgcatgtaaggtgcgtttctttgactgttttgggtaatcggaatgattgatgatggggatatggacaagtcatattccatgaccacctccgtcatggagattttggttgggaaaagttttctgttgatggaattagatatacatatgtcgaatgccattttgaacacttgcaacagatcttcagagtttaaatcactttcaccacagttttggcaggactgtgacattttttttcagttgttcttcctgatgggagctataaatagctttgaggaaggatataattatcccaaagtagaagctaaagatgaaaaatctgcttgagattttttaaggaacatttaatagttattattatgtaacatttattaagtatgctcactgtgctcattgtctttgccaggaagaaactgggaataaaaagtcaatccaagatgtgacatgtataaatagactaaaaggtacatacattaatgtggtgcca

SEQ ID NO: 36695 - DNA, 637 bp, Homo sapiens
ggtcctccatttcacttatttatgaggtggccctgtgactgcaacttatggtctcgactaaatatgctggggctcaggctcttcacagggtagagggagaacatgacttatgatgcagctgaagagtgcacatgcagatggactaataacgactgcatgtaaggtgcgtttctttgactgttttgggtaatcggaatgattgatgatggggatatggacaagtcatattccatgaccacctccgtcatggagattttggttgggaaaagttttctgttgatggaattagatatacatatgtcgaaygccattttgaacacttgcaacagatcttcagagtttaaatcactttcaccacagttttggcaggactgtgacattttttttcagttgttcttcctgatgggagctataaatagctttgaggaaggatataattatcccaaagtagaagctaaagatgaaaaatctgcttgagattttttaaggaacatttaatagttattattatgtaacatttattaagtatgctcactgtgctcattgtctttgccaggaagaaactgggaataaaaagtcaatccaagatgtgacatgtataaatagactaaaaggtacatacattaatgtggtgcca

SEQ ID NO: 36696 - DNA, 752 bp, Homo sapiens
aaawaaaaaaaaaccaagggagagaatttacattccaaaatgtaaaattttgattccaaaatactgtcatttctaattcactcagttgctggtggacaacagaacattccacgccatgaaactacacaattattgagggaaaaacaaaaaacaaaaaaacaaaacaaaacaaaccaaccctgcagagcagcagctggctttttataagcttaacaaaagccatgttcaataaaactgaggtaggactgctgggtgtggcagctcacgcctgtaatcccagcattttgggaggacaaggcaggcggatcacttgaggtcaggatttcgagactagcctggccaacatggtgaaaccccatctctactaaaaatacaaaaattagcctggcgtggtggtgtgtgcctgtaatgccagttacttgggagactgaggcacaagaatcacttgaacctgggagacagaggttgcagtgagccgagattgcaccactgtattccagcctgtgtgacagagtgagactccatctcaaaaacaaacaaacaaacaataaaaaaacaaaaaactgaggtcagactgaattcacagcaaaagcttacaaaacgttttatttttagtttcaagttttaatccttcttctgtctgaaaaataggctacatttggattgtccaattatatggcaagaaagcacataagaaaaaactactgaagtcatacttaaggtgtagtatgaagcaaaatataaaaagtcca

SEQ ID NO: 36697 - DNA, 752 bp, Homo sapiens
aaaaaaawaaaaaccaagggagagaatttacattccaaaatgtaaaattttgattccaaaatactgtcatttctaattcactcagttgctggtggacaacagaacattccacgccatgaaactacacaattattgagggaaaaacaaaaaacaaaaaaacaaaacaaaacaaaccaaccctgcagagcagcagctggctttttataagcttaacaaaagccatgttcaataaaactgaggtaggactgctgggtgtggcagctcacgcctgtaatcccagcattttgggaggacaaggcaggcggatcacttgaggtcaggatttcgagactagcctggccaacatggtgaaaccccatctctactaaaaatacaaaaattagcctggcgtggtggtgtgtgcctgtaatgccagttacttgggagactgaggcacaagaatcacttgaacctgggagacagaggttgcagtgagccgagattgcaccactgtattccagcctgtgtgacagagtgagactccatctcaaaaacaaacaaacaaacaataaaaaaacaaaaaactgaggtcagactgaattcacagcaaaagcttacaaaacgttttatttttagtttcaagttttaatccttcttctgtctgaaaaataggctacatttggattgtccaattatatggcaagaaagcacataagaaaaaactactgaagtcatacttaaggtgtagtatgaagcaaaatataaaaagtcca

SEQ ID NO: 36698 - DNA, 532 bp, Homo sapiens
caatatcaccgggtggctgtacattcattgctctgttggcagtcatgtcatactctacccgctgggtattaggatcggtgtcacagggtgagtgtacacctactgtgatatgaaaactaatatcatgctctccatccctgactattaggaacaatatcacaggtaggtgtacaccccctgtggtgttaggagtaataatattatgaattattaaacatcagtcttattaagaattatcaatggtaagattaatagtataatgtcattaatcattaatgcttattttcaagatatgattatgcatgattaaaataattaatattaatgtcacttttaatattagttattaattttaatactaattattgttttattaccaacatcacttatgattgaagtaacattaattaccgatatcattattttattattaatagtgatattgctattaattattaatartaaccattaatatttttaatccatactgttttactgtctctactgtaattattaatatcgatgattacta

SEQ ID NO: 36699 - DNA, 1178 bp, Homo sapiens
cccagtgttgggtttacaggcgtgagccactgagcctggcttattattatttcagtgtatattcccaccatggcaacccatgcaggagcccacgcactagaacccctgggcacagggagaaggtctcaccccctgcccctgctgctgtgcgacctggggccaaccacacagcctctctgggcccaaccacacagcctctctgggcccacttccctagtgagggagccctgtgcgcacaggctgcacgtgtccaacagggctcctggcccccactcctctaaagccccccctcgcggagtcgccaggccttcctgtttactcgaggcccctagagcggctgggaggcgacagccttggcctcctctgctccccacttccttcctctcccacttcagcrcctccggcccaggccctcagggccctcgaggccaagacctggaggcacagtctttgcggggggtggggggagagcaggggtcatctgaggccactaccaagtgagtcctgcccgggagcacccaggttatagaggctctaatcccactggctggtcagaatgttccagcaccttgggacaagccactgcctggagtgtccctagagataagaagcgtgtgacagcattgacgttatccaacccaacaccacgcccaactctcagtccaccagtgggggtgagcactcactgaccctggaggggtcccctcctcctccacactcctccctgagctcctgcctccaccggaccccctctggccctccctccgccaagcaggatctccctaagctgctcacggtgtcagccgtagaccggcagcctgggcgtcaccacctaacctggacctgctgaatgagaatcagctttttcacaaggcccccaccccgggatattcgtgcgtgcaccaaagctggaagtgctgcagatctaaccttcctgtctggttttaaaacccgtcacgagtgtggcccaaaggcttaacctgaatctacgaagactttacaattaacttccagtttacagaaatgttgaaggataaaggtgcaagttaaacaacaccataaggagggacaggtgaatgtaggaggaggaattctccacagaacagctggttccttcacagaaagagggggagagtggtcctagattaaaagagatcttggctgagctcaatgactca

SEQ ID NO: 36700 - DNA, 369 bp, Homo sapiens
caatagcaaaaagggttccaggctcacttaactttaggaacgctgataagaagaccgcttacagctgcggaggtactgatttggtaaagggagggaaagagattgtatacgtgagagtgaaaaaattgggtagaaaaatggaagagcatcagaaattcacttagcaacaccaaatatatttggcaccactaacctagtttctcctgtgtttgcctttccaatccgttggaccttaggggatggaccgcccactttctccccagagcggctcccgggtccggttctcagtyctaatcactgccccaagcctccatgctccagggcctgtggtcacagagcaagtcccaaggagcagaagtaaagttctaa

SEQ ID NO: 36701 - DNA, 635 bp, Homo sapiens
gctctttctttgactcacgtgctcacaaagcaaagaagaaggctgtagagataaacacaggaacccatcggcagctggatcagtccagtttaaacgacaataaatatgatacacactaaccgtgtgtgacgtcttcattagggaattcactagaatcggccgaattcacacacttatcaccacacatgcgtcccctgtccccsctcaggagaattttcagctctactcccgtggatatattcacgagaaccttacattctgctccaccgtactcacgttgccctgccacggatatccaggaagcactccacctgtctctcggaaactttgtgccctttgacccacatctcgcattggcatcctttccctgcccctacacctgcccctacaccggccccaggcccagccaaccacctttctcctctctactttcctgatcctcacagcattttctccatccaacatcacaaggagatcacgcaatacgggtcggatgggcctggctgatttcactgggcaccatgacttttgggtccatgcataacgtcccagatgacaggctttcctttcctttccctgatgtgtttgttctacgaaccctattcatttgtccttctctagtcatctgctgaagg

SEQ ID NO: 36702 - DNA, 635 bp, Homo sapiens
gctctttctttgactcacgtgctcacaaagcaaagaagaaggctgtagagataaacacaggaacccatcggcagctggatcagtccagtttaaacgacaataaatatgatacacactaaccgtgtgtgacgtcttcattagggaattcactagaatcggccgaattcacacacttatcaccacacatgcgtcccctgtccccgctcaggagaattttcagctctactcccgtggrtatattcacgagaaccttacattctgctccaccgtactcacgttgccctgccacggatatccaggaagcactccacctgtctctcggaaactttgtgccctttgacccacatctcgcattggcatcctttccctgcccctacacctgcccctacaccggccccaggcccagccaaccacctttctcctctctactttcctgatcctcacagcattttctccatccaacatcacaaggagatcacgcaatacgggtcggatgggcctggctgatttcactgggcaccatgacttttgggtccatgcataacgtcccagatgacaggctttcctttcctttccctgatgtgtttgttctacgaaccctattcatttgtccttctctagtcatctgctgaagg

SEQ ID NO: 36703 - DNA, 1014 bp, Homo sapiens
gttttaatttaaattctgtttaaatagaaatttaaaattcaatgattcaaaaattcagatgaatttaaagaatttgtctctatgcaatggataacataccattttttttctttttattcaaactcattttccaacccataaccagtcactgaaatttcaggtatcctaggygaacttttccctatgattcattttcatttacttttcattgattttattttacagacttgtgagtattaaataaatagctctcactgagagctattaaatgacagaagatgtttaagtattataacatttagttgttacagtaaactcattaatattatgtacttgtcctatttgggctaagtagaaatgtttgcataaatttctatacaaggccagcttgcaccacattgactacacaaagcaaatcgtaggtgtatgactgtcgcattgctgaatacattcagataatcagaggctccttgcataacttgtagcccaagcatcgccaggatggccatgggaattgtcatctgacacctgatgtcacgtcctgggaaacacattcagaccctttggatgcacagaggcagtggggcatcaagggtgtgagtcttttctttctgtgacccaggtgagtaacttgcttccccttatgtgccctgctagtggacccggctcataacagctccagaccctgatgctactggtggaggccaaattaaagcataagggagtggttattcaggagggatatttccaagctatagaagctaaccaattgctttcctctgctccagatatatttcttcctaaagaaccaggactctgtgggtgatcaacagttacaatactgattagacacttaggaatttttattcagtcttttcctaaccctgcagggaccttcctatttcttcccataattgccacgtcttttttttcactccaggaattctcctgtcagaattcatctcagtttcccatgctctcttggcctttgtaaactggctggcaggaagtctg

SEQ ID NO: 36704 - DNA, 1014 bp, Homo sapiens
gttttaatttaaattctgtttaaatagaaatttaaaattcaatgattcaaaaattcagatgaatttaaagaatttgtctctatgcaatggataacataccattttttttctttttattcaaactcattttccaacccataaccagtcactgaaatttcaggtatcctaggcgaacttttccctatgattcattttcatttacttttcattgattttattttacagacttgtgagtattaaataaatagctctcactgagagctattaaatgacagaagatgtttaagtattataacatttagttgttacagtaaactcattaatattatgtacttgtcctatttgggctaagtagaaatgtttgcataaatttctatacaaggccagcttgcaccacattgactacacaaagcaaatcgtaggtgtatgactgtcgcattgctgaatacattcagataatcagaggctccttgcataacttgtagcccaagcatcgccaggatggccatgggaattgtcatctgacacctgatgtcacgtcctgggaaacacattcagaccctttggatgcacagaggcagtggggcatcaagggtgtgagtcttttctttctgtgacccaggtgagtaacttgcttccccwtatgtgccctgctagtggacccggctcataacagctccagaccctgatgctactggtggaggccaaattaaagcataagggagtggttattcaggagggatatttccaagctatagaagctaaccaattgctttcctctgctccagatatatttcttcctaaagaaccaggactctgtgggtgatcaacagttacaatactgattagacacttaggaatttttattcagtcttttcctaaccctgcagggaccttcctatttcttcccataattgccacgtcttttttttcactccaggaattctcctgtcagaattcatctcagtttcccatgctctcttggcctttgtaaactggctggcaggaagtctg

SEQ ID NO: 36705 - DNA, 1014 bp, Homo sapiens
gttttaatttaaattctgtttaaatagaaatttaaaattcaatgattcaaaaattcagatgaatttaaagaatttgtctctatgcaatggataacataccattttttttctttttattcaaactcattttccaacccataaccagtcactgaaatttcaggtatcctaggcgaacttttccctatgattcattttcatttacttttcattgattttattttacagacttgtgagtattaaataaatagctctcactgagagctattaaatgacagaagatgtttaagtattataacatttagttgttacagtaaactcattaatattatgtacttgtcctatttgggctaagtagaaatgtttgcataaatttctatacaaggccagcttgcaccacattgactacacaaagcaaatcgtaggtgtatgactgtcgcattgctgaatacattcagataatcagaggctccttgcataacttgtagcccaagcatcgccaggatggccatgggaattgtcatctgacacctgatgtcacgtcctgggaaacacattcagaccctttggatgcacagaggcagtggggcatcaagggtgtgagtcttttctttctgtgacccaggtgagtaacttgcttccccttatgtgccctgctagtggacccggctcataacagctccagaccctgatgctactggtggaggccaaattaaagcataagggagtggttattcaggagggatatttccaagctatagaagctaaccaattgctttcctctgctccagatatatttcttcctaaagaaccaggactctgtgggtgatcaacagttacaatactgattagacacttaggaatttttattcagtcttttcctaaccctgcagggaccttcctatttcttcccataattgccacgtcttttttttcactccaggaattctcctgtcagaattcawctcagtttcccatgctctcttggcctttgtaaactggctggcaggaagtctg

SEQ ID NO: 36706 - DNA, 584 bp, Homo sapiens
catggaaacatcactcytccttctttgaaaggctaggcttctcaccatcatcccacgccccccgccccaccaccagtcctcacaaaattacagtgaaagagaaaatcatggtgccttgaaaaaggaaacaggaagataaggctgaagaaacacccacatctatggcactgatcaaactgccatcagtgcagtaagaagcttgggccatcagctatgccgagaattcaaaacccaggggtccaactgtgccaagctgcaaggggccccacaggtggcacccaggcctgtgactgttgtggagaagaaagaggacacagatagaggtcgatgtgagtggatcacttgagtccaggagttcgagaccaccctgggcaacacgatgaaaccctatctctacaaaaaatgcaaaaaattagccaggcatggtggtggcacctgtagtcctagctacttgggaagctgaggtgggaagatcacccgagcctgggagatcaaggttgcagtgaaccatgattgtgcctctgcactccagcctgggtgacagagtgagaccctgtctcaaaaaaacaaaaaaaaaaaaaaaa

SEQ ID NO: 36707 - DNA, 584 bp, Homo sapiens
catggaaacatcactcttccttctttgaaaggctaggcttctcaccatcatcccacgccccccgccccaccaccagtcctcacaaaattacagtgaaagagaaaatcatgktgccttgaaaaaggaaacaggaagataaggctgaagaaacacccacatctatggcactgatcaaactgccatcagtgcagtaagaagcttgggccatcagctatgccgagaattcaaaacccaggggtccaactgtgccaagctgcaaggggccccacaggtggcacccaggcctgtgactgttgtggagaagaaagaggacacagatagaggtcgatgtgagtggatcacttgagtccaggagttcgagaccaccctgggcaacacgatgaaaccctatctctacaaaaaatgcaaaaaattagccaggcatggtggtggcacctgtagtcctagctacttgggaagctgaggtgggaagatcacccgagcctgggagatcaaggttgcagtgaaccatgattgtgcctctgcactccagcctgggtgacagagtgagaccctgtctcaaaaaaacaaaaaaaaaaaaaaaa

SEQ ID NO: 36708 - DNA, 805 bp, Homo sapiens
taagacattcagccagtcagtaatcatttgttgaggacttgtcatgggctcagccaggccctgtgccaggggcttggataattgagggggagaactcattctccagctctgacaatattcaaggttgctgcaggtgtccactgggatactgctgtggcctgggagtggtacacctcagatgtgtcatctaatggatggacatctagcttgacatctagcccaccatctgcccttgcacttcttcccaagaagcctgcatttggaagaatggttagttcttttttggttacacctgggactgtgaactttgtatgtacttctyctgtttaccatttttattttgcctgctatgtgtcaggcagagtgccagtgagggattacaaagtgggcttatgtgatgtttgaggaaaatgattttatcttcctatggtgtggttttttaaaattttttatttatttttatttttttaaatctgagagttttctaggaaaaagtgttctaggtaattcccagaattacaagtgtatttgctactttagcatctctatattacagtttctctggatttgtgctctaaattcctggattttaaaatatttcatattcctcaaatctttgactttgggttaacattttgggtttgccttttctggattatatattctaacttgcagataaagatatttttaagcagcacctttatttactctgcctgaaaccttgagacaaatagaaatccatcattattatgctgctgggctaagattttctgttataaacactttccttttttggcatttaagg

SEQ ID NO: 36709 - DNA, 805 bp, Homo sapiens
taagacattcagccagtcagtaatcatttgttgaggacttgtcatgggctcagccaggccctgtgccaggggcttggataattgagggggagaactcattctccagctctgacaatattcaaggttgctgcaggtgtccactgggatactgctgtggcctgggagtggtacacctcagatgtgtcatctaatggatggacatctagcttgacatctagcccaccatctgcccttgcacttcttcccaagaagcctgcatttggaagaatggttagttcttttttggttacacctgggactgtgaactttgtatgtacttcttctgtttaccatttttattttgcctgctatgtgtcaggcagagtgccagtgagggattacaaagtgggcttatgtgatgtttgaggaaaatgattttatcttcctatggtgtggttttttaaaattttttatttatttttatttttttaaatctgagagttttctaggaaaaagtgttctaggtaattcccagaattacaagtgtatttgctactttagcatctctatattacagtttctctggatttgtgctctaaattcctggattttaaaatayttcatattcctcaaatctttgactttgggttaacattttgggtttgccttttctggattatatattctaacttgcagataaagatatttttaagcagcacctttatttactctgcctgaaaccttgagacaaatagaaatccatcattattatgctgctgggctaagattttctgttataaacactttccttttttggcatttaagg

SEQ ID NO: 36710 - DNA, 772 bp, Homo sapiens
tgagctaacaggattacttgttctaagtcccatgttaaaatagcttttgtcctttcctttggaaatatcaatctcacattcaaaaaactagcttcaacttagtgcctggacttaaaactaagtcagagaaaaatacatccacccagctccctgcgtccaggtacagaaatacccctccaatactctataatatgggccagctatgactttatgctagggcagggtttctcaaaaggttaaaaaaggaattgttttaagtccactagataaaaatgcatctgtttcattgtttcatttgaaacagtttggtcagaaatcacatgtggagtgtgctcgattttctccagatggtcagtatttggtcactgggtctgttgatggattcattgaagtatggaactttactactggaaaaatcagaaaggtaaagtattttaaatgtgttaaccttcctagtggaaaaattacctrctttgaattacttacctatggcctctaaatcagattagttgaaaaaggatctgtatgtaatgaacatgtattacttttgtaattaaaaaactcatttaaagctagggacagtggtgcacacctgtggtcctagctactgaggaggctgaggcaggaggatcacttagttgaacccaggagttcaacccagccggggcagcatagtgagaccgcgtctctaccaaaaaaaatttttttttaaattaaccatgcatgcttgtgtgcacctatagttttagctgcctgggaggctgaagtggga

SEQ ID NO: 36711 - DNA, 608 bp, Homo sapiens
ggtgccatctcagctaactgcaacttccacttcccaggttcaagcgattctcctgccttagcctcccaagtagctgggactacaggcgcatgccagcatgcctggctaatttttgtatttttagtagagcgggggtttygccatgttggccaggctggtcttgaactcctgacctcaggtgatccgcctgccctggcctcccaaagtgctgggattacaggcatgagccactgcgcccagccttgtaatttacctttgatggtgacctgaaatgcagtatgatcctatatgtggcacgtagtaatgttcagtgtttgctgaattaattctgggcagcactaagaaatccctctttcccagtcatattctataacacatttcccatttgccacaaaacctgcagctttttggtccaggtaatgacatttgctgccattttgatgatttaaaaatggtcgtgggagttgaacatagtcatgaattcaggattcctgagcatgtagacagtcatcccagtggaaagacacgttcacttaagagaagtttaagttagaggaaacagtttatgctaaaaaaatttttagaaaagtccttgagaatttttgatt

SEQ ID NO: 36712 - DNA, 608 bp, Homo sapiens
ggtgccatctcagctaactgcaacttccacttcccaggttcaagcgattctcctgccttagcctcccaagtagctgggactacaggcgcatgccagcatgcctggctaatttttgtatttttagtagagcgggggttttgccatgttggccaggctggtcttgaactcctgacctcaggtgatccgcctgccctggcctcccaaagtgctgggattacaggcatgagccactgcgcccagccttgtaatttacctttgatggtgacctgaaatgcagtatgatcctatatgtggcacgtagtaatgttcagtgtttgctgaattaattctgggcagcactaagaaatccctctttcccagtcatattctataacacatttcccatttgccacaaaacctgcagctttttggtccaggtaatgacatttgctgccattttgatgatttaaaaatggtcgtgggagttgaacatagtcatgaattcaggattcctgagcatgtagacagtcatcccagtggaaagacasgttcacttaagagaagtttaagttagaggaaacagtttatgctaaaaaaatttttagaaaagtccttgagaatttttgatt

SEQ ID NO: 36713 - DNA, 570 bp, Homo sapiens
tacatgttcttacataatgtaaaagtctatgccatccagcactttcagcagcatgtgggcaggtgcaggtgggagaggagtttgggaagcagcacagaatatctcagcaccaggaagactgaaaaggagggcagcaggcatgctgagayaccagcatcttcacaccggccctccttcacacctggttactagacagttcccagtaaggatgttcatctccctccggtcaatagttcttcaccaaataatcaaaatcaaataaatcaaagccctgttgcacatccataatctttgttttcctactttgctttccagtcacagagtttggggagttggcccatctctttctagcccttttgtcaacagggtggctttggaatccgtcctctcggctctcctcacccaggggtggtgctgaccctgccctgaaggaggaacccttggcagcacggggtggaaagactccagtgtggctggaatgaaccaagggacagatcccaggagactgtgtggctattgactctcctgccaattgtctggagggagaagcacaaagcgcccactgtgaga

SEQ ID NO: 36714 - DNA, 1219 bp, Homo sapiens
gcatgcaggggtgtggtcgcattggggtctgcttgtgcctgggcccctctgcagaccaggagcacagctctctgctgggtcagccactgactcacagctggggttggccggggtagagttgagagggtgtagctgctttgggtctgctagggctgctccagaaggcccccttcagcattggcctagggccttttctgggaagccaccatcagttctgcttccagggtgggtttgtggtcgcagtggggaaatgaggatgtttgtttccaggagagaatggacctgttgggttgggggacaggcaagtagggaggaggctggtggaggacaagaggggaagaggctgaggggaggaggctgagccctgttctaactgccccgtgtctgggccctgcagccggaggagagtgtagggctgagagccgagggccaccctgatagtctcaaggacaacagtagctgctctgtgatggtgaggcccggcccaccggtgtcccaccactctctcgggccctgtctggtccagatatggtgcgtcagcagcccccttaccagtccctctttccttagccctggctcatgcagcccagcaccgcatctctgctacgtctttgttctcccgtctccctctccccatgcctaacacttgttcctggtccccgatctctgggcccctatgcttctgaggcaaccgttacccctgcttacgcctggcctctgatcccaccatgacccagccatgccccaccatgtgcagctgccctgcctttgttcctgacttgccctttgcccttggtctccagagtgaagagcccgagggcygcagttactccacgctgaccacggtgagggagatagaaacacagactgaactgctgtctccaggctctgggcgggccgaggaggaggaagatcaggatgaaggcatcaaacaggccatgaaccattttgttcaggagaatgggaccctacgggccaagcccacgggcaatggcatctacatcaatgggcggggacacctggtctgacccaggcctgcctcccttccctaggcctggctccttctgttgacatgggagattttagctcatcttgggggcctccttaaacacccccatttcttgcggaagatgctccccatcccactgactgcttgacctttacctccaacccttctgttcatcgggagggctccaccaattgagtctctcccaccatg

SEQ ID NO: 36715 - DNA, 657 bp, Homo sapiens
tgctccagttcccaacaagttccttatctccatttaagaccacctcagcctggacttcattgtccatatcagtatcagcattttggtcaaagccattcaacaagtctctagggagctccaaactttccaattttgtcctatcttcttttgagctctccaaactgttccaacctctaactgttactcagttcgaaagtcgcttccacattttcaggtatctacagcagcaccccactcttggtaccaatttactgtattagtccatttcacactgctgagaaagacatacccaagaatgggcaatttataaaagaaagaggtttagtggacttacagttccacatggctggggaggcttcacactcatggtagaaggcaaatcggagcaagtcatgtcttacatggatggcagcargcagagagagagcttgtgcagggaaactcctccttataaaaccatcagatcgcatgagactaactatcatgagaacagcatgtgaaagacccatccccatgactcaattacctcccacctgggtgcctcccacaacatgtgggaattaaagatgagatttgggtggggacacaaccaaaccatatcaagcatgaacaaatcctgagatacaagaatacactattttttctcctgctttcttg

SEQ ID NO: 36716 - DNA, 1316 bp, Homo sapiens
agtgtgatgaggatcatgcragcccagcgtgttgaggagcccaagatgctgaaggcttttgtactgggaatcattgtaaaaatgcaaacaatgatgatgaaactcactgactggttacaaagtgccaggcactgttctaactgctgtccatgtaataactcatttaataaacaaatatttttgcaaatcaagtgcaaagagaatagaagaggtctattcgttgtccctaatttcccttgcaaggcatactaaacattcaaacgagcttctttcttggtataatttattatttactaatcactgatggcatcctgagacaaccagaaagagccagcctcagacaccaacatagcaaggccaactctactagattctactaataatgaagttcccatcccaggttcccaggatcacagcctattgcagaagtgtgcagcagtctttcagtggtatagatttgaaataggttgaaataatgttctgttgtttgaggaacatatatggaagcagcattgctaaataagctatcttttaatcaaagccaatttaactatgtttttctgtttataattcattaactttaaaaacatggtactatacaaaacatagaagtcatgaattaaaatccctgcagtcaaattagactctgcatgtctgggatatttaaaagataatgtataggggttgccatggtaactcatcaagtggtaattctgtacctttctgagtgaaaaccttgaaaggagaagacaagcaatttggggagataacagcaccagaaattgagttcatctgtaacttaggctctctgtgagtttgtttaccagctattcaccatgtggatgaaaaacagtaaaaagacaaaaaagattcacatttcaaggctccctaaaattgccaattccactctatagctgattctcagcacaggaggaaatgggactagaatgctgggagatgacactatcatcgaacagtgagctccaaggagaagcctaattgttacttctcaatggcagaaggcgggtgcttcccccggggcaggattctgtttaatccttaggttagagcccagcttcaacccagtgtcacaggtcaattaccaccctccaaccctgaggggcgacatgaaccatactcacgcaccggcgcatgctccctcctcagcacctcttgtacattcagagctcctgcatgggatgccgagaactcacacccttccagggctgctgaagatcatatgactgatcatcaactttgattttgacccatctgtcaacaacgacacaattgatgaaaacttttcaggctttttt

SEQ ID NO: 36717 - DNA, 1074 bp, Homo sapiens
ggatccctggaggaggattatatgggcactggggcaaggcagggacatcttggcagcctccccaccgcacgcttttcttgcaagtcctttgaacggcacctgctccttagctgctgcctggcaactttgagggtttcagtgagatggggtgagtgcttcccagccagcaaagtgcgttgacagtggctggcttgccycccctccccccgccccggctctggaagcttctccccctgggtcttccagtctcatgtctggacacagacaggagaggtgaggaggagctgcaggggtggcccgggcagttcctgtgacctggaggcctggcaagttgttctgacggccaggcccatcctcggggaggcctctgaggacgcctggaaccccaggcccgccctgccttgttttctggtcctggcctgggggggtcgtggtctcgctggtgcagcctcctccgggcaggccccgcctctgctcccttcccctcactccatctgattcggccccgtttccttgtccactccacgttcttctgagcgtgtctctgggacatggttaaggttaagaagcggcctctgaacgagggagaacgtactgaaattgcctaagtgaacttcaaacacaggaagaagcgctcagtcgatgttcatggtgagaacgagggttgatcttttgaatgagtcacgggtttgagagagacctaagaaccattcgatctgaaaactagattcactttgaacaaaatatctcaggtgctaaatactccagttagtgtggggaaatgtctctgagaacgaaagctctgactgaccggagcctgctgcagtggatctgaaagatgctcacgaataattctcgctgcagagcttagtaaaccaacaatacaaacgattttctgtaacgacctcccgtaaagcagccactcccctcacagcgctgagcaggcgtaaccgccagggtcctcccccttctgaagccgcggcttccttgcaggccggtgtccgccgttgatcctttaactgaccatgggcagttttagttcacgagtgtggattcttgggatacggtcggggg

SEQ ID NO: 36718 - DNA, 1074 bp, Homo sapiens
ggatccctggaggaggattatatgggcactggggcaaggcagggacatcttggcagcctccccaccgcacgcttttcttgcaagtcctttgaacggcacctgctccttagctgctgcctggcaactttgagggtttcagtgagatggggtgagtgcttcccagccagcaaagtgcgttgacagtggctggcttgcctcccctccccccgccccggctctggaagcttctccccctgggtcttccagtctcatgtctggacacagacaggagaggtgaggaggagcwgcaggggtggcccgggcagttcctgtgacctggaggcctggcaagttgttctgacggccaggcccatcctcggggaggcctctgaggacgcctggaaccccaggcccgccctgccttgttttctggtcctggcctgggggggtcgtggtctcgctggtgcagcctcctccgggcaggccccgcctctgctcccttcccctcactccatctgattcggccccgtttccttgtccactccacgttcttctgagcgtgtctctgggacatggttaaggttaagaagcggcctctgaacgagggagaacgtactgaaattgcctaagtgaacttcaaacacaggaagaagcgctcagtcgatgttcatggtgagaacgagggttgatcttttgaatgagtcacgggtttgagagagacctaagaaccattcgatctgaaaactagattcactttgaacaaaatatctcaggtgctaaatactccagttagtgtggggaaatgtctctgagaacgaaagctctgactgaccggagcctgctgcagtggatctgaaagatgctcacgaataattctcgctgcagagcttagtaaaccaacaatacaaacgattttctgtaacgacctcccgtaaagcagccactcccctcacagcgctgagcaggcgtaaccgccagggtcctcccccttctgaagccgcggcttccttgcaggccggtgtccgccgttgatcctttaactgaccatgggcagttttagttcacgagtgtggattcttgggatacggtcggggg

SEQ ID NO: 36719 - DNA, 1074 bp, Homo sapiens
ggatccctggaggaggattatatgggcactggggcaaggcagggacatcttggcagcctccccaccgcacgcttttcttgcaagtcctttgaacggcacctgctccttagctgctgcctggcaactttgagggtttcagtgagatggggtgagtgcttcccagccagcaaagtgcgttgacagtggctggcttgcctcccctccccccgccccggctctggaagcttctccccctgggtcttccagtctcatgtctggacacagacaggagaggtgaggaggagctgcaggggtggcccgggcagttcctgtgacctggaggcctggcaagttgttctgacggccaggcccatcctcggggaggcctctgaggacgcctggaaccccaggcccgccctgccttgttttctggtcctggcctgggggggtcgtggtctcgctggtgcagcctcctccgggcaggccccgcctctgctcccttcccctcactccatctgattcggccccgtttccttgtccactccacgttcttctgagcgtgtctctgggacatggttaaggttaagaagcggcctctgaacgagggagaacgtactgaaattgcctaagtgaacttcaaacacaggaagaagcgctcagtcgatgttcatggtgagaacgagggttgatcttttgaatgagtcacgggtttgagagagacctaagaaccattcgatctgaaaactagattcactttgaacaaaatatctcaggtgctaaatactccagttagtgtggggaaatgtctctgagaacgaaagctctgactgaccggagcctgctgcagtggatctgaaagwtgctcacgaataattctcgctgcagagcttagtaaaccaacaatacaaacgattttctgtaacgacctcccgtaaagcagccactcccctcacagcgctgagcaggcgtaaccgccagggtcctcccccttctgaagccgcggcttccttgcaggccggtgtccgccgttgatcctttaactgaccatgggcagttttagttcacgagtgtggattcttgggatacggtcggggg

SEQ ID NO: 36720 - DNA, 1074 bp, Homo sapiens
ggatccctggaggaggattatatgggcactggggcaaggcagggacatcttggcagcctccccaccgcacgcttttcttgcaagtcctttgaacggcacctgctccttagctgctgcctggcaactttgagggtttcagtgagatggggtgagtgcttcccagccagcaaagtgcgttgacagtggctggcttgcctcccctccccccgccccggctctggaagcttctccccctgggtcttccagtctcatgtctggacacagacaggagaggtgaggaggagctgcaggggtggcccgggcagttcctgtgacctggaggcctggcaagttgttctgacggccaggcccatcctcggggaggcctctgaggacgcctggaaccccaggcccgccctgccttgttttctggtcctggcctgggggggtcgtggtctcgctggtgcagcctcctccgggcaggccccgcctctgctcccttcccctcactccatctgattcggccccgtttccttgtccactccacgttcttctgagcgtgtctctgggacatggttaaggttaagaagcggcctctgaacgagggagaacgtactgaaattgcctaagtgaacttcaaacacaggaagaagcgctcagtcgatgttcatggtgagaacgagggttgatcttttgaatgagtcacgggtttgagagagacctaagaaccattcgatctgaaaactagattcactttgaacaaaatatctcaggtgctaaatactccagttagtgtggggaaatgtctctgagaacgaaagctctgactgaccggagcctgctgcagtggatctgaaagatgctcacgaataattctcgctgcagagcttagtaaaccaacaatacaaacgattttctgtaacgacctcccgtaaagcagccactcccctcacagcgctgagcaggcgtaaccgccagggtcctcccccttctgaagccgcggcttccttgcaggccggtgtccgscgttgatcctttaactgaccatgggcagttttagttcacgagtgtggattcttgggatacggtcggggg

SEQ ID NO: 36721 - DNA, 1135 bp, Homo sapiens
gggatcccctcctaatctcttacctctaaagaaaccataaaccggctaggcacagtggttcacgcctgtaatcccagcactttgggaggctgaagcaggtggatcacgaggtcaggagttcaagaccagcctaaccaatatggtaaaaccctgtctctacttaaaaaaaaaaaaaaaaaatacaaacattagccaggcatggtggcgtgtgcctgtaatcctagctactcaggaggctgaggcaggagaatcacttgtatgctcatttcaggcaatatagtgggaggagtcacaccagcagtgggtggaagatggatttgcacccaggcagcctggcttcaaagtcctcagggaagataaggtttctatccataggacatcaactcagaaagttgggagctttgatttaacacactgccacacactaggggtggacagcagccctagctggactttccgcccacccagccatcagagccttagccaatgggcttgctggaygatggggtcaaggacagatagcagactaaacgaatgggcaatcatcgaggccttcactgctcttcctcctcctcaaaagcccttcccaagagacgtcatctttaatagtgcacaaacacgctatttaatttttaaaagagagaaaaaagtaaagcctctcaaaatggaaaatagacatacacatagaacagtgggaggcccggccagcccgttagaaagcacgagtgcatctcgcaggcactgtggtcactcaccttcacctgcacctcgcagcccacgccagccacgggatggccagcacctcagtgcttcattaaatgattaagagctttacacgcaaatgcacctctggagtagggacgctgccggatctgtgcacactgcaaacacaataagcctgaagcagataacagccaggaacaccataacggagcacaattggtggtatctgaactggaacttccaagaagagcagaaagtggctcagcatgcccatgggtttggaccggcccacagccgggccggtgagggtcctgggaacatgagtcccccttctggccggcagcaccaagctctgggtctctgagcacctgggccaagaggtgatgtggaggctgatcctgtggctatggcg

SEQ ID NO: 36722 - DNA, 641 bp, Homo sapiens
cacacacacacacacacacacacacacacattgctcatcaattgtgtcccttcggtcataggatcaagtctagaccccatcacttggtccacagcctggtctttgtgtctctccagcctcacaccaggccactgccctctctctttcctgcagccacctaggacacctgctgggaaaggtctgacctgccccagccctcatgggggccactgtccttagcataggatgtccccgtcccacagccagcctcatgcccgcccttaaccagcactcacagagcaaaccatggagctcctgtcaggcactggctggaccctccctcccccagcaatgtcccctgaacggctctgcagtggttctcctgttgggacatctcacattctagctcctgttcagcatcccagrgcaggcgcccgctcaccccacttacaacacacattccagccacatccctggaggagaaagacagtattatcactcagtaagtgtttactgcatgaaaggaggaaggaggaaaggatcatacttcaagcaagtccctttcctcttgagagggcactgatactgttcctgaccacatcgggtccagtctgagctagaaaggacatacagcatgacactccccatgtgagaaaagagaa

SEQ ID NO: 36723 - DNA, 1827 bp, Homo sapiens
accaaagcactggcacaccctcctgccagaacacgtactccacgggttctggtaggagaagtaagagaaccttgaggcgtggcgtctcttacttcctctgccaattgacaaacctgctgaggccctgacttgccaagagcacctggaatatgagaaatgtgagaatgaggtacagcctcatgccaacacctgcccgagttgttcttctgtgttaggagttcagccgtggtgctgctgcatctgtgggttccaccttctggagctgccttgagttttggctttgaaataccagagaacttaagttccacgctctgaagtcccaaatggcaatcttgattatgaatgaaaatgagtgataatgccaaaaaagatttcctttatgttagaatttaagaggataggctgggtgcggtggctcatacctgtaatcctagcactttgggaggccggggtgggcagatcacgagatcaggagttcgagaccatcctggccaacatggtgaaacctcatctctactaaaaatacaaaaattagccgggcgtggtggtgggcgcctgtaatcccagctactccggaggctgagacaggagaactgcttgaacctgggagttggaggttgcagtgagccaagatagcgccactgcactccagcctgggtgacagagcaagacaatgtctcaaaaaaaaaaaaaaaaaataaaagagaaaaaaaaagaatttgagaggataaacacctcttgggcatttgaaacagtcacgagttattgataatattagacatacatgttaggttaagtgatctcctccaacaatcccgagggagaagcaccaccaatagctccgcttttcagaaacagaaagcaaagctcatagaagctgagagctcatccatggtcctgcaggtggaagaccacagggaggcgctggatcccgagctgtccagctccaaatccgtgctgcccccttcctcacatccacagacaccacacgcttttctttgagccgcatttgttcttctcgagggtccctacatctgggagacgtcagaagtcggactcttttatctttgggtgtggctctcctggcaccttgcaaagtccacgcatacacccatgaagccttctgtgtttgggcagtggtggggaggctgtcccgtttcttctttgcctttgcggcgaagaggatcattgagaacgctgaggacatgcacaccgatgtcgtggcctcccagcactgcacgcccctagggagcttctcgtcagctcatcttcctgtcttgttcccctcccctatagaacgttgggattaaaacatcagatcattgcctctcctaggtttttattcttgatgaatgccaacagaaactattgaagactatggtgaactagaatgcatcattgtcctacaggctctcagattactttgaaaaatattgaamaaaatcccagaactttgggaggccaaagcaggcaggtcacttgaggccaggagttcgagaccagcctggccaacatggcaaaaccctgtctctactaaaaaaatccaaaaattagccaggtatggtggcatgctcctgtaatcactgccactcagcaggctgaggcaagagaatcgcttgaacccaggaggtggaggttgcagtgagtggagatcgtgccactgcactccagcctgggcaacagagcgagactctgtctcagggaaaaaaaaaaatatatatatatatatatattacagaggtcaatgaaaacaaaatacgcaatcagaaataaaccatgcctctgtagtctctgagctcagggcgtggagctgtggccctggaaggc

SEQ ID NO: 36724 - DNA, 1827 bp, Homo sapiens
accaaagcactggcacaccctcctgccagaacacgtactccacgggttctggtaggagaagtaagagaaccttgaggcgtggcgtctcttacttcctctgccaattgacaaacctgctgaggccctgacttgccaagagcacctggaatatgagaaatgtgagaatgaggtacagcctcatgccaacacctgcccgagttgttcttctgtgttaggagttcagccgtggtgctgctgcatctgtgggttccaccttctggagctgccttgagttttggctttgaaataccagagaacttaagttccacgctctgaagtcccaaatggcaatcttgattatgaatgaaaatgagtgataatgccaaaaaagatttcctttatgttagaatttaagaggataggctgggtgcggtggctcatacctgtaatcctagcactttgggaggccggggtgggcagatcacgagatcaggagttcgagaccatcctggccaacatggtgaaacctcatctctactaaaaatacaaaaattagccgggcgtggtggtgggcgcctgtaatcccagctactccggaggctgagacaggagaactgcttgaacctgggagttggaggttgcagtgagccaagatagcgccactgcactccagcctgggtgacagagcaagacaatgtctcaaaaaaaaaaaaaaaaaataaaagagaaaaaaaaagaatttgagaggataaacacctcttgggcatttgaaacagtcacgagttattgataatattagacatacatgttaggttaagtgatctcctccaacaatcccgagggagaagcaccaccaatagctccgcttttcagaaacagaaagcaaagctcatagaagctgagagctcatccatggtcctgcaggtggaagaccacagggaggcgctggatcccgagctgtccagctccaaatccgtgctgcccccttcctcacatccacagacaccacacgcttttctttgagccgcatttgttcttctcgagggtccctacatctgggagacgtcagaagtcggactcttttatctttgggtgtggctctcctggcaccttgcaaagtccacgcatacacccatgaagccttctgtgtttgggcagtggtggggaggctgtcccgtttcttctttgcctttgcggcgaagaggatcattgagaacgctgaggacatgcacaccgatgtcgtggcctcccagcactgcacgcccctagggagcttctcgtcagctcatcttcctgtcttgttcccctcccctatagaacgttgggattaaaacatcagatcattgcctctcctaggtttttattcttgatgaatgccaacagaaactattgaagactatggtgaactagaatgcatcattgtcctacaggctctcagattactttgaaaaatattgaaaamaatcccagaactttgggaggccaaagcaggcaggtcacttgaggccaggagttcgagaccagcctggccaacatggcaaaaccctgtctctactaaaaaaatccaaaaattagccaggtatggtggcatgctcctgtaatcactgccactcagcaggctgaggcaagagaatcgcttgaacccaggaggtggaggttgcagtgagtggagatcgtgccactgcactccagcctgggcaacagagcgagactctgtctcagggaaaaaaaaaaatatatatatatatatatattacagaggtcaatgaaaacaaaatacgcaatcagaaataaaccatgcctctgtagtctctgagctcagggcgtggagctgtggccctggaaggc

SEQ ID NO: 36725 - DNA, 1827 bp, Homo sapiens
accaaagcactggcacaccctcctgccagaacacgtactccacgggttctggtaggagaagtaagagaaccttgaggcgtggcgtctcttacttcctctgccaattgacaaacctgctgaggccctgacttgccaagagcacctggaatatgagaaatgtgagaatgaggtacagcctcatgccaacacctgcccgagttgttcttctgtgttaggagttcagccgtggtgctgctgcatctgtgggttccaccttctggagctgccttgagttttggctttgaaataccagagaacttaagttccacgctctgaagtcccaaatggcaatcttgattatgaatgaaaatgagtgataatgccaaaaaagatttcctttatgttagaatttaagaggataggctgggtgcggtggctcatacctgtaatcctagcactttgggaggccggggtgggcagatcacgagatcaggagttcgagaccatcctggccaacatggtgaaacctcatctctactaaaaatacaaaaattagccgggcgtggtggtgggcgcctgtaatcccagctactccggaggctgagacaggagaactgcttgaacctgggagttggaggttgcagtgagccaagatagcgccactgcactccagcctgggtgacagagcaagacaatgtctcaaaaaaaaaaaaaaaaaataaaagagaaaaaaaaagaatttgagaggataaacacctcttgggcatttgaaacagtcacgagttattgataatattagacatacatgttaggttaagtgatctcctccaacaatcccgagggagaagcaccaccaatagctccgcttttcagaaacagaaagcaaagctcatagaagctgagagctcatccatggtcctgcaggtggaagaccacagggaggcgctggatcccgagctgtccagctccaaatccgtgctgcccccttcctcacatccacagacaccacacgcttttctttgagccgcatttgttcttctcgagggtccctacatctgggagacgtcagaagtcggactcttttatctttgggtgtggctctcctggcaccttgcaaagtccacgcatacacccatgaagccttctgtgtttgggcagtggtggggaggctgtcccgtttcttctttgcctttgcggcgaagaggatcattgagaacgctgaggacatgcacaccgatgtcgtggcctcccagcactgcacgcccctagggagcttctcgtcagctcatcttcctgtcttgttcccctcccctatagaacgttgggattaaaacatcagatcattgcctctcctaggtttttattcttgatgaatgccaacagaaactattgaagactatggtgaactagaatgcatcattgtcctacaggctctcagattactttgaaaaatattgaaaaaaatcccagaactttgggaggccaaagcaggcaggtcacttgaggccaggagttcgagaccagcctggccaacatggcaaaaccctgtctctactaaaaaaatccaaaaattagccaggtatggtggcatgctcctgtaatcacwgccactcagcaggctgaggcaagagaatcgcttgaacccaggaggtggaggttgcagtgagtggagatcgtgccactgcactccagcctgggcaacagagcgagactctgtctcagggaaaaaaaaaaatatatatatatatatatattacagaggtcaatgaaaacaaaatacgcaatcagaaataaaccatgcctctgtagtctctgagctcagggcgtggagctgtggccctggaaggc

SEQ ID NO: 36726 - DNA, 1827 bp, Homo sapiens
accaaagcactggcacaccctcctgccagaacacgtactccacgggttctggtaggagaagtaagagaaccttgaggcgtggcgtctcttacttcctctgccaattgacaaacctgctgaggccctgacttgccaagagcacctggaatatgagaaatgtgagaatgaggtacagcctcatgccaacacctgcccgagttgttcttctgtgttaggagttcagccgtggtgctgctgcatctgtgggttccaccttctggagctgccttgagttttggctttgaaataccagagaacttaagttccacgctctgaagtcccaaatggcaatcttgattatgaatgaaaatgagtgataatgccaaaaaagatttcctttatgttagaatttaagaggataggctgggtgcggtggctcatacctgtaatcctagcactttgggaggccggggtgggcagatcacgagatcaggagttcgagaccatcctggccaacatggtgaaacctcatctctactaaaaatacaaaaattagccgggcgtggtggtgggcgcctgtaatcccagctactccggaggctgagacaggagaactgcttgaacctgggagttggaggttgcagtgagccaagatagcgccactgcactccagcctgggtgacagagcaagacaatgtctcaaaaaaaaaaaaaaaaaataaaagagaaaaaaaaagaatttgagaggataaacacctcttgggcatttgaaacagtcacgagttattgataatattagacatacatgttaggttaagtgatctcctccaacaatcccgagggagaagcaccaccaatagctccgcttttcagaaacagaaagcaaagctcatagaagctgagagctcatccatggtcctgcaggtggaagaccacagggaggcgctggatcccgagctgtccagctccaaatccgtgctgcccccttcctcacatccacagacaccacacgcttttctttgagccgcatttgttcttctcgagggtccctacatctgggagacgtcagaagtcggactcttttatctttgggtgtggctctcctggcaccttgcaaagtccacgcatacacccatgaagccttctgtgtttgggcagtggtggggaggctgtcccgtttcttctttgcctttgcggcgaagaggatcattgagaacgctgaggacatgcacaccgatgtcgtggcctcccagcactgcacgcccctagggagcttctcgtcagctcatcttcctgtcttgttcccctcccctatagaacgttgggattaaaacatcagatcattgcctctcctaggtttttattcttgatgaatgccaacagaaactattgaagactatggtgaactagaatgcatcattgtcctacaggctctcagattactttgaaaaatattgaaaaaaatcccagaactttgggaggccaaagcaggcaggtcacttgaggccaggagttcgagaccagcctggccaacatggcaaaaccctgtctctactaaaaaaatccaaaaattagccaggtatggtggcatgctcctgtaatcactgcyactcagcaggctgaggcaagagaatcgcttgaacccaggaggtggaggttgcagtgagtggagatcgtgccactgcactccagcctgggcaacagagcgagactctgtctcagggaaaaaaaaaaatatatatatatatatatattacagaggtcaatgaaaacaaaatacgcaatcagaaataaaccatgcctctgtagtctctgagctcagggcgtggagctgtggccctggaaggc

SEQ ID NO: 36727 - DNA, 1827 bp, Homo sapiens
accaaagcactggcacaccctcctgccagaacacgtactccacgggttctggtaggagaagtaagagaaccttgaggcgtggcgtctcttacttcctctgccaattgacaaacctgctgaggccctgacttgccaagagcacctggaatatgagaaatgtgagaatgaggtacagcctcatgccaacacctgcccgagttgttcttctgtgttaggagttcagccgtggtgctgctgcatctgtgggttccaccttctggagctgccttgagttttggctttgaaataccagagaacttaagttccacgctctgaagtcccaaatggcaatcttgattatgaatgaaaatgagtgataatgccaaaaaagatttcctttatgttagaatttaagaggataggctgggtgcggtggctcatacctgtaatcctagcactttgggaggccggggtgggcagatcacgagatcaggagttcgagaccatcctggccaacatggtgaaacctcatctctactaaaaatacaaaaattagccgggcgtggtggtgggcgcctgtaatcccagctactccggaggctgagacaggagaactgcttgaacctgggagttggaggttgcagtgagccaagatagcgccactgcactccagcctgggtgacagagcaagacaatgtctcaaaaaaaaaaaaaaaaaataaaagagaaaaaaaaagaatttgagaggataaacacctcttgggcatttgaaacagtcacgagttattgataatattagacatacatgttaggttaagtgatctcctccaacaatcccgagggagaagcaccaccaatagctccgcttttcagaaacagaaagcaaagctcatagaagctgagagctcatccatggtcctgcaggtggaagaccacagggaggcgctggatcccgagctgtccagctccaaatccgtgctgcccccttcctcacatccacagacaccacacgcttttctttgagccgcatttgttcttctcgagggtccctacatctgggagacgtcagaagtcggactcttttatctttgggtgtggctctcctggcaccttgcaaagtccacgcatacacccatgaagccttctgtgtttgggcagtggtggggaggctgtcccgtttcttctttgcctttgcggcgaagaggatcattgagaacgctgaggacatgcacaccgatgtcgtggcctcccagcactgcacgcccctagggagcttctcgtcagctcatcttcctgtcttgttcccctcccctatagaacgttgggattaaaacatcagatcattgcctctcctaggtttttattcttgatgaatgccaacagaaactattgaagactatggtgaactagaatgcatcattgtcctacaggctctcagattactttgaaaaatattgaaaaaaatcccagaactttgggaggccaaagcaggcaggtcacttgaggccaggagttcgagaccagcctggccaacatggcaaaaccctgtctctactaaaaaaatccaaaaattagccaggtatggtggcatgctcctgtaatcactgccactcagcaggctgaggcaagagaatcgcttgaacccaggaggtggaggttgcagtgagtggagatcgtgccactgcactccagcctgggcaacagagygagactctgtctcagggaaaaaaaaaaatatatatatatatatatattacagaggtcaatgaaaacaaaatacgcaatcagaaataaaccatgcctctgtagtctctgagctcagggcgtggagctgtggccctggaaggc

SEQ ID NO: 36728 - DNA, 500 bp, Homo sapiens
ccgacactcaatgaataccttaaaattctgtctaaacaaataagtacctgggaaatatttaagaaaaaaacatataaaattcagctagctctcaattaagtgttatattggtctaaattgaataaattcatataggttagtcaaacaaattttataggaaaagtttctctagaaattaaaattaaaatataacaaattttacatgagctattttctttatagcatcattattaaaaattcaagcacatactgtagatgcagtacttttaaaaagagttttaaataaaaaacattgtcaactattttataaaaawacttgaaagctctggtgtggaaaacaaacttaaaagtagataataagcatgattgtatgtaaatgcttatatcagagacaaatgggaaaaagtttattaaaatcttaaaaatacagttaaataaaatttgttttaaaaaggcatgtttaatcgcaggaaattttatggatagtctattaataaatg

SEQ ID NO: 36729 - DNA, 1064 bp, Homo sapiens
tatgagtgaaccccttagttcactcagcatctagtaagcatttactgtgttcagttacccaccacaaagaagtataaagctggctgttgtcctcaggtattttatagacactagtatccacttttgcatgaatgataccaggcattggtattgtaatgtttatgctaaacccctatttcagccttaacttacatttctaagtaaaaaacctgaaattacttataacagcaacaaaactataactaaaatgggaataacagtaaaaataaatagtgtttagcacttaccaataaatatttagcaaccatgtaagtgtttttttaatatcaggtagtttcatattattccattttatagctcaggaaactcaaccctagagaaattatataactcacctagagagacacaggtagtgcacagcagagctgaaatgttagtctttgtcaggtgggctcagggccagaatgattggtctggctgtgtgatcttggggaaattgattgattggttgatttatgagaccgagtctagctctgctgcacaggctggartgcggtcgcataatcttggctcactgtgacctccgcctcccaggctcaagcgatgatatgaataaattattttttgatatttaggagactttctcggtgtttttttcttgtctgtaaggagaaatacaggaggaagcattatggaaaaggaacgctgctaaatagcttaatgatgaccaaagatcaatcaaaaagagaatgaaagtcaggaggcttagctctgattttctgtttgaaatctgggctgaaattgattttgaaagttgtgtgtacattggaatcgtccagtggttagatgctataggtaactgctaacttgtaatttgagtgtcacttggatatctttcagcctactcactaatctctcccctgttgtttccactgggggtaattgcattattatagatttatttctttagcttaagagattgtccaaaaaaaaggaaggttaataacttggttagagggggttgttagaggagggagtcatatattttatatatatgtaaagta

SEQ ID NO: 36730 - DNA, 679 bp, Homo sapiens
agcactccagtggaagaaacggtgggaccttatggtatgaaatggacatgagcttggcctttctaaaaatcgcaaggcaaagtgaagtcattgaggggaaagagatgagggtagagaagtacctaatggttagagcatgaaggtttggcagcccttgtgtggccatgcactggaatggcacaagaatgacaggcatgcccatgaactcagcattccaggtgttccctggtgccattttctgactgagatcactgacttgatattttctgtcaagagacgctcaaggagcagctcctgctcctggcttcaggaatgttctctgcactttcttgtctacactgttttcctctgttccattaattatctggttgagggaggaagcaggaactcttcttttttctgcttgtccctttcrgttcacctctgctggcctggatccaaatatgctcaccaaactgcttccagttttctaagatctttcctcattttgagatcagattatctttacttctcaagtgcagctgggtcttttaaagagatgattgttcatttgtcataaatttcaaattttttggtaactactagttatggggaaaggcagtgctagctttcaagtctccctgcttatttttatggtttcttaagtagaatgccactttcatttctgtaacttccacat

SEQ ID NO: 36731 - DNA, 799 bp, Homo sapiens
aggattctggaggccagatgtccaaaatcagtctcgctgggctaagtcaaggtgtcagcgggcaggtgccttctggacgttctgggggcgaatctgtttccttatgttttccatggaaaatggagaggccacccgcggtcctcggtccccgccttgtgtcaccacagcctctggtgtgcgtcagcctggcgtcttcccctcttctgtgcccttctctctcgggctccctgtcatgagggctcttgtgggtacgttggggcccacctggataatgcccccatctcaggagccaacatttcatcacagctgcaaaatcccrtttgccctataaagtgtcatttacaagtcccaaaaattcggtgatggatgtctttggggcccaccattgagtcccccataccctctctcacacttgggcatcagctattaccgaggacctcctgtggccaccggagttgctggcgctgaccccagctagtgggagccaccacaaagccccgcacctggccctcgggtggggccccagcggagtgtcttgaagaggctggaatcaggagtgctggcccgaacatggagtgaatcatgactcgcaggccaggcggtggggagcccccggtgggagctgggagcaacaatgcccgagcttgggatatcggaaggccgggctctgttctcgttacctagatgcccatggaggtgcccagcgggctgcccgctctgcaggactgatttttatctatgtgggagctcagctgcaattacggagctagaggaattggctcattcagtgccagtccca

SEQ ID NO: 36732 - DNA, 1255 bp, Homo sapiens
tagtgtggctgagccaactaatgtaccctgcagggtctgtcccctgcctactctatccagctcatttctctccattttcaggctatcacagagctgctcttcctggaaagcttccctggccccttctaggaaatgccattagtgtctgtgccacctctttgcactcccgcctccatctgcagctggagctggaacaggcagttctcatgcacatcacctgtgtcctaccaccaggcttccactccaagtacctgctgaagcttttggctccacccttccttccttcctttggaaggacaattctgaggcatattctgaacaattcttcagtctccttgaattgagccctgggtggccctaagtatatccagctgggttccacacctgcattggctttgcttctttcccttcttctgctctgcactcctcggctctgtgccccgagatcattgcccagataaaccccctgctcccatgtccttgcctcaggttgggctttcagggaacccaaatcaagacacctctccttttttccaaacaggagtaggtccccttctattatccctccttaagccaggtacaattctttgttctatttttctgtctaggtgtccccctccccaacttcagtgtgagctagaaaagagaagcgacctggctgtcctatttccagcacacagcacttgttggggcgtgcagcttgaacctcagtaggtgttgtggaataagtgaatgagaagtagggtgttcacgacaaaaacaacacactgggaacagcagrgaacttcctcaacatgataaagggcatgtgttaaaaacccacagctgacatcataatgctgaataactgaaagctttccccctaagatcaggaacaagacaaggatgttcactcttgccacttctattcagcatcgtactgggggctgggcgctgtaatctcagtactttgggaggccaaggtgagcagatcacttgaggtcagtagtttgagaccagcctggccaacatggtgaaaccctgtctctactaaaaatacaaaaattagccaggcatggtggtgcatgcctgtaatcccagctactcaggggacaggcaaaataatcacttgaactctggagacagaggttgcaatgagctgagatcaggccacttttcagtatgaaaaggactgatttttttctttatttcttaaattgacaaatttacatattgtatacaagatattgttttgaaataagtatacattgtggaa

SEQ ID NO: 36733 - DNA, 1102 bp, Homo sapiens
cacaggcagactggttcctcagcagagccccagggggcctggagttccccttctcacaaggcatcagtcaccactagctcaggaagaagctaggaacccccctgctctcaactctcaactccctgcttttcagagaagagagctggaggagtagaaggggtgtttggggtkgtgggtggggacaaagactacgagtccacccatgttgaagcagtggtgtcagaaatggaggcgagaggagaagggacctggtgagggggtgacagggcagcaccgtgctgaaacccagaccccgggagccgcctccccgccctgggagaagctgggcatccaggcaggtggtggtgggtctccagcaggctgcaagcggcatgtccttctggcttggtcaggcgatagccaagagtaggaaggttttctgagggggccctcgtgtctcctctttcctcagggattccctttctgtgagtgttggctttgtcctgagagtccctgcgcgggggtgagctaaccttctgtgcctcagtattgctttctgtagagtgggtgcactccctgctgtggtgtgccgccctcctgagcctctgacagaggagcttcagtctgtggtcgaattcttcctttgcccctctctcctcctgcagtggggcctctgtttagggaacgtgaatgggcagctgcctccagggaacttgccacctcccccgtcctgctccaaggtcatgcctcttctgcacaggctccccactatagagagggttctatgtgttggaactggtcctgggcgaggttctgggctggattttagtgctgattctgttgtatgaccttggccttatcacttcccttctctgggcctcacgtaacagacagtcaccttgcctgttacctgacgccactctccagaattgtctcgtcagtcagaaagaagtaaaaaggcctgggccttactcctagggactgtgatgcagtaggtcttagattgggtccagacaggcatttttaagatactcctcaggtgattctaaagtgtacttctccgttaagaaccaatagtctaggtcggtgtttttcaaactttaatgtgcaaatgaatctcctg

SEQ ID NO: 36734 - DNA, 580 bp, Homo sapiens
acccacctcaacttctcaaagtgctggggttacargcatgagccactgtccccagccttgaatttattatttaattttttaaaattgtggtaaaatacacataacataaaatttaccatcctatttttaagtgtacagttcagtgacattgaagtttattatattgttacacaaccatcattaagtacacttcacaaagaataatgaagaccaggtagaaacaaagaaaaaatgtttgacatagtttttgtatttttaccattttcctttaatgttatttcactaagcatataactataagcaaaacttgttggttataggtagaaactagatagaatttgcagaaatagtagttactctaggtttattttttgtgtgtgtgtatgagtcactaaaacaaaattgatccactttgatgatctgcctgggattgaaacagtaggtctttctcttttcccagttctcaagaccagaaaggagcctttccctttaagtgaggggccttgggggaagggagactactatgcttggagggaggacaggcctttgaaacttcatgctagagaggaagaaagacttt

SEQ ID NO: 36735 - DNA, 755 bp, Homo sapiens
ggcacctaccttgcgtaagtttgcaagaagagttgttggggaggaagttgcggtgtttctcagggaacttacatagttgtaaacagatttgagccaaattaacagtgtagttcaaaatctagtcaatccttataagggtctaaaagtccttcattcagtcaatagtattttattttattttttatttatttatttttttgagatggagtttcattcttgttgcccaggctggagtgcagtggcacgatctcagctcactgcaacctttgcctcctaggttcaagcgattctcctgcctcagcctcctgagtagctgggattacaggcgcccaccaccatgcccagttgattttttgtatttttagtagagacagggttttaccatgttggccaggctggtctcaaactccttacctcaggtgatccacccaccttggcctcccaaagtgctgggattacaggcatgagccaccatgcccagcccgatagtattttaaatagctttatttggagctccttttctctatgaatttaggaaagactaaagtaggctgagtgcagtggctcacacctgtaatttcagcactttgggtgaggggagtattattggaggccaggagattgagactgagatgcacaagatggcaagacgctgtctctacaaaaaaaagtttttaaaatcaggcaggcatagtggtktgtgtgctactgagactgtggtggtggtctcatctactcaggagactgaggcaaga

SEQ ID NO: 36736 - DNA, 1209 bp, Homo sapiens
tttctgttttaagataaacagatttttttttttacctttagggcattctgcaagtgattacgtgacactgattacatgaacggtttccaatcatggccccagttttggagtctgccaccgggagttaatgaaatcagattaatttgtaagtctggagtctcagagagctaaaacttatgagcagaaaaaaagaattgggagctgactgtggtttcccgcagtagtgtccttgctaaataaatgctagcctcgtccatttttcttcatgaagagtagggaagtgttttcaataagagggtgggaagccagtcattgtcattagagccatccgtgagtgctgaatgctttaaaattcaggcataaataccacacaggtatctcttgcagagttgacacagagtgtcctgtccaccctccccacctcacacgcccacccccactcataaatgtgcgccccttctggccttgaacatttgttggggtttggataggaatccggctactctttcccattgccataattatgttggtcaaggcctgtgttcttgacaaagaaaacattcctctaactcaacctgagtaatccttaatgagtccttgtatcttgtgataaatttcataattattcagcccctaccactaacaccgaaattcatcagtcaaagcaaattagccgagattcattagaataagacatctagtaggcacatgtactttattagcctcttacaccaatagttttaattaggtacatatttcacagctctcgagctactccagtgaagggctgcctttatctcttttatttacagtaacaagctatcaaacacacaccaccataattaaacttggatataaaaaacttgttttattaatggcagcctattctggccttggatttctgaaacctgcactaggcagatatttttattaattaaataaatattattcaattaaactgaaaagatggggtgacgtgagaggggcgaagagctcggtttaaaagtgagattctcttttttcttccttgstgatggtttcctctgtctcaccttcagcaggggaacaaacatctcttcatcagatattttagtgatgagaaaagtgattaaaatccagaacatttttaaattattaataaggaatttaaatgatgttataaaaaaggaaatacaagagaaaatgttacacattcatagaattttggct

SEQ ID NO: 36737 - DNA, 821 bp, Homo sapiens
taagcaatatattcccattttatagatttgtaaactgaggcacaaagatgagtcaggtcacacagttggtaaatggtggaaacaggatttaaacctatggagtaggatttgaacctctgtgctatatgtatatctaacgtgcctattattgacatgtacttccacacaactaccatataatgacaatttatgtgtaatatgatgcccttgatcattaaagacagattaaacataacactgtgtctttgttgggagatttattctattgtattcaagtattttggggatcggtcatccatctagtttccagataacatttgcagattattatctcaattcctgcccattcatccggaaggagctatttgcttaagtggacgggactgacctggctacagctcacccttgtcctgccctttcctcttcagaattggaagggaatcctgccctgccgttaggcactgctttctccctttgactggttatactggaagtcattttgcagataagaccagcattaagttttgtraaatagtggcgtccattggtgttgaaaggtgtagaatgaaatcacttaaagtagaagctgttttccaaatgatttcatgtctcagatctaaattattcatttgagaaattaatcagtttggattttaagagttactgttgggtgatgtttttcttcttcttttgcctctaatggataatttgagggaatcagcttttatattaagaagataaaacatgagtttgcaaagttgccatctgatcttattgcctggtgggccacctaggaaaaggagtctctgatggatattgga

SEQ ID NO: 36738 - DNA, 1172 bp, Homo sapiens
attttattagagaaaagcactaaatatagttaatgaaaaagaaggatcatcattaacaccttggtctataagctttctaagcttttttatatatacagtttgaatatcccttatctgaaacgcttggaacaaaaagtgtttcagatttccaatttttttggattttggaatrttttcattatatatacctattagttcagcatcccaaatttgaaaatccaaagtccaaaatactctcatgggcatttcctttgagcatcatgctggcactcaaaaagttttggattttggagcatttcagatttcggattttcaaatttaaaatgctcaacatacacatatatacacatatgtgcaaatattttattttcaaaaatgaaaatgagatcatatcaaatatatggggttatttttggttttgtttgttttaaggagacagcgtctcattctgttgctcaggctggagtgcagtggctcaatctcagctcagtgcagcctcaacctcctaagctcaagcgatcctcttgcctcaggctctcgagtagctgagactacaggtgctcatcaccacacctggctaatttttttaattttctgtaaagacaaggtctcactctgttgctcaggctggtcttaaactcctggattcaagcgattctcccgcctcggcctcccaaagtgctgggatgacatgcgtccaccaccatgctcagccaaacataggattttgaaacttcctatttcacttaaatctactctactttcccttaccttagtccctgtctctttctaagaggcaagcttgcttgtttctgattgggaaacactgaggtttcaatggcagactctagcttccctttttctgaagattgtaaatgaagggtcttatgacagctgtcaagagccattagtgtaacaagatatcactccaaagtcagggggaaaatccttttgtctatatggagtttgatcccttcgtatatttggggcctcatcaaaggggagttttgagatagtcttgctttccacataaaactcagaaaattgcttgatttaaaatgcaacttctgtctcctcttttcatttgtcatttctaaaacatttttaaaaagtgttaaaactaatggagtaacaaactgccatgcagtaataatattttaggtagatgaaaa

SEQ ID NO: 36739 - DNA, 1172 bp, Homo sapiens
attttattagagaaaagcactaaatatagttaatgaaaaagaaggatcatcattaacaccttggtctataagctttctaagcttttttatatatacagtttgaatatcccttatctgaaacgcttggaacaaaaagtgtttcagatttccaatttttttggattttggaatattttcattatatatacctattagttcagcatcccaaatttgaaaatccaaagtccaaaatactctcatgggcatttcctttgagcaycatgctggcactcaaaaagttttggattttggagcatttcagatttcggattttcaaatttaaaatgctcaacatacacatatatacacatatgtgcaaatattttattttcaaaaatgaaaatgagatcatatcaaatatatggggttatttttggttttgtttgttttaaggagacagcgtctcattctgttgctcaggctggagtgcagtggctcaatctcagctcagtgcagcctcaacctcctaagctcaagcgatcctcttgcctcaggctctcgagtagctgagactacaggtgctcatcaccacacctggctaatttttttaattttctgtaaagacaaggtctcactctgttgctcaggctggtcttaaactcctggattcaagcgattctcccgcctcggcctcccaaagtgctgggatgacatgcgtccaccaccatgctcagccaaacataggattttgaaacttcctatttcacttaaatctactctactttcccttaccttagtccctgtctctttctaagaggcaagcttgcttgtttctgattgggaaacactgaggtttcaatggcagactctagcttccctttttctgaagattgtaaatgaagggtcttatgacagctgtcaagagccattagtgtaacaagatatcactccaaagtcagggggaaaatccttttgtctatatggagtttgatcccttcgtatatttggggcctcatcaaaggggagttttgagatagtcttgctttccacataaaactcagaaaattgcttgatttaaaatgcaacttctgtctcctcttttcatttgtcatttctaaaacatttttaaaaagtgttaaaactaatggagtaacaaactgccatgcagtaataatattttaggtagatgaaaa

SEQ ID NO: 36740 - DNA, 1172 bp, Homo sapiens
attttattagagaaaagcactaaatatagttaatgaaaaagaaggatcatcattaacaccttggtctataagctttctaagcttttttatatatacagtttgaatatcccttatctgaaacgcttggaacaaaaagtgtttcagatttccaatttttttggattttggaatattttcattatatatacctattagttcagcatcccaaatttgaaaatccaaagtccaaaatactctcatgggcatttcctttgagcatcatgctggcactcaaaaagttttggattttggagcatttcagatttcggattttcaaatttaaaatgctcaacatacacatatatacacatatgtgcaaatattttattttcaaaaatgaaaatgagatcatatcaaatatatggggttatttttggttttgtttgttttaaggagacagcgtctcattctgttgctcaggctggagtgcagtggctcaatctcagctcagtgcagcctcaacctcctaagctcaagcgatcctcttgcctcaggctctcgagtagctgagactacaggtgctcatcaccacacctggctaatttttttaattttctgtaaagacaaggtctcactctgttgctcaggctggtcttaaactcctggattcaagcrattctcccgcctcggcctcccaaagtgctgggatgacatgcgtccaccaccatgctcagccaaacataggattttgaaacttcctatttcacttaaatctactctactttcccttaccttagtccctgtctctttctaagaggcaagcttgcttgtttctgattgggaaacactgaggtttcaatggcagactctagcttccctttttctgaagattgtaaatgaagggtcttatgacagctgtcaagagccattagtgtaacaagatatcactccaaagtcagggggaaaatccttttgtctatatggagtttgatcccttcgtatatttggggcctcatcaaaggggagttttgagatagtcttgctttccacataaaactcagaaaattgcttgatttaaaatgcaacttctgtctcctcttttcatttgtcatttctaaaacatttttaaaaagtgttaaaactaatggagtaacaaactgccatgcagtaataatattttaggtagatgaaaa

SEQ ID NO: 36741 - DNA, 1229 bp, Homo sapiens
ctaccatgtatatgaggacttgatatatatcttctagaaaagcaaggaagacaatagttaacctaaaccaattccttggtcatttagccctggacatcctaaataccttttacattttagtgaagaatgtattttccatttgatagcttaatgaatgatattgttgtgtcttgcataatgatcattacaattcaatgtgccagtgtgaataaaagcacccagccaatatacctattttggctctcagttttattgagggtaaagtatagaaatgttatctgggccgggcgcggtggctcacgcctgtaatcccagcacttcgggaggccgaggcgggtggatcacgaggtcaggagatcgagaccatcctggctaacaaggtgaaaccccgtctctactaaaaatacaaaaaattagccgggcgcggtggcgggcgcctgtagtcccagctactcgggaggctgaggcaggagaatggcgtgaacccgggaagcggagcttgcagtgagccgagattgcgccactgcagtccgcagtccggcctgggcgacagagcgagactccgtctcaaaaaaaaaaaaaaaaaaaaagaaatgttatctgagtttctaatggacccgctcctgttcctcaaggggttatcaccaactatcagagagatcccaatctttaagactatgggatgtagagtaattaggcttcaatgttttcaggagtgtgtgtgggttttttttttttttttttacccagaaaaaaaaacaaaaaaagcctctttctagatgtagaactgaagtatctgttgcttctgatgttgctgtcagaggccaattgggaagcaaagtatcaaacacaatggctcttttgaattcctttgcaagaggcagaacattcccagcctcaagattccygtccttcttgccttggtgtggggaaaaaagcaaatcccctccaactcgaagaaagagtcttcctctccccaccttgtgcccctgacctctgaacccagcctagttctgctatttcttaggaaatgattcacctcagaagtgtggcatttgaaggtgaaagacggggagattagaggaattcgagactgttttcacaattccagttgggaagttggagaaaatttcggtgacatttaaactgccagttactttattagattttaatttctaaagcaaaactaaataagtgcagtcagtcaatgactggccaaaatctgtgca

SEQ ID NO: 36742 - DNA, 559 bp, Homo sapiens
accaaagcttaaactctttctaccatgtatactgtctgtatcagccatgcagaagttcccatagtcatcatcaccagccatcagccacctttcagggggctaaaccaaggtatgactggtttgagacttcgaccaagttgaagttgtaaggaagatttatggtgctgtctctgaaaagtaaaagaattagtgacaaggtttcaggttaaaaaggctcttttgtggcaattacaacattagtggaatgacaaacagtgttgaaagtcaaagagccttgggttatttaggtaatttctttttaatttatcttaagcttcagttacttcctctgtgcaatagagacaatgagtggggagggaaggggaagaagaaagcttagtatgtaaagtgcttagaatagtacctagtttgttaatcttgwataactatcaactgtattcctcttttcacataaaaacaaactacagttaactcaataaaaacagtcagcaaatagatatagccctggaggttgttaaagtaagtactgaattgaaccttaaggctctgattcaaagca

SEQ ID NO: 36743 - DNA, 503 bp, Homo sapiens
tgtatgcatttttttcactcagctctctgaagatattaatttttaatttttttaagtttggggctttccctcccccctttttctgccttgtctctgtttcctctgagttctgcatttttgttgtttgtttgctctccatctttaaagcagagcgatccttggatgtccatttatgtttaaacatgtggcactaaaagccaattcgaagctctatgtgcgtaggtagagttttgctgactattggagtccaccgtaggatggttggacataacctggtctttatattgggggactctaggtttcagtatttttttctctggttctgttcagtttctccagaaaagaattcttgaatttcctgcctacgagatgtgaacaggagtgacagtcaactggacacaccagtgcagccatgctggttgttaacatattgaaactcctattgctagtggtrtataatgactgcctcaagttctcagactgcctcattccagccacactga

SEQ ID NO: 36744 - DNA, 551 bp, Homo sapiens
ttaaatagtaatttcaggtatttttaaaacatcttccttgaaatataattcacataccatacaatttttccattgcttttaatatatttacagacttgtgtaatcatcaccacaaccaattttctaatatttgcattactccaaaaaaatcctctgtacccccaaatcatcccacctygcctactcctaagcaaggactaatgattccccttccctgttaggtgggctgttttcattatcatttgcttgtttattgattggtgacatggccagtctattttaatgaagtctatttccctgcagtgtctctcctaagtaaggcacagctttggacattcatagttacttgggacaacagttttagcagggctctctttctcctttcctgatctctctgttaagctgcctggctcatttgatatcacatccaaattatcagctgattgctctattgttttggacaatgccctgaagcataccaaaatgtgtctggaattggtgggttcttggtcttactgactttaagaatgaagttgcggacttttgcggtg

SEQ ID NO: 36745 - DNA, 1153 bp, Homo sapiens
agagaaggattagccacctacaaccagaatgaacatggcattttttagacgagtaaagagattgggctttctactatctgttgggttagagggtagtgaaataaatagtctggactaaacgatggaaaaccttaaaagtagagcaaatcaatttgcatacagaatacccttgaatagcatatgtgtgtttgaatggaataataaaggctagagtgactgtggtagagagatggatttggggagatgttgaatgaagtaaagggcattaggtaggagttgattgcaggaacccagggaccatataatgaatatctgaactcggatggctgtgacagggaaaataaaatggacaggacagatagaagtatcaattcatagggaaaaattagttgtttccaactgtcctttaaatttggcatcaagtaaaaaatatatggccaatctttctaacctgtagtattttttaaaacttcactttttggagaattttatatgtacataaaaacagatacaatattatgatgaaccccaatcactcaactccaacctgcaggcaatgctgccctatctatatccttatctacttcccccttcttttgatttataatttgcaattccaayattgcatcccttttttcttttgtttcttgtgttgacatttaacatgagctctactctgttaaaaaaaattttaagtacataagaccttttgttagtcataggtactatgttttacagaagatctctgaaactcatttatttcctatatctgtaaatttatacaagatttataaaaactccttatatgccccttctcccattctctggtaacaccattctattgtctacttctataccattggctattttagaagtatcttatgtgtaagaaaaatcatgcagtgtttgtccttctgtgattgacctatctcacttgggataatgtcttccagattcatccaagttgtcacaaaaggcaggattttcttttttaagaaagtatttatttatttatttatttatttatttatttatttatttatttatttttgagacagagtctcactctgtcacccaggctggagtgtagtggcacgatctcggctcactgccatcttcacctcctgggttcaagcgattctcctgcctcaac

SEQ ID NO: 36746 - DNA, 1002 bp, Homo sapiens
gagctcattttttttcaactatgaattggaagaaatactaagttgaacaagacagacacgttttctgccttcatatatatttgagttgatgagtgagtaaataaacatgaaaataaaaataattataagttttattaagtgctatgaaggaaacaaagagagcrtgtgctacggatgaggggtaggtaacaacatgttcttaaataaggcaattagctgaggactttagtcacagagtcagctgatcattggtgatttcaaatcatactcacgtcttctgcctcctgagctggttctgtgtcaactactttattctgatacacaggcaaaattgtgtactgctccttaaaaataagttaggccgtttgagaaataacatcaatttttttcaggtctcagattgttcttgaagttggacaaatattcaggagtaatgagagactaactttcgtcacccttccacaatttaggagatacttagagttacttcagcgtttggtattgtaaaatgacatccattggtcttaaagtaggagagttttaaaacagttttctaagaagcactgaaaaatggcttcttaaaaagcactgagtttcgtttaagccttgtggcaccagagttcctattagttatatagcaataacataattggatattttgtgtcattgcctctattttttaaacattaaattttattaagcatttttcataaacagtaatattttcaggtgagaatacaaaataaattgttcattttaaaagttaattctgtaaccaggtctatggttgaactgtaaagttagaaattaatttacacactcaggattgctgtttgcaaagaccatttgttttttccaatagagtaaggaaagcagctgagcaaaatggaattccagtttttctaaagggctgttataacgacaggagtgtggtacaattatgtctatttacttgtcctgacactgggttatctccctcgtgaccctgcagagcctgaggta

SEQ ID NO: 36747 - DNA, 1002 bp, Homo sapiens
gagctcattttttttcaactatgaattggaagaaatactaagttgaacaagacagacacgttttctgccttcatatatatttgagttgatgagtgagtaaataaacatgaaaataaaaataattataagttttattaagtgctatgaaggaaacaaagagagcatgtgctacggatgaggggtaggtaacaacatgttcttaaataaggcaattagctgaggactttagtcacagagtcagctgatcattggtgatttcaaatcatactcacgtcttctgcctcctgagctggttctgtgtcaactactttattctgatacacaggcaaaattgtgtactgctccttaaaaataagttaggccgtttgagaaataacatcaatttttttcaggtctcagattgttcttgaagttggacaaatattcaggagtaatgagagactaactttcgtcacccttccacaatttaggagatacttagagttacttcagcgtttggtattgtaaaatgacatccattggtcttaaagtaggagagttttaaaacagttttctaagaagcactgaaaaatggcttcttaaaaagcactgagtttcgtttaagccttgtggcaccagagttcctattagttatatagcaataacataattggatattttgtgtcattgcctctattttttaaacattaaattttattaagcatttttcataaacagtaatattttcaggtgagaatacaaaataaattgttcattttaaragttaattctgtaaccaggtctatggttgaactgtaaagttagaaattaatttacacactcaggattgctgtttgcaaagaccatttgttttttccaatagagtaaggaaagcagctgagcaaaatggaattccagtttttctaaagggctgttataacgacaggagtgtggtacaattatgtctatttacttgtcctgacactgggttatctccctcgtgaccctgcagagcctgaggta

SEQ ID NO: 36748 - DNA, 1002 bp, Homo sapiens
gagctcattttttttcaactatgaattggaagaaatactaagttgaacaagacagacacgttttctgccttcatatatatttgagttgatgagtgagtaaataaacatgaaaataaaaataattataagttttattaagtgctatgaaggaaacaaagagagcatgtgctacggatgaggggtaggtaacaacatgttcttaaataaggcaattagctgaggactttagtcacagagtcagctgatcattggtgatttcaaatcatactcacgtcttctgcctcctgagctggttctgtgtcaactactttattctgatacacaggcaaaattgtgtactgctccttaaaaataagttaggccgtttgagaaataacatcaatttttttcaggtctcagattgttcttgaagttggacaaatattcaggagtaatgagagactaactttcgtcacccttccacaatttaggagatacttagagttacttcagcgtttggtattgtaaaatgacatccattggtcttaaagtaggagagttttaaaacagttttctaagaagcactgaaaaatggcttcttaaaaagcactgagtttcgtttaagccttgtggcaccagagttcctattagttatatagcaataacataattggatattttgtgtcattgcctctattttttaaacattaaattttattaagcatttttcataaacagtaatattttcaggtgagaatacaaaataaattgttcattttaaaagttaattctgtaaccaggtctatggttgaactgtaaagttagaaattaatttacacactcaggattgctgtttgcaaagaccatttgttttttccaatagagtaaggaaagcagctgagcaaaatggaattccagtttttctaaagggctgttataacgacaggagtktggtacaattatgtctatttacttgtcctgacactgggttatctccctcgtgaccctgcagagcctgaggta

SEQ ID NO: 36749 - DNA, 1769 bp, Homo sapiens
acgaggatcaatacttcaaaagtatttaaaatagacaccatgtttatgtacctgccaagaaatctttttgttctcttttccataatcaatttgtactatgatttgtcaccaagtcctatcaattcttcttttaaagaattgccatcaccttacacttagaagatacattaactagttatcctaaaaacaaggattataaatcattctactataaagacacatgcacacacacatctttactgcagcactattcacaatagcaaagacatggaaacaacccaaatgcccatcaatgatagactggatgaagaaaatgtggcacatatacaccaaggaatactatgcagccataaaaaagaatgagtttgtgtcttttgcagggacatggataaagctggaaaccatcattctcagcaaactaacacaggagcagaaaaccaaacaccacatgttctcactcataagtgggagttgaacagtgagaacatatggacacagggaagggaacatcacacactggggcctgtagggggttggggggcaaggggagggagagtattaggacaaatagttaatgcatgtggggcttaaaatctagatgatgggttgataggtgcagcaaccaccatggcacatgtgtacctatgtaacaaatctgcaccttctctacatgtatscccgaacttaaagtaatataaaaaaaatttaaaaagaagcagtttcttgatggttttattgtgaacttaataaatataatgtttgacaatatcgaaatcatactcaaaaaatggtgaattctaaatatttggaagatccaaattttccacataggtatgtatgttagagttctcaagaaaaacagaatcattagaatacatataaatatatgtagaagaggcgacttattataagaattgggtaatgtggttatgaaagctgggcggtctcacagactgctgtctgcaagctgtagaaccaggaaagccactcatgtgattcagtcatattctgaaggtctgagaatgggtggtgaggagaagggaggcaatggtggtgtaaacctgtactaagtccaataaccaggagtgctgatgtcatacagcaggagaagataaatgtcttagctcagacagagtaaatttgccctttctccactttttgttttactcaggccctcaaaagatttagtgatgcctgcccatattgtgattaccctcacagttacagctggaaatgctgttttgccagctatctgggcatctcgtagcacagtcaagttgaaaactagccatcgcattatgtttctattgattaacagaattaaatattaaattagaacataaaaactaaagtaagtactaatttaaattctcattttgttattcaaacactctattcaatttctgtattttaataaactttgattgaaacttaaaatatgtagaaaaaagtatgtaaatagtacacatttgaagagtgatcacaaatagaacacaacagtgtgaacttttccaggtcaatcaattgccacctatgtcttttctatccacttgacctggtggacactaagcattgtatgcagctattgttcctaaatcattgttcgaaatggagattcccagctcccgtccaggagctgctaatcagaatcttggtggtgggtctgggagcatctgggaaattctggaacgtcttatcaagtgatagaatttgggaacagatgtttttcttcttgaattttaactgttttgagttgtcttaattatgca

SEQ ID NO: 36750 - DNA, 1769 bp, Homo sapiens
acgaggatcaatacttcaaaagtatttaaaatagacaccatgtttatgtacctgccaagaaatctttttgttctcttttccataatcaatttgtactatgatttgtcaccaagtcctatcaattcttcttttaaagaattgccatcaccttacacttagaagatacattaactagttatcctaaaaacaaggattataaatcattctactataaagacacatgcacacacacatctttactgcagcactattcacaatagcaaagacatggaaacaacccaaatgcccatcaatgatagactggatgaagaaaatgtggcacatatacaccaaggaatactatgcagccataaaaaagaatgagtttgtgtcttttgcagggacatggataaagctggaaaccatcattctcagcaaactaacacaggagcagaaaaccaaacaccacatgttctcactcataagtgggagttgaacagtgagaacatatggacacagggaagggaacatcacacactggggcctgtagggggttggggggcaaggggagggagagtattaggacaaatagttaatgcatgtggggcttaaaatctagatgatgggttgataggtgcagcaaccaccatggcacatgtgtacctatgtaacaaatctgcaccttctctacatgtatgcccgaacttaaagtaatataaaaaaaatttaaaaagaagcagtttcttgatggttttattgtgaacttaataaatataatgtttgacaatatcgaaatcatactcaaaaaatggtgaattctaaatatttggaagatccaaattttccacataggtatgtatgttagagttctcaagaaaaacagaatcattagaatacatataaatatatgtagaagaggcgacttattataagaattgggtaatgtggttatgaaagctgggcggtctcacagactgctgtctgcaagctgtagaaccaggaaagccactcatgtgattcagtcatattctgaaggtctgagamtgggtggtgaggagaagggaggcaatggtggtgtaaacctgtactaagtccaataaccaggagtgctgatgtcatacagcaggagaagataaatgtcttagctcagacagagtaaatttgccctttctccactttttgttttactcaggccctcaaaagatttagtgatgcctgcccatattgtgattaccctcacagttacagctggaaatgctgttttgccagctatctgggcatctcgtagcacagtcaagttgaaaactagccatcgcattatgtttctattgattaacagaattaaatattaaattagaacataaaaactaaagtaagtactaatttaaattctcattttgttattcaaacactctattcaatttctgtattttaataaactttgattgaaacttaaaatatgtagaaaaaagtatgtaaatagtacacatttgaagagtgatcacaaatagaacacaacagtgtgaacttttccaggtcaatcaattgccacctatgtcttttctatccacttgacctggtggacactaagcattgtatgcagctattgttcctaaatcattgttcgaaatggagattcccagctcccgtccaggagctgctaatcagaatcttggtggtgggtctgggagcatctgggaaattctggaacgtcttatcaagtgatagaatttgggaacagatgtttttcttcttgaattttaactgttttgagttgtcttaattatgca

SEQ ID NO: 36751 - DNA, 1769 bp, Homo sapiens
acgaggatcaatacttcaaaagtatttaaaatagacaccatgtttatgtacctgccaagaaatctttttgttctcttttccataatcaatttgtactatgatttgtcaccaagtcctatcaattcttcttttaaagaattgccatcaccttacacttagaagatacattaactagttatcctaaaaacaaggattataaatcattctactataaagacacatgcacacacacatctttactgcagcactattcacaatagcaaagacatggaaacaacccaaatgcccatcaatgatagactggatgaagaaaatgtggcacatatacaccaaggaatactatgcagccataaaaaagaatgagtttgtgtcttttgcagggacatggataaagctggaaaccatcattctcagcaaactaacacaggagcagaaaaccaaacaccacatgttctcactcataagtgggagttgaacagtgagaacatatggacacagggaagggaacatcacacactggggcctgtagggggttggggggcaaggggagggagagtattaggacaaatagttaatgcatgtggggcttaaaatctagatgatgggttgataggtgcagcaaccaccatggcacatgtgtacctatgtaacaaatctgcaccttctctacatgtatgcccgaacttaaagtaatataaaaaaaatttaaaaagaagcagtttcttgatggttttattgtgaacttaataaatataatgtttgacaatatcgaaatcatactcaaaaaatggtgaattctaaatatttggaagatccaaattttccacataggtatgtatgttagagttctcaagaaaaacagaatcattagaatacatataaatatatgtagaagaggcgacttattataagaattgggtaatgtggttatgaaagctgggcggtctcacagactgctgtctgcaagctgtagaaccaggaaagccactcatgtgattcagtcatattctgaaggtctgagaatgggkggtgaggagaagggaggcaatggtggtgtaaacctgtactaagtccaataaccaggagtgctgatgtcatacagcaggagaagataaatgtcttagctcagacagagtaaatttgccctttctccactttttgttttactcaggccctcaaaagatttagtgatgcctgcccatattgtgattaccctcacagttacagctggaaatgctgttttgccagctatctgggcatctcgtagcacagtcaagttgaaaactagccatcgcattatgtttctattgattaacagaattaaatattaaattagaacataaaaactaaagtaagtactaatttaaattctcattttgttattcaaacactctattcaatttctgtattttaataaactttgattgaaacttaaaatatgtagaaaaaagtatgtaaatagtacacatttgaagagtgatcacaaatagaacacaacagtgtgaacttttccaggtcaatcaattgccacctatgtcttttctatccacttgacctggtggacactaagcattgtatgcagctattgttcctaaatcattgttcgaaatggagattcccagctcccgtccaggagctgctaatcagaatcttggtggtgggtctgggagcatctgggaaattctggaacgtcttatcaagtgatagaatttgggaacagatgtttttcttcttgaattttaactgttttgagttgtcttaattatgca

SEQ ID NO: 36752 - DNA, 1769 bp, Homo sapiens
acgaggatcaatacttcaaaagtatttaaaatagacaccatgtttatgtacctgccaagaaatctttttgttctcttttccataatcaatttgtactatgatttgtcaccaagtcctatcaattcttcttttaaagaattgccatcaccttacacttagaagatacattaactagttatcctaaaaacaaggattataaatcattctactataaagacacatgcacacacacatctttactgcagcactattcacaatagcaaagacatggaaacaacccaaatgcccatcaatgatagactggatgaagaaaatgtggcacatatacaccaaggaatactatgcagccataaaaaagaatgagtttgtgtcttttgcagggacatggataaagctggaaaccatcattctcagcaaactaacacaggagcagaaaaccaaacaccacatgttctcactcataagtgggagttgaacagtgagaacatatggacacagggaagggaacatcacacactggggcctgtagggggttggggggcaaggggagggagagtattaggacaaatagttaatgcatgtggggcttaaaatctagatgatgggttgataggtgcagcaaccaccatggcacatgtgtacctatgtaacaaatctgcaccttctctacatgtatgcccgaacttaaagtaatataaaaaaaatttaaaaagaagcagtttcttgatggttttattgtgaacttaataaatataatgtttgacaatatcgaaatcatactcaaaaaatggtgaattctaaatatttggaagatccaaattttccacataggtatgtatgttagagttctcaagaaaaacagaatcattagaatacatataaatatatgtagaagaggcgacttattataagaattgggtaatgtggttatgaaagctgggcggtctcacagactgctgtctgcaagctgtagaaccaggaaagccactcatgtgattcagtcatattctgaaggtctgagaatgggtggtgaggagaagggaggcaatggtggtgtaaacctgtactaagtccaataaccaggagtgctgatgtcatacagcaggagaagataaatgtcttagctcagacagagtaaatttgccctttctccactttttgttttactcaggccctcaaaagatttagtgatgcctgcccatattgtgattaccctcacagttacagctggaaatgctgttttgccagctatctgggcatctcgtagcacagtcaagttgaaaactagccatcgcattatgtttctattgattaacagaattaaatattaaattagaacataaaaactaaagtaagtactaatttaaattctcattttgttattcaaacactctattcaatttctgtattttaataaactttgattgaaacttaaaatatgtagaaaaaagtatgtaaatagtacacatttgaagagtgatcacaaatagaacacaacagtgtgaacttttccaggtcaatcaattgccacctatgtcttttctatccacttgacctggtggacactaagcattgtatgcagctrttgttcctaaatcattgttcgaaatggagattcccagctcccgtccaggagctgctaatcagaatcttggtggtgggtctgggagcatctgggaaattctggaacgtcttatcaagtgatagaatttgggaacagatgtttttcttcttgaattttaactgttttgagttgtcttaattatgca

SEQ ID NO: 36753 - DNA, 684 bp, Homo sapiens
aggcttatttttatttaaccctcttggtacttgatgttcatggtctaagtttatctttcttcaaatctaaaagttcttatctattcactttctaaatatcatttttctgccattctttctattttctttctttctttttgttttttggagtgccaattagcatgtgttgagtcttctcaaactcttttccatctccattaaccagtttttaatatttttagtctctttatccttctgcaatattctggcagaatgcctcaggattttcctatgttcactagctgtctcaattactaaaaccaattgagaggttttctgttttagttttttatttcatttactgtattatttgttagatttttacttcactatttttttcttttcttttttgctattttatattttctttttttccccccagtggtcttgtacyttttatatctctttgaagatccttaacatatatgcttcaaattgattttcatatttctctatcatattttcatattttatctagactgaatttatctcatggctgctgttcctaaattggtattcttcatgaattttggaatatcagtttccagatccatcttgactgaaagcctgtcatggtctgtagtgtggctagggggcctctatctcacatcaatattgtaaatagtgcaatccagatgccaagct

SEQ ID NO: 36754 - DNA, 614 bp, Homo sapiens
gcattgttacagctgcacaaactaccctaccccgacagtgcgtgggtgccggagccttggtccataagggagccttgtgggcagtggcttaggcaagagcctgactggtgtcatcctgtccacttgwttactaaaaccctctgctgtggtcattcattgctgaccattcacataggacagacatatcttcatgatttttgcccattcgcgaggcctattcacatatcttttccccaaatatcttcaccaccaatttttccaatcgttctttccatgtctctgaccatccagcataaacattgagcacagctggcgaaatagtccatcactgcacaactggccactgctccttctaagcaaagtgcacagccaggtgcactgcctgcagctctgcccaggaggacttcccttccccactgtctttcagggacgtcccaggaaggggctgtagttctgcagcatccactttcaggtggtgcctgcatatggggcagagccgtctgtaaaccaggcctgagtcatctcttcctctgtcagatatcatggggacctccccaggaggtcacaggctcaggctgggagagagggtctcagctgagaaaggcggtggggca

SEQ ID NO: 36755 - DNA, 614 bp, Homo sapiens
gcattgttacagctgcacaaactaccctaccccgacagtgcgtgggtgccggagccttggtccataagggagccttgtgggcagtggcttaggcaagagcctgactggtgtcatcctgtccacttgtttactaaaaccctctgctgtggtcattcattgctgaccattcacataggacagacatatcttcatgatttttgcccattcgcgaggcctattcacatatcttttccccaaatatcttcaccacyaatttttccaatcgttctttccatgtctctgaccatccagcataaacattgagcacagctggcgaaatagtccatcactgcacaactggccactgctccttctaagcaaagtgcacagccaggtgcactgcctgcagctctgcccaggaggacttcccttccccactgtctttcagggacgtcccaggaaggggctgtagttctgcagcatccactttcaggtggtgcctgcatatggggcagagccgtctgtaaaccaggcctgagtcatctcttcctctgtcagatatcatggggacctccccaggaggtcacaggctcaggctgggagagagggtctcagctgagaaaggcggtggggca

SEQ ID NO: 36756 - DNA, 924 bp, Homo sapiens
agttaaagtgaagaaaaaaaaatcagaaataacatctggatacccagacaccagatcccttcaatacatgcaaacagaaggtatgtagtcatttttaaaagaaggaggcaaaaagccacaactactattttgaaagatgatgtatacgaaaattagcaaaagaaaacatattatatcttacatactaaataagcatgatttataccaactatactgtcattcattcaacacatatttactgagcacccattatgagccatgagttggggaaaagagcaaaaacaagacaaacagttcctgctctttggagctagataaacagcaagggagtaagccaaaattaaagaatttttacaaacgtgatgttgatgcacaaaagaagtagatatagggtgtgcccgaaaacctaatagtagaagaagctgggtgtgaaggtcctcagggaataacatttcatctaagattttaaggattgtgggcrgggagcattgtgggctaacaggagacagcattctatgcagagaggatagccttacactcttattaaaaaattttttattctatttttattatttttctttcattgatacataatattttacatatttatggggtacatgtgagtattttttacacatacagattgtgtaacaatcaagtcagggaatttggggtgtcatcaccttgcatgcttatcatttctacgtattggtaacatttcaaatcctctcttctagctacctcgaaatatttgaaatattagacactatcaaatgttatatctataaattgagacagtttagataatttaggtatactgttaaatgttataactgaaaagcaaagggaccagggaacatgtatctactttattttgtgtgtgtgtgtgctgcctcctgtacttttctccaggttacacatgca

SEQ ID NO: 36757 - DNA, 666 bp, Homo sapiens
atccccaaagaaaatatgattgcattttacctctccacccccaaggaaagaaaagctgtggtgccctgagacctagactagataagctagtcactaccaaaaccctgaacataaaaagctactctgtccatcgtgggcacattctagtccctcttcagaaaaagtccactctctatatcctcacttcctccttcctcctactcaaggaaaaaatatatatatatttatatatatatatatttatatatatatatatttatatatatatatttatwtatatatatatttatttatatatttatttatatatatatttttatatatatttatttatatttatttatttatatatatatttatatatatatttgtgtatatatatatataaatatatatataaagtgtactttcatcacatggaattaaccactttcccactgtatttttaaacactttttgggctgagcatagtggctcatgcctgtaatcccagcactttgggaggctgaggcaggtggatcacttgaggtcaggagtttgagaccaccctggccaacatggtgaaacccagtttctaccaagtctacagagtgagactccatctcaaaaaaaagaagaggggatgtgaaggacccttctgccccctaacaaaataaacacttattg

SEQ ID NO: 36758 - DNA, 822 bp, Homo sapiens
cttgaagacaggagttcgagactagcctgggaaataaagtaagacccagtctctaccaaaaaaaaaaaaaaaaaaaaaattaaaaattagcatctccagtcccagctacgagaaagactgaggcagaaggatcacttgagctcaagtgtttcaatgctgcagtgagctatgatcgtgccactgcaccctagcctgggcagcacagcaagatctcatctctaaaaaaacagtcataaaaaaagaaattatgaaagggacaagattgagattattttcatattcaacatatattaagctartattatttccagatgatttttatttctctgacctcttccagaacatgaactcccaacacacaggaacgtaggagtttatcaaaatgcttccaaagacacagattgtaaaaagagagaatacaatgttgcttgatacaaatataacacaatctacacatgtaatttaaagttttcccattgccacttaaaaaataaataaataaataaaggcaggaagatggcttgaggcccagagtttgaaaccagcctgggcaatacagtgaggcactgtttcagcaaaaaaattttaaacttagctggcacatgtcgtggcacatgcctgtagtcctagctactcaggagaccaaggcaggaggattgcttaagcccaagaggttgaaggctgcagtgagctctgatcacaccactgcactctggtatgggcaacagagcaagaacctatcacttaaaaaaaaaaaaaaaaatctactgtatggtagacgaacctgtgtatggtagacacacctgacagtgataacttaag

SEQ ID NO: 36759 - DNA, 2287 bp, Homo sapiens
atgtatttaccagagaacaagacataatataggtacggatttctgaaaacattttgcacatcttgaagggaagttgctgaataaattcctctctccgtcatctagaagctgacagcttaacccctttatcttggcagatttaagctctgaacattttgataggtgacttggctttgaagtttttccactggccatacattttgcctttcattgtatgtgaataaaatacgtatgttaaatcaaagatttagtaactcttacttaacagtttcaatattgaaatatgtgtgtgttctagtcttggtaattttttatccatgtagtgagaagtaagggtaacaatgaaaatccaaccgttgtatgacttcctggtctaatcttccttcatttgtgaaatcagtttattgagatactgtttttgccacctttgcagttattcatcatactaatcaaagtaaaacatggcrtttctaagcaaaattaacaagcattaacatttatgcccaactgttgacgtgtataggctttcctttgaaataggaggcatttcaaaaaatacacatttcaaaatagaatcaactgacttttgagtttcccttctctttctcagtagtggaggtggtaaacaatcctaggtaagtagataaaagtgcagccccagaaagaatgaagaggaatcagagacaggaaaataaaaccctcagtttgtgtaactggcctggttgataaagaattggattacagtgggatgccatggctcatgcctgtcagctttgggaggccaaggcaggggaattgttaaaggccaggcgttagagaccagcctgggcaacacagtgagaaccccatccctaccaaaaaaaaaaaaaaaaaaaaaaaaggattggattaatcatcttttctaatctctgaattttgtttgtcatttctcatgccttagtgtagtggtctttgatataaaaataaaatcatgaaacagcaagtataattctaaaatgatctcaatatgattattttcatgagtggcttattccaaacaagcatttgatacttttagagaaaggtcaattaaatgaactaactggcggttcctttttatgaactaaacatttattttgtactgtatttgggtttgggtttgacattctgctaacatactctgatttggctaaaagtgtcatgcatcagtttttagaacttttaatctgaacatattttcaaattaagttacaaacgtgatttttaaaggaatcttttctccctaacgagaagaggtggttgcattaaattggtaaaaaaataacaaaaacaaaccaaaaacagtttactgtataattaaggtctccatcctattttgttattctgttgggctagtggtttttcaaacctggttgcacatttggatcacctgagttaataaaaaaaatccaaccaaacctaggctgcatacccagattgtaaggcgtagtctcaggtgtggccctagagtcagtagttttaaaatgtcccaagatgattttaatgttcagtcagagttgataaccctgatccaggctctcactactaatagacatctgtagcatgacactggtagtctttgatttttcttgattttggccttcagtgtactctgaactttcatacagtacacattaaaattccctaccctgtctacagttggggccttgtatattaactgatgagaatgctcaacagttttacagtaggctgctgttgtaggccaaatgctggttccccaaaatgtccacatcctaatacctggaacctgtaaattttaccttattggaaaaaggatccttgcagatgcggtaaattaaggatcttgagataaagagatcatcctggattatctgagttttccctaaatttcatcttaagtatcctagtgaaatgagggtgagatttgacagacacacagaggcgaaggcactgtgaagatggagacacacatggagtgatggggccacaagtcaaggaatgtctgtccgtggccaccaggaaaaggcaaagaacagattctcccctagagcctttgtggggagcgcagctctgatgaaaccttgatttcagtgcagtgaaactgattgtgagctactcgcctccagaactgtggggaaatacgtttctgttattttaaagcacaaagtttgtggtagtttgttaacagcagccacaggaaactaatatagccactttcctgttaccagttgggttttggcggtgtgctatccctgtctacacagcagtatatatttgtgtaacagat

SEQ ID NO: 36760 - DNA, 2287 bp, Homo sapiens
atgtatttaccagagaacaagacataatataggtacggatttctgaaaacattttgcacatcttgaagggaagttgctgaataaattcctctctccgtcatctagaagctgacagcttaacccctttatcttggcagatttaagctctgaacattttgataggtgacttggctttgaagtttttccactggccatacattttgcctttcattgtatgtgaataaaatacgtatgttaaatcaaagatttagtaactcttacttaacagtttcaatattgaaatatgtgtgtgttctagtcttggtaattttttatccatgtagtgagaagtaagggtaacaatgaaaatccaaccgttgtatgacttcctggtctaatcttccttcatttgtgaaatcagtttattgagatactgtttttgccacctttgcagttattcatcatactaatcaaagtaaaacatggcgtttctaagcaaaattaacaagcattaacatttatgcccaactgttgacgtgtataggctttcctttgaaataggaggcatttcaaaaaatacacatttcaaaatagaatcaactgacttttgagtttcccttctctttctcagtagtggaggtggtaaacaatcctaggtaagtagataaaagtgcagccccagaaagaatgaagaggaatcagagacaggaaaataaaaccctcagtttgtgtaactggcctggttgataaagaattggattacagtgggatgccatggctcatgcctgtcagctttgggaggccaaggcaggggaattgttaaaggccaggcgttagagaccagcctgggcaacacagtgagaaccccatccctaccaaaaaaaaaaaaaaaaaaaaaaaaggattggattaatcatcttttctaatctctgaattttgtttgtcatttctcatgccttagtgtagtggtctttgatataaaaataaaatcatgaaacagcaagtataattctaaaatgatctcaatatgattattttcatgagtggcttattccaaacaagcatttgatacttttagagaaaggtcaattaaatgaactaactggcggttcctttttatgaactaaacatttattttgtactgtatttgggtttgggtttgacattctgctaacatactctgatttggctaaaagtgtcatgcatcagtttttagaacttttaatctgaacatattttcaaattaagttacaaacgtgatttttaaaggaatcttttctccctaacgagaagaggtggttgcattaaattggtaaaaaaataacaaaaacaaaccaaaaacagttyactgtataattaaggtctccatcctattttgttattctgttgggctagtggtttttcaaacctggttgcacatttggatcacctgagttaataaaaaaaatccaaccaaacctaggctgcatacccagattgtaaggcgtagtctcaggtgtggccctagagtcagtagttttaaaatgtcccaagatgattttaatgttcagtcagagttgataaccctgatccaggctctcactactaatagacatctgtagcatgacactggtagtctttgatttttcttgattttggccttcagtgtactctgaactttcatacagtacacattaaaattccctaccctgtctacagttggggccttgtatattaactgatgagaatgctcaacagttttacagtaggctgctgttgtaggccaaatgctggttccccaaaatgtccacatcctaatacctggaacctgtaaattttaccttattggaaaaaggatccttgcagatgcggtaaattaaggatcttgagataaagagatcatcctggattatctgagttttccctaaatttcatcttaagtatcctagtgaaatgagggtgagatttgacagacacacagaggcgaaggcactgtgaagatggagacacacatggagtgatggggccacaagtcaaggaatgtctgtccgtggccaccaggaaaaggcaaagaacagattctcccctagagcctttgtggggagcgcagctctgatgaaaccttgatttcagtgcagtgaaactgattgtgagctactcgcctccagaactgtggggaaatacgtttctgttattttaaagcacaaagtttgtggtagtttgttaacagcagccacaggaaactaatatagccactttcctgttaccagttgggttttggcggtgtgctatccctgtctacacagcagtatatatttgtgtaacagat

SEQ ID NO: 36761 - DNA, 2287 bp, Homo sapiens
atgtatttaccagagaacaagacataatataggtacggatttctgaaaacattttgcacatcttgaagggaagttgctgaataaattcctctctccgtcatctagaagctgacagcttaacccctttatcttggcagatttaagctctgaacattttgataggtgacttggctttgaagtttttccactggccatacattttgcctttcattgtatgtgaataaaatacgtatgttaaatcaaagatttagtaactcttacttaacagtttcaatattgaaatatgtgtgtgttctagtcttggtaattttttatccatgtagtgagaagtaagggtaacaatgaaaatccaaccgttgtatgacttcctggtctaatcttccttcatttgtgaaatcagtttattgagatactgtttttgccacctttgcagttattcatcatactaatcaaagtaaaacatggcgtttctaagcaaaattaacaagcattaacatttatgcccaactgttgacgtgtataggctttcctttgaaataggaggcatttcaaaaaatacacatttcaaaatagaatcaactgacttttgagtttcccttctctttctcagtagtggaggtggtaaacaatcctaggtaagtagataaaagtgcagccccagaaagaatgaagaggaatcagagacaggaaaataaaaccctcagtttgtgtaactggcctggttgataaagaattggattacagtgggatgccatggctcatgcctgtcagctttgggaggccaaggcaggggaattgttaaaggccaggcgttagagaccagcctgggcaacacagtgagaaccccatccctaccaaaaaaaaaaaaaaaaaaaaaaaaggattggattaatcatcttttctaatctctgaattttgtttgtcatttctcatgccttagtgtagtggtctttgatataaaaataaaatcatgaaacagcaagtataattctaaaatgatctcaatatgattattttcatgagtggcttattccaaacaagcatttgatacttttagagaaaggtcaattaaatgaactaactggcggttcctttttatgaactaaacatttattttgtactgtatttgggtttgggtttgacattctgctaacatactctgatttggctaaaagtgtcatgcatcagtttttagaacttttaatctgaacatattttcaaattaagttacaaacgtgatttttaaaggaatcttttctccctaacgagaagaggtggttgcattaaattggtaaaaaaataacaaaaacaaaccaaaaacagtttactgtataattaaggtctccatcctattttgttattctgttgggctagtggtttttcaaacctggttgcacatttggatcacctgagttaataaaaaaaatccaaccaaacctaggctgcatacccagattgtaaggcgtagtctcaggtgtggccctagagtcagtagttttaaaatgtcccaagatgattttaatgttcagtcagagttgataaccctgatccaggctctcactactaatagacatctgtagcatgacactggtagtctttgatttttcttgattttggccttcagtgtactctgaactttcatacagtacacattaaaattccctaccctgtctacagttggggccttgtatattaactgatgagaatgctcaacagttttacagtaggctgctgttgtaggccaaatgctggttccccaaaatgtccacatcctaatacctggaacctgtaaattttaccttattggaaaaaggatccttgcagatgcggtaaattaaggatcttgagataaagagatcatcctggattatctgagttttccctaaatttcatcttaagtatcctagtgaaatgagggtgagatttgacagacacacagaggcgaaggcactgtgaagatggagacacacatggagtgatggggccacaagtcaaggaatgtctgtccgtggccaccaggaaaaggcaaagaacagattctcccctagagcctttgyggggagcgcagctctgatgaaaccttgatttcagtgcagtgaaactgattgtgagctactcgcctccagaactgtggggaaatacgtttctgttattttaaagcacaaagtttgtggtagtttgttaacagcagccacaggaaactaatatagccactttcctgttaccagttgggttttggcggtgtgctatccctgtctacacagcagtatatatttgtgtaacagat

SEQ ID NO: 36762 - DNA, 641 bp, Homo sapiens
acgcccagctagtttttgtatttttagtagagatggggtttcaccatggtggccaygatggtctcaatctcttgacctcctgatgtgcccacctcagcctcccaaagtgctgggattacaggcgtgggccaccgcaccccaccaccattcatcttaatatgtaagattatgtaaaatgaactgagaaggctgagtcttttagaattgacctcatgcaactcacacagatgtgtggaactaatgaagaaatatggggcataccaaagaagcccaatttattttagcctcatccattttataaggcaaaaattgtcacagtttttctagaggtcacctaggaaatctaaaaaattcttatttttccctaaaaatcagaaaatatttactttttggaatttaagatataatttcagatgggcaaaaattaagtgttatcagaggagatttggtcactgtgataaagataggaatacaggtacagagaagaaaatggtggcaataatcccaatgacaatacaatattctaaaataagcatagaaaaatatatcataattgttagaaaatgtatccgtttcataattaattatgctgtacaaatgtttttttcttatttttctttctagcttcattgaagtatgat

SEQ ID NO: 36763 - DNA, 641 bp, Homo sapiens
acgcccagctagtttttgtatttttagtagagatggggtttcaccatggtggccacgatggtctcaatctcttgacctcctgatgtgcccacctcagcctcccaaagtgctgggattacaggcgtgggccaccgcaccccaccaccattcatcttaatatgtaagattatgtaaaatgaactgagaaggctgagtcttttagaattgacctcatgcaactcacacagatgtgtggaactaatgaagaaatatggggcataccaaagaagcccaatttattttagcctcatccattttataaggcaaaaattgtcacagtttttctagaggtcacctaggaaatctaaaaaattcttatttttccctaaaaatcagaaaatatttactttttggaatttaagatataatttcagatgggcaaaaattaagtgttatcagaggagatttggtcactgygataaagataggaatacaggtacagagaagaaaatggtggcaataatcccaatgacaatacaatattctaaaataagcatagaaaaatatatcataattgttagaaaatgtatccgtttcataattaattatgctgtacaaatgtttttttcttatttttctttctagcttcattgaagtatgat

SEQ ID NO: 36764 - DNA, 641 bp, Homo sapiens
acgcccagctagtttttgtatttttagtagagatggggtttcaccatggtggccacgatggtctcaatctcttgacctcctgatgtgcccacctcagcctcccaaagtgctgggattacaggcgtgggccaccgcaccccaccaccattcatcttaatatgtaagattatgtaaaatgaactgagaaggctgagtcttttagaattgacctcatgcaactcacacagatgtgtggaactaatgaagaaatatggggcataccaaagaagcccaatttattttagcctcatccattttataaggcaaaaattgtcacagtttttctagaggtcacctaggaaatctaaaaaattcttatttttccctaaaaatcagaaaatatttactttttggaatttaagatataatttcagatgggcaaaaattaagtgttatcagaggagatttggtcactgtgataaagataggaayacaggtacagagaagaaaatggtggcaataatcccaatgacaatacaatattctaaaataagcatagaaaaatatatcataattgttagaaaatgtatccgtttcataattaattatgctgtacaaatgtttttttcttatttttctttctagcttcattgaagtatgat

SEQ ID NO: 36765 - DNA, 512 bp, Homo sapiens
gtctttgaaaatgcaatatttcattccttcttcaataaaagttttcaaggtacactaaaaaagatttcattatgtcagtgaaacgtggtggacgaatgtcaaaaattttaaaatatcaatatactaatatttaagttatagtcaatatgcttagaaaagaataaaatcattgttataaactcaaagaatgaacaaatggaaaaagactcaaaaatgggccgggcacagtggctcatgcctgtaatgctagcattgtgggaggctgaggcagcggatggcttgagcgcaggagtttaagaccagcctggccaccatggcgaaaccctgtctctactaaaaatacagaaatttaccaagcatagtggcacacacctgtaatcccacaccggcttctccggtggctaaggcaggggaatcctttgaacctgggaggcggaggcagaggctayagtgagccaagaacatgccactgcacgccggcttgagcactaagtgagtacctgtctcaaaaa

SEQ ID NO: 36766 - DNA, 793 bp, Homo sapiens
caatttatattatttaaccagttatagactcactgttggcatgttacatttaacacacacttgacttttgatttgaaatcatttcctcattaaatcctgtatctcacctttgagattaatgtgataatgtgatgtagcctctattgatgcctcagagagtgagaaygtgatgtaacctttagtgaagcctcacactgtttattaagatcagccaattttttttgaagttgtctcacaatgacctgacaagacatttttttgattttgtgaatcatcttatcaaattaacaatatttactttcaaaaatatccccaaatatattgattcagtttattttcttcatttgtgcacattgctgcttgttagtgaatttacttaaggacacaagaaggtgcaatctttctgccaaattggtactgtcttactagacacaagattcatctcactagtaattttttcccttaatgaatctgtagttcttcacaacttactgaagtctcaaaaaaaaaaaggcaggactagtggtggtaaattctacacagtggaattctttccttcttctgtattagaagcacaaatcaacatcaaagttcctcacatattcaatcacctgctgaaaattttccaatagatttttatctcagaataaaagtaattttatttcaaactttacaggcccttggtaacctggtctccacatccctcctgacctcagctcctatgtttctctcctctactcacttcttttgtactatacatgaaccctgccaccccttatgaattgaaaaatgg

SEQ ID NO: 36767 - DNA, 1095 bp, Homo sapiens
agcagtggaatcctcactgctgttggckgcgggcaaggtcagcggggtttccatcgctgctggtgggagccacctggcggtggtagctgcaagtgagcgcgtggcagagactggcagggctggtcccagacaccctgagggtctctgggtgcatcgccctaccaccctagggtctgctcttccttagcctgctcccaggacgcggtgtacgagggctagactctgagcagcctccaggatggggctgagcagcggattcctgccctgctgcagctacagtctgaattaggcgccaccgcagtatctggccctggggtacgtgctactgggtggcatggacagagatgggggctgccacagctgctatggggctgagcagccgattctcgccctgctgcagcgggcgaccgctgcaatccccagcgctatgggaccgaccacctgacttagatgccttggaggcatccggtcctggggtcttgctgctggtgtctgcgggcagggtcacggctgccactactactgctgtgcgccatgggcaggtgccagctgcagctgagtccgaggcagatgctgtcagggctggtctgaggttgcctaagggtggctgagtgcaccacgcttccaccccagggtccgttattcctaggccggctcccagattgcagggttgtgggcgttggacactgtgcagccatgaggatctggttgggtgcagattcccgccctcctgcagctgagaagccaatctcataacaggcgctgcagtgacctctggctctgcggtccgcgctgctgctggagctggcagagaacagagctgccaccgctgctgcttccaggagtgtgcagctggcagctgcagctgagcccgtggcggaggctggaaggccttattccagaagccttgagggtccccgaatgcaccgccctcccaccctaaggtccagtcttccttgcccgcgcccagagagttggattgcaggcgctgagcacagtgcaggtgctgggatggggctaagctgaaagtttccgccctctggctgctgcggggccgacagcctgagttatgcgccgcggcggcttttggtcatg

SEQ ID NO: 36768 - DNA, 765 bp, Homo sapiens
agaccccagacccatagatccatcaacagctcacaccccatgtacggaaaagctacaggcactcaacaccagcccagcccatgagagcagctacaggtgctaaaccctgcaaagccccaggtgcactgccttagtagagtttttccatgagcctctgcctctgtggcaggctactcccatcctgctacacaccaccctacagccagcctactcctccccactttacccacctgtttttacgtccaatccaacccctctcccatycatgaataaatcacctcccacaaggccccacatgcaaaattcgggattacaattacatgtgagtttaggtagggacacacagctaaaccatattattctgaccctgatcccccgaatatcatatccttctcacagagtaaaatacaatcaggccttttcaaaagttgtcgaaagtcttaagtcattgcagcattaagtcaaatgtaaaaagttcaacgtctcacctgagaaaaggctacagtcccttttgcctataagttcctgaatttaaaagggatttattttctttcaaggtacaaagatggtacaggcattgggtaagttttctcaatccaaagggaagaggtttgccaggaaaataacacaaattggatcacagggccaatgcaagtccaaaacccaggagaccactatccattcaatctcactgctccaaaaccatcacgagaactcaccatcatgaagaaagaattaaggagatggtgtttaaccgtttgtgaa

SEQ ID NO: 36769 - DNA, 765 bp, Homo sapiens
agaccccagacccatagatccatcaacagctcacaccccatgtacggaaaagctacaggcactcaacaccagcccagcccatgagagcagctacaggtgctaaaccctgcaaagccccaggtgcactgccttagtagagtttttccatgagcctctgcctctgtggcaggctactcccatcctgctacacaccaccctacagccagcctactcctccccactttacccacctgtttttacgtccaatccaacccctctcccattcatgaataaatcacctcccacaaggccccacatgcaaaattcgggattacaattacatgtgagtttaggtagggacacacagctaaaccatattattctgaccctgatcccccgaatatcatatccttctcacagagtaaaatacaatcaggccttttcaaaagttgtcgaaagtcttaagtcattgcagcattaagtcaaatgtaaaaagttcaacgtctcacctgagaaaaggctacagtcccttttgcctataagttcctgaatttaaaagggatttattttctttcaaggtacaaagatggtacaggcattgggtaagttttctcaatccaaagggragaggtttgccaggaaaataacacaaattggatcacagggccaatgcaagtccaaaacccaggagaccactatccattcaatctcactgctccaaaaccatcacgagaactcaccatcatgaagaaagaattaaggagatggtgtttaaccgtttgtgaa

SEQ ID NO: 36770 - DNA, 765 bp, Homo sapiens
agaccccagacccatagatccatcaacagctcacaccccatgtacggaaaagctacaggcactcaacaccagcccagcccatgagagcagctacaggtgctaaaccctgcaaagccccaggtgcactgccttagtagagtttttccatgagcctctgcctctgtggcaggctactcccatcctgctacacaccaccctacagccagcctactcctccccactttacccacctgtttttacgtccaatccaacccctctcccattcatgaataaatcacctcccacaaggccccacatgcaaaattcgggattacaattacatgtgagtttaggtagggacacacagctaaaccatattattctgaccctgatcccccgaatatcatatccttctcacagagtaaaatacaatcaggccttttcaaaagttgtcgaaagtcttaagtcattgcagcattaagtcaaatgtaaaaagttcaacgtctcacctgagaaaaggctacagtcccttttgcctataagttcctgaatttaaaagggatttattttctttcaaggtacaaagatggtacaggcattgggtaagttttctcaatccaaagggaagaggtktgccaggaaaataacacaaattggatcacagggccaatgcaagtccaaaacccaggagaccactatccattcaatctcactgctccaaaaccatcacgagaactcaccatcatgaagaaagaattaaggagatggtgtttaaccgtttgtgaa

SEQ ID NO: 36771 - DNA, 765 bp, Homo sapiens
agaccccagacccatagatccatcaacagctcacaccccatgtacggaaaagctacaggcactcaacaccagcccagcccatgagagcagctacaggtgctaaaccctgcaaagccccaggtgcactgccttagtagagtttttccatgagcctctgcctctgtggcaggctactcccatcctgctacacaccaccctacagccagcctactcctccccactttacccacctgtttttacgtccaatccaacccctctcccattcatgaataaatcacctcccacaaggccccacatgcaaaattcgggattacaattacatgtgagtttaggtagggacacacagctaaaccatattattctgaccctgatcccccgaatatcatatccttctcacagagtaaaatacaatcaggccttttcaaaagttgtcgaaagtcttaagtcattgcagcattaagtcaaatgtaaaaagttcaacgtctcacctgagaaaaggctacagtcccttttgcctataagttcctgaatttaaaagggatttattttctttcaaggtacaaagatggtacaggcattgggtaagttttctcaatccaaagggaagaggtttgccaggaaaataacacaaatkggatcacagggccaatgcaagtccaaaacccaggagaccactatccattcaatctcactgctccaaaaccatcacgagaactcaccatcatgaagaaagaattaaggagatggtgtttaaccgtttgtgaa

SEQ ID NO: 36772 - DNA, 1194 bp, Homo sapiens
atcacagccgacaaacctgcagcctcagttcaagaccagtggacaagtcagcaagatccagatcatccaactcgactgatcttgcggaggaaccaaggcacagcagaaaaagatgactgccctgccccaaccacaccagaggctggttggtaaatgcactgatgaagcttgaggaaacgtcaagccctgctctagtcacacaacaggaagctgactagtctacgcatggctgaagcctgaggaagttggtgctagataagtaaatgtggattaaatttgcaagtgtagttatactattgcttatactgattgttttgctgtcatgctatctttgcaattgctatcaaacttgttgcccaggaggatgcctgtgcatagtgtaaacttgatcacagtagtgamaataatgctaacaggcacgggaggaaaccaagataattgtcatcattatatgatagaagcttggtttggtaaaggtataacaaaaaccctgttatatcaaacttattattagtgtacaggaatcccctggggacatgtgtttataatcaaaccagctactctgtctatgacccaagtcatgggcaacctcaagtatgttatgatctaggcctcctaccctacaacttttggtttgaaattcaaatagggaaacctttgttacccacatatgccaatcctaataacgttggaactgggaaactcataagcaaaacacgggtattaccttattcacataaagaatcagtttctatatattttgatgcctgtcaggctgcacacctcagcaacctaatccaggagaagtctgcaagaacttaggacaagaaagagtcagcagtaaggctgctaagatcataatagaagaaccagaagaagaatgtcctgattgtaactttcaacggaccacacatgaattcagccaacacctatatacagggggagtagctctgcttgccagccaaaaagcaaagattggttgtgtgactaacacatgcaacccccttaatttgaccatattaaagccaaacatacctttttggactaaaggacatcaaggagagctaagctttgatcaagaaagagcaaacctaggtgtttcattggtcattattaaaaagactcaatgagctaaagttcaagtcagtccaatgtcacagttcagatttttcagatccttcaataaacatttta

SEQ ID NO: 36773 - DNA, 1896 bp, Homo sapiens
agattggagaatgttaggcttaatgctgaaaaaatgtaccaaacattctatattcaataaaactttgcttcaaaagtaaagatgaaataaagacaatttgagataaaagttgaatttgtcacaaaaagaccttcactaaaggtcttatttggcacttggaaaagacccacaatggcagcttgaggtagacaaaagagcgaaaagcaatggaaagttaaactatctggataaactttaataaatatttacagcataaataatactgatgacttttggggtataacgtagatagcatattaaagtacaataagaacacataattagggaggaaaaaatagaagtaaaattctgaagtcttttcatttttctagaaatattttagatttatgtcagwccttataagaaaagtatttgttttgcaatctctatgtaaaacaaaaaagtaaacaaaaaagctcaagtagacctagaaaaatgaaatagcaagagaatgcaaaaaaattcaaaaggatgcaaaaaaggaaaataaattaaattttaaaataaatagtatatttgaaaaattaaaccaaattaattattattttactcttaaaggaaataaaggctccaattaaaaaattgtcaaggagggaaaacaccaagatgcatgtaacttacgagaaatataacttaaatattagcaagcaaaagagatgcaaaaaaaaaaaaagaatagaaaatatgatcattcagacagtaccaaaataaagctggtttaagtaatactagcgaagaagagtttcatgccagaagcataactgataatgagaacatttcataataatcaaaaacaaaatctaccaagaatatatagcagttctaactttgtaatgagtaaaattcaaaatatatgaagtaaaagtaaaacaaaaaggaggaaaaagaaccgaatatgtaatcataatgagggatttcaaaattcttctcaccccataaatatatacacctactaagcccccacaatcagttaaaaaaccatccttttctcgtgaactgataaataggcatttaacctcatatgctagtccatgaaactaatcaacaaatttgaaagaatggcagtcttacagaatatgtaagcaattagtggaaatcagccagaaataagagcaaaagataactagaatgttcccacatgtttagaaattgtccaatacatttctaaatggtccttgcatcaagaaagaaagcaaaattgaaattagaacatattttgaattgaagacaataaaaatatcaaaacatgtaggatgtattgaagactatcctcactgaaaagtgcattgtcttaaatttctacattggaaaaaaactaaagtttaaaaatctgtaatctaagcattcaattcacaaataaaattcaaatgaaataaaatatctaatgaaatccaaagagtacagaaagaaaggaataataagacaaaagcagaaaaatatcaattatttctggagtaattggggcttttaagaaactctcaataaggatatgttaaagttgatgtaggaaataagaagttagatatgaaataactaacaattcttcacatttaaaaatagttcacatatgataaaggttaagtaccttcatttctgctctaaaaaggaaaaaaaggtaaaaatagcaaaaaccaatgggaaaacaaacaaaaagaaaataaccaaaccacaaaccacaatatggaacatcaacaaagctagaagtttgttctttgataagacaaataaaattggcactctctttgcaagatagatcaagaatagaaagagaaaacacaaattcctaatattcaggaatggataaagtaaactcaatatagatcctagagacatttaaatgataataaaacatttgac

SEQ ID NO: 36774 - DNA, 528 bp, Homo sapiens
tgcctgtaatcccagcactttgggaggccgaggtgggcggatcacgaggtcaggagatcgagacgatcttggctaacatggtgaaacagcatctctactaaaaatacaaaaaattagccgggtatggtggcgggcacctgtagtctcagctactcgggaggctgaggcaggagaatggcgtgaacctgggaggtggagcttgcagtgagctgagatcrcgccagtgcactccagcctgggcgacagaatgagactctgtctcaaaaaaaaaaaaaaaaaaatctgtctgtctgtctgtctatctatctatctatctatctatctatctatctatctatcttaagtcacaaaaggcttggcctgaaatagagattcaaccagtgagtttcctttttgccagcttgtcataggatctctgttttacctaaccttctggaatattgtctttctttctgtgctttttaaatgtgaattattgtgaaggctttgctctcttccctttttcagctaccccaggtcttgatcagt

SEQ ID NO: 36775 - DNA, 528 bp, Homo sapiens
tgcctgtaatcccagcactttgggaggccgaggtgggcggatcacgaggtcaggagatcgagacgatcttggctaacatggtgaaacagcatctctactaaaaatacaaaaaattagccgggtatggtggcgggcacctgtagtctcagctactcgggaggctgaggcaggagaatggcgtgaacctgggaggtggagcttgcagtgagctgagatcacgccagtgcactccagcctgggcgacagaatgagactctgtctcaaaaaaaaaaaaaaaaaaatctgtctgtctgtctrtctatctatctatctatctatctatctatctatctatctatcttaagtcacaaaaggcttggcctgaaatagagattcaaccagtgagtttcctttttgccagcttgtcataggatctctgttttacctaaccttctggaatattgtctttctttctgtgctttttaaatgtgaattattgtgaaggctttgctctcttccctttttcagctaccccaggtcttgatcagt

SEQ ID NO: 36776 - DNA, 531 bp, Homo sapiens
acacttggcctaaaattcttatgataaataaatgatacaaatatccaraagtgtttatgagtgtgcttaataaacactaaataatgttggttatcattataaaatttatataattattagtgtctgaagtattatgcatgccatagttttatgtgactcaaatattattattttcttcttaatatcactaatttaatattgaaggagaagttttagtaatatttttactggcaatttttaaaataagtaagttcttttgaatgctctgtagagttatggaaagtagcattgcacactctaaggaatatttgtaatttctaggtcagaaagaaattaagggagggcttagtgcccacagttgtccttacataacttctctgtcttctcaacagctttgatcagtcacgcatcaatttgcctttgaaggaagaggaaagagtttgcattttacaatgagaacatatcagcacttatatttaatttacaaagtgaagctttaaatatttttaaatgaaactgagagtaatctga

SEQ ID NO: 36777 - DNA, 470 bp, Homo sapiens
agagcagtcatccccatccccccatttcccctactatgtaggcaatcattatgtctcaatggatttacctaatcaatatttcacagaaattgagtaaatactatatatggtcttttgtcactggtttctttcacttgtaaataattcttaaaacatctaggaggtgcaaaggtaactaaaagtgatgscatgatttaaatttgaaaaaaaaaaggccaatgagtattcaaaactcattctgtagttacgagtaaagatatgagaatatgtcttcaaggtgctgaaattcaggaattgtctaaatttctatagacaccaggaatgtgttttgtgtatcatgtcaaaaacactaccaagatgaattttaggtttctgcaattcatatgcatgcaagcaaagttcctatgtaagcagagttgcttgagctactcagtcctctctctctctttctctctctctttctctctctg

SEQ ID NO: 36778 - DNA, 470 bp, Homo sapiens
agagcagtcatccccatccccccatttcccctactatgtaggcaatcattatgtctcaatggatttacctaatcaatatttcacagaaattgagtaaatactatatatggtcttttgtcactggtttctttcacttgtaaataattcttaaaacatctaggaggtgcaaaggtaactaaaagtgatgccatgatttaaatttgaaaaaaaaaargccaatgagtattcaaaactcattctgtagttacgagtaaagatatgagaatatgtcttcaaggtgctgaaattcaggaattgtctaaatttctatagacaccaggaatgtgttttgtgtatcatgtcaaaaacactaccaagatgaattttaggtttctgcaattcatatgcatgcaagcaaagttcctatgtaagcagagttgcttgagctactcagtcctctctctctctttctctctctctttctctctctg

SEQ ID NO: 36779 - DNA, 537 bp, Homo sapiens
acatagaagtcagtgtgttataggaataaacagagtttctagttgggcagatatactatrtcattattatttatgaaacattaatgaagttatagttacagtatttgggccttttattgtatgtccattagggtataagaaaaatatctatcttacaatggttcaataactactttgtggaatactttattaaatattttccttctttttaatcaacagttaagtgttattaaaagtattttctatgtgttctgatattaaaaatgtcttaagtattttcaattactataataaatgttcataacttgtatatttatatcattccaaattacttaaggtaaattctgtttttaataataaatatgtagatattataaattaatatagcatataaatatataaaagtatatctatatctaaattatataaacatgcatgtatgtatatacacacatcatgtatgaacaagacctcagaaattgagagtggatataaattcttatgaaaaaaccctccgttgaactgaacacaaaagca

SEQ ID NO: 36780 - DNA, 537 bp, Homo sapiens
acatagaagtcagtgtgttataggaataaacagagtttctagttgggcagatatactatatcattattatttatgaaacattaatgaagttatagttacagtatttgggccttttattgtatgtccattagggtataagaaaaatatctatcttacaatggttcaataactactttgtggaatactttattaaatattttccttctttttaatcaacagttaagtgttattaaaagtattttctatgtgttctgatattaaaaatgtcttaagtaytttcaattactataataaatgttcataacttgtatatttatatcattccaaattacttaaggtaaattctgtttttaataataaatatgtagatattataaattaatatagcatataaatatataaaagtatatctatatctaaattatataaacatgcatgtatgtatatacacacatcatgtatgaacaagacctcagaaattgagagtggatataaattcttatgaaaaaaccctccgttgaactgaacacaaaagca

SEQ ID NO: 36781 - DNA, 527 bp, Homo sapiens
atttctttttcttttgcataacagtcacttgccacttgkcgtagcaaactttttttttttttttttttttttgagacggagtctcgctctgtcacccaggctggagtgcagtggtgcgatctcggctcactgaaagctccgcctccctggttcacgccattctcctgcctcagcctccggagtagctgggactacaagcctcccaccaccacaggccggactaattttttttttttttgtattcttagtagagacgcggtttcaccgtgttagccaggatggtctcgatctactgaccttgtgatctgcccgcgtcggcctcccaaagtgctgggattgcaggcgtgagccaccgcgcccggccagcaaactttaaaagaagaattcaatggggagatatgacaaaacttagatgttttagtaatactgcataatgtaataattgaccaaaatatttttacattcctttgagataatactaaattgtattaaaacttagtcttgctaacatatgtgggcctcctttg

SEQ ID NO: 36782 - DNA, 527 bp, Homo sapiens
atttctttttcttttgcataacagtcacttgccacttgtcgtagcaaactttttttttttttttttttttttgagacggagtctcgctctgtcacccaggctggagtgcagtggtgcgatctcggctcactgaaagctccgcctccctggttcacgccattctcctgcctcagcctccggagtagctgggactacaagcctcccaccaccacaggccsgactaattttttttttttttgtattcttagtagagacgcggtttcaccgtgttagccaggatggtctcgatctactgaccttgtgatctgcccgcgtcggcctcccaaagtgctgggattgcaggcgtgagccaccgcgcccggccagcaaactttaaaagaagaattcaatggggagatatgacaaaacttagatgttttagtaatactgcataatgtaataattgaccaaaatatttttacattcctttgagataatactaaattgtattaaaacttagtcttgctaacatatgtgggcctcctttg

SEQ ID NO: 36783 - DNA, 506 bp, Homo sapiens
tttttcatgactctagatcttatctttagagttttccatagcatgtctgaaagtatgtagaagaaagagtatccaaaccacagtttgatcaaagtgaatctaacargagcaaaaaaggtttgttcttattatacattttccttataacctgatttagcactatgaccatatttgaaatatacaagaaaaattaattacactttgtttcttagaatactttgagaaacattaggcattcatttgggggtgatattgtagcataaactttagaaacattacctaataaacctcattgttgaaaagtcatcataagcatttagatatttgccatctgtatgaccttgaatacgttgcttaatctctctatatctcagtttgcttacttttttttttttttttttttttttgagacggagtctcgctctgtcacccaggctggagtgcagtggcgcgatctcggctcactgcaagctccgcctcctgggttcacgccattctcctgcctc

SEQ ID NO: 36784 - DNA, 506 bp, Homo sapiens
tttttcatgactctagatcttatctttagagttttccatagcatgtctgaaagtatgtagaagaaagagtatccaaaccacagtttgatcaaagtgaatctaacaggagcaaaaaaggtttgttcttattatacattttccttataacctgatttagcacyatgaccatatttgaaatatacaagaaaaattaattacactttgtttcttagaatactttgagaaacattaggcattcatttgggggtgatattgtagcataaactttagaaacattacctaataaacctcattgttgaaaagtcatcataagcatttagatatttgccatctgtatgaccttgaatacgttgcttaatctctctatatctcagtttgcttacttttttttttttttttttttttttgagacggagtctcgctctgtcacccaggctggagtgcagtggcgcgatctcggctcactgcaagctccgcctcctgggttcacgccattctcctgcctc

SEQ ID NO: 36785 - DNA, 506 bp, Homo sapiens
tttttcatgactctagatcttatctttagagttttccatagcatgtctgaaagtatgtagaagaaagagtatccaaaccacagtttgatcaaagtgaatctaacaggagcaaaaaaggtttgttcttattatacattttccttataacctgatttagcactatgaccatatttgaaatatacaagaaaaattaattacactttgtttcytagaatactttgagaaacattaggcattcatttgggggtgatattgtagcataaactttagaaacattacctaataaacctcattgttgaaaagtcatcataagcatttagatatttgccatctgtatgaccttgaatacgttgcttaatctctctatatctcagtttgcttacttttttttttttttttttttttttgagacggagtctcgctctgtcacccaggctggagtgcagtggcgcgatctcggctcactgcaagctccgcctcctgggttcacgccattctcctgcctc

SEQ ID NO: 36786 - DNA, 532 bp, Homo sapiens
ttactttttgtatttttatatttttttacttttatatttctattaaaaatcaaaataatttacagagcttcttttcacttacgtaaaatttcatcgtcttatgaaaatgtagtttgttttctcattaggaggagacaaaactaaagcaggaaataataagaattaccagcgttggcctctgttgtttaagacacagaaccatactgagtgttccaaaagggaagcataaaatagtgaggaaattaatgttccataggtctgttctatgaggatcctaccttgaccctaacacatatggtgtaggggttcagtaaaaagcaagagccttcctgagaaagaaagarggaaccaattctagtgaacatagagagaaagcaaatgaaatcatcctggtctcatctgtgttgaccctactttatcagtttgcactgagcataactatgggtttttgatagaagtatcagaaacattaatcagtcatctatcatgtaccatatacttcaaataatgttctcaaactgatgagctcata

SEQ ID NO: 36787 - DNA, 550 bp, Homo sapiens
gtgtgggtttttttttttgtttgttttgttttgttttttgtttgtttctgaggcggagtctcctctgttgcccaggctggaatgcagtggcacgatttgggttcactgcaacctctgcctcctaggttcaagcaattctgcctcagcctcccgactagctgggatgacaagcacatgtcaccacgcctggctaattttttttttgtttttagtaaagatgggatttcatcgtgttacccaggatggtctccatcccctgacctctttatccgcctgcctcggcctcccaaagygctgggattacaggcgtaagccaccacacacatctttaacacacatgttatacatatgatatttcattgtcaaaagcaattttctaaaattccaaaagatttatcttatttgaggttcaaaataatgggattaggacattctttacgtctcctattggatggaccatttttagggcagagtaaatattaagccatcatcaattaaaacttactcactgtatgagttagggtaatccagagaaccaatagctctatca

SEQ ID NO: 36788 - DNA, 400 bp, Homo sapiens
tatatatatatmttatatatatacactattatatatatacacacacacacacacacacacacacacacacacacacacaattaatatgagatgcccaaaaatccaattgtaaaaaggggcaaaggttgtaaactggtaattcataaaaacaaatgaagagatgcttattggtactatatgctcagtattaagcaaattaaatgagataggatcgtgcatattcaaccaacaaaatatctgaatgtctgaaaataataaatgttaatgagggagtggagaaaatgggaatgctcatactgctgatagagagtaaactggtacaactattgtggcagccaattaatatttagtaaagctgaagatgcatggtccactgtggtacaggccctggagatattat

SEQ ID NO: 36789 - DNA, 400 bp, Homo sapiens
tatatatatatcttatatatatacactattatatatatayacacacacacacacacacacacacacacacacacacacaattaatatgagatgcccaaaaatccaattgtaaaaaggggcaaaggttgtaaactggtaattcataaaaacaaatgaagagatgcttattggtactatatgctcagtattaagcaaattaaatgagataggatcgtgcatattcaaccaacaaaatatctgaatgtctgaaaataataaatgttaatgagggagtggagaaaatgggaatgctcatactgctgatagagagtaaactggtacaactattgtggcagccaattaatatttagtaaagctgaagatgcatggtccactgtggtacaggccctggagatattat

SEQ ID NO: 36790 - DNA, 400 bp, Homo sapiens
tatatatatatcttatatatatacactattatatatatacayacacacacacacacacacacacacacacacacacacaattaatatgagatgcccaaaaatccaattgtaaaaaggggcaaaggttgtaaactggtaattcataaaaacaaatgaagagatgcttattggtactatatgctcagtattaagcaaattaaatgagataggatcgtgcatattcaaccaacaaaatatctgaatgtctgaaaataataaatgttaatgagggagtggagaaaatgggaatgctcatactgctgatagagagtaaactggtacaactattgtggcagccaattaatatttagtaaagctgaagatgcatggtccactgtggtacaggccctggagatattat

SEQ ID NO: 36791 - DNA, 797 bp, Homo sapiens
ccgtagtgaaggaattgtcctgtatcttcattgtatcgctgtccataccctggtggtgatactgtattttagtactgcaagatgctaccattgaggaaaccaagtaaaggtacatgggatctctctmtgtcttataacccaattatctcaaaatcaaaaatttaaataaaaagattagcaaggggtgggagcaatgtggaaaatgtcaggcttcgggtcatgatggatcattaaaattagagggaagagcatgccaaatttaagcttaaaaggcattccaggaagtcttaccaatacgcactctaataccccctctgtcaatgtaccctcacctatgctaacttgaaatttttaaatgctatgtcaatttaattttttcaactaatgtttcttttgtaattgtatatttacaccctgggcaactttgtttttaatcataaacctgagtttataaaatattagtgtcacataacttaagaaaaattaaaagtttatattcttcaaactggtataaaatcaagtccggaattatatctatacccaaattggaagacctagaactttaagctttacttactcttaagtgaacaggtaaagacacgccctggaatcttcgtatgagacttggctgggtgggttgaagattgtgaactgctgatacttcatactggaaacaaatacttgttcttggaataagagggccctcactcacatcaatgaagtcacctattctgattgatttaaaaataaataaacaaaactgcaacatcaaataatttgtaagagcttgaaaaaga

SEQ ID NO: 36792 - DNA, 797 bp, Homo sapiens
ccgtagtgaaggaattgtcctgtatcttcattgtatcgctgtccataccctggtggtgatactgtattttagtactgcaagatgctaccattgaggaaaccaagtaaaggtacatgggatctctctatgtcttataacccaattatctcaaaatcaaaaatttaaataaaaagattagcaaggggtgggagcaatgtggaaaatgtcaggcttcgggtcatgatggatcattaaaattagagggaagagcatgccaaatttaagcttaaaaggcattccagraagtcttaccaatacgcactctaataccccctctgtcaatgtaccctcacctatgctaacttgaaatttttaaatgctatgtcaatttaattttttcaactaatgtttcttttgtaattgtatatttacaccctgggcaactttgtttttaatcataaacctgagtttataaaatattagtgtcacataacttaagaaaaattaaaagtttatattcttcaaactggtataaaatcaagtccggaattatatctatacccaaattggaagacctagaactttaagctttacttactcttaagtgaacaggtaaagacacgccctggaatcttcgtatgagacttggctgggtgggttgaagattgtgaactgctgatacttcatactggaaacaaatacttgttcttggaataagagggccctcactcacatcaatgaagtcacctattctgattgatttaaaaataaataaacaaaactgcaacatcaaataatttgtaagagcttgaaaaaga

SEQ ID NO: 36793 - DNA, 797 bp, Homo sapiens
ccgtagtgaaggaattgtcctgtatcttcattgtatcgctgtccataccctggtggtgatactgtattttagtactgcaagatgctaccattgaggaaaccaagtaaaggtacatgggatctctctatgtcttataacccaattatctcaaaatcaaaaatttaaataaaaagattagcaaggggtgggagcaatgtggaaaatgtcaggcttcgggtcatgatggatcattaaaattagagggaagagcatgccaaatttaagcttaaaaggcattccaggaagtcttaccaatacgcactctaatacccccyctgtcaatgtaccctcacctatgctaacttgaaatttttaaatgctatgtcaatttaattttttcaactaatgtttcttttgtaattgtatatttacaccctgggcaactttgtttttaatcataaacctgagtttataaaatattagtgtcacataacttaagaaaaattaaaagtttatattcttcaaactggtataaaatcaagtccggaattatatctatacccaaattggaagacctagaactttaagctttacttactcttaagtgaacaggtaaagacacgccctggaatcttcgtatgagacttggctgggtgggttgaagattgtgaactgctgatacttcatactggaaacaaatacttgttcttggaataagagggccctcactcacatcaatgaagtcacctattctgattgatttaaaaataaataaacaaaactgcaacatcaaataatttgtaagagcttgaaaaaga

SEQ ID NO: 36794 - DNA, 2319 bp, Homo sapiens
taactgaataatcagattatcaaaatgctgccaaagtaaagcctctcataaggaataagtggggacttgaaacttgggtgggaagtgctcttaaaacttttgaatttctagattcttgtaaaccccctgaacctgaacaagcatccccctcctctctgttgaaagacataacctctccagatcccacttgcttgaagacatctaagagctctcaaatgtgtcagttgccttacaagacaatgcttgctgtcttagtccatttgggctgatgtaacaacaagatactatagactgggtgatttataaacagcatacattattttctaccggtctggaggatgggaagtccaagatcaaggtgcctgcagattcagtgtcttgtaagggtcttctcctccataaacaaccaacttctcactctgcaatcacatgcagaagggctgagggatctcttgtagtccttaggaacactgttccaacccatttattatgtgatatgaaaggtcatttgctgtaagtgggatccagagaaagatatttcttggcagctattataagcagtcttgcccatacagccttatcatcctgtagagctcgtgatactagaagtatcagtggtttaaaacaaaacaaaaagataccatgtgcagtctgaaaaatatctaaaggagccatgcaatgaaaattcctagtgtcctgcagcaaggttatgccatctgtagtagggaaccatgcacgctaaaaaagcagtttctggtatgcaccgagctctgctccagacagagcatgcaactgtagaacagtaagtggccctgtctctaaaactgaccaacatgagctggatacgctcagagcccttaagttatgagtttgggtacatagtgggaggaaagatgattttcaatgattaagagttggtgacttccaaagttaaaataacatagaaatctctcattctctctactctgctaataggtatagaagcatgccatgttttcatttaaagcatcagcagaaggcaagaaagaaagaatactttgtattgattgattgattatttgggtcaatgccgcttgacagattctgaagaacaagaggcgagaatgttttaatctaccgtgctttgtatattagggagaacaaaaatgaattcttatatgtatatgatatttgaagttctagtgagagaagtagacttttttgaaagtgtgatgttgtagaatgaaaggaggacattgttggaaataatttatgsaaagaaaaagaagcaatagttctaaactcaatatgatattaaactccatacttattctataacacttccaaaacagtaaggataattttgcaatggtcttcaaccgattttcagtttttttatccaaaggaatatagactgggtgataagcatctctcaatctaaggaagatagtaaatgatatgaactcctctgagaagactttggtaccaaaaagaatattcaagattaatttgcttccctttcctactggggaggatccagtaagtaagaatagcagcgtatattaaaaaataaaaagactgactcataataatagttttccccaagccacgacatcaataactatctttgccccttcagcatgtgttctgaaggtagagggattgaagtactctaggtgggctccagacttaaatgaacaaatgatatgcatgtcatctctgatactctgcaaaacttgtgattccatgatcctatgagctgtatgcctttacagtctcttggtgatcactaaaagggaccaactctttttttttttttttttttttgagacggagtctcactcagtcgcccaggctggagtgcagtggctcgatctcgctcactgtaagctccgcctcctgggttcacaccattctcctgcctcagtctcccgagtagctgggattacaggcacccaccaccacgcccagctaattttttgtattttttttttagtagagacagggtttcaccatgttagccaggaccaactctttatttaacactttgagagtgaatattggaagtttttgtatatacaattttattttgggttgcctgagacacatctcagtgcttctaatgaagacaagaacttgaatgaatgtaccatgaaaactgaggactattgaacaacagatgtgaaattgcaaggtgtattaatttgcattgtgtgacgatcacacagatgtgtttcttgtttatattcagtccattaagatctgtttagttaatttattctctttgtttaaaagggaaaaaagcaaatgaatgtggtaaatagaccattaaaaccaaaa

SEQ ID NO: 36795 - DNA, 2319 bp, Homo sapiens
taactgaataatcagattatcaaaatgctgccaaagtaaagcctctcataaggaataagtggggacttgaaacttgggtgggaagtgctcttaaaacttttgaatttctagattcttgtaaaccccctgaacctgaacaagcatccccctcctctctgttgaaagacataacctctccagatcccacttgcttgaagacatctaagagctctcaaatgtgtcagttgccttacaagacaatgcttgctgtcttagtccatttgggctgatgtaacaacaagatactatagactgggtgatttataaacagcatacattattttctaccggtctggaggatgggaagtccaagatcaaggtgcctgcagattcagtgtcttgtaagggtcttctcctccataaacaaccaacttctcactctgcaatcacatgcagaagggctgagggatctcttgtagtccttaggaacactgttccaacccatttattatgtgatatgaaaggtcatttgctgtaagtgggatccagagaaagatatttcttggcagctattataagcagtcttgcccatacagccttatcatcctgtagagctcgtgatactagaagtatcagtggtttaaaacaaaacaaaaagataccatgtgcagtctgaaaaatatctaaaggagccatgcaatgaaaattcctagtgtcctgcagcaaggttatgccatctgtagtagggaaccatgcacgctaaaaaagcagtttctggtatgcaccgagctctgctccagacagagcatgcaactgtagaacagtaagtggccctgtctctaaaactgaccaacatgagctggatacgctcagagcccttaagttatgagtttgggtacatagtgggaggaaagatgattttcaatgattaagagttggtgacttccaaagttaaaataacatagaaatctctcattctctctactctgctaataggtatagaagcatgccatgttttcatttaaagcatcagcagaaggcaagaaagaaagaatactttgtattgattgattgattatttgggtcaatgccgcttgacagattctgaagaacaagaggcgagaatgttttaatctaccgtgctttgtatattagggagaacaaaaatgaattcttatatgtatatgatatttgaagttctagtgagagaagtagacttttttgaaagtgtgatgttgtagaatgaaaggaggacattgttggaaataatttatgcaaagaaaaagaagcaatagttctaaactcaatatgatattaaactccatacttattctataacacttccaaaacagtaaggataattttgcaatggtcttcaaccgattttcagtttttttatccaaaggaatatagactgggtgataagcatctctcaatctaaggaagatagtaaatgatatgamctcctctgagaagactttggtaccaaaaagaatattcaagattaatttgcttccctttcctactggggaggatccagtaagtaagaatagcagcgtatattaaaaaataaaaagactgactcataataatagttttccccaagccacgacatcaataactatctttgccccttcagcatgtgttctgaaggtagagggattgaagtactctaggtgggctccagacttaaatgaacaaatgatatgcatgtcatctctgatactctgcaaaacttgtgattccatgatcctatgagctgtatgcctttacagtctcttggtgatcactaaaagggaccaactctttttttttttttttttttttgagacggagtctcactcagtcgcccaggctggagtgcagtggctcgatctcgctcactgtaagctccgcctcctgggttcacaccattctcctgcctcagtctcccgagtagctgggattacaggcacccaccaccacgcccagctaattttttgtattttttttttagtagagacagggtttcaccatgttagccaggaccaactctttatttaacactttgagagtgaatattggaagtttttgtatatacaattttattttgggttgcctgagacacatctcagtgcttctaatgaagacaagaacttgaatgaatgtaccatgaaaactgaggactattgaacaacagatgtgaaattgcaaggtgtattaatttgcattgtgtgacgatcacacagatgtgtttcttgtttatattcagtccattaagatctgtttagttaatttattctctttgtttaaaagggaaaaaagcaaatgaatgtggtaaatagaccattaaaaccaaaa

SEQ ID NO: 36796 - DNA, 2319 bp, Homo sapiens
taactgaataatcagattatcaaaatgctgccaaagtaaagcctctcataaggaataagtggggacttgaaacttgggtgggaagtgctcttaaaacttttgaatttctagattcttgtaaaccccctgaacctgaacaagcatccccctcctctctgttgaaagacataacctctccagatcccacttgcttgaagacatctaagagctctcaaatgtgtcagttgccttacaagacaatgcttgctgtcttagtccatttgggctgatgtaacaacaagatactatagactgggtgatttataaacagcatacattattttctaccggtctggaggatgggaagtccaagatcaaggtgcctgcagattcagtgtcttgtaagggtcttctcctccataaacaaccaacttctcactctgcaatcacatgcagaagggctgagggatctcttgtagtccttaggaacactgttccaacccatttattatgtgatatgaaaggtcatttgctgtaagtgggatccagagaaagatatttcttggcagctattataagcagtcttgcccatacagccttatcatcctgtagagctcgtgatactagaagtatcagtggtttaaaacaaaacaaaaagataccatgtgcagtctgaaaaatatctaaaggagccatgcaatgaaaattcctagtgtcctgcagcaaggttatgccatctgtagtagggaaccatgcacgctaaaaaagcagtttctggtatgcaccgagctctgctccagacagagcatgcaactgtagaacagtaagtggccctgtctctaaaactgaccaacatgagctggatacgctcagagcccttaagttatgagtttgggtacatagtgggaggaaagatgattttcaatgattaagagttggtgacttccaaagttaaaataacatagaaatctctcattctctctactctgctaataggtatagaagcatgccatgttttcatttaaagcatcagcagaaggcaagaaagaaagaatactttgtattgattgattgattatttgggtcaatgccgcttgacagattctgaagaacaagaggcgagaatgttttaatctaccgtgctttgtatattagggagaacaaaaatgaattcttatatgtatatgatatttgaagttctagtgagagaagtagacttttttgaaagtgtgatgttgtagaatgaaaggaggacattgttggaaataatttatgcaaagaaaaagaagcaatagttctaaactcaatatgatattaaactccatacttattctataacacttccaaaacagtaaggataattttgcaatggtcttcaaccgattttcagtttttttatccaaaggaatatagactgggtgataagcatctctcaatctaaggaagatagtaaatgatatgaactcctctgagaagaytttggtaccaaaaagaatattcaagattaatttgcttccctttcctactggggaggatccagtaagtaagaatagcagcgtatattaaaaaataaaaagactgactcataataatagttttccccaagccacgacatcaataactatctttgccccttcagcatgtgttctgaaggtagagggattgaagtactctaggtgggctccagacttaaatgaacaaatgatatgcatgtcatctctgatactctgcaaaacttgtgattccatgatcctatgagctgtatgcctttacagtctcttggtgatcactaaaagggaccaactctttttttttttttttttttttgagacggagtctcactcagtcgcccaggctggagtgcagtggctcgatctcgctcactgtaagctccgcctcctgggttcacaccattctcctgcctcagtctcccgagtagctgggattacaggcacccaccaccacgcccagctaattttttgtattttttttttagtagagacagggtttcaccatgttagccaggaccaactctttatttaacactttgagagtgaatattggaagtttttgtatatacaattttattttgggttgcctgagacacatctcagtgcttctaatgaagacaagaacttgaatgaatgtaccatgaaaactgaggactattgaacaacagatgtgaaattgcaaggtgtattaatttgcattgtgtgacgatcacacagatgtgtttcttgtttatattcagtccattaagatctgtttagttaatttattctctttgtttaaaagggaaaaaagcaaatgaatgtggtaaatagaccattaaaaccaaaa

SEQ ID NO: 36797 - DNA, 591 bp, Homo sapiens
tgtatacacatatacccacatattacacatatatctatatacatagatatagacatacaaatataaagactaaataaatttcttacactgtgttagatcatcttatcataaagccatagagtgtggggaagaaaacagtctacatgtctatgtatttggctggtggagatcctcttttgcaggtttcatttattcctgttcaataaaatcttgtctgtagtgtatgctgggattacattttttccctccctccctcccttgcttgcttcctctctccrtccttccctctcctctttccttccttctttctctcccttctttcttttttcttcctccttccctcctttcttccttccctcccattttcttatctcctttttccttttcttccctttttcctttcctttccttttttctttccttcctctcctgtcttcccttcctttccttccctccttccttcctccctttcttccttcttccttccctctcccccacctttcttccttctctctgtctttctttcttcagaccctgatcactgagatataatcactgcgtatgtattttttcacagagtggaccttaagt

SEQ ID NO: 36798 - DNA, 568 bp, Homo sapiens
gacattaaaagttctaaattttttattraaagtttttaagaaaaattacaaaaatgcattagtaacctgtgcaaaagcatttgagtatttgtttttctttcataagggacagaatactatgttgagctatttattaatacataactcattctctttttcataatcatattttctcatacttgaaagcttctctaattcagaaagctaggacatcctgcagtcactaacctcagagaaggtttgttacttgttagagaagtacgcatttcagtaacaccttcattaggaaaaacttggcttcaaacgaaacattattttctgaggtggaacacactttttggctattgatagtcacaggttcttaaagcacagtagttttatacatatatacattttatactgggctttatttttatatttgtgtactatttacttactttgaaagatatttttactcttagatttacataatggagaggacaccactaatcatcaggcaaatgcaaatcaaaaccacagtgagatatactgtcacaccaaacaggatggctattctcaaaaagacaaa

SEQ ID NO: 36799 - DNA, 502 bp, Homo sapiens
gacatcagtagtggcttctacagggattctgggtaattcctcccagagcactggcctggaatagtgccctctatgtagaaataagaaaaaaatgaggcacagaaagatgaagggatccaccatcacaaaagtggtacacagcagataaacatctcttctttgcctttttatctcctacatttgtcttctcatctttaattcatttggtagatctgcagaataactttccagagaagatcaactgcaccacatagctaaaagctgacttcctttttttttctttcatttcaaaaaatcaaaacacctggttgtgaaatgcaacgttttcacagaatatttaatttggtccacttactgatagtatcagttttatgtgaacagttacgtggcaattaaatttctcagattaccattttttaaagagttctccagagtgcgtcaatggcaagggayccatttttccaaacctgtcttgtttccttagtgagtcagtctttcaaag

SEQ ID NO: 36800 - DNA, 555 bp, Homo sapiens
cagaccactcagctctctgtaaaatggaccaatcagcaggatgtgggtggggccagataagagaataaaagcaggctgcccgagcaagcagtgacaacctgctctggttcctttacatactgtagaagctttgtttttttttctgtttgcaataaatcttgctactgctcactctttgggtccacactgcttttatgagctgtaacactcaccacgaaagtctgcagcttcactcctgaagccagcaagaccaggagcccaccaggaggaacgaacaactccagacacactgccttaagagctgtaacactcactgcgaaggtctgcagcttcacycttgagccagcgagaccacgagcccaccaggaggaagaaactctcaacacatccaaacatcagaaggaacaaactccagacgtgccatcttaagagctgtaacactcaccatgagggtccgaggcttcattcttgaagtcagtgagaccaagaacccaccaattctggacacaagaggacaagataatcagattataatccttatcttttcaatagcaa

SEQ ID NO: 36801 - DNA, 510 bp, Homo sapiens
acctgggtcccagggtgcaccattcctctaatcccccagttgcagcaacatctgggaagtcccgagaatggggatctatgcctgtttttccaaaagataataagcgtcaacaacaacaaaaaaataaaaagtccaactccgccccaaagcagcatctggctggcctgcgagatgcccactggggaggcgagtccgcagcttaggactcaagcccggggtcggaagctattgccgaaatccgaaacgcagcgctcgcagctgcagtgacgcgacctgctcataagtccccgtgctcacagcatcccggyaacttacgagctagtgcttccgggtcaccccggcccaggaaggcgcacgcgcgaagcatagcgagcttcactccgcactcttaggctgcgtgtgaggcctgcgagtgctcgggagctgccgcggtcacaagagaaagcctagctgtcaatgacagccccagagcatctgggcgccttgcgatacccgggtgtctgtaggcag

SEQ ID NO: 36802 - DNA, 758 bp, Homo sapiens
aatatctttaccattgatcgaatatatgctatctgattttcatccaaaaactgttgaaaatggaaattttaatctaataaatgtatgtaatctggtacccaaatatattgttcacattgttattattttattattattattttgcttacatttttgcattcaagaatttgggagatttaagtaaaaatcaatatgactgtgtaactggatttggggcccatataatctgacagatctgagaacatttctcttgaaattaggtatgttgtctattaagagtaatcatttctggaagaacatagtttgcatctgcagacttgtctcaacagcagtgagaattgtctaagaatgaaggacatgcatttctactgatataggaaagcagaaaatttgatgcataaactagaaatgcagacaacaagactaggawgtaatttataaggtaaactgtatgcttgcactaaaggttacttaaagtctagtatctgaatgtggattttcaaccaagagaaaagtgaagcttaagcactgctaggacagacgctttgctctttgttagtagacttaagtgccaggtttcctgcctcccactggtaaggagagtcaggatcattcaccaatgatcttaagtgggaattattgggtccaggaggcttcggtaacctaccgatgcttcttcaaggctcaaccttaatcaagctgacagcaacacacctgagccatgctgaacaagcatttatatccattagtcttactct

SEQ ID NO: 36803 - DNA, 758 bp, Homo sapiens
aatatctttaccattgatcgaatatatgctatctgattttcatccaaaaactgttgaaaatggaaattttaatctaataaatgtatgtaatctggtacccaaatatattgttcacattgttattattttattattattattttgcttacatttttgcattcaagaatttgggagatttaagtaaaaatcaatatgactgtgtaactggatttggggcccatataatctgacagatctgagaacatttctcttgaaattaggtatgttgtctattaagagtaatcatttctggaagaacatagtttgcatctgcagacttgtctcaacagcagtgagaattgtctaagaatgaaggacatgcatttctactgatataggaaagcagaaaatttgatgcataaactagaaatgcagacaacaagactaggatgtaatttataaggtaaactgtatgcttrcactaaaggttacttaaagtctagtatctgaatgtggattttcaaccaagagaaaagtgaagcttaagcactgctaggacagacgctttgctctttgttagtagacttaagtgccaggtttcctgcctcccactggtaaggagagtcaggatcattcaccaatgatcttaagtgggaattattgggtccaggaggcttcggtaacctaccgatgcttcttcaaggctcaaccttaatcaagctgacagcaacacacctgagccatgctgaacaagcatttatatccattagtcttactct

SEQ ID NO: 36804 - DNA, 601 bp, Homo sapiens
ggggttctgattcagcctcactctcattgtgatccactggtttaaatgttagcttaaaacagcatttatcttttcacaaatagcaatgacagaaaggacttttgcgatgatttaacccattcatttttattcatcaggaaagggagagctcagctggtgaaatgacttctccaaggtctcccaggttgtgagggtagagctagatcacctaccaacatcctcaaagctccatccactgctcttcctatggttagattcatcaattttacaagattatttatttccctgccttttctaaccaagagagatgtggtttctgtggataagatgcttacatggttttgttgcctttgctgccggaggcacataatgggttgaggaggtgagacccaaggtaaatatgcctggtattcaatctggagtgtcgtggtatcaagaagatgaagataacttggaagaggtttacaggagatcagctaaaatgatgaaatgagggaagagtgaagcagataaggagggaatccttcactaggcagccagttggctggaagaaakcagactgcaggacttccctgaatattttcaagctgggatataaggt

SEQ ID NO: 36805 - DNA, 559 bp, Homo sapiens
ccgtactatattgctagattaatatccatccaagaaacaagtttttgtagaattactggttttagaaaaaaaaatcacttaaytttaggaagaaccgagtgagatactgacttttgattcgtggtaatttgtttgttttctttctgttataatagcaaaataactgtgacaaattccatgtggatttaatagaatttgcagggtcatttaaatcaagttgcctaccaggaaatgttgatactttcagtgtggtgaaattttccttagccatttcccccaataatttgctcatttcctagatatgtaatttaatggcactagatttgtttgtcactttgaatttttttctttctgaaggagttaaaaggatacttcttaataactgtaactgtacttgagtctctttaatagtatggagaagaatgagagaatagtgtagccatctgctcccctatgtgaaaggactgggtattctacaaggactttgttctggcaaaggaaggagagtcattcactcatttttttaagagtatatatttcttcattctatagattgcct

SEQ ID NO: 36806 - DNA, 554 bp, Homo sapiens
ctctatttcctgggctcaggtaatcctcctgcctcagcctcccaagtagctgggattacaggcatgtaccaccatgcatggataattttttaaattttttgtagatatgggtgtctctcactatgttgcccaggctggtcatgaactcctgggctcaggcaatccacccacctctgccttccaaagtactgggattacagrcataagccaccaagcccagctgcttgctattaatatttttaatttaattttcctgttgtgtctctcccaagattgtgagtttccctgaggacaaggacagtatcttgcttatttctgcgtctcttggacttcagaggaacttaataaatatttatggaccaccttattgcatattttggcccctttcatacaggaacaaggtctgtttatttgctttgctcaatgggcaacttgctgtgggggctggcttcgttttcaaaattctgcttctcattgggaaaggtagaataattggaggtgtggagatgggtgaggtgcactttttaccctgaatgctctgtagcccttgaaat

SEQ ID NO: 36807 - DNA, 566 bp, Homo sapiens
tgagataaacattgtgcccaagctaaggatgtataatgtgaaatgtactctaattatgcattcttcctggctttttcctatgaaaatgacagaaatagctaatgtgagtcaacwtacctataaaaaataatattgttcattatattacttgtcaagaatcaaaaattgttttattagcctattgtatgttcttctccttgtggcatttttattttgggagaaactagtttttgctggcctgaggaacaatctcacacaaatagtacgagtattctctgctaggaatagcaaacacttacctctgaaggggaaaaattctagcttctatttatttatatttgttttttcccctcaacaattgctgttctctataatttaaatgtctgcaaaaatagtagttatataaacattaatgcattaaaagctatcatttcaatgtagcgtgcaaatcctggaagctgaacattaaggaatcatgagattttccctctaagcaaggggagggacttcgcaatctttttatccctaaaatgtatcctttgaagcttctcaagttcacattgtta

SEQ ID NO: 36808 - DNA, 523 bp, Homo sapiens
tgactattgagaggcattatttttaatagcaaaaaaattcagaagtaatctaaatcccagacaaaaaagtaatagctacacaaatcccatatgttcactccattggttattatttaactttttaaaaattatatttagaaagaatgtgcaaatatggaaaatatatgtcaatgttaaaaagcaagaaaaaatattgtattcataatatttctacttagattttttgtaaaataaatattagaagcacatataagaaaatactgtgttatgtctgtctctagatagtgaaaccatgaatgattatataaatgttacatatgctttttaaattctcattttttaattcaaaggctttcttatccttttgttgtcattgtcaaatgcttacagtatgtyacataaagctttatctaaaactaaattttttaaatgaccaaaattaaagtttttccttccataagatgttcaagaaataattttttatttcttttttgtaaataataactgggttttgtatttactt

SEQ ID NO: 36809 - DNA, 591 bp, Homo sapiens
aaagtgtcttgaacctgatggagcttatgttgagaaataaaaattttagttttatttttatcttttaattccatttttcacgacctttttgaagttcccttatatttccacctcttcaagggctagtttgcatcatcacagattccagaatctcacccttcatcctggctctgccctcatcctgataacatgtccaagctctacctacctttaaaaaacaaaggcagttccctgggctcccgtttcctctctagtgcttatctctctcctgcccttctcagggaaatttcttgaagggatagcttacacttctttctgcttctgcccttccctctcactgctcaattttaccaccacataaaactgctctggccaaagtccccagtgccccattaatttctaaatcccrttgaatatgtctgtctgtatttatctctatcccctgtggctatgaagtctcatttttgtaacattttcattccatgaactcccaactccatgaaaggtttctctttttgacatctgttcttttttaactttatttagattttaaatgaactatttcaaacattcacaaaagcacagagaaca

SEQ ID NO: 36810 - DNA, 550 bp, Homo sapiens
tccacccacctctgcctcccaaagtgctaggattacrggtgtgagccactgtgcccggcctcagctagtatttcctaagggcatcttggacactgtgtttcttaatcatgtgcgaaacaaacgcatatcttttcaagaagcttagggatactttagaggggctatttttagcacatcttcttacagaaatatgtaagaatgatgagaaagcgatcaagcaataccttggaaaaaccacttcatattcatttcacatgggctatactgtggggtgttggctctaaaaataatattttcttcattactattccaaactctgtaactttccttgggttatttttcagactggcaggcatctagattttaaatgtgtgaggactttctataccatccgcatagagtctttgatgcactctttccatgagaggcagagacgggatacttacgtgactacgacttattactatcatgatagttactgcttgctattgttatttaggaaaaccaatgtgaagtatcttactcaaaatcacacggaaatgacacgttc

SEQ ID NO: 36811 - DNA, 639 bp, Homo sapiens
ttctttaaacagcagagggagaaagtgtataaattgagtgacattcactggaattaggagatccggagtggaaatttccagagaaattccaaaaatcctggtgagaagaaaggaatagccatagcaggccctgagaatacagagcttcctagccaagtcaaatccgtcccatccttctcccacctccactccccctcccctggcaccaagggggtcagcagagggagcagaaaccttcagccactccccttcctgcagaccagcagccccagccctgaccacagctggctggccttggaatgaagcttgaaggactgataaatacctgggactggacrtactagtttctgaattgagaacaagtttgtgatttaaagtgatcttggccgggcgcaaatggctcacgcctgtaatccctgccctttgggaggcttaggcgggcagatcacctgaggtcgggagattgagaccagcctggccaacatagcgaacccccgtctctactaaacatacaaaaattagccaggcatggcggcttgcgcctgtaatcccagctactcaggaggctgagacaggagaatcacttgagcccaggaagtggaggttgcagtgagccaagatctcactactgcactccag

SEQ ID NO: 36812 - DNA, 802 bp, Homo sapiens
ctgtgaagattaaagcagataatgaatagaagtatcttgcagcaagcaagagaaaggttcactggcacataggatgcattaaataaacagtaactattattatcattatttatgattattgatggttcccaagagagcctccctggcaaggcaggccatggtgccagtcgtctgtataagtccatgcgatcattgaaagcattatttctccaggaatgaggtagtcattgttctctggttttacaatawacatttagcaattggcaggatgtggacgaacctcatgggaatcggaagtagctctgaattgtaaagagaaacagccagatcagataggaaagtaatttttaattactccgctgaatttctagcagggagattgcaaccttggtgagtgagtctccatgctggtatgaggtagagctggatttggacagctcaatgcaggtgtgccaacctttccttcctctctcagtggacaaggaagggaggaacaagactaaaatacagttttaggtcgaccaagtgtctgctcgctgacatcattcatccctccctcaagtatcacagacaatttttgtagccgagcgttgctgctgtttagtaattcaaagtgtatctgagaaacacaattatctcgacagagagttggacagcagctgagggtgatgtgtgagctggtgccagaggtttgcttgtttagttactccaagcagggagttgtcataaggcttcctggaggagtggagctgggggcagagagtggcctctcactggatgcaggtagaaaaaggagccagaa

SEQ ID NO: 36813 - DNA, 492 bp, Homo sapiens
gtcaggagatcgagaccagcctggctaacatggtgacatcccatctctactaaaaatacaaaattagccaggcatggtggcacatgcctatagtcctagctatctgggaggctgaggcagaagaatagctagaacccaggaggcgaaggttgcagtgagccaagatcacgctactggactccagcctggctgacagagcaaagactccatctcaaaagaaaaaaaaaaaaaagaaaaaaagaaaaagaaaaagtcartaatgtgttactgttctattattgccctagaaaggctgtaggtggtgggtggagttgcagaccaggctccacagatgttatgcatcctgggcaataagacatcttccctttcagcctcagtatttccatctgcaggtaatatcaaagcactggatacagaggtattagaagaactgaattgttataatatttgtgaaattgtactttttaaaagggaggcatagccagggaaaaa

SEQ ID NO: 36814 - DNA, 553 bp, Homo sapiens
aggccacataagtgtcattactggatgataattatcagctcaagagggaaagttctaagacagagaatgcaagatttctaaacaggtctaagacagttttccaatgtaagatttattatgtaacagttttgaaagtagtgtctgattccctgtctatatcctccagaacaatctgagggcatggttgccattacaatttactttgggggacgattttatagcacgtcttcacagacaacacgacaaacatctttgcttctgctacactgacaacctgaagttaacatttctgtacctatgtagccattttaatcaccccctaaactggttattccacagcccaggggtgtgggactgagtcagatgggctagagatacctttattcagaggatttagaagtttgcctcagagaaaggccatttctagtctccactagaaatcacacatatcttccaggaataagaatattctcttastcataagttcaacaaatatgtactgaacaccttttctacttagaaacttgtctagctgcttctagattacatccat

SEQ ID NO: 36815 - DNA, 966 bp, Homo sapiens
tgaggttagaacctgaagacaaggaaccagactcaaggaaaaagtttccttcaaagataacggctgatgggtgcaaggaggtatcgagggatagaggatgtccaaccccaagctataagcaaaagtccaacaactgatatctcttgtttgcaacccatctcaaagccaccaagccttgtgtaaacatcacccagagtggccaagacaccaagtgagcagagcctggtgacatctaggatttgcacatagcaggcgatgaataaacccatgctgtctgacttcggaactttgacctcaagttcatcacctctagtatttgtggatgaagtcaatgatagagttagttcttgcttgttcatgaagcggatggtgcatcattctaagcaatgcataacatatctgtttttaaaatgtttttatatgcatcttggatcacattaaaattactttgcattttggaccatacaacaactgatggggttgggagtagggagtggacactccagcccttcctgcactgaaagaatggatgtgcaagccacatgctctaagagggtggaggcatcctcttacctaaatactagactggcatcagcagctgcaatccccgatctagttgccttgctggcagtatctcaaccaattgttttaatttgrgacttcataatgacaatccaaagctcacttgattatgattatcactgaggaaggcattattcagagtgtagcaaatagataatatagctttatctacacagcatcgctcagagtgcagcaagtaaatcatatggcctgatctacacacacacaaacacacacacatgaagtcaggaatatctgacagtgcagttctagtgtccccaagcctgtgatgggtgtgcaagatagcgccgtcctgggtctggcccgatccacgggcgtttggattctgggttggctcatcccctgggctttctctgcttctgt

SEQ ID NO: 36816 - DNA, 966 bp, Homo sapiens
tgaggttagaacctgaagacaaggaaccagactcaaggaaaaagtttccttcaaagataacggctgatgggtgcaaggaggtatcgagggatagaggatgtccaaccccaagctataagcaaaagtccaacaactgatatctcttgtttgcaacccatctcaaagccaccaagccttgtgtaaacatcacccagagtggccaagacaccaagtgagcagagcctggtgacatctaggatttgcacatagcaggcgatgaataaacccatgctgtctgacttcggaactttgacctcaagttcatcacctctagtatttgtggatgaagtcaatgatagagttagttcttgcttgttcatgaagcggatggtgcatcattctaagcaatgcataacatatctgtttttaaaatgtttttatatgcatcttggatcacattaaaattactttgcattttggaccatacaacaactgatggggttgggagtagggagtggacactccagcccttcctgcactgaaagaatggatgtgcaagccacatgctctaagagggtggaggcatcctcttacctaaatactagactggcatcagcagctgcaatccccgatctagttgccttgctggcagtatctcaaccaattgttttaatttgagacttcataatgacaatccaaagctcayttgattatgattatcactgaggaaggcattattcagagtgtagcaaatagataatatagctttatctacacagcatcgctcagagtgcagcaagtaaatcatatggcctgatctacacacacacaaacacacacacatgaagtcaggaatatctgacagtgcagttctagtgtccccaagcctgtgatgggtgtgcaagatagcgccgtcctgggtctggcccgatccacgggcgtttggattctgggttggctcatcccctgggctttctctgcttctgt

SEQ ID NO: 36817 - DNA, 966 bp, Homo sapiens
tgaggttagaacctgaagacaaggaaccagactcaaggaaaaagtttccttcaaagataacggctgatgggtgcaaggaggtatcgagggatagaggatgtccaaccccaagctataagcaaaagtccaacaactgatatctcttgtttgcaacccatctcaaagccaccaagccttgtgtaaacatcacccagagtggccaagacaccaagtgagcagagcctggtgacatctaggatttgcacatagcaggcgatgaataaacccatgctgtctgacttcggaactttgacctcaagttcatcacctctagtatttgtggatgaagtcaatgatagagttagttcttgcttgttcatgaagcggatggtgcatcattctaagcaatgcataacatatctgtttttaaaatgtttttatatgcatcttggatcacattaaaattactttgcattttggaccatacaacaactgatggggttgggagtagggagtggacactccagcccttcctgcactgaaagaatggatgtgcaagccacatgctctaagagggtggaggcatcctcttacctaaatactagactggcatcagcagctgcaatccccgatctagttgccttgctggcagtatctcaaccaattgttttaatttgagacttcataatgacaatccaaagctcacttgattatgattatcactgaggaaggcattattcagagtgtagcaaatagataatatagctttatctacacagcatcgctcagagtgcagcaagtaaatcatatggcctgwtctacacacacacaaacacacacacatgaagtcaggaatatctgacagtgcagttctagtgtccccaagcctgtgatgggtgtgcaagatagcgccgtcctgggtctggcccgatccacgggcgtttggattctgggttggctcatcccctgggctttctctgcttctgt

SEQ ID NO: 36818 - DNA, 559 bp, Homo sapiens
ggctactatcctgagtcttaaggctcagtggcaccagtagctttacctccaacagccagaccccgctcccagtttcaatccttgctcctccccatggcttccaggatggacccaagctccggagagatgtgcgaagccctcccagctctggcctgctggcctcccaggccacgaccacacacacaccctctctcctgccacccccaggcctccctccagctcccctagccaggcttccctagctggtgtcccaggagcccggccacttcatctgtgccgctgctgttgcacaagttcctgcccsccgtgctcctggtggacacaccctcagcctttgcattccatgttcatctaccccttggtcactccacaactctttgtggccctgccctggggtgggtgctggggggtattgaagaagacagaggctctggggtctcatgaggcttatgatctattctactagagagaagctgaacagttatgcatgttgtatttagtgacaactggtatcagcgctacctcggaaaagaaggctgaatgcaggaagaggatgcca

SEQ ID NO: 36819 - DNA, 993 bp, Homo sapiens
atcctttgtgctttgaactccagggtcaccatattgggtcaccatgtcatgggtactcacctccactgggtgcaaatgccctcggcatccctgtgtgtaaatctatcattgccataaacactggcaaaggcaaatgcccagtcttagtacttgtttcagtaaaaccagctatgacaaaattcacttatatttttggcaatgatttccatactctatggtgtcacttcacttcctctgctttgcttccctcaacctttctccacatttccccccttccccttctccctccttctttcccttcctcctgtctctttatctctttctctcattccctccattctttcctttattttccttctaatatagtttggctgtgtccccacccaaatctcttcttgaattgtagctcccataattcccatgtgttgtaggagggacccagtgggaagtaattgaatcatggcagtggtttcccccatactgttctcatggtagtggatgagtctcacaaggtctgatggctttataaggggttgccccattcacttggctctcatttttctcttgcctgccaccatataagatgtgcctgtcaccttccgccatgattgtgaggcttccccagccacatggaactgtgagtccattaaatctcttctttataaattacccagtctcaggyaacatgaaaactaacttccttccttccttccttcttttccttgttttgtttcccttgtgctaaaacttctatccacgaaatcaaaggcatagaaaaggggtaaaaacatgaagcaggggagggacaaagaggtagctgagtgcaataagacagcaagcagggcatacacatcaagaaaagtgtggtgtgtgtgtgtgtgtgagagagagagagagaggagagagatatgggagggaaaatctaactggaagagcagcatactgaaaggggaagttgaggcatggagaaggaaaggactagcgctggtagga

SEQ ID NO: 36820 - DNA, 993 bp, Homo sapiens
atcctttgtgctttgaactccagggtcaccatattgggtcaccatgtcatgggtactcacctccactgggtgcaaatgccctcggcatccctgtgtgtaaatctatcattgccataaacactggcaaaggcaaatgcccagtcttagtacttgtttcagtaaaaccagctatgacaaaattcacttatatttttggcaatgatttccatactctatggtgtcacttcacttcctctgctttgcttccctcaacctttctccacatttccccccttccccttctccctccttctttcccttcctcctgtctctttatctctttctctcattccctccattctttcctttattttccttctaatatagtttggctgtgtccccacccaaatctcttcttgaattgtagctcccataattcccatgtgttgtaggagggacccagtgggaagtaattgaatcatggcagtggtttcccccatactgttctcatggtagtggatgagtctcacaaggtctgatggctttataaggggttgccccattcacttggctctcatttttctcttgcctgccaccatataagatgtgcctgtcaccttccgccatgattgtgaggcttccccagccacatggaactgtgagtccattaaatctcttctttataaattacccagtctcaggcaacatgaaaactaacttccttccttccttccttcttttccttgttttgtttcccttgtgctaaaacttctatccacgaaatcaaaggcatagaaaaggggtaaaaacatgaagcaggggagggacaaagaggtagctgagtgcaataagacagcaagcagggcatacacatcaagaaaagtgtggtgtgtgtgtgtgtgtgagagagagagagagaggagagagatatgggagggaaaatctaactggaagagcagcatactgaaaggggaagttgaggcatggagaaggaaaggactagcgctggyagga

SEQ ID NO: 36821 - DNA, 1856 bp, Homo sapiens
acaccccagtcacagtgagtagtctggttatgtgggaaaggggcacagcccctctgtccacccggcttcagcacctctgggaggacagctccacctccacacactttgccaggacactgcactaaggggatgsggccctctctttgctgtctcaggccttctcagaagtcatgagcctttacccaccttactggtgcaaccttgacatgtgaaaaacaattgtccatcactgagggacaggagtcagggtataaattctctgcctctgcctcagtttcctccgatccagtggggcaattatgaggcctgctctgtgcctgcgcttctcaaacattagagggcatcagaatcacctgaagagctgattaaaccacacattgctaaaccttgtctccagtgattctgactcagtacatctggggtggaatccaatattttgcctttctaatgagctcccaggtgatgctgaggctgctggtacagagaccacacttcaagaaccactgttctacgtgattccttagaaggctcccagtaggaatgagctccagttgcccatagcagcaaccagctcattaaagcaacttttactgattttcttttctccctttctaatctcattctttccattctgggatccaggaatgacatcccaaataaataacctgccagccaattctgtgcctcacactctactttcaagggaacccaacctaggacaaggcccatattgcctcttatttagatttctcagccccctaactggtctacctgccacgaactgtcccacttgaattcattcttcactcagggacctaaaggatctaagacacaaattggatgatgtgacttccttgcttaaaagcatcgcatattcccatggccctttggtataatccagactcttgggatattttaaaggatttttatgacttgagcccttggtctccagttgcattctgtgacattctcctcttgcaggctttgccccaactattctaaaaccccatctattatccagtccccaagaccattcttgctgctgggtcttcacacaggcttcttcatgtctgtttaataagttcccattcaccatttgcatcttagcttagcactcactcagtcaggcacatttgtttctgatgctgtggataagattaagtgcttctctgaggccttaattacttaccatagcctttattacgctcatctggtattgctgtttaacagtctgtgtcccataccaggctgtgcatgctatgagaacaagaaccattcctttctcacaggccatggcatgcccagcgcacagcacagatctgcagtacagaaagcactctgcaactatgcgttgaaaggacacatgaatcaatgaatgttattacttcagttttatagactagggaaacggagcatggctaagttaataacgcagatcagggtgacccccaaagcctgaggtctttgagaagagtggacccaatggaagtgccatctgagggacagcagaagacagcctcataggaggactctggccaagaagatacagagcctgagatggaaggatgtgaagcctttgggactgttgccgtttgggccaaaacttatgacagaacaaaaagaccaccagtactctatattgtctgggtgtataattccccaaggttgttggtttccttttttaaagatgatatttagatttccttttattagtataacacattatttagtatattgtggtgagccggcttgccaatatagtttgttttccaatagatcatgatatggtttggtagtgtccccacccaaatctcatcttgaattgtagctcccacaattcccacctattgtgggag

SEQ ID NO: 36822 - DNA, 1856 bp, Homo sapiens
acaccccagtcacagtgagtagtctggttatgtgggaaaggggcacagcccctctgtccacccggcttcagcacctctgggaggacagctccacctccacacactttgccaggacactgcactaaggggatgcggccctctctttgctgtctcaggccttctcagaagtcatgagcctttacccaccttactggtgcaaccttgacatgtgaaaaacaattgtccatcactgagggacaggagtcagggtataaattctctgcctctgcctcagtttcctccgatccagtggggcaattatgaggcctgctctgtgcctgcgcttctcaaacattagagggcatcagaatcacctgaagagctgattaaaccacacattgctaaaccttgtctccagtgattctgactcagtacatctggggtggaatccaatattttgcctttctaatgagctcccaggtgatgctgaggctgctggtacagagaccacacttcaagaaccactgttctacgtgattccttagaaggctcccagtaggaatgagctccagttgcccatagcagcaaccagctcattaaagcaacttttactgattttyttttctccctttctaatctcattctttccattctgggatccaggaatgacatcccaaataaataacctgccagccaattctgtgcctcacactctactttcaagggaacccaacctaggacaaggcccatattgcctcttatttagatttctcagccccctaactggtctacctgccacgaactgtcccacttgaattcattcttcactcagggacctaaaggatctaagacacaaattggatgatgtgacttccttgcttaaaagcatcgcatattcccatggccctttggtataatccagactcttgggatattttaaaggatttttatgacttgagcccttggtctccagttgcattctgtgacattctcctcttgcaggctttgccccaactattctaaaaccccatctattatccagtccccaagaccattcttgctgctgggtcttcacacaggcttcttcatgtctgtttaataagttcccattcaccatttgcatcttagcttagcactcactcagtcaggcacatttgtttctgatgctgtggataagattaagtgcttctctgaggccttaattacttaccatagcctttattacgctcatctggtattgctgtttaacagtctgtgtcccataccaggctgtgcatgctatgagaacaagaaccattcctttctcacaggccatggcatgcccagcgcacagcacagatctgcagtacagaaagcactctgcaactatgcgttgaaaggacacatgaatcaatgaatgttattacttcagttttatagactagggaaacggagcatggctaagttaataacgcagatcagggtgacccccaaagcctgaggtctttgagaagagtggacccaatggaagtgccatctgagggacagcagaagacagcctcataggaggactctggccaagaagatacagagcctgagatggaaggatgtgaagcctttgggactgttgccgtttgggccaaaacttatgacagaacaaaaagaccaccagtactctatattgtctgggtgtataattccccaaggttgttggtttccttttttaaagatgatatttagatttccttttattagtataacacattatttagtatattgtggtgagccggcttgccaatatagtttgttttccaatagatcatgatatggtttggtagtgtccccacccaaatctcatcttgaattgtagctcccacaattcccacctattgtgggag

SEQ ID NO: 36823 - DNA, 605 bp, Homo sapiens
agaaatcaagagaatcagctcagtttaagtaagagcatgatgctggagtgtatcttatcttatctcattttaaactaaaggagatcaaagttgagaatgttttcttttcttcactggacaaaaaatatgaaatgctaactgtgcatgaagcattgttccaccttaaccctttaatgcaagtatgggacttgaaccatagtatgtctatcaaaaatattttttaaaaatcaaaatctgtgctcaataaagatttttaaacttgttaaagtatttcagattccccattatagaaagttttgcatgtttgaaaggatgagccactgggcataagagtgagttgatgggtgtgatatttacactctctcctaggtggatatctttctggaccctaatggggtaggtaaggttgccttacatgacctygtgtgtgttgaagcctagagaggcatgaacagtgtatattcatgggcaggcatactctgcctaatcttctatccccagaggttacttttgagctgacacaaggaatatatcaataattagcccttaagatgcaattctctgttggtctaattactcaggccattttcacaggcaataaaagc

SEQ ID NO: 36824 - DNA, 637 bp, Homo sapiens
taaaatataagtaagtatagcagttagctgctgctttgtaacaaattacccaaggatgcagtggcttaaaacaacattcagttatttaactcatgattaggtggggctgggctcatctgatctcggctgggctcacttgtgcatctgcatgtcagcttctggtttggttggggactggctcatataaaatggcctcagcaggaatgagtcacctctgctccacatgatctctcatcctgtagcaggctggcctgtagcatgaaagctacaggactccagaaccactggagataagcaagttctcttgaggtttatgcttggctctcaagtactatgayggtggctgccacattctatgggtcaaagcaagtcacaaggcccacacagattcaagatatggggaagtagactccacctcttaatgagagaagctacaaagtcacactcaaaagtatgtgcataacagagagtgaaggatttggcccatttgttttgcaagttactccagagaaaaagtcagaaaaccatttttgctttgagtaattcagcttaactaggaaagtggattgagtgatcaccacatgggaacatgctcagctctctgcctccccttgactacaagatgtagccacaggtt

SEQ ID NO: 36825 - DNA, 637 bp, Homo sapiens
taaaatataagtaagtatagcagttagctgctgctttgtaacaaattacccaaggatgcagtggcttaaaacaacattcagttatttaactcatgattaggtggggctgggctcatctgatctcggctgggctcacttgtgcatctgcatgtcagcttctggtttggttggggactggctcatataaaatggcctcagcaggaatgagtcacctctgctccacatgatctctcatcctgtagcaggctggcctgtagcatgaaagctacaggactccagaaccactggagataagcaagttctcttgaggtttatgcttggctctcaagtactatgacggtggctgccacattctatgggtcaaagcaagtcacaaggcccacacagattcaagatatggggaagtaractccacctcttaatgagagaagctacaaagtcacactcaaaagtatgtgcataacagagagtgaaggatttggcccatttgttttgcaagttactccagagaaaaagtcagaaaaccatttttgctttgagtaattcagcttaactaggaaagtggattgagtgatcaccacatgggaacatgctcagctctctgcctccccttgactacaagatgtagccacaggtt

SEQ ID NO: 36826 - DNA, 697 bp, Homo sapiens
caattttgctttgtccttaggttcagatggaaataaataacataaaaaatgaagtgataattaatttcattttgcatacattttgtttttcttggagtatttaattatctatctatctatctatatctatcttgtaatgtctgcctttgtcatatccttaccaccatgtaatatttaaggacattttcaaatacatgaaattgtttttcttccttttcccatctttatggagtccttttgctctaacctaatccctctctaattctgtttcagagctatcctcctggatacaatctactcttgttacaggaaagggtcctgatccagacccccagagagggttcttggatctcgtgcaaggaagaattcagggtgagtccctagagtaaagtgaaagcaaggttattaagaaagaaaaggaataaagaatggctactccatagacagagcagccccaagggctgcccatttttgtggttatttcttggttatgtgctaaacaagaggtagattattcatgccccctttttagaccatataaggtaactttctgacattgctatggcatttgtaaattgtcgtggtgctgrtgggagtgtagcagtgaggacaaccagaggtcactctcgtggccatcttggttttggtgggttttagccggcttctttactgcatcctgttttatcagcaagatctt

SEQ ID NO: 36827 - DNA, 762 bp, Homo sapiens
cctggaggcggtgccctaagatggtttaccggacacagtacctggtagtggaggtcccygagtccaggaacgtgactgactgctgtgagggctatgaacagctcggcctctactgtgtcttgcgtgagtccagggctgctgggctggggcggggccacccttgccgtcgagacgcctgatgggacagtcaccgttggcatccattggccccgaacttgctagatcttccaggagcacggctcccagccttgaccaggcagcaggtcatcggcagggctttccctggccccactcctaggtttctgagtccgtgggtgggggtgaagtacaagaatttgccctcctgacaagttcctgggtgacgctgacgctgctggcccagggaccccactttgagaacctctgctgttctcagagggctcctggatggctttaaaaatgcagatgcctgggtctcttcctgagagagtgtgagggaattggcccggggcgttgagagagtgtcggaagttttcaaagctcccagagtgattctcatataccactgagtgtgagagccagcactgaactctcttctacagcagccttttctttctaaaagctgcagtgaaatgctttcgtagccaaaatcctattctgaactccaatacgtgaaagagctggaaggagccccgagcctaccaccctaagtgctcagaggcccccaagtcctcccagttcctcagtgcagtttggaagctgctttcctgtaggatgcttggg

SEQ ID NO: 36828 - DNA, 446 bp, Homo sapiens
gcccaagcccacccctcaggcccggtaccccacagcagagatcaagaggtggctggagggcagtgggggcacggacagcaccactgggcgctccctcttcaggcctctctggaaacccttgctttggaaacgtagaaagccctttctcctgcccccaccttgaaactgtacctaataacggcaaataagttattcagctccccacagctggcaaagtgcaagtcgcagatgctgccacacagcatttcctgacagccctagggcagaccgttgatccattctgcaggtaaaggagttgagatgcaaacacttcccaaggaagcaagaatggcctcctcstccactccctagaaggacccagggcaaccgatccacttgacaacaccagggaatatgggttgccagccacgcactcatgagagaggtggctttgactcccagagcat

SEQ ID NO: 36829 - DNA, 593 bp, Homo sapiens
ttggaatgcgtcgtgcggcagggcccaggaagccagcaggtggctcatggtcctcggcccctttctgggcctccaccttcctttctctgcctgtgctgtcctgacgtgtcttccccagcggtacccagtggaggcagtggagaggaacaccaggcagggcgtctcgtctcagccaagcctttctctctgctagcratcttgaggacagagggaaggcctgtctgaatgtttacacgtgctgcattttgtagctgacatgcacactcaggccatacgttctggtggtggtgctggtcacataactccctaactgcaagactgccttgcgctggaggagacctaggatcgttgatatcatctgcgtggactttaaggctggcatgtttgcagacagtggcgcctgcccgcacttaggttcccatcagagcgtgtaaccatgggagagtggggggcacggctgtcttggggctcatcgaggctgcctgtcatgtttgctttttctttcctcagacagatcgaggagctgctagagctgctgatgactgagatcctgcaccccagcagccaggcccccaacggtgtgaagagccact

SEQ ID NO: 36830 - DNA, 593 bp, Homo sapiens
ttggaatgcgtcgtgcggcagggcccaggaagccagcaggtggctcatggtcctcggcccctttctgggcctccaccttcctttctctgcctgtgctgtcctgacgtgtcttccccagcggtacccagtggaggcagtggagaggaacaccaggcagggcgtctcgtctcagccaagcctttctctctgctagcaatcttgaggacagagggaaggcctgtctgaatgtttacacgtgctgcattttgtagctgacatgcacactcaggccatacgttctggtgstggtgctggtcacataactccctaactgcaagactgccttgcgctggaggagacctaggatcgttgatatcatctgcgtggactttaaggctggcatgtttgcagacagtggcgcctgcccgcacttaggttcccatcagagcgtgtaaccatgggagagtggggggcacggctgtcttggggctcatcgaggctgcctgtcatgtttgctttttctttcctcagacagatcgaggagctgctagagctgctgatgactgagatcctgcaccccagcagccaggcccccaacggtgtgaagagccact

SEQ ID NO: 36831 - DNA, 593 bp, Homo sapiens
ttggaatgcgtcgtgcggcagggcccaggaagccagcaggtggctcatggtcctcggcccctttctgggcctccaccttcctttctctgcctgtgctgtcctgacgtgtcttccccagcggtacccagtggaggcagtggagaggaacaccaggcagggcgtctcgtctcagccaagcctttctctctgctagcaatcttgaggacagagggaaggcctgtctgaatgtttacacgtgctgcattttgtagctgacatgcacactcaggccatacgttctggtggtggtgctggtcacatractccctaactgcaagactgccttgcgctggaggagacctaggatcgttgatatcatctgcgtggactttaaggctggcatgtttgcagacagtggcgcctgcccgcacttaggttcccatcagagcgtgtaaccatgggagagtggggggcacggctgtcttggggctcatcgaggctgcctgtcatgtttgctttttctttcctcagacagatcgaggagctgctagagctgctgatgactgagatcctgcaccccagcagccaggcccccaacggtgtgaagagccact

SEQ ID NO: 36832 - DNA, 515 bp, Homo sapiens
gccgtgcaccagggagaaattcaggggttaagggcttctctggagcttgcccaggacaggtgaacagagcaagaggaattccaccccccagggtgtcttcccagggcccaagtccactgtgggggtttcctgtggcctcctcctgccccagctgcactgtttgccaccagasctgtccacctcccttctccatagagacccgcagagaagagtctggaatgaagagtccggagctcaggtttcagggagcatcgcccacaacatcaacgagagaggacccagagctccccgtggaagtgccgggccagggtgtcctggaggcctgagggcaggtcgggaggctgcagctggcccacggggcaggggctttcctcccagaccaccctcctgctgacctgcagcaggagctgacctgcagtggggagattgctggccaccccatgggtcccagctgagtggtgcgggagactcacattgtaagcattcttaatgagttggaccacattgctggagtc

SEQ ID NO: 36833 - DNA, 515 bp, Homo sapiens
gccgtgcaccagggagaaattcaggggttaagggcttctctggagcttgcccaggacaggtgaacagagcaagaggaattccaccccccagggtgtcttcccagggcccaagtccactgtgggggtttcctgtggcctcctcctgccccagctgcactgtttgccaccagagctgtccacctcccttctccatagagacccgcagagaagagtctggaatgaagagtccggagctcaggtttcagggagcatcgcccacaacatcaacgagagaggacccagagctccccgtggaagtgccgggccagggtgtcctggaggcctgagggcaggtcgggaggctgcagctggcccacggggcaggggctttcctcccagaccaccctcctgctgacctgcagcaggagctgacctgcagtggggagattgctggccaccccatgggtcccagctgagtggtgcgggagactcacattgtaagcattcttaatgagwtggaccacattgctggagtc

SEQ ID NO: 36834 - DNA, 872 bp, Homo sapiens
gggtgccaccccagcattctttgcaggtgcagagcccaaccctcagctaaggccgcagctggggcagggtcatcttgtgacagaagggcgtccaagtgtggggttatccgtggctgtcagctgagcgctcctggccaccattgagagggaggctccaggcggaggatggggtgtgtgcattctctggacagacacctggggtagagcccctgaatcagcagatcagagaggatgactgtaggagcttcaggagcaggaacatgaatccctcggtaatcgatttaaacaagttctacagttgactcggctttcatgccttttagaccctggggccctcggtgcatttttccgagttaaagggttaacacagcagatcaaagcttcctggggcctggaggtgcctggcgctggcctgcaggactctgagaagctctgggctgggaccgtggatgccaggctcaaggcccgcagacctgggctgggcacgtcccgggtgcctcagccccaggcccartgttggcatatgggggactgtggggcacaatgggagacaggagaggcagtgggaggagccccccaccctgccagtcccgcaggaagggcagtgtctggttgcagggggtgtggggtgttggccaaaggaatagcaaatgcctggcccagagtgaagggctcctggctgggatggccacaggccctggggggtctccctcagccccgggcaggcccaggttctccttccaggcgcccgggatctcctttgtccctggctgtcctcaggctgcacttagtgtggccactccaaggggggctgaggaaaccacctctcagcacctaccaggcttctgtaaggcccacacccagcagctatt

SEQ ID NO: 36835 - DNA, 796 bp, Homo sapiens
tcctggggttatttcagagagccctccagctggcctttatctcagactcgcaggcaggtgcctcctcctcagtgccttccttgctccagtttgggtctgacaagtcatcctggtgcctgtgactgtcacgttacctaattccacgtgggaagtgcctctcctattccagccattgagccaaccgtctcaccaaactccccccagggctcttgatgcaaaataaaaacgaaacacacaaaatggaccgtgagcaaatagacctgaatattggggtggtaaaggctggaatacaaaaacgcagaaatttttaaggaaaaataaaaattttaattttggccaggcgcagtggctcacgcctctaatcccagcactttgggaggccaaggtgggcggatcacgaggtcaggagatcgagaccatccyggctaagacggtgaaaccccgtctctactaaaaatacaaaaaaattagccgggcgcggtggtgcatgccacaagtagccccagctacttgggaggctgagacaggagaatcgcttgaacccaggagactgaggttgcagtgagccgagatcgcgccactgcactccagcctgggcaacagagcaagactcagtctcaaaaaaaatacaaaaaacaaacaaacaaaaaaatgtaatctctacagagaaaaaatgagcaacatatctaagttggcattttatagaataacatttcaaaaggcttttaaagtgtagttttactctgaaatcaaagaaacacacacgaacagagcaaggattccacattttgctact

SEQ ID NO: 36836 - DNA, 796 bp, Homo sapiens
tcctggggttatttcagagagccctccagctggcctttatctcagactcgcaggcaggtgcctcctcctcagtgccttccttgctccagtttgggtctgacaagtcatcctggtgcctgtgactgtcacgttacctaattccacgtgggaagtgcctctcctattccagccattgagccaaccgtctcaccaaactccccccagggctcttgatgcaaaataaaaacgaaacacacaaaatggaccgtgagcaaatagacctgaatattggggtggtaaaggctggaatacaaaaacgcagaaatttttaaggaaaaataaaaattttaattttggccaggcgcagtggctcacgcctctaatcccagcactttgggaggccaaggtgggcggatcacgaggtcaggagatcgagaccatcctggctaasacggtgaaaccccgtctctactaaaaatacaaaaaaattagccgggcgcggtggtgcatgccacaagtagccccagctacttgggaggctgagacaggagaatcgcttgaacccaggagactgaggttgcagtgagccgagatcgcgccactgcactccagcctgggcaacagagcaagactcagtctcaaaaaaaatacaaaaaacaaacaaacaaaaaaatgtaatctctacagagaaaaaatgagcaacatatctaagttggcattttatagaataacatttcaaaaggcttttaaagtgtagttttactctgaaatcaaagaaacacacacgaacagagcaaggattccacattttgctact

SEQ ID NO: 36837 - DNA, 1085 bp, Homo sapiens
cagatgtctgaaccttcagtgtgtaggctaggagcaccttaggcggacgcagatcgaagtgccagtagagatgtcacccctgcctccctggcttggctgtgcgcctgcagtgacttctgtgtggagcatgaccagagcccctggcttgggaaggctggagggacatctgttgggctccagcctggggaggggtgcaggtgggcagggctgcctcagccccctgacgccacgttcctctgggctctgtaggtgctgaacaccaggctctaggcctcatgtccagaaccactagggcatgagggsatggagctgcacttcgagtctctgccggagtggaacctgccaccttgtgtctttggagcccccaggatagccccggaatgtgacgtgttccttgtaggacccgggtggccctcccagaagcagtccttagggctttgttggtgggctctattgtccttcaacaggaaatttccaaatgtgcattctaggatgggtggaaaaccctcactctttttctagagtaacccttgaaggacgtaggtcagtcatccctgcgtgtcactgcaggtaaatggtgctgcctgggactgtgtggcatgggtttaactcttaagagcattttttttgttcttatatctgtcccccaaattaagagggaagtccttcattaaccatacaggttaatgagaccagtaatcccctcaacggggtgctgagccctggccatgtgcctcagatgtctgcgttaacaagcatcagccccagcaccagaccttcagagtgaggctctcggaactcactctgaagttaaagttcttcgcctctctttgaaagtttggagattcgcctaatcttatatgaaatggaaacttttatttcctctggcttatccctaatcttcttatgactttttcttctctgtaaactcgaatgaatcgccctttccctctggcaccctggccaattggaatgcgtcgccccttccctctggcaccctggccacgtcctgtgtttctgtcacagcctcagttcctcgcgtccgctcacccctgcattgcagatgccgctgcctgcgggtgcat

SEQ ID NO: 36838 - DNA, 1085 bp, Homo sapiens
cagatgtctgaaccttcagtgtgtaggctaggagcaccttaggcggacgcagatcgaagtgccagtagagatgtcacccctgcctccctggcttggctgtgcgcctgcagtgacttctgtgtggagcatgaccagagcccctggcttgggaaggctggagggacatctgttgggctccagcctggggaggggtgcaggtgggcagggctgcctcagccccctgacgccacgttcctctgggctctgtaggtgctgaacaccaggctctaggcctcatgtccagaaccactagggcatgaggggatggagctgcacttcgagtctctgccggagtggaacctgccaccttgtgtctttggagcccccaggatagccccggaatgtgacgtgttccttgtaggacccgggtggccctcccagaagcagtccttagggctttgttggtgggctctattgtcyttcaacaggaaatttccaaatgtgcattctaggatgggtggaaaaccctcactctttttctagagtaacccttgaaggacgtaggtcagtcatccctgcgtgtcactgcaggtaaatggtgctgcctgggactgtgtggcatgggtttaactcttaagagcattttttttgttcttatatctgtcccccaaattaagagggaagtccttcattaaccatacaggttaatgagaccagtaatcccctcaacggggtgctgagccctggccatgtgcctcagatgtctgcgttaacaagcatcagccccagcaccagaccttcagagtgaggctctcggaactcactctgaagttaaagttcttcgcctctctttgaaagtttggagattcgcctaatcttatatgaaatggaaacttttatttcctctggcttatccctaatcttcttatgactttttcttctctgtaaactcgaatgaatcgccctttccctctggcaccctggccaattggaatgcgtcgccccttccctctggcaccctggccacgtcctgtgtttctgtcacagcctcagttcctcgcgtccgctcacccctgcattgcagatgccgctgcctgcgggtgcat

SEQ ID NO: 36839 - DNA, 1085 bp, Homo sapiens
cagatgtctgaaccttcagtgtgtaggctaggagcaccttaggcggacgcagatcgaagtgccagtagagatgtcacccctgcctccctggcttggctgtgcgcctgcagtgacttctgtgtggagcatgaccagagcccctggcttgggaaggctggagggacatctgttgggctccagcctggggaggggtgcaggtgggcagggctgcctcagccccctgacgccacgttcctctgggctctgtaggtgctgaacaccaggctctaggcctcatgtccagaaccactagggcatgaggggatggagctgcacttcgagtctctgccggagtggaacctgccaccttgtgtctttggagcccccaggatagccccggaatgtgacgtgttccttgtaggacccgggtggccctcccagaagcagtccttagggctttgttggtgggctctattgtccttcaacaggaaatttccaaatgtgcattctaggatgggtggaaaaccctcactctttttctagagtaacccttgaaggacgtaggtcagtcatccctgcgtgtcactgcaggtaaatggtgctgcctgggactgtgtggcatgggtttaactcttaagagcattttttttgttcttatatctgtcccccaaattaagagggaagtccttcattaaccatacaggttaatgagaccagtaatcccctcaacggggtgctgagccctggccatgtgcctcagatgtctgcgttaacaagcatcagccccagcaccagaccttcagagtgaggctctcggaactcactctgaagttaaagttcttcgcctctctttgaaagtttggagattcgcctaatcttayatgaaatggaaacttttatttcctctggcttatccctaatcttcttatgactttttcttctctgtaaactcgaatgaatcgccctttccctctggcaccctggccaattggaatgcgtcgccccttccctctggcaccctggccacgtcctgtgtttctgtcacagcctcagttcctcgcgtccgctcacccctgcattgcagatgccgctgcctgcgggtgcat

SEQ ID NO: 36840 - DNA, 1091 bp, Homo sapiens
catggtcagcccctgggcgtggcttttgagcccagtgggtccagaggggactcagtgaggtcttgtcttgcagagtgtgtgtggcagtgaggggaagaggttcatctgctgcagggcctgggaactcctgacacttggtgtggccttgaccaccgggagcaaacgcagtgcacacggcaaccggctctgacaaggcagatgctcctgcccagggcaggtcggaccctggctgagggagacacaaacctgaacgggctctgacaaggcagatgctcctccccagggggtttcagactctggctgagggagacacaaacctgggagtggaggggagtttagcactggatggcccacatgcagctaggatggccgcagtacccaggctggagcgagcggcttctggggcccaggagaggccctcgagcccgctgtcttcccggctgtcatctcctggcagggatctgctggggaaatagaatctgacgcaacgtattttccaacccagaaaacctcttcagaaaggtggaagagaaaaagcaattctattactgagtaagcgttaaagccagaatgcgaggtgcggctggggcagcccactgaaggcatcgcagagacagaaacctcactccttacagccgagtgaacactgagcacctgtgccttcaggggggtttgcagtttggcgagtgaggcccgctgctctgaggcgctaatctcccaaggaaacgttcctgagttgagcctgggcagaggcttccttagctagaaaacagatttaca[311 bp omitted]

SEQ ID NO: 36841 - DNA, 792 bp, Homo sapiens
tccagggctcagcgggcccagctcaactgtgggtccctgactgtcctgccctcaggggtcccccagaccctgctgctcctgctcaagcagacctgccctagcttttagggttttaggaagattccccaaatggccacaaacctaatagggcagcacagacgggatgttgcgggtgcatctgtatgtatgtgtgcacaggtgcctgtgcatgtgtacrtgtgtgcatagacctgtatgtacatctgtctccatgtacgtatgtctgtgtggcacagatgcgatactgcgggtgcatctgcatatgtgtgcacaggtgcctgtgcatgtgtacatgtgtgcatagacctgtgtgtgcatctgtctccatgtacgtatgtctgtgtgtggcacagatgggatactgcgggtgcatctgcatgtgtgtacacaggtgcctgtgcatgtgtacatgtgtgcatagacctgtgtgtacatctgtctccatgtacgtatgtctgtgtgtggcacagatgggatactgcgggtgcatctgcatatgtgtgcacaggtgcctgtgcatgtgtacatgtgtgcatagacctgtatgtgcatctgtctccatgtacgtatgtctgtgtatggcacagatgggatactgcgggtgcatctgcatgtgtgtacacaggtgcctgtgcatgtgtacatgtgtgcatagacctgtatgtgcatctgtctccatgtacgtatgtctgtgtgtggcacagatgggatactgtgggtgcatctgcatgtgtgtacacaggtgcctgtgca

SEQ ID NO: 36842 - DNA, 529 bp, Homo sapiens
aatatctccaaacatgagagcagatgaatatgctttaagacagtatacataatgatacatctccatttttcccttcctcttacgatcatttacacagatatatgagaagtaaatatgtgtttagaaagtattagtcatcatagatgtacctctagtcacccattcaaatgtaaacatggtaaaatatgcacttgtacacttttatactataatgagtataggtaggtgaaaattagtgttgccagaaaaaattcaaaccagaaaactgaaggtatagaaaaattatactttttattttgtgattgataaaccatctttaaataatatatcatgtatagaataaaaaattatggatatatacatgcaattataaatatatgtgaatttaattttgttaaaaggtaattggcatctgcaatttcatggagactaagtgaaacccataargaaatgtgtatgaaataggaaagcaacaaaagctcgtaatattttaaaattagaaatcagattcaaaatccatcatgatcta

SEQ ID NO: 36843 - DNA, 596 bp, Homo sapiens
aatgaaagaaataaagaaatggacatttgtgagctttggtcatgagaatgcaggcctcgcagtacttaactacttccaaacccctgtccaaagagaggaccaaactctagtgaggcttccggcagcacaagggtgtcccgcggatgaccccagccctcttaaaatgactgcctgaaaaagctcacttgcaaagaaaatttactgtttgtttcaggcaaaacctggtgatgggcaggtagagccccgaatcccctcttagaaccttagaaagcttgcaattataaatttttctccacctttgaagtgtaaatctacatcccagaattgtctcctcaaagacctgagagttctctctttgaaatgcaaacattcaggaagctaactcttgctcttgttgccagttcctgagggaggggaaaggcctagctttggygagcaccttgttccagcttgcaccgtctgactcttttattgccatcaaaatcaacatgtagacttttttcaaacccaatgacagcccattacaatggaggccatagcaatggaggtctctacatgcaaaaaaaatggtgggacagtttcctgataacaggtca

SEQ ID NO: 36844 - DNA, 257 bp, Homo sapiens
aaaaatacagtccttcatgaccacagatgcaaaaagatcttaacagagtttcaaagaattgacttatggcagtaattcatgtttagattaccataataaaatcaaccaaagcaatttggcataaagactatcattctgcaaaacaatttggcagtttcttaaatgttaaacagatacctaccatatgacatagctattcttgtctagrtatttacccaagagaaatgaaaggatattttcatatgaccatctgtgca

SEQ ID NO: 36845 - DNA, 614 bp, Homo sapiens
aggtcagcagatagagaccatcaggtgaaaccccgtctctactaaaaatacgaaaaaattagccgggcgctaattggcgggctcctgtagtcccagctactcgggaggctgaggcaggagaatggcgtgaacccgggaggcggagcttgcagtgagccgagattgagccactgcactccagccttgggaacagagcgagactcaatctcaaaaagaaaagaaaagaaaaaaaaagaacctccaaactttgcagcgagcagagattgcaccactgcacttcagcctgggtgacagagcaagactcggtctcaaaaaaaaaaaaaaaaraaaaaaaaaaaaaggaaaggaaagaaaagaaaagaacctctaaaagtagccaacagctggagacagacatccatcctaagaactacggagcaagtaaatgatatgatgaagcagtccgcttctgccaaagatcctgaaacaagattcactccgattccccttctttgtctctgacttcaattttgggtctacttattctgctactactcctgtgtcctctacaacgtcccatctttatcctagtgatgtgtcctacttacaacatatatactccatctccagcctca

SEQ ID NO: 36846 - DNA, 614 bp, Homo sapiens
aggtcagcagatagagaccatcaggtgaaaccccgtctctactaaaaatacgaaaaaattagccgggcgctaattggcgggctcctgtagtcccagctactcgggaggctgaggcaggagaatggcgtgaacccgggaggcggagcttgcagtgagccgagattgagccactgcactccagccttgggaacagagcgagactcaatctcaaaaagaaaagaaaagaaaaaaaaagaacctccaaactttgcagcgagcagagattgcaccactgcacttcagcctgggtgacagagcaagactcggtctcaaaaaaaaaaaaaaaaaaaaaaaaaaaaaaggaaaggaaagaaaagaaaagaacctctaaaagtagccaacagctggagacagacatccatcctaagaactacggagcaagtaaatgatatgatgaagcagtccgcttctgccaaagatcctgaaacaagattcactccgattccccttctttgtctctgacttcaattttgggtctacktattctgctactactcctgtgtcctctacaacgtcccatctttatcctagtgatgtgtcctacttacaacatatatactccatctccagcctca

SEQ ID NO: 36847 - DNA, 614 bp, Homo sapiens
aggtcagcagatagagaccatcaggtgaaaccccgtctctactaaaaatacgaaaaaattagccgggcgctaattggcgggctcctgtagtcccagctactcgggaggctgaggcaggagaatggcgtgaacccgggaggcggagcttgcagtgagccgagattgagccactgcactccagccttgggaacagagcgagactcaatctcaaaaagaaaagaaaagaaaaaaaaagaacctccaaactttgcagcgagcagagattgcaccactgcacttcagcctgggtgacagagcaagactcggtctcaaaaaaaaaaaaaaaaaaaaaaaaaaaaaaggaaaggaaagaaaagaaaagaacctctaaaagtagccaacagctggagacagacatccatcctaagaactacggagcaagtaaatgatatgatgaagcagtccgcttctgccaaagatcctgaaacaagattcactccgattccccttctttgtctctgacttcaattttgggtctactyattctgctactactcctgtgtcctctacaacgtcccatctttatcctagtgatgtgtcctacttacaacatatatactccatctccagcctca

SEQ ID NO: 36848 - DNA, 584 bp, Homo sapiens
gttgctcaagttcatttatagtgaagagaagttartagtgtatttatagaagcctaacactatgatatgcatatattttttaaatactatagaaggagccaatggcagtgatccagaaaatatatccttttcagttgagatagaagagcaaaagaaatctctattcctattgcagagaaaaaatagtaaatatatttgctcataacaacataactaaactgtttgtggcttaataaataaaaatatagttatttaaaggtggttcaaggtttcgtatataatcttacattccccaaatgtgaatttgcacagtaatgaattaaaaataaaacaaagcaatattacttgtcaattcaatcaaataactttgtaatttagcagaaaataaattgcaccagtttggtttaaagccctaactacacatctatagtttccttaaattaattaaaagaagtcatgcaattttcacagaatatcacatgcatgttatccattttaatttctcttaaaaatgggttagttgccattatcaaactttagacaagaaatcaaacagataaagtaacaatgaaagcaacttagac

SEQ ID NO: 36849 - DNA, 584 bp, Homo sapiens
gttgctcaagttcatttatagtgaagagaagttagtagtgtatttatagaagcctaacactatgatatgcatatattttttaaatactatagaaggagccaatggsagtgatccagaaaatatatccttttcagttgagatagaagagcaaaagaaatctctattcctattgcagagaaaaaatagtaaatatatttgctcataacaacataactaaactgtttgtggcttaataaataaaaatatagttatttaaaggtggttcaaggtttcgtatataatcttacattccccaaatgtgaatttgcacagtaatgaattaaaaataaaacaaagcaatattacttgtcaattcaatcaaataactttgtaatttagcagaaaataaattgcaccagtttggtttaaagccctaactacacatctatagtttccttaaattaattaaaagaagtcatgcaattttcacagaatatcacatgcatgttatccattttaatttctcttaaaaatgggttagttgccattatcaaactttagacaagaaatcaaacagataaagtaacaatgaaagcaacttagac

SEQ ID NO: 36850 - DNA, 584 bp, Homo sapiens
gttgctcaagttcatttatagtgaagagaagttagtagtgtatttatagaagcctaacactatgatatgcatatattttttaaatactatagaaggagccaatggcagtgatccagaaaatatatccttttcagttgagatagaagagcaaaagaaatctctattcctattgcagagaaaaaatagtaaatatatttgctcataacaacataactaaactgtttgtggcttaataaataaaaatatagttatttaaaggtggttcaaggtttcgtatataatcttacattcyccaaatgtgaatttgcacagtaatgaattaaaaataaaacaaagcaatattacttgtcaattcaatcaaataactttgtaatttagcagaaaataaattgcaccagtttggtttaaagccctaactacacatctatagtttccttaaattaattaaaagaagtcatgcaattttcacagaatatcacatgcatgttatccattttaatttctcttaaaaatgggttagttgccattatcaaactttagacaagaaatcaaacagataaagtaacaatgaaagcaacttagac

SEQ ID NO: 36851 - DNA, 584 bp, Homo sapiens
gttgctcaagttcatttatagtgaagagaagttagtagtgtatttatagaagcctaacactatgatatgcatatattttttaaatactatagaaggagccaatggcagtgatccagaaaatatatccttttcagttgagatagaagagcaaaagaaatctctattcctattgcagagaaaaaatagtaaatatatttgctcataacaacataactaaactgtttgtggcttaataaataaaaatatagttatttaaaggtggttcaaggtttcgtatataatcttacattccccaaatgtgaatttgcacagtaatgaattaaaaataaaacaaagcaatattacttgtcaattcaatcaaataactttgtaatttagcagaaaataaattgcaccagtttggtttaaagccctaactacacatcyatagtttccttaaattaattaaaagaagtcatgcaattttcacagaatatcacatgcatgttatccattttaatttctcttaaaaatgggttagttgccattatcaaactttagacaagaaatcaaacagataaagtaacaatgaaagcaacttagac

SEQ ID NO: 36852 - DNA, 523 bp, Homo sapiens
cggaaacagtcctttcatgaaagttattgtaatatagtctttaggtattcttttgaataactatttaatcccagttgatctactttaggatataaaaacactgaaatctcctgrtgctttggtttgactttatcacactactaaaatgagaaaagaagaaatcttctagggatataattaattagggacacagtttaaaatgttcctgttttaagtgtagtggtttagcaaagaaaatgccacaagtgcctcctaactggtattgcaaaataatgtccgcagagtaggtcagcacatttatcatgtttgatttggaggttctgggtaaaaaaagaactggttgtctttcatgtaaccaattctgcttggcttaatattcttacatcaatttatttttttcttgagagaaaaataatgttgttataaattctaactgccccattacctataaatatatcatttaggaaaatatgttactttcccataaataattagatatttttctttagttatctatcactaa

SEQ ID NO: 36853 - DNA, 565 bp, Homo sapiens
ccctgaacctctgctattccctgtcactgggtccgtttcctttaaaaccctaaccaattatttgcacacttatttgttttatggtgattccccgcaagtagactgtaagcyctgggagagtaaggactatctttatctcttttaccacttccacccttacacttagaagagacctggcaggtgacaaaaatatattgctaaagtgaacaagtgggatggtgagtttctatccactagagagtcatagctgtctaaagggacaccatgcaccatttttccagccttacctggtcctccagatgccccgcagataccttgtggtgtggccttcgctcttgcagggtctcagccccctgggacatcctcctacatccacatcttcatggctgaatcccacccagacctcaaaaatgaaacgaaaggccaccttcaggaagccttcctcaatccagtgcttcccttttgtctcctcatcttcttccccattaaagggcttaagaatgatgtcctccaaatttgaccaccttggcttttaaactgcaactctctggaagcttcacacctg

SEQ ID NO: 36854 - DNA, 604 bp, Homo sapiens
ggattacaggcgcctgccaccacacctggctgatttttgtatttttagtagagacagggtttcatgatgttggccaggctggtgttgaactcctggcctcaagtgatccacccacctctgcctcccaaagtgctgggattacaggcgtgagccactgcgcccgttgttgtgcctacattttctatctcacttacctgcctattttccccttcttaacacttaacattatctaatatatcatatgtatattttccattctccctctagaatgtaagctccatgggagcaaagattgtaatctkttttgttcagtgttatgtccccagcatctagaatagtgcctgcaaaaaagtaagttttcaatgaatatgttttgcataattgaaggtagagtcagtagaactcaatccatttgaagtcccattgtcaacccatttctatgcggttgacaatgatttttcttggaatttaattctcctaccaatatatctgcctagaatatgtttttctcatttaaaattgctatacgagacaaaatgaacattcttgataggtttaaaaaattgttttatttattgctccctttccttcaaccagtcttaaa

SEQ ID NO: 36855 - DNA, 579 bp, Homo sapiens
gattcttagaagctattactagtatacacatatctttttaagcctaaaaggcttccaaatgatccaatatacagctaataaatgaaggcagctgaatggaataaatgcatgtaaaacctttcacagatttttgttgcattttagttgttcgtgtaaggatttctatgaataacatgtttatttctgcttaattgcttataggtatcacagtaatataaattaagaaaatatggactaataaaatcattaaaccaataatcctaaaaggcaaataaaagtgcaattacttttatcataaacttatattacacagattacactcgattacatagataaattctggctaaaaatactaactttttatgtaaattttttacagtggctaaaaaggcaagaaaacacaaatagaygtttcatctacttaatgtcttaatttgaaatccagtgaacaaactattcaaattattaaactatgaatgactatttatgagggaaattactatcatttcatttatgttttgtgatttgaggtagtatttgtcaaattccatgtagtcacaccttccttttctaattaaa

SEQ ID NO: 36856 - DNA, 449 bp, Homo sapiens
ttccctatcgcccatgtatatagaaatatacatgttgataaacttctgtatttcttgtcctaaactgtcttttgctaaaggactccaagctgagaactgagaaaggtagagggaaaattatttttcctcccctgtgctatccatttcacagataatggagcagactggaggcattttaacacattaataagttaataagattttgaatcccaatttcactactaactatctgcagtcctgaccaagtggctctcaaagcttagttttctcatctgtgaaatgtgattaatatcttcctcacaaggatgttttcaagaagaartgatacatagtatataagaactcagcactttttctaacacatatttgataatcaattaatgttaactactatgctattcttttaaagggcattggtctatgctgtgttatttgttcacctttaattc

SEQ ID NO: 36857 - DNA, 1156 bp, Homo sapiens
accgggcactgcctcagggcatctctagaatcattctatccatattgtacttaaatttgttgcaaatgccttgtttttttgttttctcgactagtttgtaccaagcagggaaggaaggagcaacttggttagatccacagaaaagaacttaaatcccagcatacctgccccaggctggcacccattcccagtcagtcagcgccccactgggcatggtggctccracatatgccagactaaacacatgctgcaatactttagcacccccacaggcagaaatatgttccagaattctcccttgagtacctactcagggagactgtctccactcatagcaaaataaatgaacgcattcaaggtctttgatctctcataagagcaaattgtccctggctatcagggatgggagcagagggtctacctctgctcctatcgctcccagattgcaatgtgggctgatgtaaaaaactgaagctgtgggtatgggcatgtgtgggcttcatctgagccatggcatttccaggagcagttccagggagcgacagaaacgttcttctccggcactgaaggtgtgctctggtttactaccactttagcaagtgccagcctcgctttggatgccacttacccttcaatatggtcagtattactgggtccgtaagtacattctactccctctcccctgcccacaggcgtggctggctgccgccgcctgtattttcagctgtcgaactgccgcgttgccttttgtattgatcttccagggatcagtctgtttcctactgtgtcaaaacttacagaggccggatgtcttttttctcatacatctggctttgctggaagttttgaaaatggaatgggaagtctctcagattcacgggtccagccaagcgatcggcatatggtccagtcttcatctgctgcagccgagacgggacggggcctcttctcccagatagctgagcgctcagctgcaagaacccaagaacccagatgtgtgtccgtatgtaattgatgatataatagaacgcgcgctctggctgcaggggaaatgtgatacggtgtcaatcaccctgccagagagaaaatgaaagtgaggtccaaaatttgaaaatgatgacttcgcttttgttggttaaagtcatcatcaggtaag

SEQ ID NO: 36858 - DNA, 1156 bp, Homo sapiens
accgggcactgcctcagggcatctctagaatcattctatccatattgtacttaaatttgttgcaaatgccttgtttttttgttttctcgactagtttgtaccaagcagggaaggaaggagcaacttggttagatccacagaaaagaacttaaatcccagcatacctgccccaggctggcacccattcccagtcagtcagcgccccactgggcatggtggctccaacatatgccagactaaacacatgctgcaatactttagcacccccacaggcagaaatatgttccagaattctcccttgagtacctactcagggagactgtctccactcatagcaaaataaatgaacgcattcaaggtctttgatctctcataagagcaaattgtccctggctatcagggatgggagcagagggtctacctctgctcctatcgctcccagattgcaatgtgggctgatgtaraaaactgaagctgtgggtatgggcatgtgtgggcttcatctgagccatggcatttccaggagcagttccagggagcgacagaaacgttcttctccggcactgaaggtgtgctctggtttactaccactttagcaagtgccagcctcgctttggatgccacttacccttcaatatggtcagtattactgggtccgtaagtacattctactccctctcccctgcccacaggcgtggctggctgccgccgcctgtattttcagctgtcgaactgccgcgttgccttttgtattgatcttccagggatcagtctgtttcctactgtgtcaaaacttacagaggccggatgtcttttttctcatacatctggctttgctggaagttttgaaaatggaatgggaagtctctcagattcacgggtccagccaagcgatcggcatatggtccagtcttcatctgctgcagccgagacgggacggggcctcttctcccagatagctgagcgctcagctgcaagaacccaagaacccagatgtgtgtccgtatgtaattgatgatataatagaacgcgcgctctggctgcaggggaaatgtgatacggtgtcaatcaccctgccagagagaaaatgaaagtgaggtccaaaatttgaaaatgatgacttcgcttttgttggttaaagtcatcatcaggtaag

SEQ ID NO: 36859 - DNA, 556 bp, Homo sapiens
atcccagttacttgccaggctgaggcaggagaattgcttaagcccaggaagtggaggttgcagtcagccaagatcgcaccactgcaytccatcctggtgaacagagcgagactcaacctcaaaaaaaaaaaaaatttataatcgtgttggaaagagatattgtaatgtatacatgcaaatgactagaaaaacatttctgacaacaattatttgtcagcaataagcatttacttattactgacaaaaataagaaaatacctattaagcatctgtaatgagaaggttcctttgcaagttgtaagcagattggtgagtggacttactataaatataaatagaacccagtccttgccattggtgcaagatattaggggaaataaggcacaaatctttaagttataaagccattaagctgaactttgaaagaggaaagaaggctttcaatgaacagaccacatgggattccaagtggaaagcataactttgggtaaaaaagcatgggacgtgtttgtgaacacagagtaattctgtttggctggaaggcaggtaaacatga

SEQ ID NO: 36860 - DNA, 902 bp, Homo sapiens
attgggagggtggccagaggagcagggggtaaaactccacaaggagaaggaattttctagccgaactttgtaacaatttgaatggtgtgagaagcctcctggctagaactcaggggagggyaagatcgggcatgcagacttcacaggccagggaagaactaaagcccttttctctagcagatgggaggcagatagcctcaggaaagttttcaagcctatcttgccctctgcctggaaacagacttggggctgttgggcagtgcacagtgggagtcagatcagcccttcagtttgtatgggagctaggtaaggcttgtgacttcgggctttcccccacttccctgccaacctgcaagacttgacagaggcagccataatcctcctaggtacacaactccagtgacctgggaatctcacccgaattcccaacagcagctgcagcaagacttgcctaaggagaatctgagctcagacatccctagccctgcccctgcctgatggtccttccctatccaccctggtagtggaagacaaagggcatataatcttgggagttctagggcctcacacaccaccagtccctcttcaccctactacagctgatgctttctggaaagcaccacctcctgacaggaggccaaccagaacaaaaatagagcattaaaccaccaaagctaaggaccctcacagagtccattgcaccctccaccacctccaccagaacaggcactggtatcctcggctgagagactcatagacagttcatatcacaggactctgtgcagacaagcccctgtactagcccggagctgggtagactctctgggtggccagacccagaagatagataacaatcactgcagttcagctcacaggaagccacatccataggaaaaggggga

SEQ ID NO: 36861 - DNA, 902 bp, Homo sapiens
attgggagggtggccagaggagcagggggtaaaactccacaaggagaaggaattttctagccgaactttgtaacaatttgaatggtgtgagaagcctcctggctagaactcaggggagggcaagatcgggcatgcagacttcacaggccagggaagaactaaagcccttttctctagcagatgggaggcagatagcctcaggaaagttttcaagcctatcttgccctctgcctggaaacagacttggggctgttgggcagtgcacagtgggagtcagatcagcccttcagtttgtatgggagctaggtaaggcttgtgacttcgggctttcccccacttccctgccaacctgcaagacttgacagaggcagccataatcctcctaggtacacaactccagtgacctgggaatctcacccgaattcccaacagcagctgcagcaagacttgcctaaggagaatctgagctcagacatccctagccctgcccctgcctgatggtccttccctatccaccctggtagtggaagacaaagggcatataatcttgggagttctagggcctcacacaccaccagtccctcttcaccctactacagctgatgctttctggaaagcaccacctcctgacaggaggccaaccagaacaaaaatagagcattaaaccaccaaagctaaggaccctcacagagtccattgcaccctccaccacctycaccagaacaggcactggtatcctcggctgagagactcatagacagttcatatcacaggactctgtgcagacaagcccctgtactagcccggagctgggtagactctctgggtggccagacccagaagatagataacaatcactgcagttcagctcacaggaagccacatccataggaaaaggggga

SEQ ID NO: 36862 - DNA, 1222 bp, Homo sapiens
atgagaggtgatgatgagggcacagcacccaagacttcaacagactccatcaccttgcacagtttgagtcaaggacattcctcaattcagagctgcyggcctggtgtgaaggccatttgcccagcccttgctggaagtcatgctaccagacccttagagcctgaccttgccagggccttccttcaggcttgcatgagtgggtgggagggtggaatcagcagtatcatgaataaacactgaccaatttcctttcctgctgaggcacttttagaaatattcttgcactcttactatgaataagatggtgattacaagtattatagtgctttatctgttcacaaagtttgagagatttttgtcgaaatctggacacacccataaaagtgtgccacacttgagacccttgttctttatacatgtggctattggaaaacattaagaccactatgtctaccagatccagcatgatttttaaaaactccattataagtgaagatgacactcaggaatggaaacttacagcttatccactctgccaagaaatcatgttctctaagagtgagagaaaagagatgctgtgtgtggtcacttcccacttttttcttgttccacgatcccctcctctccgagtttcattcaccatccgcaattgcagacttcttgctctgaagattgtactagtaagctttctgtagcagacaccactgaagccttactgttttctactaggccagtgttgctcaaatgtggtccttcgaccagcagcacatcaacatctcctgggaacttgtgagaagtgcagactttggcctctccccaaacctcttggataagatcctgaaatagaggccctgccgtctgtgtgtttgccagccctgcagatgattcggctgctcactcagactgagagcagtagccggagatgctcaccctcccacgagctccactgcttcctgccgcgggcccctggggctccgttgaggtcttgcttaggtgtgctcacatctgagatgcgctcagaccactaacttcagctgcgagccaggtcagaagtgctgaagagttagtgccctggggaacagctctcaagcagagagggacaggacttggaaaataaaaatgcagctccctcacacatgagatgagacgattttcaggcatgttccacctggttcttcagaagtccccatcaggactgaggcccggttgtcacagatgtggc

SEQ ID NO: 36863 - DNA, 802 bp, Homo sapiens
caaagtgaccaacctcacttacaatttattcctgcttggctgaaggaaataaggattctgttgggtggcagataggaaactaggtgcttgggaagcacttcaaattgatgtgcactacacactccaaccccaaatcttcttttcttaagccattgagtggagagaccagtggtgaagttggaaaggagcaaggtaagagatgaaagaaattggcctcctgaaacaagtggtcttcatagagcaacctctggaaggaggagacctccaagggcctctaaagttctctccagccctgaggctgcacctgcacaaggactctggatgtgtgtatccctgccaccatgtgggagacactgtgggagggtttttacacrggactccagatgtgtgtgtcacctgccaccgtgtgggagacactgtgggaggggttttacacaggacttcggatgtgagtgtcaccggccactgtgtgggagacgctgtgggaggggttttattcatatcagttcttcaaatcctcactctcatgccatgaggtgggtgatggcattgcacttggagaaggggcactgggcactggctggtaaaccgattggcctccaccatgcagctggaatttgacagcatcctgatccaaaaaccagttgtcagatggcaaatgccatgttcttaaccactctgctcttcatgaaaacgtgcacgatgaacactacatcatctttggaaaattaaaaaaaagcttagggggcgttcattaggagggatgttatggacagcagtgggcacagggctgttccttcct

SEQ ID NO: 36864 - DNA, 654 bp, Homo sapiens
aacacacaaggtccaaaacacataccatcagataaataatacatgctgtgcttaccacgattaaaaatgaggtgccatgagtggtatctcaatatattatgacataaatgtcccatatccccttgccagtcttctttacattggaatgtccacacactttgtcagccaagtgagtcagtcaaggtggaaatactaattcgtttgagtggacatgctctactagctcatactgtraaaagaaatccctggtatatattaccaaactctgtatagcattttatagtttacaaatcacttttcataattatcaccactattctgtaagataagtattattgttcttcctcatttacacatgaaggacctaagattcagtttcagtaatttactcaaagcacacagcagagaggtggtaaaccaggacttccacccaggtcctgtgactccagatctcgctacaagagcaggacctctgtggattctgtggaggggagattataggtgcttggaggatgcgtagaaacagcagcctttaaggactgatgagattttagtagaaggagataggagggatggcattccaggcacagggcactgcaaagttcagtatatgaatgcaggaaatatagaacacgccacataagagccatggtt

SEQ ID NO: 36865 - DNA, 540 bp, Homo sapiens
accattcaggacataggcatgggcaaagacttcatgactaaaacaccaaaagcaatggcaacaaaagccaaaatagacaaatgggatctgattaaactgaagagcttctgcacarcaaaagaaactatcatcatagtgaagaggcaacctatagaatgggagaaaatttttgcaatctgtccatctgacaaagggctaatattcaaaatctaggagttcttcatatattacatatttttttgccagttatgtacattgcaaagaataccttccagcttgtgtcttgtccttttaccttgtttatggaatgttaaagcatattaaatttctatgccattaaaatgttaatataatttaaagtataatattttcttttacaggttgtgctttttatgtcctagttaagtaaattcttatacaagttcatttttaagttttaaggtcatgcttttcacatttaaacttttaatatgtctgaaatttgtttttatgtaaccatttattacatcctttaccaattatctctaacagcacatctgt

SEQ ID NO: 36866 - DNA, 661 bp, Homo sapiens
tttataagttttggtgtggacatagttttaaattttttggtatatacctagaaaaggaattgctgtgccacactaaactccatgtttaaatggactccatgtcaaactccaagtttaactttgtaagaaactttcaccaggtcacatatcataaaaggcagttactaaggaaggcawattttcctatttgcctattctggatattttatataaatagaataatctgatatatggccttttatgtctggttcagagacagaaagtaagtcagtggtggctaggggctgggtagaggaggacatgggaaattggtacaagggatcttttggaggagatgaaaattttctaaagagttttaagaatggtgatgggtgcagagtcagtttggtagtatacaagtagcagaaatggtcaccaggaaactcaccacaatttcagaatttctgtttgcatggtaaaaatacaccatcattttaatttctctttcctcataggaggagtcttagacatttccctcttgtatgatatgtgtttatatattacaaatatcagacatatgatagaaaaagactagtaaggaataagtcaaaatattaataaaaattatctcttttagtagttatttttcagtgggatttcaaataacttttccttattgttg

SEQ ID NO: 36867 - DNA, 661 bp, Homo sapiens
tttataagttttggtgtggacatagttttaaattttttggtatatacctagaaaaggaattgctgtgccacactaaactccatgtttaaatggactccatgtcaaactccaagtttaactttgtaagaaactttcaccaggtcacatatcataaaaggcagttactaaggaaggcatattttcctatttgcctattctggayattttatataaatagaataatctgatatatggccttttatgtctggttcagagacagaaagtaagtcagtggtggctaggggctgggtagaggaggacatgggaaattggtacaagggatcttttggaggagatgaaaattttctaaagagttttaagaatggtgatgggtgcagagtcagtttggtagtatacaagtagcagaaatggtcaccaggaaactcaccacaatttcagaatttctgtttgcatggtaaaaatacaccatcattttaatttctctttcctcataggaggagtcttagacatttccctcttgtatgatatgtgtttatatattacaaatatcagacatatgatagaaaaagactagtaaggaataagtcaaaatattaataaaaattatctcttttagtagttatttttcagtgggatttcaaataacttttccttattgttg

SEQ ID NO: 36868 - DNA, 661 bp, Homo sapiens
tttataagttttggtgtggacatagttttaaattttttggtatatacctagaaaaggaattgctgtgccacactaaactccatgtttaaatggactccatgtcaaactccaagtttaactttgtaagaaactttcaccaggtcacatatcataaaaggcagttactaaggaaggcatattttcctatttgcctattctggatattttatataaatagaataatctgatatatggccttttatgtctggttcagagacagaaagtaagtcagtggtggctaggggctgggtagaggaggacatgggaaattggtacaagggatcttttggaggwgatgaaaattttctaaagagttttaagaatggtgatgggtgcagagtcagtttggtagtatacaagtagcagaaatggtcaccaggaaactcaccacaatttcagaatttctgtttgcatggtaaaaatacaccatcattttaatttctctttcctcataggaggagtcttagacatttccctcttgtatgatatgtgtttatatattacaaatatcagacatatgatagaaaaagactagtaaggaataagtcaaaatattaataaaaattatctcttttagtagttatttttcagtgggatttcaaataacttttccttattgttg

SEQ ID NO: 36869 - DNA, 661 bp, Homo sapiens
tttataagttttggtgtggacatagttttaaattttttggtatatacctagaaaaggaattgctgtgccacactaaactccatgtttaaatggactccatgtcaaactccaagtttaactttgtaagaaactttcaccaggtcacatatcataaaaggcagttactaaggaaggcatattttcctatttgcctattctggatattttatataaatagaataatctgatatatggccttttatgtctggttcagagacagaaagtaagtcagtggtggctaggggctgggtagaggaggacatgggaaattggtacaagggatcttttggaggagatgaaaattttctraagagttttaagaatggtgatgggtgcagagtcagtttggtagtatacaagtagcagaaatggtcaccaggaaactcaccacaatttcagaatttctgtttgcatggtaaaaatacaccatcattttaatttctctttcctcataggaggagtcttagacatttccctcttgtatgatatgtgtttatatattacaaatatcagacatatgatagaaaaagactagtaaggaataagtcaaaatattaataaaaattatctcttttagtagttatttttcagtgggatttcaaataacttttccttattgttg

SEQ ID NO: 36870 - DNA, 632 bp, Homo sapiens
ccttttttcattctgtgtagaatgctattgtacaaatacacatgattggacatgatcccatcccctttactccccattctccctcaccctcctgccttttggcctgtacctcccttttttctctcctcacatcttggtggcagccccctgactctgcaggaataacccctcaatgagtgtcaaggggttcttggccacagaatgagaggccaccacaccctctagctttgcctacaccagcttctctcctttttcttttttcttgcaatttgttgaagaaactttgtagcttkccctgtagttttccacattgtggatattgttgattgctttcttttggtggtattaatgtgcttttttagcccctgtatttcctgaaaactgatagaactagagttgtcaccagccacatatagatattgagcatttgaaaagtggctcatgggacttattggaggaactcgcccccaatatttcaacataggttctttctattttccataagtgtcagctggctgagaaataaagagaaagtacaaagagaggaattttacagctgggccaccgggggtggcatcacatattggtgggaccatgatgcccacctgagcctcaaaccagcaagtttttta

SEQ ID NO: 36871 - DNA, 841 bp, Homo sapiens
ggaatctgtaaaagttgggctccaccgcccatggcagaggaaagggtttgctattaagaggcaggaaaagaaatgcaaactccagatgtgtccctatgtccctttggacaaaagctttctcctgtgtgggcctcaggctcccccttgtaaaacgggctgttgggtttggagggctctcctccaactcagaaatattatgggatgctgagtctccagagacccattcagtcagctccttccctcttgccctgaccccagcctggacttggtcccctcccccatcattataatacttttgtcccagttccctaggccaccctggctgcacattagattaacttagggagatttatgaaaatatcaatgtcaagccccagagatccagatttaattgttttggggtggggccagtgccaagtttttcaaagctccccaggtgattctagtgtgcagccaggtctgagaaccactgccctaggccgtccagtacttctgccacaggcaactcaagggtagagggtgggaacccggaccctggttctgacctttccccatggtaaccctgggttagtcacttgccttctctgcgctgcagttatttcaggtatagaagatgagaatgaggggattaaatgagatcatgcatgtaaagcgctggctgggcacagacgcagtgctcattcaccaaatcctgtctctatggtctcctttccaatttggagttaactcggggctcctctccgcaaccctgagagggcagyaggttaaagaagtagacattacacatgggcagactgaggcccagaggagaagtgactcacccaaggtcaggtagctagaa

SEQ ID NO: 36872 - DNA, 841 bp, Homo sapiens
ggaatctgtaaaagttgggctccaccgcccatggcagaggaaagggtttgctattaagaggcaggaaaagaaatgcaaactccagatgtgtccctatgtccctttggacaaaagctttctcctgtgtgggcctcaggctcccccttgtaaaacgggctgttgggtttggagggctctcctccaactcagaaatattatgggatgctgagtctccagagacccattcagtcagctccttccctcttgccctgaccccagcctggacttggtcccctcccccatcattataatacttttgtcccagttccctaggccaccctggctgcacattagattaacttagggagatttatgaaaatatcaatgtcaagccccagagatccagatttaattgttttggggtggggccagtgccaagtttttcaaagctccccaggtgattctagtgtgcagccaggtctgagaaccactgccctaggccgtccagtacttctgccacaggcaactcaagggtagagggtgggaacccggaccctggttctgacctttccccatggtaaccctgggttagtcacttgccttctctgcgctgcagttatttcaggtatagaagatgagaatgaggggattaaatgagatcatgcatgtaaagcgctggctgggcacagacgcagtgctcattcaccaaatcctgtctctatggtctcctttccaatttggagttaactcggggctcctctccgcaaccctgagagggcagcaggttaaagaagtagacattacacatgggcagactgaggcccagaggagaagtgactcacccaagstcaggtagctagaa

SEQ ID NO: 36873 - DNA, 1340 bp, Homo sapiens
cacccatccattcaactgcttatactgaccaacattataagataagttgtgtgctgtgctgtgtgaaataaaaagatggttattagatattgactttgtcctcaaggacctcacaatctattaggataaactctcctgcatgtcaaaaaaagttttcacagaggaaatgatgtcaaaggtgaacttgaaggaggagaaacatcagccaagtgaaaaaagtctgcagaggggatgtgggtaacatgacgcaacatgataggtagacagagcttatcatggagagaaacaaagctagagtgaagcagaggatagtatgaaagagcattgaataccacattatakggcattaggggataaaatcactgaaagaggtaagcagaggcatgacttgttcatcttgaggtttggggatgatctactgtccgctgtgtggaggaggaacggggagaaacagcacactctgatgctcacaagcacacggttcctgactgtgtgagcccagaggcatagtgaacgtccctgtgaggggaaagccataaggaaggcttcagacctggcttctccattgcatcctttcaggtagccaaagcacagaagttcttccaggaatgatgaaagagttatcatcaggaccattgcactttgagaaataatgggttgtgctgggacatttctcgacgtcttcccgagattttgtttccagtccctctgcagaggtcactcagatttgcagttttcagttcacaataagacaggagaagaggactcattcctctcccttctccacaactgcctcataaacagatgccaaatctggaaaatgagtaggatcccagagactctatagccaaaggaagattgaatccagatacacaagacccaacttggtaggggaagccatcataatattccacttctgggactggtcccattgagggattggctagccccttggaaagccgctacaatgaattagatggcatggtagagaaactgcttttgactgtaaaatcgaggagtgactcatccatccacagaatgtcaaggctggatggttctttaggcatcatttaatccagccctcttattttcagaagaaggaaccatgccatcttcatatttaatgcctaaaacacaagatggtgtctggcacatagtaggtacctgataaatattgtaaaaggagtaaactttgagaacgaaatggagcaagagattttctcataactacattgcaaatcctcagtggagctttatatgcctgataaaattaaaattattgcaggtggtgagacttcagcctgttgactttgtgctgctaaaagtcagagaaatgtatg

SEQ ID NO: 36874 - DNA, 1340 bp, Homo sapiens
cacccatccattcaactgcttatactgaccaacattataagataagttgtgtgctgtgctgtgtgaaataaaaagatggttattagatattgactttgtcctcaaggacctcacaatctattaggataaactctcctgcatgtcaaaaaaagttttcacagaggaaatgatgtcaaaggtgaacttgaaggaggagaaacatcagccaagtgaaaaaagtctgcagaggggatgtgggtaacatgacgcaacatgataggtagacagagcttatcatggagagaaacaaagctagagtgaagcagaggatagtatgaaagagcattgaataccacattatagggcattaggggataaaatcactgaaagaggtaagcagaggcatgacttgttcatcttgaggtttggggatgatctactgtccgctgtgtggaggaggaacggggagaaacagcacactctgatgctcacaagcacacggttcctgactgtgtgagcccagaggcatagtgaacgtccctgtgaggggaaagccataaggaaggcttcagacctggcttctccattgcatcctttcaggtagccaaagcacagaagttcttccaggaatgatgaaagagttatcatcaggaccattgcactttgagaaataatgggttgtgctgggacatttctcgacgtcttcccgagattttgtttccagtccctctgcagaggtcactcagatttgcagttttcagttcacaataagacaggagaagaggactcattcctctcccttctccacaactgcctcataaacagatgccaaatctggaaaatgagtaggatcccagagactctatagccaaaggaagattgaatccagatacacaagacccaacttggtaggggaagccatcataatattccacttctgggactggtcccattgagggattggctagccccttggaaagccgctamaatgaattagatggcatggtagagaaactgcttttgactgtaaaatcgaggagtgactcatccatccacagaatgtcaaggctggatggttctttaggcatcatttaatccagccctcttattttcagaagaaggaaccatgccatcttcatatttaatgcctaaaacacaagatggtgtctggcacatagtaggtacctgataaatattgtaaaaggagtaaactttgagaacgaaatggagcaagagattttctcataactacattgcaaatcctcagtggagctttatatgcctgataaaattaaaattattgcaggtggtgagacttcagcctgttgactttgtgctgctaaaagtcagagaaatgtatg

SEQ ID NO: 36875 - DNA, 1340 bp, Homo sapiens
cacccatccattcaactgcttatactgaccaacattataagataagttgtgtgctgtgctgtgtgaaataaaaagatggttattagatattgactttgtcctcaaggacctcacaatctattaggataaactctcctgcatgtcaaaaaaagttttcacagaggaaatgatgtcaaaggtgaacttgaaggaggagaaacatcagccaagtgaaaaaagtctgcagaggggatgtgggtaacatgacgcaacatgataggtagacagagcttatcatggagagaaacaaagctagagtgaagcagaggatagtatgaaagagcattgaataccacattatagggcattaggggataaaatcactgaaagaggtaagcagaggcatgacttgttcatcttgaggtttggggatgatctactgtccgctgtgtggaggaggaacggggagaaacagcacactctgatgctcacaagcacacggttcctgactgtgtgagcccagaggcatagtgaacgtccctgtgaggggaaagccataaggaaggcttcagacctggcttctccattgcatcctttcaggtagccaaagcacagaagttcttccaggaatgatgaaagagttatcatcaggaccattgcactttgagaaataatgggttgtgctgggacatttctcgacgtcttcccgagattttgtttccagtccctctgcagaggtcactcagatttgcagttttcagttcacaataagacaggagaagaggactcattcctctcccttctccacaactgcctcataaacagatgccaaatctggaaaatgagtaggatcccagagactctatagccaaaggaagattgaatccagatacacaagacccaacttggtaggggaagccatcataatattccacttctgggactggtcccattgagggattggctagccccttggaaagccgctacaatgaattagatggcatggtagagaaactgcttttgactgtaaaatcgaggagtgactcatccatccacagaatgtcaaggctggatggttctttaggcatcatttaatccagccctcttattttcagaagaaggaaccatgccatcttcatatttaatgcctaaaacacaagatggtgtytggcacatagtaggtacctgataaatattgtaaaaggagtaaactttgagaacgaaatggagcaagagattttctcataactacattgcaaatcctcagtggagctttatatgcctgataaaattaaaattattgcaggtggtgagacttcagcctgttgactttgtgctgctaaaagtcagagaaatgtatg

SEQ ID NO: 36876 - DNA, 1001 bp, Homo sapiens
ccttccattggaaagttttgctttctccatcgggtgtgtcatttgttggtgtcaagaactccaagggctgcgagactacactgttatgaaatactaatgccccctttgtttttgttggaattatttccaccacctaaggatgattttgcaaagggttgggatgggcagaaaatgagcaatgatctttgaattgggcttaggtgatgagaaggaggaacaacacctgaaagtctggatgggttactgctttctggaaaacggtcatcctttaaaaaacaaaacactgggtttagaaccccatgtctcaaactaactgtataatcttgacaaagtcacttgacgctcttgatctgatatttctgtgatgatttacatttaaattaattgaaatgaattataattaaaattccaatcctcagtcatagtagccacatttcaagtattcaggaaccacatgtagctagtggctactgtaatggacagcacagaacacatttccatcattgcagaaaaatccattgaacagtgctcctgtggatgctgaacttcagttttctcatgtgctaaaatggagataattagtcctatgcctctgagtagcttaaagtggttggcacagtgggtgacacatagaagatgctcaaggaatcacagtccccattcccactttgcgttgggaggtctctgcagagtgtgtgacagctgtccctccctccccagagaccagctgggacctgtcacagcatggaagaggccttagacttttcctttcacccaggcaattaacactgggcaatgtttgttgcttttaaraggtgtcagagtagcaggataatgccttgcaatcaatccttaagatggctagggcattgaattgatctccaaggagccacccaagtcctctcctgtctgcacacctatgagcaaagaagaagtttgtatttttagctggtctcagcattgtctggcagtgggtcttgcttgctggaaattgccgatga

SEQ ID NO: 36877 - DNA, 542 bp, Homo sapiens
aaagaaaatgcacccaagagttaattataatcatctctgtgtggcaaggcagaattatgagggatcttaatttaccttttttacatttgcatgaaatagatatagtttccttcttttataataaatatgctttacttttttttttttttttttttttttgagacagggtatcactctgtctgtcacccagcttggagtgtagtagcacaatctcggctcatgacaacctctgcatcccgggctcaagtgatactcccacctcagcctccagaraagctgggaccacaggcgcgagccaccatgcccagctaattttttgtatttttggtagagacgggggtttcgtcatgttgcctaggctggtcttgaattcctgacctcaagtgacctgcccgactcagcccccaaagtgctgggattacaagcatgagccattgcgccaggcctactctcctagactttggttaacctgaccccaaccagtagcagtatctgggactgtttaatgttacctaactacttcaatatgtcgcattaacaac

SEQ ID NO: 36878 - DNA, 954 bp, Homo sapiens
tgccttgggaatatggtaagattagggagatatatacagagaatcaatatgaaccgcattcactctctaggccacatgtaatttgaatttattccacatttgattaagtcattttcccccaatccctattttcctccaacccttagatggttactacctaaatatttaaccatgggtgaacaaacgaaccatgtgttactgtagattctagttytatctagagtaatatttgtataaaaaagagattgtgcagatttctgggaaacatgttttatacaagatttcattccatttttagaaattactcatccactcaccacacccacactcaggttatccagtgataatggaaattactgatgggttttcaaagctcacattagctcctccctagccgccatctctccctttcatggaaaacattcttcagactgacagagactctgctttgagctgtgtcaagccttaccccagagcagtggttccaagcattttttttttcatggaccagtaaaatctctctagatgttttgggaactaaggtaatattgttatcttttaattcttcaattaaaaatttaaaaggcaaaaacacagctacaagaatttaaacaaaagaataaacccaaaaataaagttacaacctcataacagatttatacatattatatatataaaatgcacttagctccatgaaaaagctcagaattcttacttttttttcatcttgccacagattgccttttgggaaaaactacctttgtgctttgcatagataggggctataaaagaacaagttaaccaaatattcaatttctgctgtttatgtaccatggcatgggcttatgtttacaatggcagcagagtagagaaatgcaaggaagtgagaaaatgtatgaatcagctccataccatcttagccttcagagctatttattattgccagtatggtca

SEQ ID NO: 36879 - DNA, 596 bp, Homo sapiens
aaaaaaaaaaaaaaagcaacagtgttgcagacatctcctggcaccaatcagatagtgcctccctgcagctccaggaccattcacaccccgtctgcagtcactgcctcatgcccttgagactgtacacctccatgctgggagmgcttccatgcccaggggtgctgagaagttgacatctcaggcatacttcaccccagtttcctatgggaactggtgaggcaactctaaggtggaggttgagcccccgtgactcctacaacaaattgttgcctttccttccttgtctcgttctccttccctttactcagggtcagcttcaggggggatgtgaagccccctactctaagctggggattgaggcagaggtggcaccagggatatacgtctctcacaggccctggatactctcagagaacacttctgcatcttacaatcataatatgcacctacatcacacattaaaactaatgtcgatataactgtctataagtcagatatctgcaaataattcaaatatatttagatacagccatcataatttagatacaactatctaagaagtaactgctaattgctcacataagtctttattctct

SEQ ID NO: 36880 - DNA, 834 bp, Homo sapiens
cctctataccccctgtttctgcattctkctttgtttttaccttaaagcacttaccacaaacaaacattcatttctttgttaatttcttcattatgtggctagtttcttctactagactgtattccccatgagggtagcaaacttgtttagtgccatagtgcccaatatgtagagtagtgcctggcacatagcagtattcaacaagcatttgatgaacaaacacaaagattggcctgggcttttacaggttaagagttgagagcctgtggaggtgatggggtgctgagggttgcatgctactagcagatgtagaatcagaaacgaaatttttagaatcagctcatacttcttcctgtttgcatagactaacagttgtggttatctaaaagaaaataggggagaagatacccaagcaattctatgagaatataaatatttcagttcaaaattttagatatttaaaaaaacaaaaagctaaaatctagttaaatatgtcatcttatagaacaaagattattgaatttgttcacttagtctgtatagatcaaagaatgacttaaaaaagagctgtgtactcctaataacatatttattatacattaaaaatcagtatcataatgtagcagataaagagggtatgaatttgtggaaatacgattaaaccaggtatccaagcgagccaatgcccaaagctgtgtttaccatacaattttaattttggaggaggaacttgtagtactgttgagaaaatttgtcaagtcatacctactaatgactgttcttcggtgggggggcttttttgttggatctaattttttagttaaattgatccta

SEQ ID NO: 36881 - DNA, 595 bp, Homo sapiens
agaacagaattcaggtaaaagtccacacagaaataggtatttaatatactgtcaagttggcacctcagttcaggaataaatggatgacttattaaataaatggtatgaacatgagtgacagtccatctggcagctaaatatcataactcttcccatatcctatgtagacaaatgcattccgaatgaattgaaaagctaaatgaaaaacattaaataaaacaaataaatgaawgcataaataataaatattattaaaataaaaggagaatattagtaagaacttaaggttaggaagaccttcttaaggaaaacaagactctcagaagccatctagaaaatgaccaacatatatgattattgtaattactacagtcataattttcttttttcccaaaatacctctaacaactgaaagcaataatttttgtcagataaaatgtagatgccaccaaaagaaagatgattgaataagaagttaatatcaattaatctaaaagaaaaagataaataactgaattgaaaactgggcagaaagatatgaacaatcaaataacagaaaaagaaatgcaaatggccaataagcatgtgagaaaaa

SEQ ID NO: 36882 - DNA, 647 bp, Homo sapiens
tagcaagtctaaaagagttctctaaaagtgtaaagaaaaagcctaagtgataggaaaatgttgtgtcatcatcttattggctatattttttctttacttgtgaaacataaaatataatctattttacaatcacttgctacttcaattctattgaatatagcttgtaatttcttcattgtttctgtgcattttcaaactttctatatgattttaaactaattaaaaagatataagaatatgacaaaggaatcctgcatatttcttttttaattaattaattwatttatttatttattttgagacagagccttgctttgttgcccaagctagagtgcagtggcacaatgtcggctcactgcaacctccacctcccaggtttaagcaattcttctgcctcagcctcccgagtagctgagattacaggtgtccaccaccatgcctggttaattttttttttttttgagatggggtctcattctcacccacgctggagtgcagtggcgcaatctcagctcattgcaagctccgcctcccaggttcacgctgttctcctgcctcagcctcccaagtagctgggactacaggcgcctgctaccatgcccggctaatttttttgtatttttagtagagaccgggtttcaccgtgt

SEQ ID NO: 36883 - DNA, 560 bp, Homo sapiens
agacttgccagggattcttgttaacaacatagatttctggcctctatgaactggggagtacagggcctggtggagggtagggagggatcagctttgtgtgtggactgtgattctgggctcttccatatggacatttcctaccagttgcaagttcaccataaccttcaggaacctgtgtatttaatgaactgttcaggtgagtcttatggtcaggccagctggggtgacgctaggtctgccaggcgagaccattagaagcctgtgcacctgcactgcggttcatccacagaattgctcttcccaaggtactcttggactgatgccatcgccctgtgatgccattgtccttgttgtgtttactgtgcacacttccccggccaccttatttaatattgccttctgccaaatatgtrcaaatactgtcatacccacagttcttccccgtctgtgttgtttgctttgtttacattacatagcacttttcaggaataaaattaatttatttatctagtctctatctataccactagattgaaatcctcctgagggaaggattttta

SEQ ID NO: 36884 - DNA, 526 bp, Homo sapiens
tgttaatagggtccgtggatcggtctctctttctctcctctctctctagctctctatctctctccctttccacctcgtgtttcattcctttgaaacaaatccagggagcagatggcctcagaagggtatctaatmcatgcctggcctcgaggcacgtactataagctgtgataccgtgctaaggtgttattatagagacaaaaatatctcagactgcaggatctagccatcctattcttaaagttccctagggaaagatgttgtacaatattctttgataacctactacaaatgctaaccactttaagtacaatataagaaccttctgatcctaggttttatttgtttctatttaaactcattcagggtcaggctacccagagggcagttgaacacctgtccggtggcttatgggaatgccttgcacgatgtgcacttccctccaccaggatcagtgtgtctgctgacactggggaccatgcctgagacataggtacaattgggctgtgccagggcagctcagaga

SEQ ID NO: 36885 - DNA, 526 bp, Homo sapiens
tgttaatagggtccgtggatcggtctctctttctctcctctctctctagctctctatctctctccctttccacctcgtgtttcattcctttgaaacaaatccagggagcagatggcctcagaagggtatctaatccatgcctggcctcgaggcacgtactataagctgtgataccgtgstaaggtgttattatagagacaaaaatatctcagactgcaggatctagccatcctattcttaaagttccctagggaaagatgttgtacaatattctttgataacctactacaaatgctaaccactttaagtacaatataagaaccttctgatcctaggttttatttgtttctatttaaactcattcagggtcaggctacccagagggcagttgaacacctgtccggtggcttatgggaatgccttgcacgatgtgcacttccctccaccaggatcagtgtgtctgctgacactggggaccatgcctgagacataggtacaattgggctgtgccagggcagctcagaga

SEQ ID NO: 36886 - DNA, 757 bp, Homo sapiens
aggctcgtcccttgtccactacagaccccagatggcctgaatcagatgctcttggcagggaagagcgtgagcaaaatggcaaccaggcctgagagggtcccccagacacagccctgagttctgtctctctggaaaggccgatttgtgcagcaagmtcttgggaggtagataacccagtctgacaagcgaccttgaaagaattacagcaataatattttcagttggttgggccaatcttggccaatttctccagagcgttaggtgcgaacgtcagtctgggactccacattgctcatgcatgtgtttgccgtgtcccctttgctgttttaagtgtttatcctgtggcttgtacaagcgacatcgctctcttccctggtgagagccagtctccaggcctccctcccccacactctgctagaagtgcagcgaagcaatgagaacaaggatcttgttccaagcccactgagcaagtgctagcatttagtgaccttctgcaccagtaattcggtccttcggggattgaaattgattttcctcctttctgtgtgtgagcacaacccaagtgcacagctctgttatgaatgctgatctcaggtgtgtatttaaaggtgaacagcaacactcttgaagacagaaatgagaaaagttgtttgcatagcctctgtgaatggacgggatgtctgctccaaagactggctttgaatttctccaagcccttttgtgtgtatgtgcatacatgtttgtgtgtgtgtgtgtg

SEQ ID NO: 36887 - DNA, 757 bp, Homo sapiens
aggctcgtcccttgtccactacagaccccagatggcctgaatcagatgctcttggcagggaagagcgtgagcaaaatggcaaccaggcctgagagggtcccccagacacagccctgagttctgtctctctggaaaggccgatttgtgcagcaagctcttgggaggtagataacccagtctgacaagcgaccttgaaagaattacagcaataatattttcagttggttgggccaatcttggccaatttctccagagcgttaggtgcgaacgtcagtctgggactccacattgctcatgcatgtgwttgccgtgtcccctttgctgttttaagtgtttatcctgtggcttgtacaagcgacatcgctctcttccctggtgagagccagtctccaggcctccctcccccacactctgctagaagtgcagcgaagcaatgagaacaaggatcttgttccaagcccactgagcaagtgctagcatttagtgaccttctgcaccagtaattcggtccttcggggattgaaattgattttcctcctttctgtgtgtgagcacaacccaagtgcacagctctgttatgaatgctgatctcaggtgtgtatttaaaggtgaacagcaacactcttgaagacagaaatgagaaaagttgtttgcatagcctctgtgaatggacgggatgtctgctccaaagactggctttgaatttctccaagcccttttgtgtgtatgtgcatacatgtttgtgtgtgtgtgtgtg

SEQ ID NO: 36888 - DNA, 461 bp, Homo sapiens
atggtataggagggagaaatgaagaagactgattggccaaggcaagtttgagttaacagaaagccttggttactatattctgaaaaacttgtggtgtgaacttctgtattgacagakgctctaatatgaagaaagggatggtctccatagcaagcaggcatcccctgaagctttcgaaacttcaagtatttgggaatgctattgcctataccttctttgtcaacctccaagtcattcctcagtatacattaaggactcggctacgagttctctgtgtatgaaccatccgacactagcttttaagttcctgagctcttatggccattaacagtcctctacattcttctgtacccatcatttccatgtattcttggacatcatggacatcatggtacttttctgccttgcaaacattgattcctttatttgcctgtgatatgtgtgcgcacagacacacacac

SEQ ID NO: 36889 - DNA, 461 bp, Homo sapiens
atggtataggagggagaaatgaagaagactgattggccaaggcaagtttgagttaacagaaagccttggttactatattctgaaaaacttgtggtgtgaacttctgtattgacagaggctctaatatgaagaaagggatggtctccatagcaagcaggcatcccctgaagctttcgaaacttcaagtatttgggaatgctattgcctataccttctttgtcaacctccaagtcattcctcagtatacattaaggactcggctacgagttctctgtktatgaaccatccgacactagcttttaagttcctgagctcttatggccattaacagtcctctacattcttctgtacccatcatttccatgtattcttggacatcatggacatcatggtacttttctgccttgcaaacattgattcctttatttgcctgtgatatgtgtgcgcacagacacacacac

SEQ ID NO: 36890 - DNA, 836 bp, Homo sapiens
ttgttcttggacactgctcacagctattgcttgctctctcttcctctcttggttctaattctttcctttttatgagtaggctttattgtcacccagagtctctccacatggcagtaatgtattttccagcagcttcagacttgccatcattgccgtctatcagaactgtttgggttgtgagtgttayaaaattcattgtaaattagcttaaacaaacaaaataagagaacttactagcctgtataatcaaagaggtgtaatctaggatagggttggcttgtaggggagcttaagctaagagctccagcaatgtcaaccacttgggcttatttcactccctccattaggagcctgcctgctgctgtgtttgttggcttcattctcagaacagtccctcatgctaccttccagcggccctaggttcttctcatccttgatgctcttagtccagggaaaaagagtttttctctctcttaacaatcccatatttcaatggctctcattgggacgcagggctatgccaaacagtctctgtggtcacgggaacatgactaatcagatgcgggttacatgcctaactatgggctcaaagagaattcacctccactcaaagtagaggaactgagaatgagaggaaggtagctccctcccctttcctgcacaatgggtgtagtgttatcaggggtgaaatacatgttagagagtaaaattaacatacacctaccacaattttcttacatgtagctcataaccttagaaagagacatacctgcttcttcccagagtccatatcaatgctccagaaggctgtagctatgttggggtcatgtgtcttc

SEQ ID NO: 36891 - DNA, 836 bp, Homo sapiens
ttgttcttggacactgctcacagctattgcttgctctctcttcctctcttggttctaattctttcctttttatgagtaggctttattgtcacccagagtctctccacatggcagtaatgtattttccagcagcttcagacttgccatcattgccgtctatcagaactgtttgggttgtgagtgttacaaaattcattgtaaattagcttaaacaaacaaaataagagaacttactagcctgtataatcaaagaggtgtaatctaggatagggttggcttgtaggggagcttaagctaagagctccagcaatgtcaacsacttgggcttatttcactccctccattaggagcctgcctgctgctgtgtttgttggcttcattctcagaacagtccctcatgctaccttccagcggccctaggttcttctcatccttgatgctcttagtccagggaaaaagagtttttctctctcttaacaatcccatatttcaatggctctcattgggacgcagggctatgccaaacagtctctgtggtcacgggaacatgactaatcagatgcgggttacatgcctaactatgggctcaaagagaattcacctccactcaaagtagaggaactgagaatgagaggaaggtagctccctcccctttcctgcacaatgggtgtagtgttatcaggggtgaaatacatgttagagagtaaaattaacatacacctaccacaattttcttacatgtagctcataaccttagaaagagacatacctgcttcttcccagagtccatatcaatgctccagaaggctgtagctatgttggggtcatgtgtcttc

SEQ ID NO: 36892 - DNA, 528 bp, Homo sapiens
gagacctgcctgggcaacaaagtgagaccctgtttctatttaraaaaattttttttaattgggctgggctcgatggctcacgcctgtaatcccagtaatttgggaggccgaggtgggcagatcacctgaggtcaggagttcaagaccaccctggccaacatggtaaaaccccgtctctgctaaaaatacaaaaattagcagggtgcggtagtgcgcacctataattccagctacttgggaggctgaggcaggagaatcacttgaacccgggagacaaaggttgcagtgagcccagattgtgccattgcactccagcctgggggacagaccgagactccaaaaaaaaaaaagaacctctgaacctctgatgctcgtggaaatatgatgaaagaggaggagattgaagatgaaggactcacggagcatgcagctgtcagtgctgtgctgtctatgtggagctgcctgccccaaccagcatctaagtgtatccaggatgcagattctctgagcagcaccatggtgctttat

SEQ ID NO: 36893 - DNA, 528 bp, Homo sapiens
gagacctgcctgggcaacaaagtgagaccctgtttctatttaaaaaaatttttttyaattgggctgggctcgatggctcacgcctgtaatcccagtaatttgggaggccgaggtgggcagatcacctgaggtcaggagttcaagaccaccctggccaacatggtaaaaccccgtctctgctaaaaatacaaaaattagcagggtgcggtagtgcgcacctataattccagctacttgggaggctgaggcaggagaatcacttgaacccgggagacaaaggttgcagtgagcccagattgtgccattgcactccagcctgggggacagaccgagactccaaaaaaaaaaaagaacctctgaacctctgatgctcgtggaaatatgatgaaagaggaggagattgaagatgaaggactcacggagcatgcagctgtcagtgctgtgctgtctatgtggagctgcctgccccaaccagcatctaagtgtatccaggatgcagattctctgagcagcaccatggtgctttat

SEQ ID NO: 36894 - DNA, 467 bp, Homo sapiens
tgttgcccaggcaggtcttgaactcatgagctcaagcaatccacccaccttgcctcccaaagcgccagtattacaggcgtgagccaccatccctggctagaggcagcattttgatgactcaggtcaccattgtcatctacatcgtttcagtagcccccgttttaaaagctcattatatctttctatgatacccactgctgttactttgtaatgttactttgtaatacccatcgttgcatttgctttgtggtacaagaagagccttgatctgactgtgtaacttgtggcayacccaaaggctgtaaaagctgttttggtaacccattgtgacattagtagaggttcctgcctcacatgggtaagcaaatggatggctgtgtagatatcccttagcatattcattggctcctgtcactgtagggggaggccctttgaagttgatttgccagttctgataatggccttcc

SEQ ID NO: 36895 - DNA, 867 bp, Homo sapiens
actgctgtgtcatttgcacactgtaagagccatagaaaatgttttatrtgagatgatttataaaatattaaatggaaatgtgattaacttacacacagggagagatgagctaattaaggcaggaatgatagagcttacattggatgatagaattaaaactgcacttcatctgcaactttcctaacttattctctggtgctgtttctgccatagatgcttctacagatctgttttatgctgtgtctcctaccctttaagatttaatgcaagtgctgtctctctctttcattgcaataatcatgagtctttctttcttcttcagactgaggctgccaagttttttatggtgtcacttgcatgttgctggtgtaatgggccctatgttcacatctgatctcctttgttgaagggaacaaagctcttctcccttgggtccagttctcatatggagggacttctgttagcagagtacttttagaagagtgacttagatgattgatgagcttgggacaaaacctcagtgggccagactaacttcaggaagcacatgttgtggtctgttcttccaagccttctgttttgtagaaactggtcatttcactctttaagagttctctgtgctcttctaggttgcctgtgattggataaccctaatttgggtgtgcaacattaaaagtaccactgttgtcatgcaacttagtcacattctccaaaagccctattagtaagaagttggcacttgatctcattcttcctattcctcaatctctagtggaatgaagaaaggggctattagatatgatccttctaatgttctagttcaaggaccatgagagataaacaaagagtgaaactttggcactaaaa

SEQ ID NO: 36896 - DNA, 613 bp, Homo sapiens
tttttttgagacggagtcttgctctgtcgcccaggctggagtgtaatggcgtgatctcggctcactgcagcctctgcctcccaggttcaagcaattctcctgcttcagcctcctgggtagctgggactacaggtgcccgccactacacctggctaattttttgtgtgtatttttaggagaaatgaggtttcaccatgttggccaggatggtcttgatctcctgacctcgtgatccgcccgcctcggcctccccaagtgctgkgattacaggcatgagccaccgtgcctggccattttgtacattttttaaagataacacgtgtgggtgcaaaaaaataaagctaacatttattgagccagcaaccttgctgtattatctctcttactcttcacaatacctctctgagttagatactattagatttcaccatattataagtgaggaaacaaagacataagatcagctaaatgatgcctctcttctgcttcttctcttttccttctcccctacaccatcctcctaccaagcagaaaaaacacagctctagagtaaccttctcagatctccacaaaccaggctcactgtggccctgtgaaaacagtccccaggcag

SEQ ID NO: 36897 - DNA, 1218 bp, Homo sapiens
agccatttgttagagcaatcaccatagagctgcagggcaaggaatttyatccttataattttattgtcattttgggggtgtccattattccattataccatttacaatacaataaatttaaataatatttaaaatatggcacttcattgcactgctttcttactttttcagagtgacaaggttcaacccaacaacctgacttaatgaaagtgaaaaacattagccagtgaaaatatagaaggaaaaacatcattgtgatggtaacagagctctggccacaggtgaggcatgtgccagttttttcataactatcaaacagtgctacctcctgtaaacaaacattgaaggttttagccctggtcaaagttcccaaagatctctcaatgcctctgataagtgtgactttaactcaaggaaacactgatctctcttcatgtctcaaaaatctggatacagagctgtgggtcacatttggagatgctcaattttgttctccactactgaattctcgagtgaactattctgtacaaatctactttaattatgtattaatttcaatattattacatgcagtacacaactgctactcattaaaaattaatctagattctattggttttatttcgtattcattataaggcaacatccacttttttaaaaaagccctccagataaatgtgttgctctacatagccaagtagtgacttgccaaaaatagaaataccttaataagaattccgcctgcattgtcctttccctcctctctttagcagcttcattcacaatcatcaataatgaactggaggaaagcagaactgacagggactggttaagcacaacatttgagaatccctctgttctaagtttttgttgaagttggaacaccaaagtcctattctcattttgccattaaaaggaattattttatgttcttgcctttaacagccctgctctggagattccacaacaggaaagcttttgtttagacattgacaagaagtcccagtgctttatttctccacatctattgcagtacttttccatgcagataagtgcagaaaaaaatacaacaatgcttagagtcatgcaccacataacaacattttgattaatgacagaccacatatacgatggtagtcccataagactatgatggagctaaaaaattcctattgcctagtgatgtcttagacacatttttatgtcctacgttgtacg

SEQ ID NO: 36898 - DNA, 1218 bp, Homo sapiens
agccatttgttagagcaatcaccatagagctgcagggcaaggaattttatccttataattttattgtcattttgggggtgtccattattccattataccatttacaatacaataaatttaaataatatttaaaatatggcacttcattgcactgctttcttactttttcagagtgacaaggttcaacccaacaacctgacttaatgaaagtgaaaaacattagccagtgaaaatatagaaggaaaaacatcattgtgatggtaacagagctctggccacaggtgaggcatgtgccagttttttcataactatcaaacagtgctacctcctgtaaacaaacattgaaggttttagccctggtcaaagttcccaaagatctctcaatgcctctgataagtgtractttaactcaaggaaacactgatctctcttcatgtctcaaaaatctggatacagagctgtgggtcacatttggagatgctcaattttgttctccactactgaattctcgagtgaactattctgtacaaatctactttaattatgtattaatttcaatattattacatgcagtacacaactgctactcattaaaaattaatctagattctattggttttatttcgtattcattataaggcaacatccacttttttaaaaaagccctccagataaatgtgttgctctacatagccaagtagtgacttgccaaaaatagaaataccttaataagaattccgcctgcattgtcctttccctcctctctttagcagcttcattcacaatcatcaataatgaactggaggaaagcagaactgacagggactggttaagcacaacatttgagaatccctctgttctaagtttttgttgaagttggaacaccaaagtcctattctcattttgccattaaaaggaattattttatgttcttgcctttaacagccctgctctggagattccacaacaggaaagcttttgtttagacattgacaagaagtcccagtgctttatttctccacatctattgcagtacttttccatgcagataagtgcagaaaaaaatacaacaatgcttagagtcatgcaccacataacaacattttgattaatgacagaccacatatacgatggtagtcccataagactatgatggagctaaaaaattcctattgcctagtgatgtcttagacacatttttatgtcctacgttgtacg

SEQ ID NO: 36899 - DNA, 1218 bp, Homo sapiens
agccatttgttagagcaatcaccatagagctgcagggcaaggaattttatccttataattttattgtcattttgggggtgtccattattccattataccatttacaatacaataaatttaaataatatttaaaatatggcacttcattgcactgctttcttactttttcagagtgacaaggttcaacccaacaacctgacttaatgaaagtgaaaaacattagccagtgaaaatatagaaggaaaaacatcattgtgatggtaacagagctctggccacaggtgaggcatgtgccagttttttcataactatcaaacagtgctacctcctgtaaacaaacattgaaggttttagccctggtcaaagttcccaaagatctctcaatgcctctgataagtgtgactttaactcaaggaaacactgatctctcttcatgtctcaaaaatctggatacagagctgtgggtcacatttggagatgctcaattttgttctccactactgaattctcgagtgaactattctgtacaaatctactttaattatgtattaatttcaatattattacatgcagtacacaastgctactcattaaaaattaatctagattctattggttttatttcgtattcattataaggcaacatccacttttttaaaaaagccctccagataaatgtgttgctctacatagccaagtagtgacttgccaaaaatagaaataccttaataagaattccgcctgcattgtcctttccctcctctctttagcagcttcattcacaatcatcaataatgaactggaggaaagcagaactgacagggactggttaagcacaacatttgagaatccctctgttctaagtttttgttgaagttggaacaccaaagtcctattctcattttgccattaaaaggaattattttatgttcttgcctttaacagccctgctctggagattccacaacaggaaagcttttgtttagacattgacaagaagtcccagtgctttatttctccacatctattgcagtacttttccatgcagataagtgcagaaaaaaatacaacaatgcttagagtcatgcaccacataacaacattttgattaatgacagaccacatatacgatggtagtcccataagactatgatggagctaaaaaattcctattgcctagtgatgtcttagacacatttttatgtcctacgttgtacg

SEQ ID NO: 36900 - DNA, 1218 bp, Homo sapiens
agccatttgttagagcaatcaccatagagctgcagggcaaggaattttatccttataattttattgtcattttgggggtgtccattattccattataccatttacaatacaataaatttaaataatatttaaaatatggcacttcattgcactgctttcttactttttcagagtgacaaggttcaacccaacaacctgacttaatgaaagtgaaaaacattagccagtgaaaatatagaaggaaaaacatcattgtgatggtaacagagctctggccacaggtgaggcatgtgccagttttttcataactatcaaacagtgctacctcctgtaaacaaacattgaaggttttagccctggtcaaagttcccaaagatctctcaatgcctctgataagtgtgactttaactcaaggaaacactgatctctcttcatgtctcaaaaatctggatacagagctgtgggtcacatttggagatgctcaattttgttctccactactgaattctcgagtgaactattctgtacaaatctactttaattatgtattaatttcaatattattacatgcagtacacaactgctactcattaaaaattaatctagattctattggttttatttcgtattcattataaggcaacatccacttttttaaaaaagccctccagataaatgtgttgctctacatagccaagtagtgacttgccaaaaatagaaataccttaataagaattccgcctgcattgtcctttccctcctctctttagcagcttcattcacaatcatcaataatgaactggaggaaagcagaactgacagggactggttaagcacaacatttgagaatccctctgttctaagtttttgttgaagttggaacaccaaagtcctattctcattttgccattaaaaggaattattttatgttcttgcctttaacagccctgctctggagattccacaacaggaaagcttttgtttagacattgacaagaagtcccagtgctttatttctccacatctattrcagtacttttccatgcagataagtgcagaaaaaaatacaacaatgcttagagtcatgcaccacataacaacattttgattaatgacagaccacatatacgatggtagtcccataagactatgatggagctaaaaaattcctattgcctagtgatgtcttagacacatttttatgtcctacgttgtacg

SEQ ID NO: 36901 - DNA, 1218 bp, Homo sapiens
agccatttgttagagcaatcaccatagagctgcagggcaaggaattttatccttataattttattgtcattttgggggtgtccattattccattataccatttacaatacaataaatttaaataatatttaaaatatggcacttcattgcactgctttcttactttttcagagtgacaaggttcaacccaacaacctgacttaatgaaagtgaaaaacattagccagtgaaaatatagaaggaaaaacatcattgtgatggtaacagagctctggccacaggtgaggcatgtgccagttttttcataactatcaaacagtgctacctcctgtaaacaaacattgaaggttttagccctggtcaaagttcccaaagatctctcaatgcctctgataagtgtgactttaactcaaggaaacactgatctctcttcatgtctcaaaaatctggatacagagctgtgggtcacatttggagatgctcaattttgttctccactactgaattctcgagtgaactattctgtacaaatctactttaattatgtattaatttcaatattattacatgcagtacacaactgctactcattaaaaattaatctagattctattggttttatttcgtattcattataaggcaacatccacttttttaaaaaagccctccagataaatgtgttgctctacatagccaagtagtgacttgccaaaaatagaaataccttaataagaattccgcctgcattgtcctttccctcctctctttagcagcttcattcacaatcatcaataatgaactggaggaaagcagaactgacagggactggttaagcacaacatttgagaatccctctgttctaagtttttgttgaagttggaacaccaaagtcctattctcattttgccattaaaaggaattattttatgttcttgcctttaacagccctgctctggagattccacaacaggaaagcttttgtttagacattgacaagaagtcccagtgctttatttctccacatctattgcagtacttttccatgcagataagtgcagaaaaaaatacaacaatgcttagagtcatgcaccrcataacaacattttgattaatgacagaccacatatacgatggtagtcccataagactatgatggagctaaaaaattcctattgcctagtgatgtcttagacacatttttatgtcctacgttgtacg

SEQ ID NO: 36902 - DNA, 1218 bp, Homo sapiens
agccatttgttagagcaatcaccatagagctgcagggcaaggaattttatccttataattttattgtcattttgggggtgtccattattccattataccatttacaatacaataaatttaaataatatttaaaatatggcacttcattgcactgctttcttactttttcagagtgacaaggttcaacccaacaacctgacttaatgaaagtgaaaaacattagccagtgaaaatatagaaggaaaaacatcattgtgatggtaacagagctctggccacaggtgaggcatgtgccagttttttcataactatcaaacagtgctacctcctgtaaacaaacattgaaggttttagccctggtcaaagttcccaaagatctctcaatgcctctgataagtgtgactttaactcaaggaaacactgatctctcttcatgtctcaaaaatctggatacagagctgtgggtcacatttggagatgctcaattttgttctccactactgaattctcgagtgaactattctgtacaaatctactttaattatgtattaatttcaatattattacatgcagtacacaactgctactcattaaaaattaatctagattctattggttttatttcgtattcattataaggcaacatccacttttttaaaaaagccctccagataaatgtgttgctctacatagccaagtagtgacttgccaaaaatagaaataccttaataagaattccgcctgcattgtcctttccctcctctctttagcagcttcattcacaatcatcaataatgaactggaggaaagcagaactgacagggactggttaagcacaacatttgagaatccctctgttctaagtttttgttgaagttggaacaccaaagtcctattctcattttgccattaaaaggaattattttatgttcttgcctttaacagccctgctctggagattccacaacaggaaagcttttgtttagacattgacaagaagtcccagtgctttatttctccacatctattgcagtacttttccatgcagataagtgcagaaaaaaatacaacaatgcttagagtcatgcaccacataacaacattttgattaatgacagaccacatatacgatggtagtcccataagactatgatggagctaaaaaattcctattgcctagtgatgtcttagmcacatttttatgtcctacgttgtacg

SEQ ID NO: 36903 - DNA, 521 bp, Homo sapiens
gcattatacatatcctgctgcattctagttctttacttgtaaaattggaatgaaaatagacgcttaaactctatggttgttgcaaggattaaatgagttaacatatgtaaaacatttaaaaccagtgctttggaggatggtaagtgcacagaaattgttagttattcatgtcatgcccttcaggagcactgggctggaaaaagttgagaacaaattgtgtggtgtccctcccacaataaagctgttaagtgaggttacagctatcatggaacaaggcacattagggcacctacaaatccatgtgaggctttagtgctgcacttggcagtatttttaatgcgtccttggtcagtcccttgtttttttccccatattcgatattctgtatctttgcccactcctcaaaccatgtatcccactccamccaaacacttcccagttggaaaaagatatcctctactctgcatctttctcagactgccaccctgtctttcccttcttcattactgataagcacctca

SEQ ID NO: 36904 - DNA, 545 bp, Homo sapiens
gattcaccaagaagatggatccaggaagtgacttatgacaagaatactttctttgtggtttgagagaggttccagtaggctctaaagtcaatggggatgccatcctgaggcatgagaaccacaatggtcacatgggcaggggaagcttcactcaagaaggctgcagctgcacagagcaatgccaaggcttcatctcttagtattgcttcccctgggcttcaacctcaggactggtgcatagagcagggtactgagggataatgccaagatatcagagagtgraagagaaattctataccaccagactggaagccaaaaactgttttgtttacaaataacaaaaataaatctgcatttgcttcagttgagaagggaaagatcttgaaaaacacagggtacaaatgcaatgagacatcagaatggaactgaaatgttaatccagctccctctctcttcatctttcgtctctactcattttgacctgattgttcttttctcctacctttgcagacctgcctccttttattttctgattcatgtaacta

SEQ ID NO: 36905 - DNA, 545 bp, Homo sapiens
gattcaccaagaagatggatccaggaagtgacttatgacaagaatactttctttgtggtttgagagaggttccagtaggctctaaagtcaatggggatgccatcctgaggcatgagaaccacaatggtcacatgggcaggggaagcttcactcaagaaggctgcagctgcacagagcaatgccaaggcttcatctcttagtattgcttcccctgggcttcaacctcaggactggtgcatagagcagggtactgagggataatgccaagatatcagagagtggaagagaaattctataccaccagactggaagccaaaaactsttttgtttacaaataacaaaaataaatctgcatttgcttcagttgagaagggaaagatcttgaaaaacacagggtacaaatgcaatgagacatcagaatggaactgaaatgttaatccagctccctctctcttcatctttcgtctctactcattttgacctgattgttcttttctcctacctttgcagacctgcctccttttattttctgattcatgtaacta

SEQ ID NO: 36906 - DNA, 587 bp, Homo sapiens
taaatacctgatcctagcatcaaaattccagatgtttcacttcaaaattttcactggtctacttctgccagaccctcatttgtcagggacattcagtgtgatatgattaattttstgatagcactttaattaacttcatgaaatcttgtaccatgtgcaagatttgcaacctcaatttgcaatcaagttcactaccagatatttacactttactatctagtagagactcatctagaaatattatgacagatgtatagaaatagctactactttttaagagggaaggatgtttgaatgggtactaataagtgggcaattcattagtaaatatttttgcattaggaagacgcttgtttccatataaaaccttttaagtacaggattttagataacaaagtttcagataatgaggactttctaatttattcatttttaccctatatgttatatttcagttaggaagttagaaaaataaataaaaatgggatatgtgtaccgagcacctaccctatatcaggtgctatgttagaagcatttcgcatgctatttcttttaatccccccatcaggtctatagaataaggtctt

SEQ ID NO: 36907 - DNA, 543 bp, Homo sapiens
ggaagtgccatcatgtcagttcartacctagttcttaagagacctaagaacttccagttttactctgttggagccttgagctactctgaaaagaagttgaactacccttctagaaagtgagactttgccatcctccaaagatcccagcctctccagctgaggcaccagacatgggatcaagatatcttggatcctccaaccccagtggagtcacccccacctattacctcgcagagcagagataagccaaccctgctgagccctgcttaaattcctgtcacacagactaatgagcaagaaaatgtttttcctttaagccatcaacttggggatggctattgtatgataataaacatcagagatttttaaaaacaccatgggaatacctgtaggaaagagagactttttggagtaatctgagagatattaaaaaaataattagaatttgagttgaaccttaaagacatgagtgggccctgagcaaaaagtttccataatgccgcctctacccctactgagagcacctgtcctatcttagaagca

SEQ ID NO: 36908 - DNA, 543 bp, Homo sapiens
ggaagtgccatcatgtcagttcagtacctagttcttaagagacctaagaacttccagttttactctgttggagccttgagctactctgaaaagaagttgaactacccttctagaaagtgagactttgccatcctccaaagatcccagcctctccagctgaggcaccagacatgggatcaagatatcttggatcctccaaccccagtggagtcacccccacctattacctcgcagagcagagataagccaaccctgctgagccctgcttaaattcctgtcacacagactaatgagcaagaaaatgtttttcctttaagccatcaacttggggatggctattgtatgataataaacatcagagatttttaaaaacaccatgggaatacctgtaggaaagagagactttttggagtaatctgagagatattaaaaaaataattagartttgagttgaaccttaaagacatgagtgggccctgagcaaaaagtttccataatgccgcctctacccctactgagagcacctgtcctatcttagaagca

SEQ ID NO: 36909 - DNA, 543 bp, Homo sapiens
ggaagtgccatcatgtcagttcagtacctagttcttaagagacctaagaacttccagttttactctgttggagccttgagctactctgaaaagaagttgaactacccttctagaaagtgagactttgccatcctccaaagatcccagcctctccagctgaggcaccagacatgggatcaagatatcttggatcctccaaccccagtggagtcacccccacctattacctcgcagagcagagataagccaaccctgctgagccctgcttaaattcctgtcacacagactaatgagcaagaaaatgtttttcctttaagccatcaacttggggatggctattgtatgataataaacatcagagatttttaaaaacaccatgggaatacctgtaggaaagagagactttttggagtaatctgagagatattaaaaaaataattagaatttgagttgaaccttaaagacatgagtgggccctgagcaaaaagtttccatratgccgcctctacccctactgagagcacctgtcctatcttagaagca

SEQ ID NO: 36910 - DNA, 543 bp, Homo sapiens
ggaagtgccatcatgtcagttcagtacctagttcttaagagacctaagaacttccagttttactctgttggagccttgagctactctgaaaagaagttgaactacccttctagaaagtgagactttgccatcctccaaagatcccagcctctccagctgaggcaccagacatgggatcaagatatcttggatcctccaaccccagtggagtcacccccacctattacctcgcagagcagagataagccaaccctgctgagccctgcttaaattcctgtcacacagactaatgagcaagaaaatgtttttcctttaagccatcaacttggggatggctattgtatgataataaacatcagagatttttaaaaacaccatgggaatacctgtaggaaagagagactttttggagtaatctgagagatattaaaaaaataattagaatttgagttgaaccttaaagacatgagtgggccctgagcaaaaagtttccataatsccgcctctacccctactgagagcacctgtcctatcttagaagca

SEQ ID NO: 36911 - DNA, 2364 bp, Homo sapiens
tcctcattgtcagtcccttcttgtcggggggtcatctcttttctggcatcgatattaaccgtctgtatgtcttctcccttttggctaacaatatcatgcacctccccactggaaagaacctggacagtggtttcggtaatcatgaaggcaatattgtcagtggctgcattttcttcagtgggagaacttgaacttgattctccatcctcattagggttcacgttagcatgccttgcctccttgggtcttagaacaacttggccaaaatctgtcgtgataacctcttgatcttctgttttaaaatcatgcacgcttgattctgttagtctagtgtgagaggaaacgtgacacttatccgtattttgcttttccatctcctttgtctttccgtaattcagcgtctggttctcggtgtcaggtatagagtattgcaggcctgagattttagaccctttgtttatttcatcttctaatggactaatgccagagaaaccgaaactggccttaggcacagtttcctgggaatagtttctactgtctctgagtaaactcatattggatatggaattttccttcattatgatctcagttttatattctgatgttcttgatgcatcagaaatactattctccattcctctttcccacttaggagggtcactaggtcttacagcccctgtggtaacctgagagggagaacggaggagggaaaccacacacgttaatcagcaatggatctgcagaggcaggtacttaatgtgcatggtattggtcggaacccagatctggtgaactcaccttttggaattccatttgggggccattttcatattcaacatcagatttccgtacatcttcatggaaaaattccaaattctggtagaatagtgtaggacatgttactccacaaaaccacatccccccaaaaaagtggactataactaaatcgttcctttaattacatttctaagacatgcgggccacgcatatttcttacacaccaatccaaagcctacagctgtttaccttggattgctttgttctccaactgccaaaaatgccctgtgtttgcacaagatgaaaatctcaattagcaaaagatttcaagaatttaaaattttgtaggggagtggtgaagaaaataaagggacagagtcattactaacatgtcctcttttcaacatcagattgtgagcttagcagaatttaaaacctgaagaattgtgaaaagcacaatgtatgggctgacagaaagttttgatcctaatcaagatctgccactaaactgtgttactttagataagtcactttacttctttggcctcagttttcttgcctataaacttaggaaccagcccaggggaattttagttccccttacagctcattatttcagtcctccctctgcttctgttatggagattatcctataaagacatctgccttggttgggtttggcatttggggacgaaaaaacattattttcccctgatcaaatgacagattgaaatgcagtttgtactgcaggtgtcgaagtgccaaaataaccttcacactcctcatagccacgatgaccaaatccaaattcagagtgatcatgctgttacaatataacctcaattcatatccatcatgctgttacaatagaaccttggttcatatccatcatgctgttacaatagaacctaaacattcacaaagcagatatttgaggttacattggtgacggtgacgtcacgactcagctttcattctctatattttccagtgtagactgaagatacatgtcttagggtctcaccaagattcaggagtgaaggatccagtggtgaggacccaggtattcaaggcgcttcacctggaggcctggcctttcccaaggtgtatcagtagcctcaggccctgacataacactaacactagtgatgccttgtcggttccaaggcactgctgccctttcttcatgctgaggtgattgattatagcaggatggagcacaattcccatgaaggctgcttggttaaagcaatgacaacacaaagcacaaacacccgggcccagccaaagtcaacccagagcaacccctatgaccttacttaagaatggaaagactgttcatacacgcctgaggaatgacacacaaacaaygcagtcagaattaatcacacgcaaatactgtgcaaagtacaaggtacacgagccaccaaatacctcctgttttacttctgcttgctccccaggaagcccccaaacaagtgccatgattcggctgctgcagcggagccacatggcttcttttgtgggattttaaatttaaaatatgaaacaatgaatacgtcaagtaaaaggttttaaagaagaaaa

SEQ ID NO: 36912 - DNA, 514 bp, Homo sapiens
cacagcacatgttctgcatatcctgatcagctttgttcatacggtcaatattcgatactctcagtcctcactgctggtccttacgtaggtaccagagctgctggagggttaaaacaggtgtctttccagccacaaacaagattctcagaggcgattctggggcaccggtgtggaaatggctctatgtgataggaacagaactctcagcaccatggaactccagggtgaaggctagacatagcaaaaaataaagatattcaaggagcgaagacattgatgaatgtctccaagaaagagaataacagagtaataaaaggcaaatggtgcygtaatatttagtccatgcttcacgattggcatgactcaatctgtctccatgtggctctggtttacacataaagtataactggcaaaataaggctgaaaatcctagaatttctgaagtagcgacacagctttcaattcaagtcacacatcatttctgacacaaaaataacagcagttgagtacgtga

SEQ ID NO: 36913 - DNA, 558 bp, Homo sapiens
  misc_feature (1)...(558): n = A,T,C or G
tttatctgttcagcatcttgccacaattcttctaaaatagagtataatgaatcatctcttgtgtcttcaccctccatttcactatgaaatgtagatttcccagaaattctcctctgggaaggcttaattccaaatttcccatctaaaaagagaaagaaaaagtaaaattgacacaaacaatagaccgcaagagattaaaaggtacacataagctaatacaaattgaacacatggaaatcagtaaatctcatgatgacaatgatgacaggaaatacatatatagcacttttatgtgccaaactcttacacgacacttacaatattccaggcaccattctaagaaatatatgcagtcaaacattgcttgacaacagggrtacagtctgagaaagctgtcattaggcaatttcgttgttgtgcaaacatcatagagtatacagtacttataaaaaccnnnnnnnnnnnnnnnnnnnnnnnnnnnnnnnnnnnnnnnnnnnnnnnnnnnnnnnnnnnnnnnnnnnnnnnnnnnnnnnnnnnnnnnnnnnnnnnnnnnntact

SEQ ID NO: 36914 - DNA, 850 bp, Homo sapiens
aaaataccctcctaaatacacacagttgaatgtttatcatagtgaaaaaaacgaaaatgccctaaatgcctttgacttgcctttggttaaatagatgatactgtatctacattatgaacaaccataaagaaattaaaaataactcagtacatttctatatatcgatatgataattttctgtgctaagtatggtaagtttctagcatttagctagaaaagtaatcctgaaaagaatcatagcaaattgctaacagtggccagctgcagggagaaggggatggggccagtgcaaggaactttcccttttattctcctatgtacagcattgttggcatttttttacagccctgtaatttgtatgatttaaataaaagaaacatatttgagggactgaggcaggaggatcacctgagcccaggagtttgagaccagcctgggcaacttggggagactctgtctctacaaaaaaaaattttttttttgagatgaagtttcactcttgttgcccagattggagtgcaatggcgccatcttgtctcactgcaacctccgcctcccaagttcaagcaattctcctgcctcagcctctcgagtagctgtgattacatttgctcgccaccacatccaactaatttttgtatttttagtagagaacggggtttcaccacattgrccaggcaggtcttgaacttctgacctcaggtgatcacccgcctcagcctcccaaagtgttgggattacagttgtgaaccactgtgcccggcccaaaaaatttttttaaattagccaggtgcaatggtgtacacctttagtcccagctatttgggaggccgaggtgagaggatgggtt

SEQ ID NO: 36915 - DNA, 809 bp, Homo sapiens
cagcataaacatagctttcattctcaatctaagatctcctttataaataattataaggaactgagcttcctactctaggcactattaaaagtaagaagaggctgggcgtggtggctcatgcttgtaatcccagcactttgggaggccgaggcaggtggatcacgaggtcaggagttcaaaaccagcctggccaacatggtgaaacctcrcctctactaaaaatacaaaaattagctgggcatggtggcatgtgcctgtaatcccagctactccggaggctgaggcaggagaattgcttgaattgggacccaggaggcaaggtggaggttgcagtgagccgacatcaagccactgccctctagcctgggtgacaaagggagactctgtctccaaaaaaaaaaaaaaaaaaaaaaaaaaagtaagaagaatcacctgcaagaaaatgtagaaaagatgcatccttggcctgataggttagacaagatagtatatttaaactcctcggtaacctaagtttacaggtaatgcaagttgatttaccagccaactaacagttgaatttccacactctcatccaagttgtctgaaagtttgagtacctacaaaataaagctactctcagaatgtaatagtttaacaaatattcctaacatgactacagatttatttactttgctagaagaagaaggaacacgtagggttaacagttgtaaatcaggaatttatcagttttaaagcttttcatgtgctattttattttacaagatgttgtgagaattttaagagtgatttttcaggtcatcaaacta

SEQ ID NO: 36916 - DNA, 809 bp, Homo sapiens
cagcataaacatagctttcattctcaatctaagatctcctttataaataattataaggaactgagcttcctactctaggcactattaaaagtaagaagaggctgggcgtggtggctcatgcttgtaatcccagcactttgggaggccgaggcaggtggatcacgaggtcaggagttcaaaaccagcctggccaacatggtgaaacctcgcctctactaaaaatacaaaaattagctgggcatggtggcatgtgcctgtaatcccagctactccggasgctgaggcaggagaattgcttgaattgggacccaggaggcaaggtggaggttgcagtgagccgacatcaagccactgccctctagcctgggtgacaaagggagactctgtctccaaaaaaaaaaaaaaaaaaaaaaaaaaagtaagaagaatcacctgcaagaaaatgtagaaaagatgcatccttggcctgataggttagacaagatagtatatttaaactcctcggtaacctaagtttacaggtaatgcaagttgatttaccagccaactaacagttgaatttccacactctcatccaagttgtctgaaagtttgagtacctacaaaataaagctactctcagaatgtaatagtttaacaaatattcctaacatgactacagatttatttactttgctagaagaagaaggaacacgtagggttaacagttgtaaatcaggaatttatcagttttaaagcttttcatgtgctattttattttacaagatgttgtgagaattttaagagtgatttttcaggtcatcaaacta

SEQ ID NO: 36917 - DNA, 809 bp, Homo sapiens
cagcataaacatagctttcattctcaatctaagatctcctttataaataattataaggaactgagcttcctactctaggcactattaaaagtaagaagaggctgggcgtggtggctcatgcttgtaatcccagcactttgggaggccgaggcaggtggatcacgaggtcaggagttcaaaaccagcctggccaacatggtgaaacctcgcctctactaaaaatacaaaaattagctgggcatggtggcatgtgcctgtaatcccagctactccggaggctgaggcaggagaattgcttgaattgggacccaggaggcaaggtggaggttgcagtgagccgacatcaagccactgccctctagcctgggtgacawagggagactctgtctccaaaaaaaaaaaaaaaaaaaaaaaaaaagtaagaagaatcacctgcaagaaaatgtagaaaagatgcatccttggcctgataggttagacaagatagtatatttaaactcctcggtaacctaagtttacaggtaatgcaagttgatttaccagccaactaacagttgaatttccacactctcatccaagttgtctgaaagtttgagtacctacaaaataaagctactctcagaatgtaatagtttaacaaatattcctaacatgactacagatttatttactttgctagaagaagaaggaacacgtagggttaacagttgtaaatcaggaatttatcagttttaaagcttttcatgtgctattttattttacaagatgttgtgagaattttaagagtgatttttcaggtcatcaaacta

SEQ ID NO: 36918 - DNA, 809 bp, Homo sapiens
cagcataaacatagctttcattctcaatctaagatctcctttataaataattataaggaactgagcttcctactctaggcactattaaaagtaagaagaggctgggcgtggtggctcatgcttgtaatcccagcactttgggaggccgaggcaggtggatcacgaggtcaggagttcaaaaccagcctggccaacatggtgaaacctcgcctctactaaaaatacaaaaattagctgggcatggtggcatgtgcctgtaatcccagctactccggaggctgaggcaggagaattgcttgaattgggacccaggaggcaaggtggaggttgcagtgagccgacatcaagccactgccctctagcctgggtgacaaagggagactctgtctccaaaaaaaaaaaaaaaaaaaaaaaaaaagtaagaagaatcacctgcaagaaaatgtagaaaagatgcatccttggcctgataggttagacaagatagtrtatttaaactcctcggtaacctaagtttacaggtaatgcaagttgatttaccagccaactaacagttgaatttccacactctcatccaagttgtctgaaagtttgagtacctacaaaataaagctactctcagaatgtaatagtttaacaaatattcctaacatgactacagatttatttactttgctagaagaagaaggaacacgtagggttaacagttgtaaatcaggaatttatcagttttaaagcttttcatgtgctattttattttacaagatgttgtgagaattttaagagtgatttttcaggtcatcaaacta

SEQ ID NO: 36919 - DNA, 1068 bp, Homo sapiens
ccaaacaaaataaaatcccaagaaaaatattcccactcgtccccccactgaagacgtcggagagggcagaacagaatgtgggcttttcgcaggagaacagaaaacaagcgggacctgtgttctgagacttccccgccaggtgtctagttttacatcatacgtaagttcacagcccaaatttcctggcgtagagaaaataattttattttattgacttttttttttttgtaaaatatagcatgttacaagtgggcccctagctagggcttagaagtatgtttgctattcttgccttcgagtctattaatgtcaactgagaactgtaaatcaaaatgataaaaaatgaaactctgactaggggaactcttaagtcataaaaaacattaatcttgtttgggctaaatgcaaccaacttaaatctataaaaaaaagtctctgtttgaaaggctgaacttcaggaaataaagagacatttggaatcatcttaattttctgttcttgttgagaagatgggaagatgcaaccatctcatgacaccggctccgaatctcacttccccaggacgaaaaggtcaccttctcaggtctccctgaggggaaccgggtgggccgccctcacagaagccactcagccacctacctgccgctctgcactgtctggggaagaactggcgaactcktcagcttgaacgcggctgagaaatccgccttcagaactccctaagactgatgagcttctgtctaaaaagcaaaaagttaaatttaaagggacagagcatatacattgtggaaatatcattatcctactgcgattgctaaatccaattgaagtgaatggatgcacagcttccctcttgttcatgagatcactatacacatgtcaggtcagttcaacaacaagtgatcctgtaagaacattaattctttcatgaatacactcagtcagtatttcttgggcatcactctctctcgagtattctgatggatcaggagattcacggatggaaaggcactgcctcggccctgaagctgctcatggttctgcaggaggcagacacaggagagaaag

SEQ ID NO: 36920 - DNA, 514 bp, Homo sapiens
ttcaagcctcaaatgcctcttttccagtttgtccctggatctaaacaaacaaacaaacaaacaaacaaaccaaaaagatcccaccacctctcaacacgtttacattggcaattaaatttcagcatgaattttgcaaagacacacsatatctaaatcagaactcagggccagccccaggtatggttcgctccaaagggcctgcttttttagggctcagtgactttgcccttcttcatgtcttgttttattctaatcacagggcacagacattcctgacattgcctcttcatatgaggttgcccaggtgacaaaaacgggtatctcagcctccccagtgatggtgtcaaggcttgttctgattggaccatcttaggtcagattctcatttctaaaccaatgaggaagggctatgctaattggcagaaataaaaatcagggcccaccttggagctgggtgtggagtcaagcacacctaaaccaaatggaagcctgggtagttcgccaaataaactct

SEQ ID NO: 36921 - DNA, 763 bp, Homo sapiens
cccgggttggagtacagtggctcttcacaggcaggatcatagcacactgtagcctccagctcctgggctcaagtgatcctcccaccttagcctcctaaatatctgggactatgggcacataccaccatgcccaccttcccatgccatttttgaagatgatttgttcccagtaaaagtcgaaaggttggatcgctcatcctctcaggatgttgataacgatggtaacaaaggatgaggctgggaggktgctttcactcgtgcaatgctttggagtcagttagtctttccctgctaggggaggcctgtcagtctcctggttgactcccatctatgtaaggaaagaggagagtgaaaagtgcaaagtctcaaacttgtcttctgtgatagaaattccagatccaagcacctggaacctcaacccagatgcctcctacgtgtattattgcgcaaatgagacggtgcatggtgtggagtttgactttatacccgatgtcaagggagcagtactggtttgtgacatgtcctcaaacttcctgtccaagccagtggatgtttccaaggtagagtataaaaggcagggtgaggggaacccactgactcggtgtctgcagggacattttaatatatacaagagcgggaagaaccatgggtgtttgaggcctgcagaacccctgagccagtgcagctgccagtgagcaggctgccaggtgcgaattcccagctgttgcagtgcctgagtcctgctgttcccagcctcgtggtg

SEQ ID NO: 36922 - DNA, 1231 bp, Homo sapiens
tgcatacaaggctgagcatcataagaggacaggcatctatcccagatgataagaacaaatctaaagtagttcaccgacagagcagtcacgaagtatgggaaatgcacagtggtttggttgtggaagatgctgggggaagccagtatgttttttgtattctatgaaaaaactcagctaactcaacccttcctcaaagtttttgtggtctctagctcttttaaaggcccaagaaaaaaaatctgaaagaacaaagaataaggccaggactggtggctcactctgtaatcccagtgctttgggagggcgaggcaggaggattgcttgaggccaggagttggagcccagccttggcaatataatgcgaacctgactctactaaaaattgaaaagttagctgggcatgggggattgtgcctgtagtcccagttacttgggaagctatgggaagattgcttgagcctcaaagtttaaggctgcagtgagctataatcatgccactgcactccagcctggttgacagagtgagacccagtctcaagaacaacaacaaaaaagaacaaagaaaaaattgtttgtgcaattatcagctctagctgccaggctgtaaagtagcacagggagaggacagggggtgtttggagaggtattctacagatatgctcatatcttctacaccagatctcactggaaaataaagaggccagtgaaatttcaaaatctgatttgtattttatttaattgatttatgtatttttgtgcctgtaaataattgttatattacaaataacaaacctaagcttaaaaatatgaagccattgcaagaaaaccttgtatgccctaaaaccttatctgttattgatagaaaattcagaaaatggggaattttggttagttgagattttctggatggttgagaatcttccctttaatctctaaagctttttttcacttgtgtactttggataaacattttcctaaaactgaaagctcatattcccagtatcatcaaactgaggatgttaggcctaagagaatatagattttgatgtttcactggccttgaaacaccaygtccctgctgaaggcccctccctccagggacatgtccacctaatgtgcttctttaaacaaagcaatcattcttatgctcactgttgtgagcattatgattttatgctctaaaactgtggtgctttggggccgtgtgacagtgcagtttacccccaatgca

SEQ ID NO: 36923 - DNA, 964 bp, Homo sapiens
caatacacttcaacaatgtgaaactgacatttgttcactattatccrtattaaatttatacaaaattgcaattcctatacaattgcaccactgtaaaattttgtgtaatgaattcgatagcctaaagtgaatccatgagttgaagcaacagattttttaatatatttcagtagtactttttacaaatatatagcagtgtctgtatatctaatcaatcaaactacattggctgctgtgatacatgatcctaatctatgttaatgacagcgagatgtattctacacacagctgatggtgcttcaaattgacagcttcagctgtcaaccctcgtaagaaatagcccttgatttgaaacagctgcctcatccaatattatctcccactctcctaggaaatcttgcatccagtgacttgcccaccctagtataagaaggcccattctcaccacaatgcaggacagcttggaagagccattacagccacctagctccttgtggctgactgagatcatttttgtgactacatctcacccaacatcccattcttcctaatcctgtttccttccttcaccttccaaagagcatacctggggaactcaagctgcaaccacaacagataatctttgtagcactgttaaaggcattaataagacacaataggtcaaagacatatttatatagaaactgaaccccaatctctcatcatatacaaaaaattacctcaaggtgggttaatctaaatgtaacatttgagactgtaaaagtcatataagaaaatttagaaaaaactattcaagacattggcctaggcaaagaatttatgcttagacctcaaaagtaaatgcaacaaaaacaaagaaattaatggaatttaattaaactaaaaagcttctgtaaagcaaaagaataatcagcagagtaaacagacaacatacagaatgggaaaaaatatttgcaagctatgc

SEQ ID NO: 36924 - DNA, 964 bp, Homo sapiens
caatacacttcaacaatgtgaaactgacatttgttcactattatccatattaaatttatacaaaattgcaattcctatacaattgcaccactgtaaaattttgtgtaatgaattcgatagcctaaagtgaatccatgagttgaagcaacagattttttaatatatttcagtagtactttttacaaatatatagcagtgtctgtatatctaatcaatcaaactacattggctgctgtgatacatgatcctaatctatgttaatgacagcgagatgtattctacacacagctgatggtgcttcaaattgacagcttcagctgtcaaccctcgtaagaaatagcccttgatttgaaacagctgcctcatccaatattatctcccactctcctaggaaatcttgcatccagtgacttgcccaccctagtataagaaggcccattctcaccacaatgcaggacagcttggaagagccattacagccacctagctccttgtggctgactgagatcatttttgtgactacatctcacccaacatcycattcttcctaatcctgtttccttccttcaccttccaaagagcatacctggggaactcaagctgcaaccacaacagataatctttgtagcactgttaaaggcattaataagacacaataggtcaaagacatatttatatagaaactgaaccccaatctctcatcatatacaaaaaattacctcaaggtgggttaatctaaatgtaacatttgagactgtaaaagtcatataagaaaatttagaaaaaactattcaagacattggcctaggcaaagaatttatgcttagacctcaaaagtaaatgcaacaaaaacaaagaaattaatggaatttaattaaactaaaaagcttctgtaaagcaaaagaataatcagcagagtaaacagacaacatacagaatgggaaaaaatatttgcaagctatgc

SEQ ID NO: 36925 - DNA, 534 bp, Homo sapiens
aagcaagcaggtgatttttatcaccaagggcaaactagatgttgtcactaccaggaatattgctaattaaaattttaaattactcagacttgaccattcatgtattcctatccttctgcaccaccattacttactctactgattagatatccaaattgctttgctctacacgactgcttataatttcttttaaaatatttctaataatttataatttatctcaaaacttccatttgtatatacttaacatttttgttactatctgattataaaagcttactgttggrtgtaagtggccaataattaacttcttcattgcttctgctttaatattctcggtttcttattgtgtgacctaccatctgccctgcatttaaaaatattagctcttccacattttagacaaattcaaacacaaagaaaggattacaaactgtgctaagctgacatgtgtctaaatctggtagtaattttctatagaaaattaatatctctggatatattaataaatattctctaaaataaaaaatatca

SEQ ID NO: 36926 - DNA, 655 bp, Homo sapiens
ataacaaattgtatcaggtactccatacatctgcacacataaaaacatatcccttgggattccagagttaggtggattgaagcttggaagatactggaaaattttgagttattctctctcttactatcatggttacatttttccattcctggtcattgagtttggatggtgggtctaaattgtccttgytgccaccctggaactgtggttccgggttggccactggactttatgttgggctctgggttttggtgccatggccttgcaggtcttctccctttctcactgtatgtaatccatgcctgcatataattgaagatatagtacatctttgagttttcttgacagattcactatcctattatagtgatttttgtatctaattcttgagcctacatttagctccaatgttgaatacatacacacacacactttcaaatataataaaatccaaataatattgtgggtatatcttttttctctatttttttttttaatattccaagtgtgcttggaaagaattactgaattgctattattgaaaggtgctttatgaataagttaagtaatatctaggtagatactatttagaaagctcacaatatatcttccttttagcttttagattttttttttcagttaaaactcagatatt

SEQ ID NO: 36927 - DNA, 1275 bp, Homo sapiens
tgcattttacaaataagaatgctaactgaagtaactaacacaaaggttgcaaaaatttcatatggtatttgcactctgaaagaatttgatataatttggttagctatttgaaaatataaaaatcaaactattggtaatattgctgcaagacttctctccaacactttaacacttttttcctaaaaggatgttaatattttgagaatactcttccaatgttttcccagtagtattatatcaacaacatgacatgtgcataggttatggggtcctgtttctttaagcaccaacaatgcaaatgttaaaagaggaaaaagttaggcaaagtgtttgcagatagaaattcaaaatgatagctttcatttacctactgtattcaaaacaatctattttaagaattaatattatcgcatatgatctcaattttttagatgaaaaacctgaggatcatggaattaaataatttgaccaaagctatgtaactgatgtttgaaggaacttagatttaatctaagtttggctcactccaaatattaagctattttccttatactatacccaccatgtgtgacagactgctgcagtgaatatagttttatttgtttctactctatacaaagtgattattttactttataagaacaagcctaataaattactgaccaattatgtagtttaggtaataggaatgtcaacaagattaacacaactctcaacattaagatattatcaattgctctacaacagttatttttaacagcttttcaaaactaaaaagaaacattgtattgtaaaatgatagtttcagaaaggcatgtgaaaaaatgccttttgtatatacaagaaagaaactgaaaagaaggaataaatggtttacagtctgctcactgaccaccccctcargctcccatcaaggagaagtaaactgtaattatacacacatctcccctcaatgcacacactcacatgcacatgtattcccatacagatcagcattattgcagccaagatcatacatagccagtccctgaaggcctccaattgagagtattcaggttagcagaaaagtctaaataagcttcttgggttttgtattaaagaattcggagaatgaaatgtgtgagatatttccaaacgcaagtctccagctacacaaagagcacaatagatcatttctcagtgaaatagaaatctttagctttgtattaataacctgtttctccacttggtttactaagtgattttctagtcagacacaatcaagaggatgaaaat

SEQ ID NO: 36928 - DNA, 1275 bp, Homo sapiens
tgcattttacaaataagaatgctaactgaagtaactaacacaaaggttgcaaaaatttcatatggtatttgcactctgaaagaatttgatataatttggttagctatttgaaaatataaaaatcaaactattggtaatattgctgcaagacttctctccaacactttaacacttttttcctaaaaggatgttaatattttgagaatactcttccaatgttttcccagtagtattatatcaacaacatgacatgtgcataggttatggggtcctgtttctttaagcaccaacaatgcaaatgttaaaagaggaaaaagttaggcaaagtgtttgcagatagaaattcaaaatgatagctttcatttacctactgtattcaaaacaatctattttaagaattaatattatcgcatatgatctcaattttttagatgaaaaacctgaggatcatggaattaaataatttgaccaaagctatgtaactgatgtttgaaggaacttagatttaatctaagtttggctcactccaaatattaagctattttccttatactatacccaccatgtgtgacagactgctgcagtgaatatagttttatttgtttctactctatacaaagtgattattttactttataagaacaagcctaataaattactgaccaattatgtagtttaggtaataggaatgtcaacaagattaacacaactctcaacattaagatattatcaattgctctacaacagttatttttaacagcttttcaaaactaaaaagaaacattgtattgtaaaatgatagtttcagaaaggcatgtgaaaaaatgccttttgtatatacaagaaagaaactgaaaagaaggaataaatggtttacagtctgctcactgaccaccccctcaggctcccatcaaggagaagtaaactgtaattatacacacatctcccctcaatgcacacactcacatgcacatgtattccsatacagatcagcattattgcagccaagatcatacatagccagtccctgaaggcctccaattgagagtattcaggttagcagaaaagtctaaataagcttcttgggttttgtattaaagaattcggagaatgaaatgtgtgagatatttccaaacgcaagtctccagctacacaaagagcacaatagatcatttctcagtgaaatagaaatctttagctttgtattaataacctgtttctccacttggtttactaagtgattttctagtcagacacaatcaagaggatgaaaat

SEQ ID NO: 36929 - DNA, 1275 bp, Homo sapiens
tgcattttacaaataagaatgctaactgaagtaactaacacaaaggttgcaaaaatttcatatggtatttgcactctgaaagaatttgatataatttggttagctatttgaaaatataaaaatcaaactattggtaatattgctgcaagacttctctccaacactttaacacttttttcctaaaaggatgttaatattttgagaatactcttccaatgttttcccagtagtattatatcaacaacatgacatgtgcataggttatggggtcctgtttctttaagcaccaacaatgcaaatgttaaaagaggaaaaagttaggcaaagtgtttgcagatagaaattcaaaatgatagctttcatttacctactgtattcaaaacaatctattttaagaattaatattatcgcatatgatctcaattttttagatgaaaaacctgaggatcatggaattaaataatttgaccaaagctatgtaactgatgtttgaaggaacttagatttaatctaagtttggctcactccaaatattaagctattttccttatactatacccaccatgtgtgacagactgctgcagtgaatatagttttatttgtttctactctatacaaagtgattattttactttataagaacaagcctaataaattactgaccaattatgtagtttaggtaataggaatgtcaacaagattaacacaactctcaacattaagatattatcaattgctctacaacagttatttttaacagcttttcaaaactaaaaagaaacattgtattgtaaaatgatagtttcagaaaggcatgtgaaaaaatgccttttgtatatacaagaaagaaactgaaaagaaggaataaatggtttacagtctgctcactgaccaccccctcaggctcccatcaaggagaagtaaactgtaattatacacacatctcccctcaatgcacacactcacatgcacatgtattcccmtacagatcagcattattgcagccaagatcatacatagccagtccctgaaggcctccaattgagagtattcaggttagcagaaaagtctaaataagcttcttgggttttgtattaaagaattcggagaatgaaatgtgtgagatatttccaaacgcaagtctccagctacacaaagagcacaatagatcatttctcagtgaaatagaaatctttagctttgtattaataacctgtttctccacttggtttactaagtgattttctagtcagacacaatcaagaggatgaaaat

SEQ ID NO: 36930 - DNA, 668 bp, Homo sapiens
tgtaccatcatctggtggacaagaattctcccaatgggaaaagaactatatgtacatgataagatatttccgtcactaccagttgccttccagagtaactcatcttagcacaaatactcctttcaaagctttgtaatatggaactggtgcttcaaacctggtacccccatgaatattgatcttagagtatgtagtcaaaaaatcaagagaataaagccctagtgcagccttgtccagtggaaatttttgtgataatggaaattgtgtctaatctgtgctgtcctatagagtagttactggtsatatgtggctattaagaaattgaaatataactagtgtgattgaggaactaaattttttatttaatttcattttaattaatttaaatttaaatagccccacgtggctgatggttacatattgaacaacaaagctccagtcaacaagcaacacgaggacatgtctctactgctcactgttgcactcccatgtggtgccatttctggagtatagcagcacctaatgtttgttgttactgtatactgttgtatacaaatatcttttattcacatctaggttagatgtggggcatctttgtaaatatatttgtataaagtgtataatatatgtataaatagatgtacaaatgttcaatacaggttagatat

SEQ ID NO: 36931 - DNA, 579 bp, Homo sapiens
gcagttgttccagcactcactggattcattcactggggaatgcatgcagtcagatttggttctagaatttttctcacgtaaaagatgttggctctcttttgattaggttttataatctggtgatttcagggaaaaaaagtatctgtaagaatcagttcatatcctcttttcttagttcagtgcttccattaaycaacaaaccaaatactgcctttacgtattgtacgatctgattaaatgatctggtaatttgtctgttacctttccacctgcagagggaatgccatcaagtctatcagtggctgctgacttagaactggtcaagcatagacaagagtttattcttcactaaattttccaacttgcagtgttttgcaaaaagagggaaatatgtaagtggaggaagatggggatagaatgcaaaattgtttctgtattactcaaggaaggatatagtgaggagaaataacagaaaggtatcagggataattctgggtcaagaaaacacaaaaaaattttgggatgctcagcagttaaggggttttattttatttcttttctgtctcgctcactttcact

SEQ ID NO: 36932 - DNA, 579 bp, Homo sapiens
gcagttgttccagcactcactggattcattcactggggaatgcatgcagtcagatttggttctagaatttttctcacgtaaaagatgttggctctcttttgattaggttttataatctggtgatttcagggaaaaaaagtatctgtaagaatcagttcatatcctcttttcttagttcagtgcttccattaaccaacaaaccaaatactgcctttacgtattgtacgatctgattaaatgatctggtaatttgtctgttacctttccacctgcagagggaatgccatcaagtctatcagtggctgctgacttagaactggtcaagcatagacaagagtttattcttcactaaattttccaacttgcagtgttttgcaaaaagagggaaatatgtaagtggaggaagatggggayagaatgcaaaattgtttctgtattactcaaggaaggatatagtgaggagaaataacagaaaggtatcagggataattctgggtcaagaaaacacaaaaaaattttgggatgctcagcagttaaggggttttattttatttcttttctgtctcgctcactttcact

SEQ ID NO: 36933 - DNA, 780 bp, Homo sapiens
gaggccagatggtttccttcaaacatgcgagaactctgatcccaagggtctctggagagaaaatacaaattgcaaaattccataatttattttgtgaatttaacatcatctgataccaaaaacttgcagagacaggccagtttcaaggtcaaaccaacgtgggttaaaagcttgactctccgtttactacccatgttaccttatagatgagaattacatgaaatataccaaaagtatactttagaaaatgctatttatctgctgtaggtacacaactaatgttagctagctgctgtaataatagcatagaacacacatatatacacacacattaggtagtaaaagaaaatctcagaaaaataaactcaaagacataaaacacgctaaaatgaaaccaayagcatattaaataactaaatctgattcataaatataagcagggaataatattaacaatgtattattctaataaatcatatcaacaaatctagtatgagaaactatatattcatctaaacagatacggaaacacccaaatctcattcctaatgataatacaaaacaaaaaacgctgcatacgcattatgaagaacatctaaaagaaacacaaacattgacaaaaagtgaaacagaaggtaaaaaagaaaaaagaaatcaatagaaaatcaggatctaagtgtgaacccttactatctcataatatttaacattttttgaagggttaatgtaatagaaataatactgtgatgatatcagcttccttattttagtactttccat

SEQ ID NO: 36934 - DNA, 671 bp, Homo sapiens
tttccgaccatccaaggaatgaatcgggggattaaatataattcattggtattacctgcaaagtaatccttgactggcacaatgcaggttaaaaagcacaaagaatgcctctcaaatggccatttttattgagttttatctgagccatcttttctaaagagaatttatttggatataacccttctttagccaacacagcatcccatttttcacatataatagcagagataatgcaaatagcaatcaagtgcttgaatgggagtcaaacccagggtagatcataagagagctgtttatttacttgtttatcattttttcattttatttacattgagaagctctttgggctgtgttacttgataaaatccttcactctcttaccttaacccatccctacattctgtacagttatggaattcagtacatgtcttgcagttttcactgcatttccggcaaagatttttctctgttaaaaaaaagagaaagttrtaaatcagttggtcaattggattccataaaagcatcagagatgttctaatgcttgctaatgtatgctacagtacctatggccttgactagacaattgcaggaaaagccacagaatcactatttgttatcatttctcagcaaaccaagtacagacaggaactgtaacactggaaaacacctta

SEQ ID NO: 36935 - DNA, 1765 bp, Homo sapiens
atgccaaaaacgtttgctaaatagattgtgttcttcttagcaatcacaatggtgcacaagatttatgaagagaaacaagattagaagaccagtgtcaaaaaatgtaaaagcaatcttcattcatcactttctccttttcaaaatcagccatctttttctttcttcccttttttactataccttgaacttactatgtaagctaagaaaaaaattacataataatagctaacagagcacttactatgtgtcagcactgtgcaaagtttaccaacattgtctcatgtaatactcaaagcaaacttatgataggcattatgccttttacagaggaggctttaaaagggtaaataagctccctaagaagacaatgagaaacagaccaaggattagaacccaagcagattccaaggtctgtgatcttyaacactaggcaacaatacctaccctccacatggagacattatatttttttatagtaaagtttaaggacattactattaaaataagatgaaatatgtggaaaaaatatgaatttctttcttccacaatcattaatcatggcaaataatctcctaatgagccttacctttattgattcaatttataatatatactatatgaactgagatgacagattgaaaatctagtcagtagaacttataaatactaagaatagtaattttgagccatcacgctcaaagcattgtacacattaaagataaccaataataatagctaccgaatgtctctctgtatagggcttttattagttcaggtcttacaaaataattcaaaacaaagtccctgaactataacttcatttgaaaagtccatctttgttttcaaaaggaatgggagtctccagaacagtcagcaaaatgactgttagcacatatttgagcatcattcatattgtcctgattgtcctatgctgatcagccttggctatggacaaagaagatatacaagcaagctggaagacaatgcatggttgacagttaaggaagatgaagtcaacaagagttcagggaaaactgagaccacttgagtcagggaagacttcacataggaagcggggagagacagaataggctctatagaataaattaaaaaaaaaaaaacagaacaagaaagaactcagggattggcagagtgagaatacattatgagtaaagacaggaactgacaggatgcatccatgggaaagtgaattaaccatcctgggtaaagttagggaagactgacattaggaaagagtcaaagagaagacaggaaaagaaagatggagtgcgaagaccctgaatatcagtctattaactgtgaactatattctgcaagcactggggactaattttatgtattaccatttatataacaattagccatcaacaatatatgtgattccctaacgttcttgaagcaggtcaaccttataccttaagtttctacagggcaacaatcagagtaaaaaatattctgtgtatacaatatggatctgtaggcacttaacacacttatcattttgtacctaattgtcgttcttaatttctttacatcttcttctggaaccaagtctgttttattaatgagaatgatatctgccaaagcaacttgcctaaaatagcaaacaaaaagaaatgttaagaaattttaaataatatacacgcatgcagattaatacatcaaaagagaaatgttaacaaattaaaaataaataaaaacacctcatgtagatcaatatatcagttaaggattatatagtgct

SEQ ID NO: 36936 - DNA, 1765 bp, Homo sapiens
atgccaaaaacgtttgctaaatagattgtgttcttcttagcaatcacaatggtgcacaagatttatgaagagaaacaagattagaagaccagtgtcaaaaaatgtaaaagcaatcttcattcatcactttctccttttcaaaatcagccatctttttctttcttcccttttttactataccttgaacttactatgtaagctaagaaaaaaattacataataatagctaacagagcacttactatgtgtcagcactgtgcaaagtttaccaacattgtctcatgtaatactcaaagcaaacttatgataggcattatgccttttacagaggaggctttaaaagggtaaataagctccctaagaagacaatgagaaacagaccaaggattagaacccaagcagattccaaggtctgtgatcttcaacactasgcaacaatacctaccctccacatggagacattatatttttttatagtaaagtttaaggacattactattaaaataagatgaaatatgtggaaaaaatatgaatttctttcttccacaatcattaatcatggcaaataatctcctaatgagccttacctttattgattcaatttataatatatactatatgaactgagatgacagattgaaaatctagtcagtagaacttataaatactaagaatagtaattttgagccatcacgctcaaagcattgtacacattaaagataaccaataataatagctaccgaatgtctctctgtatagggcttttattagttcaggtcttacaaaataattcaaaacaaagtccctgaactataacttcatttgaaaagtccatctttgttttcaaaaggaatgggagtctccagaacagtcagcaaaatgactgttagcacatatttgagcatcattcatattgtcctgattgtcctatgctgatcagccttggctatggacaaagaagatatacaagcaagctggaagacaatgcatggttgacagttaaggaagatgaagtcaacaagagttcagggaaaactgagaccacttgagtcagggaagacttcacataggaagcggggagagacagaataggctctatagaataaattaaaaaaaaaaaaacagaacaagaaagaactcagggattggcagagtgagaatacattatgagtaaagacaggaactgacaggatgcatccatgggaaagtgaattaaccatcctgggtaaagttagggaagactgacattaggaaagagtcaaagagaagacaggaaaagaaagatggagtgcgaagaccctgaatatcagtctattaactgtgaactatattctgcaagcactggggactaattttatgtattaccatttatataacaattagccatcaacaatatatgtgattccctaacgttcttgaagcaggtcaaccttataccttaagtttctacagggcaacaatcagagtaaaaaatattctgtgtatacaatatggatctgtaggcacttaacacacttatcattttgtacctaattgtcgttcttaatttctttacatcttcttctggaaccaagtctgttttattaatgagaatgatatctgccaaagcaacttgcctaaaatagcaaacaaaaagaaatgttaagaaattttaaataatatacacgcatgcagattaatacatcaaaagagaaatgttaacaaattaaaaataaataaaaacacctcatgtagatcaatatatcagttaaggattatatagtgct

SEQ ID NO: 36937 - DNA, 1765 bp, Homo sapiens
atgccaaaaacgtttgctaaatagattgtgttcttcttagcaatcacaatggtgcacaagatttatgaagagaaacaagattagaagaccagtgtcaaaaaatgtaaaagcaatcttcattcatcactttctccttttcaaaatcagccatctttttctttcttcccttttttactataccttgaacttactatgtaagctaagaaaaaaattacataataatagctaacagagcacttactatgtgtcagcactgtgcaaagtttaccaacattgtctcatgtaatactcaaagcaaacttatgataggcattatgccttttacagaggaggctttaaaagggtaaataagctccctaagaagacaatgagaaacagaccaaggattagaacccaagcagattccaaggtctgtgatcttcaacactaggcaacaatacctaccytccacatggagacattatatttttttatagtaaagtttaaggacattactattaaaataagatgaaatatgtggaaaaaatatgaatttctttcttccacaatcattaatcatggcaaataatctcctaatgagccttacctttattgattcaatttataatatatactatatgaactgagatgacagattgaaaatctagtcagtagaacttataaatactaagaatagtaattttgagccatcacgctcaaagcattgtacacattaaagataaccaataataatagctaccgaatgtctctctgtatagggcttttattagttcaggtcttacaaaataattcaaaacaaagtccctgaactataacttcatttgaaaagtccatctttgttttcaaaaggaatgggagtctccagaacagtcagcaaaatgactgttagcacatatttgagcatcattcatattgtcctgattgtcctatgctgatcagccttggctatggacaaagaagatatacaagcaagctggaagacaatgcatggttgacagttaaggaagatgaagtcaacaagagttcagggaaaactgagaccacttgagtcagggaagacttcacataggaagcggggagagacagaataggctctatagaataaattaaaaaaaaaaaaacagaacaagaaagaactcagggattggcagagtgagaatacattatgagtaaagacaggaactgacaggatgcatccatgggaaagtgaattaaccatcctgggtaaagttagggaagactgacattaggaaagagtcaaagagaagacaggaaaagaaagatggagtgcgaagaccctgaatatcagtctattaactgtgaactatattctgcaagcactggggactaattttatgtattaccatttatataacaattagccatcaacaatatatgtgattccctaacgttcttgaagcaggtcaaccttataccttaagtttctacagggcaacaatcagagtaaaaaatattctgtgtatacaatatggatctgtaggcacttaacacacttatcattttgtacctaattgtcgttcttaatttctttacatcttcttctggaaccaagtctgttttattaatgagaatgatatctgccaaagcaacttgcctaaaatagcaaacaaaaagaaatgttaagaaattttaaataatatacacgcatgcagattaatacatcaaaagagaaatgttaacaaattaaaaataaataaaaacacctcatgtagatcaatatatcagttaaggattatatagtgct

SEQ ID NO: 36938 - DNA, 508 bp, Homo sapiens
taagagccacgggggaagaggagctggctctcagtccccgcctcgcgaggggtgcctcctccccctgcgatgggggtcctaagagccaggagcggaagaggggctggctctctgtatccacctcgcggggggtgcctccccgccctgtgatgggtgttctaagagccagaaggcttaggggggctgtctctcagtccccgcctcgcggggagtgcctccccttcctgcgacgggggtcctaagagccagggggggaacagggrctggctcagtccccgccttgcggggggtggctcgctcccctgcgatgggcatcctaagaaccaggggaggaagagggggagaggatgataataatttcagcatcgcaggctgtgttcacccagccctgttaaatcgttatttatatcctgaaagggagaggatgatattactccccgtaatagacagatatgactccccatcgtagagcacgaggtgtacacccgccctgtgattttcttcctca

SEQ ID NO: 36939 - DNA, 413 bp, Homo sapiens
gaagtgcatttttactctgaggaaatacaaccaccacacctagcaattaaaaataaacctcatagtgttatcacctgcttgaagtgctgatatcagagcaagcctaccagtaggagtggtgcaggctgcaggtttttggttttgttttgttttgtttttkgagactgcactccagccttagtctgtcatgcaggctggagtacagtggtgtcatcacagcttattgcagccttgatctccccacacaagcgatcctcccacttcagcctcctgaatagttgagactacaggcccgtgccaccacgcccggttaattttttgtattttttttgtagagatggggtttcactatgttgcctagactggtcttgaactcctggatgcaagtgatccacttgcctcggcctcccaaa

SEQ ID NO: 36940 - DNA, 413 bp, Homo sapiens
gaagtgcatttttactctgaggaaatacaaccaccacacctagcaattaaaaataaacctcatagtgttatcacctgcttgaagtgctgatatcagagcaagcctaccagtaggagtggtgcaggctgcaggtttttggttttgttttgttttgttttttgagactgcactccagccttagtctgtcatgcaggctggagtacagtggtgtcatcacagcttattgcagccttgayctccccacacaagcgatcctcccacttcagcctcctgaatagttgagactacaggcccgtgccaccacgcccggttaattttttgtattttttttgtagagatggggtttcactatgttgcctagactggtcttgaactcctggatgcaagtgatccacttgcctcggcctcccaaa

SEQ ID NO: 36941 - DNA, 413 bp, Homo sapiens
gaagtgcatttttactctgaggaaatacaaccaccacacctagcaattaaaaataaacctcatagtgttatcacctgcttgaagtgctgatatcagagcaagcctaccagtaggagtggtgcaggctgcaggtttttggttttgttttgttttgttttttgagactgcactccagccttagtctgtcatgcaggctggagtacagtggtgtcatcacagcttattgcagccttgatctccccacacaagcgatcctcccacttcagcctcctgaatagttgagactacaggcccgtgccaccacgccyggttaattttttgtattttttttgtagagatggggtttcactatgttgcctagactggtcttgaactcctggatgcaagtgatccacttgcctcggcctcccaaa

SEQ ID NO: 36942 - DNA, 765 bp, Homo sapiens
tctcccatgtccaggtctctatccctaaccacatcagcaaagtctcttttgccatggaaggtatttgcaggctctgactttgtgtgtattagggcaggacatytttggcggggcagtggtgggggcagggaattattctgcctaccatgccttatacaaaaataaataaatcacaggcttatacctgaaagaattcctgcaaataataaaagaattagagcagctcagttaaataaaaaaaggtatgagatgtgaacagacacttcacagaagatgacatgcaggggagcaaggtatttatcaaaaagtgctccacttttcacttaccagagaaatgcaaatcagcacccaaaggagtcactgcggcaccctcatctgagcctcagaagttagaaagatggatagcaccagtgtcaaaggtgactgtgggagggagatttgcatacactgctagtaacaatgcgaattgatggaaccaacctggaaaatggcttggcatcaactgttggagaagaagacacacagtcctctaacctgccagtcccacatcagggcctggatatggccgtcatgtgtaccagggagcatggccaggaatctttacagccaaatactcaccatagcaccaaactggaatcagccgacatacccatcaggaagagaatggatgttaaaaaatgcaaggatagccattgggtagaacgccatacagccatgacaattacacagtgacacctacacacaaggagcatgagtctcacaaac

SEQ ID NO: 36943 - DNA, 443 bp, Homo sapiens
aggaaaaaatatgaaaattaacaaataaacaagagtgtctatytctctctatgaatgacaggattcctggggtcatttttatttctctctgacttcagactggaataattagaagaagagagatcaaaatcagtttctggcaaacaggaaagcatttcaaagagttgaaatgtgaaatgacttaggagtctagaatttatgttctcatcaccgggttgtaaacatgaggtggctcagtggaggagtgacttcccagacagggaaagcaagattttcagagagaaacaccccagagatgaagaagctttcatcttccatttttttcttcttacatgttttattactgtgtataccactgggtgacatgactcagactgtaaacatattggagagacaggaggtggtttaaaaaaaagtactgccttttatatcacaggaagtga

SEQ ID NO: 36944 - DNA, 1165 bp, Homo sapiens
accatgattacagtgttatatagaatagcttcactgtcctaaataatctgctgtgcttcacttattcaaccctctccccctttccgtaagcccctggaaaccactaatctttctattatctctatagttttgcctttttcagaatgtcattgaatttcaatcatattttcagaatgtcattgaatttgaatcatataatgtgtagccttatcataccggcttctttcacttagcaatatgtacttaagattcgtctatatctttttgtggcttgatagttcattttcttttactgctgaataatattccattgtgttgatatgccgcagtttgtccattcatgtactgaaggacatcttggttgcttccatccataattttagcaattatgaagaaaactgctataaacgttcacatacaggtttttgtatggatataagttttcaagtcaataacttagttttcacattagtaaaaatatttgattactagacagtatgttaagactgtcaggcctctgagcccaagctaagccatcatatcccctgtgacctgcaggtatacatccagaaggcctgaagtaactgaagaaccacaaaagaaagccagttcctgccttaaccgatgacatctctccattgtgatttgttcctgccccaccctaactgatcaatcgaccttgtgacattccttccctggacaatgagtctcatgatctccccaccctgcaccttgtgacctccacttctgcccaaaagagataaccaygtttaactgtgcttttccactgcctacccaaatcctataaaactgccccgcccctattctccctttgctgactcctttttcgtactcagcccgcctgcacccaggtgattaaaaagctttattgctcacacaaagcctgtttggtggtctcttcacacagactcatgtaacatttggtgccaaagacccgggacagggggactccttcgggagaccagtgccctgtccttgccctctctccttgaggagatccacctacaaccttgggtcctcagaccagcccaaggaacatctcaccaattttaaattgggtaagcagcctcgttttattctcttctccaacctctctggctatgcctccacctttcaatctctcccttaatttcggttcctttcc

SEQ ID NO: 36945 - DNA, 1165 bp, Homo sapiens
accatgattacagtgttatatagaatagcttcactgtcctaaataatctgctgtgcttcacttattcaaccctctccccctttccgtaagcccctggaaaccactaatctttctattatctctatagttttgcctttttcagaatgtcattgaatttcaatcatattttcagaatgtcattgaatttgaatcatataatgtgtagccttatcataccggcttctttcacttagcaatatgtacttaagattcgtctatatctttttgtggcttgatagttcattttcttttactgctgaataatattccattgtgttgatatgccgcagtttgtccattcatgtactgaaggacatcttggttgcttccatccataattttagcaattatgaagaaaactgctataaacgttcacatacaggtttttgtatggatataagttttcaagtcaataacttagttttcacattagtaaaaatatttgattactagacagtatgttaagactgtcaggcctctgagcccaagctaagccatcatatcccctgtgacctgcaggtatacatccagaaggcctgaagtaactgaagaaccacaaaagaaagccagttcctgccttaaccgatgacatctctccattgtgatttgttcctgccccaccctaactgatcaatcgaccttgtgacattccttccctggacaatgagtctcatgatctccccaccctgcaccttgtgacctccacttctgcccaaaagagataaccacgtttaactgtgcttttccactgcctacccaaatcctataaaactgccccrcccctattctccctttgctgactcctttttcgtactcagcccgcctgcacccaggtgattaaaaagctttattgctcacacaaagcctgtttggtggtctcttcacacagactcatgtaacatttggtgccaaagacccgggacagggggactccttcgggagaccagtgccctgtccttgccctctctccttgaggagatccacctacaaccttgggtcctcagaccagcccaaggaacatctcaccaattttaaattgggtaagcagcctcgttttattctcttctccaacctctctggctatgcctccacctttcaatctctcccttaatttcggttcctttcc

SEQ ID NO: 36946 - DNA, 1165 bp, Homo sapiens
accatgattacagtgttatatagaatagcttcactgtcctaaataatctgctgtgcttcacttattcaaccctctccccctttccgtaagcccctggaaaccactaatctttctattatctctatagttttgcctttttcagaatgtcattgaatttcaatcatattttcagaatgtcattgaatttgaatcatataatgtgtagccttatcataccggcttctttcacttagcaatatgtacttaagattcgtctatatctttttgtggcttgatagttcattttcttttactgctgaataatattccattgtgttgatatgccgcagtttgtccattcatgtactgaaggacatcttggttgcttccatccataattttagcaattatgaagaaaactgctataaacgttcacatacaggtttttgtatggatataagttttcaagtcaataacttagttttcacattagtaaaaatatttgattactagacagtatgttaagactgtcaggcctctgagcccaagctaagccatcatatcccctgtgacctgcaggtatacatccagaaggcctgaagtaactgaagaaccacaaaagaaagccagttcctgccttaaccgatgacatctctccattgtgatttgttcctgccccaccctaactgatcaatcgaccttgtgacattccttccctggacaatgagtctcatgatctccccaccctgcaccttgtgacctccacttctgcccaaaagagataaccacgtttaactgtgcttttccactgcctacccaaatcctataaaactgccccgcccctattctccctttgctgactcctttttcgkactcagcccgcctgcacccaggtgattaaaaagctttattgctcacacaaagcctgtttggtggtctcttcacacagactcatgtaacatttggtgccaaagacccgggacagggggactccttcgggagaccagtgccctgtccttgccctctctccttgaggagatccacctacaaccttgggtcctcagaccagcccaaggaacatctcaccaattttaaattgggtaagcagcctcgttttattctcttctccaacctctctggctatgcctccacctttcaatctctcccttaatttcggttcctttcc

SEQ ID NO: 36947 - DNA, 1165 bp, Homo sapiens
accatgattacagtgttatatagaatagcttcactgtcctaaataatctgctgtgcttcacttattcaaccctctccccctttccgtaagcccctggaaaccactaatctttctattatctctatagttttgcctttttcagaatgtcattgaatttcaatcatattttcagaatgtcattgaatttgaatcatataatgtgtagccttatcataccggcttctttcacttagcaatatgtacttaagattcgtctatatctttttgtggcttgatagttcattttcttttactgctgaataatattccattgtgttgatatgccgcagtttgtccattcatgtactgaaggacatcttggttgcttccatccataattttagcaattatgaagaaaactgctataaacgttcacatacaggtttttgtatggatataagttttcaagtcaataacttagttttcacattagtaaaaatatttgattactagacagtatgttaagactgtcaggcctctgagcccaagctaagccatcatatcccctgtgacctgcaggtatacatccagaaggcctgaagtaactgaagaaccacaaaagaaagccagttcctgccttaaccgatgacatctctccattgtgatttgttcctgccccaccctaactgatcaatcgaccttgtgacattccttccctggacaatgagtctcatgatctccccaccctgcaccttgtgacctccacttctgcccaaaagagataaccacgtttaactgtgcttttccactgcctacccaaatcctataaaactgccccgcccctattctccctttgctgactcctttttcgtaytcagcccgcctgcacccaggtgattaaaaagctttattgctcacacaaagcctgtttggtggtctcttcacacagactcatgtaacatttggtgccaaagacccgggacagggggactccttcgggagaccagtgccctgtccttgccctctctccttgaggagatccacctacaaccttgggtcctcagaccagcccaaggaacatctcaccaattttaaattgggtaagcagcctcgttttattctcttctccaacctctctggctatgcctccacctttcaatctctcccttaatttcggttcctttcc

SEQ ID NO: 36948 - DNA, 1165 bp, Homo sapiens
accatgattacagtgttatatagaatagcttcactgtcctaaataatctgctgtgcttcacttattcaaccctctccccctttccgtaagcccctggaaaccactaatctttctattatctctatagttttgcctttttcagaatgtcattgaatttcaatcatattttcagaatgtcattgaatttgaatcatataatgtgtagccttatcataccggcttctttcacttagcaatatgtacttaagattcgtctatatctttttgtggcttgatagttcattttcttttactgctgaataatattccattgtgttgatatgccgcagtttgtccattcatgtactgaaggacatcttggttgcttccatccataattttagcaattatgaagaaaactgctataaacgttcacatacaggtttttgtatggatataagttttcaagtcaataacttagttttcacattagtaaaaatatttgattactagacagtatgttaagactgtcaggcctctgagcccaagctaagccatcatatcccctgtgacctgcaggtatacatccagaaggcctgaagtaactgaagaaccacaaaagaaagccagttcctgccttaaccgatgacatctctccattgtgatttgttcctgccccaccctaactgatcaatcgaccttgtgacattccttccctggacaatgagtctcatgatctccccaccctgcaccttgtgacctccacttctgcccaaaagagataaccacgtttaactgtgcttttccactgcctacccaaatcctataaaactgccccgcccctattctccctttgctgactcctttttcgtactcagcccgcctgcacccaggtgattaaaaagctttattgctcacacaaagcctgtttggtggtctcttcacacagactcatgtaacatttggtgccaaagacccgggacagggggactccttcgggagaccagtgccctgtcctygccctctctccttgaggagatccacctacaaccttgggtcctcagaccagcccaaggaacatctcaccaattttaaattgggtaagcagcctcgttttattctcttctccaacctctctggctatgcctccacctttcaatctctcccttaatttcggttcctttcc

SEQ ID NO: 36949 - DNA, 711 bp, Homo sapiens
tatttcattacacagtgccctccttataagatcccaagggagaaatttctctctgatctcagaatgggaaatgcacgctgctttctagtacttagaatggtttggtggtgactcttattacagataatgaggatcatggacataagggcattgccttctttgcatttcctgctggacagcttagcaccaaaccagagacccatttatagctgactgacaggcctttttggtgtgaattttagatgttaaccttgtgctagctttgccttatctttcttatttctatatacaatctgttctgcttcctcattcaaatatttttatatttatatttttctacttawgatacttattaagcagccttaaatatccttggaacctcaaagagaataaataaattaaatatataaatactaacttcacaatcatctattttggtggaacccttactttttgaattcagatactaaagctgagttaatcacccttctcaatggtttatttcataatctttggtccaacaagatctctatcattttatttattttccctttatcccactcgaacccctctgctgccccaaggcaatcattcaaactatgtccttttgttagtaagtgttcttataaagcatatagttttatataaacatggaccttaactatatgcaaatgtcattgttatctacctcaacctgtttcttttttcatc

SEQ ID NO: 36950 - DNA, 1022 bp, Homo sapiens
gattaaattaaataatgtacataaaatgcttagcacagtatctaataaatgctctatatgtataaactattagcataaagtaacttttaaacagataaattatgtatgtatatgtatgcttaataaatgtgtgaagaagatgggaaagaaatatagcaaaatattaacagtggttatgtatgggcagtagggttatggtacttatgtttttatttattagatttctttattttgccaaacttcctacaacagacagatgtttcctgtataatgaaaaaatatattgttttacaaactaagctaagtaaacaagaactgtaaacccacaaatacatttatttatatctttttaaaattctcaatgatccattatctaatcatttctgacccagagaaaaagatagatattgacagcgcattttcactttatcttaatagaagttgggatgggtttaccaggcatctgcatagacagaaatgcaggataataaaaaattaattggggaaagatgaagagcaaaggaagaagatctccaggaagaggccgaactagaaaaaaatgaagagacaggaaaagaactaagaaagagggcattgccaaaattctcacagaccaaagagaggttgccaacagagcatcagaagaaagaaaagaccagagtttactgtggagtattttgtgcaagaaccatccataggaatttttaaaactctattggagacttttggactccaggcctacatgtatggagcttggaagttgctattccaccttaacaaacattaagctgaacaaactaaaacatcaaaaactcttcttaagtttgaaaaagaagtgagatcacaattgccacaaataaatcaaatacctggtaatacagctaacaagggaagtgaacgatctctacaaggaaaactacaaaccatggctcaaagaaatcagagatgacacaaacaaatgaaaaaatttctcgtgctcacggataggaagartcaatattgttaaaatggccgtactgccc

SEQ ID NO: 36951 - DNA, 1748 bp, Homo sapiens
ggggcgggacatgcatgtagagccagctgacccccctgggcacctcctacagctctcttgcctgactgtgactgtaactggatggggacagtaacccccacccagaaggtccctcagggatgagggcctgagccacccatcagcagaagggctggctaggggtgggggaatggagcctggagggtggattgggagaccctaaggacagaggtgggcaggggccgtggaggcccccagcatcctcggaagcttccaggagggggcccttggrgatcctggaaagtcgctctttgactggaccccagtgagtgaggggtggtctgtgggaagcttagagacccccttgagggaggacgagggctcccagcccatcaggatccccttcagctgcaggaacccacctctcccatggccacgccatgtccatggactgaacaagggacccgctgaggctgggtcatctcagccgaggtgatgctctgacaggtcacacccttgcacccccacatgaccttctgacttctgcatcccccaagaatctcctccagagctaggaagacccccaaccccagattaaccatcccagtccatgttctggacgagccccctcggcctggtcatcagaacagtgcacctgcggccggcgggctgaagactgccaccaacgtggggcctatccaattcagcccctcaccgaccacaggacgcctcatctcagggaggacagagggaggctcagacccgcacctgaccctgagtcccctccgccctggctgtgtcctggtcagagaaggtgagtttatggggccgtgtgctaccagtcacttcttcctgggaagagaccctctggtgagggggggaatgcgcagtggcctctgcgggttgcttgatatccaggtacaaggtgccagaaagcacccacctgcagtcttcccacactagtggaggtcagggctcaccctggggatccgagaacactttcgcctttgtaattactcccgtgccgcctccaacaccccaatccccgcacagcacccctcgctgggggaaagcgtcctactcgggagccccggctgcacacatatttaagtaatgactccagctacgagccatcagagccctgcaattgcattattaaaaagaagtctctgtagacacctaaaatgcatcaaactactcaatattccacatttgatcataattaaaagtaaaaaatatgggccacaagggggctggtggtgatggatttgctgcacggggtgaatggaagtgttattaacaggaggaaattgccagagacaggcttggcaagacgcctggttagacatgcatgtggagggccttgggggccggtggtgattaatgtcactgacccccaaatccaggcagagaagtagctgtgaccccgagacctgccctggccctccgccctggggattcgaggccccctctgctgaccaggaaccgggatctcccagtatgaaggagggagtgtggggtgggggtatcccagcggggctggcatcagggccgtgtgtggggtggacccggggccagattccccgtgcagtactgaagcatgtgattccccctgctgagagtgctggcagccgacggtggctctcagaccaaccctctccagaactgcctttggctggagagaatagcctggctcaagttgactcatgactgaaggatgtgtggcttgggaaggtcttgggcccctcaccctgacgcggggtagctct

SEQ ID NO: 36952 - DNA, 1169 bp, Homo sapiens
gctttagccagtagaatgcaggaacagtgaagtgtgtcagctcagagcctcaacttctagagggcttgtgtgcttccagtctctcttggagccacaagaacaaaactggtgtcagctgctggaggataacaaaccacttggaggagagcacaggagtctcagccaactctcagaagtagaaccacctcatgcacacacagctgacctcagatacatgaagaagacgaccttatatcacgagctaaatacatgttctaagcctcgaagtttgaagtggtttgttatgcagcaatacctaactcatacttgtatcaacttccacatctttccaataaattccttttttgtgaatttctacagctacaaagaactctattagacactttccaastagtctctcattcttgtaacagaatgtgatcatatcacacatgctcttttgtaatctactttatttcactttgcaactgattttgagcatctttcccaaacgatcaaatgtacacagttgaagaaggaaaatctcccaaatgccacttctgagcctctgcccaaaccaagtttcatcatgacattatggccaccagccaaaatgccatttgtaggcaggcctagcatgatctgttctgtccagaaggaagtgcctttagcttgtttctccatgagattattggacagcactgtgacttttcacagcttgatgaccaagaaaaggacacagtcatgcctgagaggtgcttgagaacattaaccttcccaggcactgtttacctctttggagaaagaaagcaataattgcattcagaatgttctattattttcaaacatataaaacatatggacagcgaagacagaaaaagagatagacattccccataatgattttatcttctgacccaaaactgagtgattggagctctccagtccttttattcctggtcatcctatttccattatcctttttttttttccaccaaaaggcagctttaatttgagatattatttgtttggcagagtagggcaaggggagggtgcaatgccagccccataactctagtctctagtctccacgctaatgaaaatacattaatattttccaaggaaattagtgtttgtaaaatggatcccctgcaactgtgcacacatttctattggaaggaattttctga

SEQ ID NO: 36953 - DNA, 612 bp, Homo sapiens
tgtactaaaaaccgctgaaatgtacactttaatgcgggaattatatctcagtaaagcttttacttaaaaacagacatsaggagggccagtaatccactgcatatagtccattatctactgaaaatgattcacacatatagagcatcaggtcacagaccccagtatgagaaataacctgttaaaggtaacagacctcagctttattcctactaggcaagtaattgaaatatcccaaatattcacagtagaagatgaacaaaccctgaaatattcataccatgaaaagcagtaccctaaattaacatattaataccttaagaaaaagcaatacaggctgggcacggtggctcatgcctgtaatcccaacattttgggaggctgaggcaggtggatcacttgagaccagcagttcgagaacagcctgcacaacatggtgaaacccgtctctagtaaaaatacaaaaaaattacccaggccttgttgtgtgcctgtaatcccagttattcgggtgactgaggcacgagaattgcttgaacccaggagcagagatcacgccactgcactccagcctctctgacagagtgagactccgctgtctcaaaaaaaaaaaga

SEQ ID NO: 36954 - DNA, 767 bp, Homo sapiens
cagaaggtcgagtttcttatccctctcatatagctatactttccctgcctgaagcctcaagcataatagacacttattataggtctttttgatawtttttccatgacaacttggtagagtttgtagagaaaagcctgcaaaatgataaggagtccctagatttccttgtcctcagcaactttgtaccactcgcatagcgcgcattcagcgtctatcagctactgtgtgtaaactcttgtcactggtgtcctgttgcatctacaataggtgaatcaatttcaaagctgggtgcaatggctcgtgcctgtaatcccagtgctttgggaggtcaaagcgggaggatcacttgagaccaagagtttgagaccagcctcgcaaaatagtgagactctatctccacaaagataataaaaataaattagccaggcgcagtggcgctcacctgtagtccaaactactcagaaggctgaggtgggaaaatcacttgagcccaggagtttgaggctacagcgagctatgattgtaccaatgcgctccaggctggacaacagagcaaagtgagaccttgtctctaaaaaaaagttcaagttttctctctcccaataggcactgtgtctctcagagtttcttcaagtaatcttctcagcagtctcagctctctgctatgtttgagaaatcataaatgtgatgttactctgtgtcattttattgtaggcataggggctatgctccttgcagccttccatatcctaaagtggaagccagaa

SEQ ID NO: 36955 - DNA, 767 bp, Homo sapiens
cagaaggtcgagtttcttatccctctcatatagctatactttccctgcctgaagcctcaagcataatagacacttattataggtctttttgataatttttccatgacaacttggtagagtttgtagagaaaagcctgcaaaatgataaggagtccctagatttccttgtcctcagcaactttgyaccactcgcatagcgcgcattcagcgtctatcagctactgtgtgtaaactcttgtcactggtgtcctgttgcatctacaataggtgaatcaatttcaaagctgggtgcaatggctcgtgcctgtaatcccagtgctttgggaggtcaaagcgggaggatcacttgagaccaagagtttgagaccagcctcgcaaaatagtgagactctatctccacaaagataataaaaataaattagccaggcgcagtggcgctcacctgtagtccaaactactcagaaggctgaggtgggaaaatcacttgagcccaggagtttgaggctacagcgagctatgattgtaccaatgcgctccaggctggacaacagagcaaagtgagaccttgtctctaaaaaaaagttcaagttttctctctcccaataggcactgtgtctctcagagtttcttcaagtaatcttctcagcagtctcagctctctgctatgtttgagaaatcataaatgtgatgttactctgtgtcattttattgtaggcataggggctatgctccttgcagccttccatatcctaaagtggaagccagaa

SEQ ID NO: 36956 - DNA, 1110 bp, Homo sapiens
acaataaattgaaggcaggaagtttatatgaggtattaccaaatacctactactatgtgtcatttcttacaattatacacagagtatgaaaaaaattgcattttttcacgcaactacaacaatggcagaaacaattgatgcctaaaatgtcctgtatacaggaggacagaatgggatcaaaaaattgagtcacatttgcctgtttctacaaatattcaccttgcatccctcaagtttcaacacatacagtaacagcagcagcagtgacagtcatcagcacttttcactttgatttgaatatcaacttgcaaattcactgataccagactaactatcactgaagagccttgtcattagattattttaacttttatctaaggaagacattctgaaaatagtttcaataaaataaaatatgtgacattcatattaaaaattatctgagttggctgccgtgtgttcctataacagaacaccagagacagggtaatttttaaagaatatacatttatttcttttttttcctatagttttagaggctgggaagtccaaggtgggggttcccacatcatgtgaagggctccttgcttcatcattccacagtggaaggcggaagggcaggagatcatgtttgcaaagggaagagggaatccagctagcttttataacaagcccactgctgataactaactcattcacggtaaggacattaatccatcactggggctttgcctgatgacctaatcatctctgtaggcctcacctcycaacactgtcacataggggattaagtttgagagacattttcaaaccatagcaatgactgaagagcaaactcttcctggatattatcccatcgagtccacctttttgttataattgccattgtaagacatacaactgtaagtaaatcttgcaaggtaaaacaagtatcttgctattacttagttgtcataagtatatcagtaagtcgatactaaagacaccacttaggagtataatttagaagatattgaatggatttggctacagatgtaatccatggttttaggtctaacatttaagtctttaatccatcttgaattaatttttgtataaggtgtaaggaag

SEQ ID NO: 36957 - DNA, 1110 bp, Homo sapiens
acaataaattgaaggcaggaagtttatatgaggtattaccaaatacctactactatgtgtcatttcttacaattatacacagagtatgaaaaaaattgcattttttcacgcaactacaacaatggcagaaacaattgatgcctaaaatgtcctgtatacaggaggacagaatgggatcaaaaaattgagtcacatttgcctgtttctacaaatattcaccttgcatccctcaagtttcaacacatacagtaacagcagcagcagtgacagtcatcagcacttttcactttgatttgaatatcaacttgcaaattcactgataccagactaactatcactgaagagccttgtcattagattattttaacttttatctaaggaagacattctgaaaatagtttcaataaaataaaatatgtgacattcatattaaaaattatctgagttggctgccgtgtgttcctataacagaacaccagagacagggtaatttttaaagaatatacatttatttcttttttttcctatagttttagaggctgggaagtccaaggtgggggttcccacatcatgtgaagggctccttgcttcatcattccacagtggaaggcggaagggcaggagatcatgtttgcaaagggaagagggaatccagctagcttttataacaagcccactgctgataactaactcattcacggtaaggacattaatccatcactggggctttgcctgatgacctaatcatctctgtaggcctcacctctcaacactgtcacataggggattaagtttgagagacattttcaaaccatagcaatgactgaagagcaaactcttcctggatattatcccatcgagtycacctttttgttataattgccattgtaagacatacaactgtaagtaaatcttgcaaggtaaaacaagtatcttgctattacttagttgtcataagtatatcagtaagtcgatactaaagacaccacttaggagtataatttagaagatattgaatggatttggctacagatgtaatccatggttttaggtctaacatttaagtctttaatccatcttgaattaatttttgtataaggtgtaaggaag

SEQ ID NO: 36958 - DNA, 1110 bp, Homo sapiens
acaataaattgaaggcaggaagtttatatgaggtattaccaaatacctactactatgtgtcatttcttacaattatacacagagtatgaaaaaaattgcattttttcacgcaactacaacaatggcagaaacaattgatgcctaaaatgtcctgtatacaggaggacagaatgggatcaaaaaattgagtcacatttgcctgtttctacaaatattcaccttgcatccctcaagtttcaacacatacagtaacagcagcagcagtgacagtcatcagcacttttcactttgatttgaatatcaacttgcaaattcactgataccagactaactatcactgaagagccttgtcattagattattttaacttttatctaaggaagacattctgaaaatagtttcaataaaataaaatatgtgacattcatattaaaaattatctgagttggctgccgtgtgttcctataacagaacaccagagacagggtaatttttaaagaatatacatttatttcttttttttcctatagttttagaggctgggaagtccaaggtgggggttcccacatcatgtgaagggctccttgcttcatcattccacagtggaaggcggaagggcaggagatcatgtttgcaaagggaagagggaatccagctagcttttataacaagcccactgctgataactaactcattcacggtaaggacattaatccatcactggggctttgcctgatgacctaatcatctctgtaggcctcacctctcaacactgtcacataggggattaagtttgagagacattttcaaaccatagcaatgactgaagagcaaactcttcctggatattatcccatcgagtccacctttttgttataattgccattgtaagacatacaactgtaagtaaatcttgcaaggtaaaacaagtatcytgctattacttagttgtcataagtatatcagtaagtcgatactaaagacaccacttaggagtataatttagaagatattgaatggatttggctacagatgtaatccatggttttaggtctaacatttaagtctttaatccatcttgaattaatttttgtataaggtgtaaggaag

SEQ ID NO: 36959 - DNA, 1110 bp, Homo sapiens
acaataaattgaaggcaggaagtttatatgaggtattaccaaatacctactactatgtgtcatttcttacaattatacacagagtatgaaaaaaattgcattttttcacgcaactacaacaatggcagaaacaattgatgcctaaaatgtcctgtatacaggaggacagaatgggatcaaaaaattgagtcacatttgcctgtttctacaaatattcaccttgcatccctcaagtttcaacacatacagtaacagcagcagcagtgacagtcatcagcacttttcactttgatttgaatatcaacttgcaaattcactgataccagactaactatcactgaagagccttgtcattagattattttaacttttatctaaggaagacattctgaaaatagtttcaataaaataaaatatgtgacattcatattaaaaattatctgagttggctgccgtgtgttcctataacagaacaccagagacagggtaatttttaaagaatatacatttatttcttttttttcctatagttttagaggctgggaagtccaaggtgggggttcccacatcatgtgaagggctccttgcttcatcattccacagtggaaggcggaagggcaggagatcatgtttgcaaagggaagagggaatccagctagcttttataacaagcccactgctgataactaactcattcacggtaaggacattaatccatcactggggctttgcctgatgacctaatcatctctgtaggcctcacctctcaacactgtcacataggggattaagtttgagagacattttcaaaccatagcaatgactgaagagcaaactcttcctggatattatcccatcgagtccacctttttgttataattgccattgtaagacatacaactgtaagtaaatcttgcaaggtaaaacaagtatcttgctattmcttagttgtcataagtatatcagtaagtcgatactaaagacaccacttaggagtataatttagaagatattgaatggatttggctacagatgtaatccatggttttaggtctaacatttaagtctttaatccatcttgaattaatttttgtataaggtgtaaggaag

SEQ ID NO: 36960 - DNA, 790 bp, Homo sapiens
attagataaggaaattgatcccttcactactgtctgtgatcatacatgctttggaaagtctcaggataatcccagaggtatgagcagcccagttttaatcttagaacatctgagactcagttttttcaaatgtaaaaagaggataatagtgatatcctcacagagctattttatgacttgccaaaaaagtagacttttgagcatatagtaggcactcactagacagcagctttgagataattcttcgcttgattttcttcaacttttaacaaataatccattagttttcttggagcacagactaagaataagatattaaacactactgttaggtgtgggaaaatattcaaatagaaatttatataattaaccattcaagtttaaattcaaagacaatttatgcaaaatattagcctcatttgaagttagaattgttaagttgaaagaaaaatctgaagacattacacataatgcataaaagtggcataaartgaatactgcaagaaacagaagtgtttaagaaataagtacacatcgtgaaggttcagtttttgtgtaataagagaatgcgaaagaaaataaatagaagacactggggagtaggtcatatttgaagagttaatgtttgtgaatttccataaattggttaaaaataaaacctcattcctagaatttgtaatttctatagaggcaataagaaaaacaattcaaaaaacctatacttagtcaaatcttgaaacttaagaataacaagaacagaggcagattcattaaaaatacagtattatac

SEQ ID NO: 36961 - DNA, 790 bp, Homo sapiens
attagataaggaaattgatcccttcactactgtctgtgatcatacatgctttggaaagtctcaggataatcccagaggtatgagcagcccagttttaatcttagaacatctgagactcagttttttcaaatgtaaaaagaggataatagtgatatcctcacagagctattttatgacttgccaaaaaagtagacttttgagcatatagtaggcactcactagacagcagctttgagataattcttcgcttgattttcttcaacttttaacaaataatccattagttttcttggagcacagactaagaataagatattaaacactactgttaggtgtgggaaaatattcaaatagaaatttatataattaaccattcaagtttaaattcaaagacaatttatgcaaaatattagcctcatttgaagttagaattgttaagttgaaagaaaaatctgaagacattacacataatgcataaaagtggcataaagtgaatactgcaagaaacagaagtgtttaagaaataagtacacatcgtgaaggttcagtttttgtgtaataagagaatgcgaaagaaaataaatagaagacactggggagtaggtcatatttgaagagttaatgtttgtgaatttccataaattggttaaaaataaaacctcattcctagaatttgtaatttctatagaggcaataagaaaaacaattcaaaaaayctatacttagtcaaatcttgaaacttaagaataacaagaacagaggcagattcattaaaaatacagtattatac

SEQ ID NO: 36962 - DNA, 1226 bp, Homo sapiens
tggatcattcagtgagtaatattggccaattatgtgcctgtttcctcctgtcatcactaaaaacacaaaagtcaggaagtttatatgctgtaacattaaacaatccctacgtatcggtgaaaaaaacaagatctacgtttcatgctgcatgtccactgtgggttagagagaggggcactggtctgcatcatattcagttactcaggctgagaaaagtttcttctccacttttccaaatttgccaaagcagaaaaaaaaagtggttcttaaagcttctaaacataatcctacatatgctcgaaagaggaaagctgtaaagctttggtgaacagcatatcaccatactcctcacccttctttccacaaccactttcatctacattccaagatagactatccaatagtacttcctagttatgtcatctgctgaaagtccaggagctcttggttatgccctgtagtcactacagaagttctagatgtggtacctatggtgtttagtttagtttacttcatagatcacctcaataagtgaaaaaattgtttgccctcatacacctaatattaatatttaataatgaaataaggatatggtagccacagaaaacactcttgtttggaaaaagaaacttaagacatgcagcagacactggtgttaaggcatttctgaaactccgaagaagatactttgagggttcctagttccttgattatgtcctaatttcactccctagggagttttcttctctattattctgcatctctggcttcactgtctgtgagattctttcttttcattgtcttctaggtcacacctgagcatctgggaatacacctttcttaaagactgagcaaagttttctacctgtatcrtatccataaatggttagggaatgagttgggtttatttcccctcccttttaggttaggaagactttcacaggattgaaagcctctaccttgagatttaatagcttccagctcaaatctctttattctgcatgttttatttttctcaaaaaattttaaaatactgatttgactttattattcataagacgttcaatttttctgaaagttctctataatactatcttatatttttactctatctatggatacctacctatttttaatctcaatggcttttaattttcttttgttttctgcctgatagacatttgcctactttattagtcattccaaagaaccattttttagctttg

SEQ ID NO: 36963 - DNA, 1226 bp, Homo sapiens
tggatcattcagtgagtaatattggccaattatgtgcctgtttcctcctgtcatcactaaaaacacaaaagtcaggaagtttatatgctgtaacattaaacaatccctacgtatcggtgaaaaaaacaagatctacgtttcatgctgcatgtccactgtgggttagagagaggggcactggtctgcatcatattcagttactcaggctgagaaaagtttcttctccacttttccaaatttgccaaagcagaaaaaaaaagtggttcttaaagcttctaaacataatcctacatatgctcgaaagaggaaagctgtaaagctttggtgaacagcatatcaccatactcctcacccttctttccacaaccactttcatctacattccaagatagactatccaatagtacttcctagttatgtcatctgctgaaagtccaggagctcttggttatgccctgtagtcactacagaagttctagatgtggtacctatggtgtttagtttagtttacttcatagatcacctcaataagtgaaaaaattgtttgccctcatacacctaatattaatatttaataatgaaataaggatatggtagccacagaaaacactcttgtttggaaaaagaaacttaagacatgcagcagacactggtgttaaggcatttctgaaactccgaagaagatactttgagggttcctagttccttgattatgtcctaatttcactccctagggagttttcttctctattattctgcatctctggcttcactgtctgtgagattctttcttttcattgtcttctaggtcacacctgagcatctgggaatacacctttcttaaagactgagcaaagttttctacctgtatcgtatccataaatggttagggaatgagttgggtttatttcccctcccttttaggttaggaagactttcacaggattgaaagcctctrccttgagatttaatagcttccagctcaaatctctttattctgcatgttttatttttctcaaaaaattttaaaatactgatttgactttattattcataagacgttcaatttttctgaaagttctctataatactatcttatatttttactctatctatggatacctacctatttttaatctcaatggcttttaattttcttttgttttctgcctgatagacatttgcctactttattagtcattccaaagaaccattttttagctttg

SEQ ID NO: 36964 - DNA, 1149 bp, Homo sapiens
aataaaatgtaatgcattaattaatgacagttttggcttttgtgaaatttgatgacaacttttctatgatgaagtgaaagcccttgaaatggcactaatgaatatcagagtgaaaaatatggggtgatattcctgagcccaccctcacctccagtcaccagaccattgaaggggccttgcttacttgtcttgaagtcaggaaaaagaaggaagattttgacactactgacctgagttaatcttttacaattcacattggtttacacactatctttttaaaccagttcctagagagcaggattagagcttatattttattgtattcaggaattgctagtgtattttttccactaacaaagatattaagggaataaccagtggagatatttctccagtgtcttaaaggttttacttaaaagctgctttccattaattcggcttgacttctgcaacagggytgcagggagcagagggttggcctggatgagatgcataaaactggcaggcatcacagagtcggatgaaccgtaaagcagcgttgaaagcagtagcaagcttcaggctttgagagcgttggcagggacagggtggaaagtggaatggggaagaaggaagatacttgttccttctccatcagtgttctttaaagctcttttgactgagcacccctcaattaaaaaaaaatccttcaagctacacctatacacgtttgtttacaaattatatacatgtgatgctatcatcagttgacaaaccaaggtgcaacacccacacaaaatttatcattgatgataataaatgtagtacttaaaaaatgattttgattacttttggccgacttattgtcacataaaattatattgtccttaatttggttagaaatgtggctattgaagagctctgctaggaagagtaaccagcttatacattactggtatcatcacggatctgtgatatttttacaatctgcattaatttcaatctgtagtttttgcagcaatttaaaaacattaaattattgtacaggatatagacattatgaagttagtatcactcaagttatgtaacaggctctacaaatccgttatattcatccatgtaacctgtgttaactgtgtgctgtgtgtgttatcacttcctgtccaggat

SEQ ID NO: 36965 - DNA, 554 bp, Homo sapiens
tatctcccccacatattgacttgtgtctcctaaggtagcgaagtaactgcagcagctccagctttcatacctgccttccataccatccagaagagaaagaaacttgttatggtattcctagtacgaggcctgagartcaccctgattggagcagtggaggtcacatgccctgtcttgaaccatgcaccgtgttgaggaggcaggaatggcctgcttagcctggcctgggccagatggtctatctcaggagcttcgggaagagtcagcttccctggaatcacagagattacaaaacagaaatcagggctgctaggaagtgcagaatggatgatggtggggccacagtgatcactgcaaggttgaaaaggtgaagacaggcctgtgctataggatttgggacttcttaaaatgacaggaagtcattaaaggattttcagtaggtcagtaatgtctttggttattcaaaaacatcattgtgaactctaccttgatgtgtctgtagtttctttttttttttttttttttgaaacggagtttcactctgtcacccaggc

SEQ ID NO: 36966 - DNA, 534 bp, Homo sapiens
aactttctggtaaatgtagaggctaggaggaattattaataataaaaatgagaaaataacaatacaagctatagtagaatataatgcagctaattgtatgtatataaaagtatacagtttccaaagtacttccacatcaactatttgggtctcacaggaagcgtgtaagaaaggcaaaggcaagacagactctttacagatgagaagacagatggacttaaagcagtttcctggcttgtccagagtcatggaggttgttctcagaggacgtgagatcaaatccaggtcctcctactcagtacacctcttgctgcccacgggcgctaaagtgtaaaaggaagagagggtactagayaccagtattcatataaagagagtgattgagaaaaatataacatctgtgagctttaattgccagtaaatgtaatgatttttccttcaatgattaaaaagggaaaaagggaagagtgataataagtagagtctacccacaaaacatgcaattaatttgatttttttttttttttttttttt

SEQ ID NO: 36967 - DNA, 820 bp, Homo sapiens
tatgtaaagttctgaaaaatctacaccacaattaatttttctaatatcatatgccactttctcattcctttgagaaggctatgctctgacattgccaaattcaagttcaatgtccaattatacccacataattagcagacaagtagagcagyagagggtaggtcaggctaaagtgttaaagaattttaaaatctcacaatattttagagctgtggcaagacctgaacaacagatgaatatgaaaatgaactcaaaaatctattagagtcaagcaactagtttttttttctaattgggtggagtgttgcagaagtgtatctccccaggtaaaataatttaacaagggaatgtccatataaggcacctaaagaagcatctcagaagaacgcaggtctcaggtctagaagcaatgcctagatgttgaaaagaggcacataataatgtactgctgtaagtgagacagtttgttctgaaaattgcaggttataggattttcactagtcattttcaataatgaatggggccttaaaaagatgaagaagcccacaaaatatgcattaggtgttcagaatgattttcttactagtattactcagcaagggcatggcacacatattattctggtgcatttgttagaaaacccacttcaactggctaagaataaaagtaatgtactagctcacgtaactaaaaagttcagaagtagagaaggctacaaactattcaataagctttatccaaccaacagtgatattgccaattttcccattttttttacatctctctttcctctttgcctttatgttcaattacagctata

SEQ ID NO: 36968 - DNA, 611 bp, Homo sapiens
tatacatcctagaggattttgaatccagacatggaagagagagtaggaatgtagaaaggggaaaggaacaaatctgtagttagcatttgctgtaggttttcaatattttatttattttattaatttcactcttctacccaactctgtgaagttattctcattttatagatgatgaactaartttcaaaaaagttaattagttttcccagagttgcatggctcaaaccagatgctaaaccacacattcctgcttcccaagtccctgctcacgtagtcagcacagtgaaaatcagtggctttcactgtgcttccaggtgccctgaaataagaccctccaacaatctggccctggtgaaaagcctactttttccactcttcctagcttacttaaatgcttaatcctatgatgatctgtggatttccctgtggccatttttgctggacacctttctgtaccatctgataaatcttgtaaagaagggaaagacaaagagaatcattccaagggtacttttaccttaagcccttagttatggaataaaactgatctctcctggtaaagaatcctcagagttcaattagcggttgagagagtaatttttagagcacag

SEQ ID NO: 36969 - DNA, 546 bp, Homo sapiens
caatgaggctgatgactaaagcttcttaaatggtcgtttgacctaccccctaaatgacttaaaaaatgataatgttgaatcacaagtacaaacaactgtagcagtctttgcaaagtcatttgggtggcttcacttgcagggagctagaacccaagactccccagttatgtcatccagcaatgttgaccaagttcaaagtactttcagaatgacaacttgctcaaataccgtagcaatcctgtcactaggcagtattctcattttaaacatgaaaacattgaggagcaggaagataaagtggctcttaatggtggtgctgggattttactcagtattttggatttagagtcaatgggcgttttctcttttgcccccacagagctctactctatggttataaaaaacaatgtatggtggcctagtagtgatgtgtattatagataatgaatcataaataaccaaataattttctccaagacactgcgactattagtaagattatcatcrcaacaaagaccctttgttgcgatgataaatgattaatac

SEQ ID NO: 36970 - DNA, 1175 bp, Homo sapiens
cacacaccaagacctaatggctatggtatgtttgcataggaaaaaatatttggacttatgctatggtaagccagaatgaacaaatcgcatcccgagaatagagagtctgtctgtaagagattcatggtaaaagagaagctctgatattatgaaagagtaggtatacaggcattctaagagtaaagtgagtgagagcagaacaagtaaaatattacaaaatgagaactgtataaaagtatttaatatcaattgtcatttcctaatttgttaaaggtttgaggaaggtcaatgactcctcctgcttcatccctgaccttgaggtctacataaatgtaaaagcagaggttatagagatcacatatttaaaaactattatttaattataccaccatacaaaagtcttatttataaattggcaaatttatactcataagaaaaagcagaaaggcacctttgattatgctgtaattgtttattaaaatggctttctgaactataatctctttgaggaatacgagtgtatcttatttgccttgataggtctgttcatagcagtcatgccacaaatgtttaatgaaaagatcttgattctcatccttggtttatagaatataaaataaacaaaagaaaacataaatatctggcaatttttatatacagataaacattctgtataatttatggaagttgttagtaaatgagcaagagtcaccaaataattatctgttttctgtttaagttctggctgaacatttcagtctaaagggggcttttatgtatttagcaaataaacatatattaatttatggattttaattagtgctattacctaaaacataacctaaatattatacaacttattcratttaaaagtttgcaaattctatgtgaaagggcaaactaaaacaccttctaagtatttaaaagtacaggaaaagtcctcttataagatgcagtcagaaccagtattgattcacatactacaaaaggtcaagtaaagcagaaaaaataacaaagaaaaaatatgtaccttattttaacttaaaacacatgtatattcatttgtatataggatttcttcatacatgcaatttgttcaatcttgcttaccatagcataagcccaaatactttttactatgccaacataccatagccattagccattggtgtgcg

SEQ ID NO: 36971 - DNA, 1338 bp, Homo sapiens
tgatgagaagatggaagaaaatcagggatctagtgggagattaattcaatttggctgtcaagtttgaggatcaatagaacatccctcttcacatggcaagcaggcatgcaaaagtttgggatgaaaactcacaatggaagtcaggtctggtgactcaattttgaagtgatgtttaaatatcgtaatgatgttaaagagatgagaaagccaacacttaacaataaagaggaaacaagaaaagagataaaggagaatgaacaggcttgctccaaccaagatggcaaagcagaaatgtgtgtgactggtgatcctagccctgccgttctgtctttttctcccagtggttcttcctcccttttcctcatcatgcttcaattatacctgccttatctttcccagggcaaataaagaaactcaacacaccaacttcaactcrtcacttcatagtagtttcctactcaaaaccgttcactattgtctatataccaatgtccaaagtcccaactctttatgtagcatttggaactttctttggcacagccacagtgtaaccttgtattccatgatgttgcccctctctcattcccacaccctgtgctccatgctgacttttctacatttgtggcttcactctcactgtccttgtgcctggcatagtcccttcctttctttactgaactactgggggcctaaatgcacttaaaggttttaagccttcatagttttttttccattcaaaattccctcactttattgactgttatagaatcttagccgtgcttctattattatagcatatgccttggcgtcccttgctatttatatgccgttgtccttcaatagactgtgagcctcaggggactgtcacttcctgccctttgtaccttgtacagctttctcaagaactctgagcacagcagtgattagatggatgttttttgaaataaaagagaaaaataattgcagtatggcagtcttagctatgtgtcttctctttcttagtaggactgatctgatatgacggtaggaaacatcactgaatgcctattaacaggtggagaggtctctggtattgcttcattccctggccgattacttccaggaagaaaaaaaaaagaaaagaaaaagaaaaaaagaaacccacaaaatgtattaggtttgggactggagggaacttcattatttttaatgtctcagtaaaaggtctttttttctttctacatttaccagactaatcccaataatgtcttttaaacaattaattctagtttcaaaagcattctactctgcagtttgtccagaattaagtgaccattagaaggcattagcttagaaatg

SEQ ID NO: 36972 - DNA, 1338 bp, Homo sapiens
tgatgagaagatggaagaaaatcagggatctagtgggagattaattcaatttggctgtcaagtttgaggatcaatagaacatccctcttcacatggcaagcaggcatgcaaaagtttgggatgaaaactcacaatggaagtcaggtctggtgactcaattttgaagtgatgtttaaatatcgtaatgatgttaaagagatgagaaagccaacacttaacaataaagaggaaacaagaaaagagataaaggagaatgaacaggcttgctccaaccaagatggcaaagcagaaatgtgtgtgactggtgatcctagccctgccgttctgtctttttctcccagtggttcttcctcccttttcctcatcatgcttcaattatacctgccttatctttcccagggcaaataaagaaactcaacacaccaacttcaactcgtcacttcatagtagtttcctactcaaaaccgttcactattgtctatataccaatgtccaaagtcccaactctttatgtagcatttggaactttctttggcacagccacagtgtaaccttgtattccatgatgttgcccctctctcattcccacaccctgtgctccatgctgacttttctacatttgtggcttcactctcactgtccttgtgcctggcatagtcccttcctttctttactgaactactgggggcctaaatgcacttaaaggttttaagccttcatagttttttttccattcaaaattccctcactttattgactgttatagaatcttagccgtgcttctattattatagcatatgccttggcgtcccttgctatttatatgccgttgtccttcaatagactgtgagcctcaggggactgtcacttcctgccctttgtaccttgtacagctttctcaagaactctgagcacagcagtgattagatggatgttttttgaaataaaagagaaaaataattgcagtatggcagtcttagctatgtgtcttctctttcttagtaggactgatctgatatgacggtaggaaacatcactgaatgcctattaacaggtggagaggtctctggtattgcttcattccctggccgattacttccaggaagaaaaaaaaaagaaaagaaaaagaaaaaaagaaacccacaaaatgtattaggtttgggactggagggaacttcattatttttaatgyctcagtaaaaggtctttttttctttctacatttaccagactaatcccaataatgtcttttaaacaattaattctagtttcaaaagcattctactctgcagtttgtccagaattaagtgaccattagaaggcattagcttagaaatg

SEQ ID NO: 36973 - DNA, 2155 bp, Homo sapiens
aacttagaagttttggaaaactgtacgtattgtaccctggaaactagtttcaactccttcaagaaagattgtcaaatgcaaggatgttatgaattcatcacgcattaatcatttagccccactggggaattttctgttccttgccttatctgtcattgaaaaaaattcacaagacctacattattccatttatgttatggttataaataatcaaatacaatttgctactctgtggtttgtaatgcattcagattgacttagaacatgatggaaaagaacaagcttggtttgtacttgaggtttgctaaggactggaaatccccaggtagttctctctcattatgtagggcacagttatgttgtagagacctctccagaagcccaggggagagcctcctctcattaggcatgtaccagagagcaccgttgatgggagagtgtgacactccgcagatccacaggcggggatgagaatgatcaagatttttaaaatggaaattttttgagtcatcttggctacagatttttttttttctgtaatctccaaatccttcaatgcaaaaaagaaatagagggtgataattcaaaactgaagattgttgctgtgaattggtagtgacaacaatatggtcaaggtctgtttttcacagttcggttcacacttatttcagggctgggggaaaatgtgttcttgaaataaaattcagctcattcagagattgtgagcatgagatcttaatgaagattcttttcttctgaaattatgagcttccttcagggttcagcctccctgcctgcctgagatcttctagcagactggagatggatgctattctcattggcatttcccaaggccagtttccaaacttgtcgcccaccagcccctgttggctggagtgcgggattctaattaagtcattgcacattccggctgtctcctttggtggcagagccacgcccagggggatgctgagcctatgacagttgtgttcctgaggctccatcgtggacaactggattacttggctattgccactcagcctctgcgctgagcctatgggctttgttcaggtggtgtttgcatgaacaagtgagttatccatggaaaacattaccctcattaaggcattagcaaagttcaagggtatttctacactgaggcatctatttgggccataggcacagcagcttgtgctgtacatccttggtatagcagrtagagcaagtatgtacttctgtggtcagatttaaaaggccaagatcagaataggtgttctgactctgttgaccttgtttaagaggagatgagagccctgaaatcctgggtcctttatgtggctacaactcttgaactggcagattccctagtgccccttgactaaggtgtccagtcccaggacatacggggccagtagagtccaccgtaaatctatgtctatcaatacaggcaagattcatctttacctagactggggagataacccccaatcactttcagaaatttctcctctctgcttctcctccttcccctcttccatctgtttcctgagatctaacatcatgagcatataaaaacctgaatgccccatgcctcaccagcttgtggagacaagtcatataaatattgatatttaagtattcttgctcatgcgcttgtaaagactatctctgtccctcctcctcctcctctcccatctatcccttgaaatctggggcattcacctatccaaatagttacttctctacacccgcactgttcatctcttctttgttttggtcatgaacccactggaagaagccttcatgcttaaaagtttcccatgctggaggtgctgatctttgagtgtgcccacacttctgatccaggaagtaccaggaataatgggttctaagcccacctgtagctttctcctttaaccattccctgcactgggctccaagccaaccatgaagtttatcctgatatagtatatgatatatatatgtatttatgatggaatatatatatatgatagaatatatatatgatggaatatatatatatatgatggaatactactcagccataaaaaggaatgaattaatggtatttgcagcaacctgaatgggaccatagactattattctaagtgaagtaactcaggaacagaaaacc

SEQ ID NO: 36974 - DNA, 2155 bp, Homo sapiens
aacttagaagttttggaaaactgtacgtattgtaccctggaaactagtttcaactccttcaagaaagattgtcaaatgcaaggatgttatgaattcatcacgcattaatcatttagccccactggggaattttctgttccttgccttatctgtcattgaaaaaaattcacaagacctacattattccatttatgttatggttataaataatcaaatacaatttgctactctgtggtttgtaatgcattcagattgacttagaacatgatggaaaagaacaagcttggtttgtacttgaggtttgctaaggactggaaatccccaggtagttctctctcattatgtagggcacagttatgttgtagagacctctccagaagcccaggggagagcctcctctcattaggcatgtaccagagagcaccgttgatgggagagtgtgacactccgcagatccacaggcggggatgagaatgatcaagatttttaaaatggaaattttttgagtcatcttggctacagatttttttttttctgtaatctccaaatccttcaatgcaaaaaagaaatagagggtgataattcaaaactgaagattgttgctgtgaattggtagtgacaacaatatggtcaaggtctgtttttcacagttcggttcacacttatttcagggctgggggaaaatgtgttcttgaaataaaattcagctcattcagagattgtgagcatgagatcttaatgaagattcttttcttctgaaattatgagcttccttcagggttcagcctccctgcctgcctgagatcttctagcagactggagatggatgctattctcattggcatttcccaaggccagtttccaaacttgtcgcccaccagcccctgttggctggagtgcgggattctaattaagtcattgcacattccggctgtctcctttggtggcagagccacgcccagggggatgctgagcctatgacagttgtgttcctgaggctccatcgtggacaactggattacttggctattgccactcagcctctgcgctgagcctatgggctttgttcaggtggtgtttgcatgaacaagtgagttatccatggaaaacattaccctcattaaggcattagcaaagttcaagggtatttctacactgaggcatctatttgggccataggcacagcagcttgtgctgtacatccttggtatagcaggtagagcaagtatgtacttctgtggtcagatttaaaaggccaagatcagaataggtgttctgactctgttgaccttgtttaagaggagatgagagccctgaaatcctgggtcctttatgtggctacaactcttgaactggcagattccctagtgccccttgactaaggtgtccagtcccaggacatacggggccagtagagtccaccgtaaatctatgtctatcaatacaggcaagattcatctttacctagactggggagataacccccaatcactttcagaaatttctcctctctgcttctcctccttcccctcttccatctgtttcctgagatctaacatcatgagcatataaaaacctgaatgccccatgcctcaccagcttgtggagacaagtcatataaatattgatatttaagtattcttgctcatgcgcttgtaaagactatctctgtccctcctcctcctcctctcccatctatcccttgaaatctggggcattcacctatccaaayagttacttctctacacccgcactgttcatctcttctttgttttggtcatgaacccactggaagaagccttcatgcttaaaagtttcccatgctggaggtgctgatctttgagtgtgcccacacttctgatccaggaagtaccaggaataatgggttctaagcccacctgtagctttctcctttaaccattccctgcactgggctccaagccaaccatgaagtttatcctgatatagtatatgatatatatatgtatttatgatggaatatatatatatgatagaatatatatatgatggaatatatatatatatgatggaatactactcagccataaaaaggaatgaattaatggtatttgcagcaacctgaatgggaccatagactattattctaagtgaagtaactcaggaacagaaaacc

SEQ ID NO: 36975 - DNA, 673 bp, Homo sapiens
gcctccgtcttctctccccttcccccaccccttgccggcgatctcattcttgccaggctgacatttgcatcggtgggcgtcaggcctcactcgggggccaccgtttttgaagatgggggcggcacggtcccacttccccggaggcagcttgggccgatggcatagccccttgacccgcgtgggcaagcgggcgggtctgcagttgtgaggcttttccccccgctgcttcccgcctcaggcctccctccctaggaaagcttcaccctggctgggtctcggtcaccttttatcacgatgttttagtttctccgccctccggccagcagagtttcacaatgcgaagggcgccacggctctagtctgggccttctcagtacttgcccaaaatagaaacgctttctgaaaactaataactttgctcacttaagatttccagggacggcgccttggcccgtgtttgttggcttgttttgtttcgttctgttttgttttgttcgtgtttttcctttctcgtatgtctttcttttcaggtgaagtagaaatccccagttttcaggaagacgtctattttccccaagacacgttagctgccgttttttcctgttgtgaactagygcttttgtgactctctcaacgtgcagtgagagccggttgatgtttactatccttcatc

SEQ ID NO: 36976 - DNA, 1797 bp, Homo sapiens
cttactgggaattcctcgttcatggggaataattgcaatccccgatccccatcacgaatggggttcaacgggttacccgcgcctgccggcgtagggtaggcacacgctgagccagtcagtgtagcgcgcgtgcagccccggacatctaagggcatcacagacctgttattgctcaatctcgggtggctgaacgccacttgtccctctaagaagttgggggacgccgaccgctcgggggtcgcgtaactagttagcatgccagagtctcgttcgttatcggaattaaccagacaaatcgctccaccaactaagaacggccatgcaccaccacccacggaatcgagaaagagctatcaatctgtcaatcctgtccgtgtccgggccgggtgaggtttcccgtgttgagtcaaattaagccgcaggctccactcctggtggtgcccttccgtcaattcctttaagtttcagctttgcaaccatactccccccggaacccaaagactttggtttcccggaagctgcccggcgggtcatgggaataacgccgccgcatcgccggtcggcatcgtttatggtcggaactacgacggtatctgatcgtcttcgaacctccgactttcgttcttgattaatgaaaacattcttggcaaatgctttcgctctggtccgtcttgcgccggtccaagaatttcacctctagcggcgcaatacgaatgcccccggccgtccctcttaatcatggcctcagttccgaaaaccaacaaaatagaaccgcggtcctattccattattcctagctgcggtatccaggcggctcgggcctgctttgaacactctaattttttcaaagtaaacgcttcgggccccgcgggacactcagctaagagcatcgagggggcgccgagaggcaaggggcggggacgggcggtggctcgcctcgcggcggaccgcccgcccgctcccaagatccaactacgagctttttaactgcagcaactttaatatacgctattggagctggaattaccgcggctgctggcaccagacttgccctccaatggatcctcgttaaaggatttaaagtggactcattccaattacagggcctcgaaagagtcctgtattgttatttttcgtcactacctccccgggtcgggagtgggtaatttgcgcgcctgctgccttccttggatgtggtagccgtttctcaggctccctctccggaatcgaaccctgattccccgtcacccgtggtcaccatggtaggcacggcgactaccatcgaaagttgatagggcagacgttcgaatgggtcgtcgccgccacggggggcgtgcgatcggcccgaggttatctagagtcaccaaagccgccggcgcccgccccccggccggggccggagaggggctgaccgggttggttttgatctgataaatgcacgcatcccccccgcgaagggggtcagcgcccgtcggcatgtattagctctagaattaccacagttatccaagtaggagaggagcgagcgaccaaaggaaccataactgatttaatgagccattcgcagtttcactgtaccggccgtgcgtacttagacatgcatggcttaatctttgagacaagcatatgctactggcaggatcaaccaggtaggtaggtagagcgcgkcgaggccccgacgcggccggacggccggccggggggcctcgcgaggacgggcccggcgccccgcaagcgaggaggacgacggacggacggacgggccgcggacgggcggacgggagggagcgagcgggc

SEQ ID NO: 36977 - DNA, 597 bp, Homo sapiens
aaataaaattaaattaaaacatayaacaaaattaaggtccaattaaaggtaaatatatatagcaaaaaaaaaattcaagctctgataaggttaattgtaacagattgtgccagaattttgagatttctggggatggacagagcccaagagtttccttctataacaatttctgtgaagtttcttacactcttattcaatttgaacgtggataaatgggttttctctgttttgttatttaagagattcatgataaggaaggcctatttatgcatgattcttaaacaattattgagtcagtggtgtctgctgaggaagggcacagaatctcatgcccacagaagcatgatgttctgtcagataggagacttctcccagagccagaacttcatctttcaaatggaattagagattttcacaggcatacattgctctgaagccctatcagaggcttagcactgagaatatgaccaaataaggtgactaataaacatatgacctagtactctgatctacagtgattctaccctctcaaatagctcttccctggctctggaatcttttctggattcatctaccagaaacagatacactgaaaga

SEQ ID NO: 36978 - DNA, 597 bp, Homo sapiens
aaataaaattaaattaaaacatataacaaaattaaggtccaattaaaggtaaatatatatagcaaaaaaaaaattcaagctctgataaggttaattrtaacagattgtgccagaattttgagatttctggggatggacagagcccaagagtttccttctataacaatttctgtgaagtttcttacactcttattcaatttgaacgtggataaatgggttttctctgttttgttatttaagagattcatgataaggaaggcctatttatgcatgattcttaaacaattattgagtcagtggtgtctgctgaggaagggcacagaatctcatgcccacagaagcatgatgttctgtcagataggagacttctcccagagccagaacttcatctttcaaatggaattagagattttcacaggcatacattgctctgaagccctatcagaggcttagcactgagaatatgaccaaataaggtgactaataaacatatgacctagtactctgatctacagtgattctaccctctcaaatagctcttccctggctctggaatcttttctggattcatctaccagaaacagatacactgaaaga

SEQ ID NO: 36979 - DNA, 597 bp, Homo sapiens
aaataaaattaaattaaaacatataacaaaattaaggtccaattaaaggtaaatatatatagcaaaaaaaaaattcaagctctgataaggttaattgtaacagattgtgccagaattttgagatttctggsgatggacagagcccaagagtttccttctataacaatttctgtgaagtttcttacactcttattcaatttgaacgtggataaatgggttttctctgttttgttatttaagagattcatgataaggaaggcctatttatgcatgattcttaaacaattattgagtcagtggtgtctgctgaggaagggcacagaatctcatgcccacagaagcatgatgttctgtcagataggagacttctcccagagccagaacttcatctttcaaatggaattagagattttcacaggcatacattgctctgaagccctatcagaggcttagcactgagaatatgaccaaataaggtgactaataaacatatgacctagtactctgatctacagtgattctaccctctcaaatagctcttccctggctctggaatcttttctggattcatctaccagaaacagatacactgaaaga

SEQ ID NO: 36980 - DNA, 587 bp, Homo sapiens
aatggaaaagatgaaagaaataaacacgaagacggaaagcacggtgtgaacgtttctcttgccgtctcccggggtgtaccttggacccggaaacacggagggagcttggctgagtgggttttcggtgccgaaacctcccgagggcctccttccctctcccccttgtccccgcttctcccccagccgaggctcccaccgccgccctggcattttccataggagaggtatgggagaggactgacacgccttccagatctatatcctgccggacgtctctggctcggcgtgccccaccggctacctgccaccttccagggagctctgaggcggatgcgacccccacccccccgtcacgtcccgctaccctcccccrgctggcctttgccgggcgaccccaggggaaccgcgttgatgctgccttcggatcctccggcgaagacttccaccggatgccccgggtgggccggttgggatcagactggaccaccccggaccgtgctgttcttgggggtgggttgacgtacagggtggactggcagccccagcattgtaaagggtgcgtgggtatggaaatgtcacctaggatg

SEQ ID NO: 36981 - DNA, 1785 bp, Homo sapiens
  misc_feature (1)...(1785): n = A,T,C or G
ctcaccgcaccttccgcctcccgggttcgagcgcttctcctgcctcagcctcccgattagcggggatgacagggaggcacccccacgcctggcttggctgatgtttgtgtttttagtaggcacgccgtgtctctccatgttgctcaggctggtctccaactcccgacctcctgtgatgcgcccacctcggcctctcgaagtgctgggatgacgggcgtgagccaccgtgcccggcctgttgactcatttcgcttttttatttctttcgtttccacgcgtttacttatatgtagtaatgtaaacgtttctgtacgcttatatgcaaacaacgacaacgtgtatctctgcattgaatactcttgcgtatggtaaatacgtatcggttgtatggaaatagacttctgtatgatagatgtaggtgtttgtgttatacaaataaatacacatcgctctataaagaagggatcgtcgataaagacgtttattttacgtatgaaaagcgtcgtatttatgtgtgtaaatgaacgagcgtacgtagttatctctgtttcctttcttcctctccttcgtgtttttcttccttcctttcttcctttctctccttctttaggtttttcttcctctcttcctttccttctttctctctttctgtccttttttccttcgtgctttatttctctttcgttccctgtctttccttcttttttctttcctctctgtttctttttcccttctttccttcgtttctttcctcattctttctctctttttcgtgtttctttcctttccgcctgtcttttaaaaaatggagtgtttcagaagtttactttgtgtatctacgttttctaaattgtctctcttttctccattttcttcctccctccctccctccctccctccctgannnnnnnnnnnnnnnnnnnnnnnnnnnnnnnnnnnnnnnnnnnnnnnnnnnnnnnnnnnnnnnnnnnnnnnnnnnnnnnnnnnnnnnnnnnnnnnnnnnnaaaaaacccaaccaccagccaagccagggttgggggtgcatcccggtaatcccccctaatcggaaggttaaggcagaaaaaacacaaaaaccgggaaggcgaaaaaaaaaataagcaaagattgggtcattgcctccctccctccctccctccctccctgcttccgagaggcatctccaaacacccacgcgccgtgggttgtcttctgactctgtcgcggtcgaggcagagacgcgttttgggcaccgtttgtgtggggttggggcagaggggctgcgttttcggcctcgggaagagcttctcgactcacggtttcgctttcgcggtccacgggccgccctgccagccggatctgtctcgctgacgtccgcggcggttgtcgggctccatctggcggccgctttgagatcgtgctctcggcttccggagctgcggtggcagctgccgagggaggggaccgtccccgctgtgagctaggcagagctccggaaagcccgcggtcgtcagcccggctggcccggtggcgccagagctgtggcgcgtcgcttgtgagtcacagctctggcgtgcaggtttatgtgggggagaggctgtcgctgcgcttctgggcccgmggcgggcgtggggctgcccgggccggtcgaccagcgcgccgtagctcccgaggcccgagccgcgacccgcggggacccgccgcgcgtggcgcgggaggctggggacgcccttcccggcccggtcgcgggtccgcgctcatcctggccgtctgaggcggcggccgaat

SEQ ID NO: 36982 - DNA, 777 bp, Homo sapiens
ggatccagcagggcagaggccagcaggggaattcagggaagagcctcagggctgacaatggggacacctgactacagtcaaggggattcaaagcacagcctggaacctggaggaatcccctggaacatggacacagaaatgcggacagctgaagccatgaacgtgaccacaggtagggagcttgcagttagggacaggagccaactttacttagacataactcaaattcatttcatttctgaaggaaatgaaatttccttctttttcacctggttggaatttattgctctctccttaatggtgcatagcaycttgtttatttatgctttgagtaattgtaatatgccttgttttatagtatttttatacatttctacttcaactcttgattataaatttgttaaggcagggaatatctatctatctatctatctatctatctatctatctatctatctatctatctgtctatcttatctatctatcatctacacacactaatggtattttagctatagcatacataaatacataggtacattttgttgaattgaaattaagtgaattaatcccatcctctttcagaatagaaattatgttttctgggagctagaaactattgtgagagatgttagtattgttgaaatttaaaaggggctgtccagttcagttgtggcctggtgtgtactgaatgacatccaaattctaagtaagtggaattgctatcagatctgaaataaattagccatgctcgagagaagatgtagagcgaggaat

SEQ ID NO: 36983 - DNA, 501 bp, Homo sapiens
aatacataagtatagtatgtataggaaaaaagcaattgacataaaaggtcttatataatagtctctatgtatagggaagacccttgtgttgaacatatataatatgtcagtataggtatatacacttatatatacatatgtgtgtgtatacatatatatatatacaccccatatataactcatatatatatatatatatatacttctcatgtttaattagggtgatttaatgtaaactgaatattagaatctgaggtgtttctgttactgactgctattttatgtaatttagtttatctatctacttacttgtttatcatttttctatttgtttgtatgattaggtagttttcaagctacaggcaarctaataaaatttaggcagtttgttattatttttgtatgaaaaactctaattattttgaatttgaaagaattgggacttagctatccaattaaacctcatgttttacaaggacagcttttcaaacatattttgtt

SEQ ID NO: 36984 - DNA, 645 bp, Homo sapiens
ctcccacaagacacggaaattatgggagctacaattcaagatgagatttgggtggggacacagccaaaccatattgctgctgaatagatcatgtagacaggctctcaaactacacggagagcaagagaggcccaccttaccacaacatttcatccaatccactaataaaacaggcacatcactgaagccaccttcaactctccagactacccagctgccagctgaataccacagatggctacagttaataccacayggagcagaatcatgtagctaagccctgcttgcactaatacaagtccacaattttttttaagtttgttgttttaagctgctaagttttgaggtggtttgtggtacgtggaataagatgtcactctaatataatataaacttaaactatgtggcattggctttggaatcagacaatggatagaagccagaaggatttcacaaagactgttagtgaaaagtgaacagacttcaaggaaaatgatagcaaaacctgtaaaagcattctgggaactgacagtaaacactgaatggtccttaaggagactgaaaacttgaaagagcttaagaagtctactggaaagggctttaaggataatgagaaaaaatcatcagtggagactgaggaaaacg

SEQ ID NO: 36985 - DNA, 645 bp, Homo sapiens
ctcccacaagacacggaaattatgggagctacaattcaagatgagatttgggtggggacacagccaaaccatattgctgctgaatagatcatgtagacaggctctcaaactacacggagagcaagagaggcccaccttaccacaacatttcatccaatccactaataaaacaggcacatcactgaagccaccttcaactctccagactacccagctgccagctgaataccacagatggctacagttaataccacatggagcagaatcaygtagctaagccctgcttgcactaatacaagtccacaattttttttaagtttgttgttttaagctgctaagttttgaggtggtttgtggtacgtggaataagatgtcactctaatataatataaacttaaactatgtggcattggctttggaatcagacaatggatagaagccagaaggatttcacaaagactgttagtgaaaagtgaacagacttcaaggaaaatgatagcaaaacctgtaaaagcattctgggaactgacagtaaacactgaatggtccttaaggagactgaaaacttgaaagagcttaagaagtctactggaaagggctttaaggataatgagaaaaaatcatcagtggagactgaggaaaacg

SEQ ID NO: 36986 - DNA, 645 bp, Homo sapiens
ctcccacaagacacggaaattatgggagctacaattcaagatgagatttgggtggggacacagccaaaccatattgctgctgaatagatcatgtagacaggctctcaaactacacggagagcaagagaggcccaccttaccacaacatttcatccaatccactaataaaacaggcacatcactgaagccaccttcaactctccagactacccagctgccagctgaataccacagatggctacagttaataccacatggagcagaatcatgtagctaagccctgcttgcrctaatacaagtccacaattttttttaagtttgttgttttaagctgctaagttttgaggtggtttgtggtacgtggaataagatgtcactctaatataatataaacttaaactatgtggcattggctttggaatcagacaatggatagaagccagaaggatttcacaaagactgttagtgaaaagtgaacagacttcaaggaaaatgatagcaaaacctgtaaaagcattctgggaactgacagtaaacactgaatggtccttaaggagactgaaaacttgaaagagcttaagaagtctactggaaagggctttaaggataatgagaaaaaatcatcagtggagactgaggaaaacg

SEQ ID NO: 36987 - DNA, 645 bp, Homo sapiens
ctcccacaagacacggaaattatgggagctacaattcaagatgagatttgggtggggacacagccaaaccatattgctgctgaatagatcatgtagacaggctctcaaactacacggagagcaagagaggcccaccttaccacaacatttcatccaatccactaataaaacaggcacatcactgaagccaccttcaactctccagactacccagctgccagctgaataccacagatggctacagttaataccacatggagcagaatcatgtagctaagccctgcttgcactaatacaagtccacaattttttttaagtttgttgttttaagctgctaagttytgaggtggtttgtggtacgtggaataagatgtcactctaatataatataaacttaaactatgtggcattggctttggaatcagacaatggatagaagccagaaggatttcacaaagactgttagtgaaaagtgaacagacttcaaggaaaatgatagcaaaacctgtaaaagcattctgggaactgacagtaaacactgaatggtccttaaggagactgaaaacttgaaagagcttaagaagtctactggaaagggctttaaggataatgagaaaaaatcatcagtggagactgaggaaaacg

SEQ ID NO: 36988 - DNA, 580 bp, Homo sapiens
tttccaggcttgggttttatggatcagtaagaaaaaaaatgggatgatgaacatatgattgctagcttttaattttgtcaatatagacattggtatcatttatcttgaatactcaatatttaatttggaaacatgaatatttttccttcatttattctctcattatagatttatggtctatctagagttggctggttattcagtctactacctttattttactgatgagggagctgaggctccaaaatgcctttgagaccccagagagaagacagaaaacttctttctcatgaatatattatagcctaatattgacatgttactagcagttacaaacataaatgttgctatgacttgtatgggagttaatttttcttcaggcttgaaatgtgatgattcccaaagccatcttttygtgtaaattagataatttcctggattaatttgtatcttgggaaattactgattgcagctattattttagaagtgtgactgatagcttactgagattctgagttgctattttgttttgggaagcatttttagagagtattataataatttgacagatatgcaaaag

SEQ ID NO: 36989 - DNA, 580 bp, Homo sapiens
tttccaggcttgggttttatggatcagtaagaaaaaaaatgggatgatgaacatatgattgctagcttttaattttgtcaatatagacattggtatcatttatcttgaatactcaatatttaatttggaaacatgaatatttttccttcatttattctctcattatagatttatggtctatctagagttggctggttattcagtctactacctttattttactgatgagggagctgaggctccaaaatgcctttgagaccccagagagaagacagaaaacttctttctcatgaatatattatagcctaatattgacatgttactagcagttacaaacataaatgttgctatgacttgtatgggagttaatttttcttcaggcttgaaatgtgatgattcccaaagccatctttttgtgtaaattagataatttcctggattaatttgtatcttgggaaattactgattgcagctattattttagaagtgtgactgatagcttactgagattctgagttgctattttgttttgggaagcrtttttagagagtattataataatttgacagatatgcaaaag

SEQ ID NO: 36990 - DNA, 961 bp, Homo sapiens
ctctgccaggcttggtggctcatgcctataatcccagcactttggagaagctgaagtgggtagatcacttgaggtcaggagttcgagaccagtttggccaacgtggtgaaaccctgtctctactaaaaatacaaaaattaactgagcatggtggtgtgaacctgtaattccagctacttgggaggctgaagcaggagaatgacttaaccctgggagatgaaagttgctgggagctgagatcacgccactgcactccagcctggacaacagagtgagactccatctcaaagaaaaaaataaaacaaacaagcaaacaaacaaaaaaacctttccctcccctgtaattttaaccagggcatgcccttctcataatgtttgatgaagttactgtaatgacttttgttgatgtactttatacattatacaaattcatttattttattcaaatggttgagttggctattactaggtatacgtggaaagagaaatttggtgtagatatgccaggtaaatgtttcaaagtgacagaatttgagaagtacagtttggggtaccttggaagtgatagggytgaagggttaacattgtatgtcattcattcaccatgggataagagtgacagcatcagagaatgtattctctttgattttttcccagcattaatcatgaccatctgtcagctgcaagagaggcctcacgacattatggaataagaataggatttggaataataaatataatagctacaatttattaggctattgcttccaagctgtggctgtactcagttctttacatgtatatttcaattccctcctctgatggaggcatcataatcaatcattcttatagattagttaggtaggcaaatcacacatggccacacagccaggagatggcagagttactggatgtgggctcacgtttctctgtctccagggcccatactcccgtactgtca

SEQ ID NO: 36991 - DNA, 567 bp, Homo sapiens
tgcctgcaaatcattttgtagtattgctgtctcagtatgacatgaaccatctccatgaagttgcacaagtcattggatatatctggtcatatcttatcaccacctgtaacacaaataactattctaaataatttctaaactcctcctaacagcaatgatcttccataattctaaacttttccattgctcytcactctttttctcactcagtattacttttgttatcctgtgcatccttttgatttaaggaatatgatcaatcatagttgctaagaaatagaaaagtatatacaaaaatccaatatagacatgagtattagctttttatgttgttgtaataaattaccacacatttaatgacttaaaacaacacaaatccattctctgtaaattcgggactcagaagtataaaatcagtctcattgggcttaagttaaggtgtcagtagagccagttccttctgcaggccctgaggggaggatcatttcctcaccatttttagtttctagaagccacctgtattccccagtttatagtcccttactttaccttcaaagtcagcagtgt

SEQ ID NO: 36992 - DNA, 567 bp, Homo sapiens
tgcctgcaaatcattttgtagtattgctgtctcagtatgacatgaaccatctccatgaagttgcacaagtcattggatatatctggtcatatcttatcaccacctgtaacacaaataactattctaaataatttctaaactcctcctaacagcaatgatcttccataattctaaacttttccattgctcttcactctttttctcactcagtattacttttgttatcctgtgcatccttttgrtttaaggaatatgatcaatcatagttgctaagaaatagaaaagtatatacaaaaatccaatatagacatgagtattagctttttatgttgttgtaataaattaccacacatttaatgacttaaaacaacacaaatccattctctgtaaattcgggactcagaagtataaaatcagtctcattgggcttaagttaaggtgtcagtagagccagttccttctgcaggccctgaggggaggatcatttcctcaccatttttagtttctagaagccacctgtattccccagtttatagtcccttactttaccttcaaagtcagcagtgt

SEQ ID NO: 36993 - DNA, 567 bp, Homo sapiens
tgcctgcaaatcattttgtagtattgctgtctcagtatgacatgaaccatctccatgaagttgcacaagtcattggatatatctggtcatatcttatcaccacctgtaacacaaataactattctaaataatttctaaactcctcctaacagcaatgatcttccataattctaaacttttccattgctcttcactctttttctcactcagtattacttttgttatcctgtgcatccttttgatttaaggaatatgatcaatcatagttgctaagaaatagaaaagtatatacaaaaatccaatatagacatgagtattagytttttatgttgttgtaataaattaccacacatttaatgacttaaaacaacacaaatccattctctgtaaattcgggactcagaagtataaaatcagtctcattgggcttaagttaaggtgtcagtagagccagttccttctgcaggccctgaggggaggatcatttcctcaccatttttagtttctagaagccacctgtattccccagtttatagtcccttactttaccttcaaagtcagcagtgt

SEQ ID NO: 36994 - DNA, 1045 bp, Homo sapiens
cctctatgtgtcsctggtatcaatgactctctaccttggtggtttttttgttgttgttttcattacggtaaaatacagatgaaataatttaccatcttaaccagttttaagtgtacagttcagtggcattaagtacattcacacaggtatgctgttaattttaaattcacagttttaagcacttagtgggacctttcaaactggagatgtatattcttatttaataatttcatcctctattttctctcttttctctttctggaatttctattaaacagatgtttgatcttctgcactacacatctaactttatgtccttcctatcatctctctaatcatttgttctactttctggggtttctttaacgttttctttcagttatttactgagtgttttatttctatattttacttctctgtttttcttgctttgaatgtattttaaaaatagcatcccattattgtttcattgatgtaaaatgttatattattctccaagaacagtaatcacattttttgaaattttcttataggccctttctttcttccaagtaccttttgccttttttttgtttgtttagtttggggtctctcattttagaaaagttttccttaactattagccatccctggctatctctttttggctaagaatctgtcactacgaagctgaatggatgatctatgtacattggacagggatggtttgattagttagaaaccaataattttcttggcgaattgcttgcaaatatccgtgggttttctgttaagtcaggatgtcagccatctgaaaacccagcggcataggaacagaagtggggatctcaccgtttacaaggtaggcttttatttaattactgtgttttttagcacagcattccactatctcctttgcctcatgtgcttaactctgggagctctcaggttcatattcccagtaaacctctcacctcctctaagcatgatgtagggaaggcatcaggcaccaccctcttcttatatagattttcgactaatcattccccacctcaatgtcttctaa

SEQ ID NO: 36995 - DNA, 1045 bp, Homo sapiens
cctctatgtgtcgctggtatcaatgactctctaccttggtggtttttttgttgttgttttcattacggtaaaatacagatgaaataatttaccatcttaaccagttttaagtrtacagttcagtggcattaagtacattcacacaggtatgctgttaattttaaattcacagttttaagcacttagtgggacctttcaaactggagatgtatattcttatttaataatttcatcctctattttctctcttttctctttctggaatttctattaaacagatgtttgatcttctgcactacacatctaactttatgtccttcctatcatctctctaatcatttgttctactttctggggtttctttaacgttttctttcagttatttactgagtgttttatttctatattttacttctctgtttttcttgctttgaatgtattttaaaaatagcatcccattattgtttcattgatgtaaaatgttatattattctccaagaacagtaatcacattttttgaaattttcttataggccctttctttcttccaagtaccttttgccttttttttgtttgtttagtttggggtctctcattttagaaaagttttccttaactattagccatccctggctatctctttttggctaagaatctgtcactacgaagctgaatggatgatctatgtacattggacagggatggtttgattagttagaaaccaataattttcttggcgaattgcttgcaaatatccgtgggttttctgttaagtcaggatgtcagccatctgaaaacccagcggcataggaacagaagtggggatctcaccgtttacaaggtaggcttttatttaattactgtgttttttagcacagcattccactatctcctttgcctcatgtgcttaactctgggagctctcaggttcatattcccagtaaacctctcacctcctctaagcatgatgtagggaaggcatcaggcaccaccctcttcttatatagattttcgactaatcattccccacctcaatgtcttctaa

SEQ ID NO: 36996 - DNA, 1045 bp, Homo sapiens
cctctatgtgtcgctggtatcaatgactctctaccttggtggtttttttgttgttgttttcattacggtaaaatacagatgaaataatttaccatcttaaccagttttaagtgtacagttcagtggcattaagtacattcacacaggtatgctgttaattttaaattcacagttttaagcacttagtgggacctttcaaactggagatgtatattcttatttaataatttcatcctctattttctctcttttctctttctggaatttctattaaacagatgtttgatcttctgcactacacatctaactttatgtccttcctatcatctctytaatcatttgttctactttctggggtttctttaacgttttctttcagttatttactgagtgttttatttctatattttacttctctgtttttcttgctttgaatgtattttaaaaatagcatcccattattgtttcattgatgtaaaatgttatattattctccaagaacagtaatcacattttttgaaattttcttataggccctttctttcttccaagtaccttttgccttttttttgtttgtttagtttggggtctctcattttagaaaagttttccttaactattagccatccctggctatctctttttggctaagaatctgtcactacgaagctgaatggatgatctatgtacattggacagggatggtttgattagttagaaaccaataattttcttggcgaattgcttgcaaatatccgtgggttttctgttaagtcaggatgtcagccatctgaaaacccagcggcataggaacagaagtggggatctcaccgtttacaaggtaggcttttatttaattactgtgttttttagcacagcattccactatctcctttgcctcatgtgcttaactctgggagctctcaggttcatattcccagtaaacctctcacctcctctaagcatgatgtagggaaggcatcaggcaccaccctcttcttatatagattttcgactaatcattccccacctcaatgtcttctaa

SEQ ID NO: 36997 - DNA, 1045 bp, Homo sapiens
cctctatgtgtcgctggtatcaatgactctctaccttggtggtttttttgttgttgttttcattacggtaaaatacagatgaaataatttaccatcttaaccagttttaagtgtacagttcagtggcattaagtacattcacacaggtatgctgttaattttaaattcacagttttaagcacttagtgggacctttcaaactggagatgtatattcttatttaataatttcatcctctattttctctcttttctctttctggaatttctattaaacagatgtttgatcttctgcactacacatctaactttatgtccttcctatcatctctctaatcatttgttctactttctggggtttctttaacgttttctttcagttatttactgagtgttttatttctatattttacttctctgtttttcttgctttgaatgtattttaaaaatagcatcccattattgtttcattgatgtaaaatgttatattattctccaagaayagtaatcacattttttgaaattttcttataggccctttctttcttccaagtaccttttgccttttttttgtttgtttagtttggggtctctcattttagaaaagttttccttaactattagccatccctggctatctctttttggctaagaatctgtcactacgaagctgaatggatgatctatgtacattggacagggatggtttgattagttagaaaccaataattttcttggcgaattgcttgcaaatatccgtgggttttctgttaagtcaggatgtcagccatctgaaaacccagcggcataggaacagaagtggggatctcaccgtttacaaggtaggcttttatttaattactgtgttttttagcacagcattccactatctcctttgcctcatgtgcttaactctgggagctctcaggttcatattcccagtaaacctctcacctcctctaagcatgatgtagggaaggcatcaggcaccaccctcttcttatatagattttcgactaatcattccccacctcaatgtcttctaa

SEQ ID NO: 36998 - DNA, 1045 bp, Homo sapiens
cctctatgtgtcgctggtatcaatgactctctaccttggtggtttttttgttgttgttttcattacggtaaaatacagatgaaataatttaccatcttaaccagttttaagtgtacagttcagtggcattaagtacattcacacaggtatgctgttaattttaaattcacagttttaagcacttagtgggacctttcaaactggagatgtatattcttatttaataatttcatcctctattttctctcttttctctttctggaatttctattaaacagatgtttgatcttctgcactacacatctaactttatgtccttcctatcatctctctaatcatttgttctactttctggggtttctttaacgttttctttcagttatttactgagtgttttatttctatattttacttctctgtttttcttgctttgaatgtattttaaaaatagcatcccattattgtttcattgatgtaaaatgttatattattctccaagaacagtaatcacattttttgaaattttcttataggccctttctttcttccaagtaccttttgcctyttttttgtttgtttagtttggggtctctcattttagaaaagttttccttaactattagccatccctggctatctctttttggctaagaatctgtcactacgaagctgaatggatgatctatgtacattggacagggatggtttgattagttagaaaccaataattttcttggcgaattgcttgcaaatatccgtgggttttctgttaagtcaggatgtcagccatctgaaaacccagcggcataggaacagaagtggggatctcaccgtttacaaggtaggcttttatttaattactgtgttttttagcacagcattccactatctcctttgcctcatgtgcttaactctgggagctctcaggttcatattcccagtaaacctctcacctcctctaagcatgatgtagggaaggcatcaggcaccaccctcttcttatatagattttcgactaatcattccccacctcaatgtcttctaa

SEQ ID NO: 36999 - DNA, 1045 bp, Homo sapiens
cctctatgtgtcgctggtatcaatgactctctaccttggtggtttttttgttgttgttttcattacggtaaaatacagatgaaataatttaccatcttaaccagttttaagtgtacagttcagtggcattaagtacattcacacaggtatgctgttaattttaaattcacagttttaagcacttagtgggacctttcaaactggagatgtatattcttatttaataatttcatcctctattttctctcttttctctttctggaatttctattaaacagatgtttgatcttctgcactacacatctaactttatgtccttcctatcatctctctaatcatttgttctactttctggggtttctttaacgttttctttcagttatttactgagtgttttatttctatattttacttctctgtttttcttgctttgaatgtattttaaaaatagcatcccattattgtttcattgatgtaaaatgttatattattctccaagaacagtaatcacattttttgaaattttcttataggccctttctttcttccaagtaccttttgccttttttttgtttgtttagtttggggtctctcattttagaaaagttttccttaactattagccatccctggctatctctttttggctaagaatctgtcactacgaagctgaatggatgatctatgtacattggacagggatggtttgattagttagaaaccaataattttcttggygaattgcttgcaaatatccgtgggttttctgttaagtcaggatgtcagccatctgaaaacccagcggcataggaacagaagtggggatctcaccgtttacaaggtaggcttttatttaattactgtgttttttagcacagcattccactatctcctttgcctcatgtgcttaactctgggagctctcaggttcatattcccagtaaacctctcacctcctctaagcatgatgtagggaaggcatcaggcaccaccctcttcttatatagattttcgactaatcattccccacctcaatgtcttctaa

SEQ ID NO: 37000 - DNA, 576 bp, Homo sapiens
ttgcagctgctgtcaaccattctgagttcagcccagggcctgaaggatggcgtggcacttctgaaggtctggctgcggcagcgggagctggacaaggtgagttgggggtggcgcagcctccctacctgagcgcctgtgtgatgggcaggctctgacctcagcctctccctgtctctttcagggccagggtgggtttactgggttccttgtctccatgctggttgtcttccttgtgtctacacgcaagatccataccaccatgagtggctaccaggtcctgagaagtgtcttgcagtttctgggtgaggcaactaggtggggaarggccaggggctccactcctcctgggaatcctctcatcccagtagcagtcttttggtgttttgccatcagacagatgagcaaactgaatcggctgagggagggtgtcattagggctgggtccccagaaggggataccttctaatacacttgtgattcacttcagccactacagacctgacagtcaacgggatcagtttatgtctcagctcagatccctctttggtgagttggggaagggccaggtctatgcca

SEQ ID NO: 37001 - DNA, 622 bp, Homo sapiens
ttttaaatgtacaatttgtggcatcaaataaatcacagtgttgtgcaaccatcaccaccattcatctgcagaactttttctcartcccaaatagaaactttacccattgaacgctaatccccattgcccactcctgtcagcccttggtaacctccattctactctctgtctctacaaatttgcctattctgagtacttcatataagaggaatcatatagtatttgtccttttgtgtccagcttatttcccttagcttaatatgttcaagcttcatcaatgtcgtagcatgtatcagaatttcattccttcttaaggctcaataatattctgctctatgtctctatcaccttttgcttatccactcatcattcaatggacacttagtttgcttcctccttttggcttttgtgaataatgctgctataaacgtgagtgtgccggtatctgtgtgggacactgcttttacctcttttgagtatatatacctagaagtggaattgctgtttaacttttcgagaaaccaccaaaccattttccaaacaaagctatttgataatagatgttaggcattaatgatgcttttattttcaatgtgtgttgacttgctggcccacacagcca

SEQ ID NO: 37002 - DNA, 808 bp, Homo sapiens
cagttctagcatctataaccattgtattttactctgctcacttgagacatttcttagcatctgtgtatatccagtattttcagaaaacataggttcccaagttatccgggaaacatgaaaaaactttttatagatgtcctctcctgaataaatctcattgtagaattgctacttaaggcaatttttttttcacaatctggaatatttatcaaaaagaaaggaaatggcttgctcagtgttaagccaagcacatattttaagtgttgtatgatttggacaggacaataaaaagggatatccggtaaaaaggaagaatagataagaactatctgccaaaactaaactttaagagatgtcgtcatgttacctctttttttaataccttgaacatcttggttacaatttaatcttactatagcctgagattttaaatgccaatacatgtttatagccctagccctgacactaagtagatttgtggtcttcagaattcctttacaattcaatacaatacatatattgattgtctaatacatgccaggtgctgtgatgggcattggaagtatgaagataaattaaacatggttttgccctaaagkatttcactgaggatctggttaagtcatcaagcttctttgagtgccaccttctcatctgtaagagtggggcacggaaataaatatttcatctgctccagaaacttttattgagcacgcttgtcttgccatacactctaggagatatcaaggaatgaaaataggactgtatcactataacaattcaattacaaagcatgcctagtctctgc

SEQ ID NO: 37003 - DNA, 454 bp, Homo sapiens
tgcttcctcacagatgttgtcaatctctagtaaacacatcccatcacaaactttatctccatctcttcttcagagaacccaacttttgacagtaccgtgcgataaccaagaaggtggctctggatcctctgtgcccaactctgaattctgacctccactccctgggctctctcaaatgtgtcacttagtcatatgttgccttggtttcttcacctataaaatggaaatgacattaatctgtaccccataaagttgtgaagatcaagtgaattaatccatattaaacacttaaaagagtgcctgggatcattaagcattcaggaaatgttaggtgytattatttccaacattacagcatgctaggccctgcgccacaccctgggaacacagagtaaaatcaggtatggcccttgcccatgaaggagtaagtaccatgggagatgtgtgtgtcaat

SEQ ID NO: 37004 - DNA, 527 bp, Homo sapiens
  misc_feature (1)...(527): n = A,T,C or G
tannnnnnnnnnnnnnnnnnnnnnnnnnnnnnnnnnnnnnnnnnnnnnnnnnnnnnnnnnnnnnnnnnnnnnnnnnnnnnnnnnnnnnnnnnnnnnnnnnnnggaaatataccaaaaatagaaatactaggatggaagagttttgtttttgttttgaaacaggatctyactctgtcacccaggctggagtacagtggagcaatcttggctcactgcaacgtccacctcccaggcacaagcgatcctcccacctcagcctcctgaagagctgggacttcaggcacctgccaccatgcctggctaatttttgtagagatggggtttcaccatggtgcccaggctggtctcaaactcctgagctcaagcaatccgcccaccttggcctcccaaagtgctgggattacaggcatgagccagaagactatgcagaaataaaggggaaacaatttgtgatagctagtgagagcagaacacaaaatggaatgggtggtgtgtttacatatgtctgcatgcatgtagaaataaat

SEQ ID NO: 37005 - DNA, 527 bp, Homo sapiens
  misc_feature (1)...(527): n = A,T,C or G
tannnnnnnnnnnnnnnnnnnnnnnnnnnnnnnnnnnnnnnnnnnnnnnnnnnnnnnnnnnnnnnnnnnnnnnnnnnnnnnnnnnnnnnnnnnnnnnnnnnnggaaatataccaaaaatagaaatactaggatggaagagttttgtttttgttttgaaacaggatcttactctgtcacccaggctggagtacagtggagcaatcttggctcactgcaacgtccacctcccaggcacaagcgatcctcccacctcagcctcctgaagagctgggacttcaggcacctgccaccatgcctggctaatttttgtagagatggggtttcaccatggtgcccaggctggtctcaaactcctgagctcaagcaatccgcccaccttggcctsccaaagtgctgggattacaggcatgagccagaagactatgcagaaataaaggggaaacaatttgtgatagctagtgagagcagaacacaaaatggaatgggtggtgtgtttacatatgtctgcatgcatgtagaaataaat

SEQ ID NO: 37006 - DNA, 1225 bp, Homo sapiens
aatagtaagagcttctgggaggcaagatttctgctcaatagaaggatgcactttctgataattaaagctgtctgacagtggagaagtgaccacctgtcatggggataattcaggcagagaccaggtgattatcatttagaaatatggtaaaagggataattcaggtggtagaacatttgattaagtgatttctcaatttccttacaactgaaacgttttgcttaggattgtggaagttcttatctaacctaaaattttttcccatgaagaaacagctacatggtacagtggttaaaagcagcaattttatgattaaacagattgacctggagtttgtgccttgctgctactgaccaacagagtgacaataaggcactcattcaactttcccagagacagtttctgtagctgccagaaagaacaatatctaataagtgagtttggaggattgagtttatacatgttacaatatctcatgggtatgggtctacaaacctaggaggtcatgtctttcaaaatacaaagggagaaatgattgagaaatatacctgcttggaactagaggaacatcatgatattcaatgattttttttaaaaaaatctctacatctgtaatgtatattggaccactttgcatgcttagtttataatagccagaagcaaatatctttgtggcagttgtatgacaattaagacattttagcaactgcatggatgaagtattcacaattgattgctttcttctggagataattccataatctatttctagatcaatagctctgtatagacactagaagtgattaaatatctaactaaatgctgtaagtgtcattgtaacatcctgggaatctggaaatcacataatctctcagttcatgtgtatcactctctttcaagccagcaacacctggggcagtttaaggttttcttgcacatttgtgtagcatgatgatactcacgctggcaacaataaatcaaacctctggtgatagatgttttttctgtatgcacacatacagataccttaatgcaagtcacatttcccaaagagtacagtgtgagtattacgtrcagatactacgcaaaagcaatctctcttagcctagggtttcgatccttcactgtgaaccctcctggagcctgctgatcagcatgcagaaccaagttccagagaagtacagagaaatctctagggatctctgtccacctgtgaagtgagaaa

SEQ ID NO: 37007 - DNA, 805 bp, Homo sapiens
tactacattttaaactaggctgccacccagtcactttgggctgcttgtgctamgagatcagaaggtgagaaaatgagtcctcgtcccagcaagagtcattgatcctgaaccttaggataagacagggctgcttttatacaatggaggcatgtcagagtgcctttggcatccaggtgctctaatgggatgtttcttggttctctcctatacaattttaatagtaaatggacaagtgcagcagctacagcctgaaaaggacatgtggaccaggggttcagaccccttagggatgagggcctgtgtctccgattggtaaaccatcaaaccctgcagaggtgctagcagaaggtaaggggaatttagaatggatggtgcagaaaggatacagtgagtaccaggtgtacaccccatgaccatctacaatcgcagaagttctaatttgtctcaataactgccaacctgaaagtgtccacaggaatagacacaaaccagaaagattccatgggagttgttttctgatggagtatactcactataggcagctattggttttgagtgacaaggtgtggtccctactaaatctgtgatgtacccaggtttgactttaggaatgaggtacttatttctccagctgccacaagtgatggctgctgatcatttgtgactgagctccttttggagaaatgccctcagctgagtaaaggtgcctctcccaggtttacacctctctctggatgcaggttgcactcaatgactggccaaggtgtggggacaaatgtctggcctccattgcttcaatttggaa

SEQ ID NO: 37008 - DNA, 807 bp, Homo sapiens
cacatcagggcctgctgctccctggcacatcacttgaaggtttcacttgggtgtccctgcaggaaaagtgaaatgggcccttttgaactcactgggacaacataaaggagttccctggactttccccactcagagaagcagtcctatgtttttgagtttgctagatgttcagaagcatatcatggaagtttcaagaaaaatgaaacaaagcagaacatgggaaaagcctcagagactacaagagtagatgttttcaggggaaacagtctagtttgacatttacaaggcatgagtggtcccttttctttttttatgggacacttagagagtctgatgataatatgatggtawgtattaagaaacagtttatttgtttcccagtttcttctgatacccaataaaaatatcagagataggaagaaagaagagcaaagagaaattcaaaaaattatcatcttcttagtgaaagagttgggaaaactgttgacaggggtagcaacagcagaggagcaccccagtcattctcttcttcaagaccccagcttctaaagatgagaatgaaataaagacaaaggaagtgcccttactcaaatagcctccaccatctagatgcctcttctccttcttccacaaccaaatctgacccaactaagtcccagatcaacaacttcagctgtaaaaccaaactcctattatcatttttgactaaacacttcttctaaaaaaatagtattacattttcaaccctactaagcagtctgtttcttgagtttggggtttatatccattttatatgttgcccctata

SEQ ID NO: 37009 - DNA, 548 bp, Homo sapiens
tactaaactcagagtttctatttttctcttggaaactgaaataaaatgaatgtgttgtctcttatgatgtcaagggcccctcaaattctaataatccaagattatattaattgtgctaatgtaagcagcaaatatttaacaatcgttcaaataatttctgagtcttccctgtatttcaggccccatgctgaaagctggggcaarcagaataagaaagaaaaccttgctcctgtcctcaaatagatgatgaccagcatgggcctttaattgaggtaatgagcacacaaaggctaagagacaacaagtgtcttagtagcaagtgccaggaggctggtcggagaaggagggaggagagagtcacaccttgagaaaggagtaaaaataaaatggttagagagaagagagaaagggcagctcaggcatggcggggggcagggacgggggcacagaggagcaacaattctatctcgaacgtgtgtgctgggggctttgtgttagaaaactgagacacacagtctgatacatttttgtgccatttctggacacaa

SEQ ID NO: 37010 - DNA, 974 bp, Homo sapiens
ctgcccacctcctcttcagctcatcagtagtgacatgccaatgtggtaggcagcataatgaccctgccctaaagatgtccacatcctaatcccagaaatatgtgaatgttaccttacatggaagagaggattttgcaggtgtgattaaattaagggtcatgagatgggaagattatcttggattagtggagagggctcagtgtaatcacatgggtccccacaaccgggaggctggagggtcagagtgagagttgtggccacagaagcagaagtcagagtaatttagggccaggagccaaggaatgtgggaagcctctagaagctgtaaaaggcaaggaattagattctccctcagagcttccaaaagaaaccagccctgccaataccttggttttagtacagtgagactaattttggactcctgactttcagaactataagataataaatgtgggttgttttgttacagcagccataggaaaccaatatactaggatagagtaagcctagatttcctctgaaatgtgaacgaattttctatctatctctgttgcaaaagagagaaacttttatccctttgaaaatttcccaytacagcttcagaataatcatgggcttgagacatgatagcgagggaccaatgtgagaaaagaaagcagtgacggggtggacctgccctttggataatgtttcctaaagtgacattcaaggagatcggcttccagggtttattctggcatggtagttaagcacatctccctgtgactttggaaatctttagcctctttttgcctcagtttcctcatctgtaaaataaggttaatcacagcattcacctcaaagagatgctgtgtgtaatgtttcatatagtacatgctacatggcaagctttatgtaaatgttagctcttatgaatagccattattttaaaaaagtgaaacagaatttatagggggtccaatatgtttagaaca

SEQ ID NO: 37011 - DNA, 980 bp, Homo sapiens
ttgctggtggttatctttactaagttccattgtggcctttggattgtcaattacagctttcaagtcacagaagcctatttcatacattcttatctgggaattgttcgctttgctagaccttatcacatcctaatacaaatattgctttaactctgctatttcattcccaattcacaaataatattttatgattgtgttcccagtagtgatgattcaactcttccactgtgcttatcatggagagctggttgggggtatttgccatatggttaatgtggcaacctgtgtttttagtggccattatccaagtgctaaagggaagaagagcaacaggaccatggtccagccatggggctaaagtgcccttgcacttaacaccacatgtgtttgggttaaaacggaggaaaaatattttcactgctagggcggtgaagttaccagtggagtgtccaggaataaaaggctgaatatctcttaaaatcaaataatagagggctagaaataacacttcactaagagtcaggaggcctggactttcgtgcttgctgtgaaatcagttagctgaaagcagttagttgatcaagttatgtctctctcagggcttctgtttccccatctgtgcagttagaggcagaagtaggtgatctttcaaggtttttttcaatttctaaaattccatcgcccaattctgtgacaatacagtgagtgtaggtaattctttttcatcaatttcagaagtgtttactgtgatatttccaaaatctcctgggaattttaracatatgtttcagaaatatcacagaagtgtttgctgtgattttgtgtaaatattttttttacttggttaggatagggacagcttgatagaaaaatccaaaattcttcagagacttgttgtcttgggccagaagcatcaacatcacttgggagcttgttggaggtgcatgtcagatctcgcctcagactctcctaaatcagtc

SEQ ID NO: 37012 - DNA, 575 bp, Homo sapiens
tagggcaattttcaaaactcacattttaaagaacaactaaattgcagttgctcagtgcatataaataggagtgtttccatagagtcaatttgagcagctttagtaattggagttatttttcatttggccacccatctaattgaacattaaaatttaaaaattaaatcaaacacataggtaaaactaatggtataaattctgatcctctttttcaaaaatgggaaaacattcacatttcactaataagtcattagcattcttctcttcaaagtcctcaagatggaagaaattccaagaactaaaacggttagctgtatgaattttcatgttaatatcccataaccctctccacccacccttgctcctggkataatctggaagaggctcacctcaatgtttctgagtccacttcagaaattccaaacactgggtgagcctcagcattgacctcttacagagaaagggttccttttgccctggtaataatcgaccagtgtttattaggcaaccatgattctttccccccaggtgcaaaaggggagacaaaaatagaagacgtgtttttcactgccaag

SEQ ID NO: 37013 - DNA, 580 bp, Homo sapiens
aattagtctttttccctattttaaataatatacgtgcaatatacttaccagtgtttagtattgtagattttttcttggtgaacaaactgtagtggttccagccatgtaatagtgaaagagttattaatataagacgatgaataattttaaatgtgagtctagtgagtgcttccttttccagacctttcctctagggaaagacccgaaatgtttataatgatgtgtttgggttgacaattaataatccttttttacttttaataaagggtgtatcatggaatayggttcggtacatgatcggagaagtacaatatggaggcagagtgacagatgactttgacaaacgtctacttaattgctttgccagagtaagtcaatttagaaaaataaagtttggagacacatttcactgtattttccaatttttttgtttgtaataggtctgccaaactcaagcatacagcagagctgctgcaaagaattagccaagaaacaaatgcatgtgtgcgcttacacacacgcacacacatgcacacacacacacacacacacacacaacaaccagcaattgggccaggca

SEQ ID NO: 37014 - DNA, 1105 bp, Homo sapiens
gaaataggctctgtgagcagaagggcccgattccctttgtcagataatttattctgttttctcctcccccactcctttgctctctttctctctccaacctcgctccccagtcccctctctcaatgctcccccctccttatccccatgctgaaaatgagattacagtatttaaatgactatggtaatcaatctagggaccccgagctgagattgaggttaatttttcttagcagaacaaagaagcgtgatgcctttggggacgtgaaggtgcagtctgggtttcttgcttgtgttttttcccccccgaaattgcagttttaggagtcttttcttgtcactaactaggcgccgagtgtgatttttaaaggcagcagcctctaagagagcagaaatgtaattttgagctgataaacagctaacggccttcaatcaacaattttaataggaaaaaaagtcacttacatgatatgggtacagatctaatgaaagggtgatcatttaccttatttatttttaaacacacatggaataatttcccactgtgttagaactagtaattacagccacacggtgtgtccgtaaacttttgaatgaagagccttgtcactcagacggccctctccctggcagcttttgctgctataaaagttgagattttgtcatgttttggctaattggaaaccgggtcattataccattgaaaatctacatgaaagtgacttgttcaattgttacctgaagcattcacaagccggccagtcattctgcygagacccccgcccgcctccccgagcttctaaaacagagagaatcaaaatatgtatatttctttgtctccctttgctatcttgtcagagctgttttacatgctgccacccaatgttatcttttatttgtgtcaggagaaaggatttgacaagttcagtatacaatgttcatttggcaaggcaaatttttcataccaattttgagttaggaaatgaaactatctttcaacagaatgagcaacatcatttttggacagacttattatgagagagaggattgcagaactttatttccttgcatgatcccgaaaagtctaatacattttttaaaagtagga

SEQ ID NO: 37015 - DNA, 1706 bp, Homo sapiens
ttctgttttttcctctcaggaaaaactgaagcctcagtacttggaagagctacctggacaactgaaacaattctccatgtttctggggaaattctcatggtttgccggggaaaaggtaggaagaagggaaaagaagaggatacttctctatctctgcaggctactactcctcagacctaagcatcttattgcttttcttctagctcacctttgtggattttctcacctatgatatcttggatcagaaccgtatatttgaccccaagtgcctggatgagttcccaaacctgaaggctttcatgtgccgttttgaggtgacgtttcctgcacctttctcttataaaaacactcacaggctcccctgggacctgcaggatcccatagtggaggattcttccccggcttttgcctaatgggatcaatggttggacacctctagacctttaagtcttgggaagagcctaacttctataccttggaggcactgtctacaaaaaaatggaggaggtagacgcaggcaacacgtgaatgttgctgttctggtatgcatctgttggactgggttggggtckttataagatttggtgtattttcctttcaggctttggagaaaatcgctgcctacttacagtctgatcagttctgcaagatgcccatcaacaacaagatggcccagtggggcaacaagcctgtatgctgagcaggaggcagacttgcagagcttgttttgtttcatcctgtccgtaaggggtcagcgctcttgctttgctcttttcaatgaatagcacttatgttactggtgtccagctgagtttctcttgggtataaaggctaaaagggaaaaaggatatgtggagaatcatcaagatatgaattgaatcgctgcgatactggcatttccctactccccaactgagttcaagggctgtaggttcatgcccaagccctgagagtgggtactagaaaaaacgagattgcacagttggagagagcaggtgtgttaaatgggactggagtccctgtgaagactgggtgaggataacacaagtaaaactgtggtactgatggacttaaccggagttcggaaaccgtcctgtgtacacatgggagtttagtgtgataaaggcagtatttcagactggtgggctagccaatagagttgggacaattgcttactcattaaaaataatagagccccacttgacactattcactaaaattaatctggaatttaaggcccaacattaaacacaaagctgttgaaatattgatgaaaatgtaagaatttttgtgaccacggggtaggagaagtttctttaaagacgtaaaaagaaaaaaaccataggctgctctgcctgtggagtagccattctttattcttttactttttaaaataataacaatcacaaaggaaagatttgccaattgaataggatcaaattctacaacttttcctaaggcacccacaaataaatgacaagtgagacaaaaagcactagtataaagattatataaagacctataaatcattaagacaactgagtttttaaaaatggacaaaatccatgaacaatttataaaatagaaatatagccaaaaatgtctaaaagatgtttatgatgtaaggaattatcaattacaacagtgagaaaccatatttccttctatccgatgagtaaaaagtttctaaagtgttggcaaggctt

SEQ ID NO: 37016 - DNA, 1706 bp, Homo sapiens
ttctgttttttcctctcaggaaaaactgaagcctcagtacttggaagagctacctggacaactgaaacaattctccatgtttctggggaaattctcatggtttgccggggaaaaggtaggaagaagggaaaagaagaggatacttctctatctctgcaggctactactcctcagacctaagcatcttattgcttttcttctagctcacctttgtggattttctcacctatgatatcttggatcagaaccgtatatttgaccccaagtgcctggatgagttcccaaacctgaaggctttcatgtgccgttttgaggtgacgtttcctgcacctttctcttataaaaacactcacaggctcccctgggacctgcaggatcccatagtggaggattcttccccggcttttgcctaatgggatcaatggttggacacctctagacctttaagtcttgggaagagcctaacttctataccttggaggcactgtctacaaaaaaatggaggaggtagacgcaggcaacacgtgaatgttgctgttctggtatgcatctgttggactgggttggggtcgttataagatttggtgtattttcctttcaggctttggagaaaatcgctgcctacttacagtctgatcagttctgcaagatgcccatcaacaacaagatggcccagtggggcaacaagcctrtatgctgagcaggaggcagacttgcagagcttgttttgtttcatcctgtccgtaaggggtcagcgctcttgctttgctcttttcaatgaatagcacttatgttactggtgtccagctgagtttctcttgggtataaaggctaaaagggaaaaaggatatgtggagaatcatcaagatatgaattgaatcgctgcgatactggcatttccctactccccaactgagttcaagggctgtaggttcatgcccaagccctgagagtgggtactagaaaaaacgagattgcacagttggagagagcaggtgtgttaaatgggactggagtccctgtgaagactgggtgaggataacacaagtaaaactgtggtactgatggacttaaccggagttcggaaaccgtcctgtgtacacatgggagtttagtgtgataaaggcagtatttcagactggtgggctagccaatagagttgggacaattgcttactcattaaaaataatagagccccacttgacactattcactaaaattaatctggaatttaaggcccaacattaaacacaaagctgttgaaatattgatgaaaatgtaagaatttttgtgaccacggggtaggagaagtttctttaaagacgtaaaaagaaaaaaaccataggctgctctgcctgtggagtagccattctttattcttttactttttaaaataataacaatcacaaaggaaagatttgccaattgaataggatcaaattctacaacttttcctaaggcacccacaaataaatgacaagtgagacaaaaagcactagtataaagattatataaagacctataaatcattaagacaactgagtttttaaaaatggacaaaatccatgaacaatttataaaatagaaatatagccaaaaatgtctaaaagatgtttatgatgtaaggaattatcaattacaacagtgagaaaccatatttccttctatccgatgagtaaaaagtttctaaagtgttggcaaggctt

SEQ ID NO: 37017 - DNA, 1706 bp, Homo sapiens
ttctgttttttcctctcaggaaaaactgaagcctcagtacttggaagagctacctggacaactgaaacaattctccatgtttctggggaaattctcatggtttgccggggaaaaggtaggaagaagggaaaagaagaggatacttctctatctctgcaggctactactcctcagacctaagcatcttattgcttttcttctagctcacctttgtggattttctcacctatgatatcttggatcagaaccgtatatttgaccccaagtgcctggatgagttcccaaacctgaaggctttcatgtgccgttttgaggtgacgtttcctgcacctttctcttataaaaacactcacaggctcccctgggacctgcaggatcccatagtggaggattcttccccggcttttgcctaatgggatcaatggttggacacctctagacctttaagtcttgggaagagcctaacttctataccttggaggcactgtctacaaaaaaatggaggaggtagacgcaggcaacacgtgaatgttgctgttctggtatgcatctgttggactgggttggggtcgttataagatttggtgtattttcctttcaggctttggagaaaatcgctgcctacttacagtctgatcagttctgcaagatgcccatcaacaacaagatggcccagtggggcaacaagcctgtatgctgagcaggaggcagacttgcagagcttgttttgtttcatcctgtccgtaaggggtcagcgctcttgctttgctcttttcaatgaatagcacttatgttactggtgtccagctgagtttctcttgggtataaaggctaaaagggaaaaaggatatgtggagaatcatcaagatatgaattgaatcgctgcgatactggcatttccctactccccaactgagttcaagggctgtaggttcatgcccaagccctgagagtgggtactagaaaaaacgagattgcacagttggagagagcaggtgtgttaaatgggactggagtccctgtgaagactgggtgaggataacacaagtaaaactgtggtactgatggacttaaccggagttcggaaaccgtcctgtgtacacatgggagtttagtgtgataaaggcagtatttcagactggtgggctagccaatagagttgggacaattgcttactcattaaaaataatagagccccacttgacactattcactaaaattaatctggaatttaaggcccaacattaaacacaaagctgttgaaatattgatgaaaatgtaagaatttttgtgaccacggggtaggagaagtttctttaaagacgtaaaaagaaaaaaaccataggctgctctgcctgtggagtarccattctttattcttttactttttaaaataataacaatcacaaaggaaagatttgccaattgaataggatcaaattctacaacttttcctaaggcacccacaaataaatgacaagtgagacaaaaagcactagtataaagattatataaagacctataaatcattaagacaactgagtttttaaaaatggacaaaatccatgaacaatttataaaatagaaatatagccaaaaatgtctaaaagatgtttatgatgtaaggaattatcaattacaacagtgagaaaccatatttccttctatccgatgagtaaaaagtttctaaagtgttggcaaggctt

SEQ ID NO: 37018 - DNA, 1706 bp, Homo sapiens
ttctgttttttcctctcaggaaaaactgaagcctcagtacttggaagagctacctggacaactgaaacaattctccatgtttctggggaaattctcatggtttgccggggaaaaggtaggaagaagggaaaagaagaggatacttctctatctctgcaggctactactcctcagacctaagcatcttattgcttttcttctagctcacctttgtggattttctcacctatgatatcttggatcagaaccgtatatttgaccccaagtgcctggatgagttcccaaacctgaaggctttcatgtgccgttttgaggtgacgtttcctgcacctttctcttataaaaacactcacaggctcccctgggacctgcaggatcccatagtggaggattcttccccggcttttgcctaatgggatcaatggttggacacctctagacctttaagtcttgggaagagcctaacttctataccttggaggcactgtctacaaaaaaatggaggaggtagacgcaggcaacacgtgaatgttgctgttctggtatgcatctgttggactgggttggggtcgttataagatttggtgtattttcctttcaggctttggagaaaatcgctgcctacttacagtctgatcagttctgcaagatgcccatcaacaacaagatggcccagtggggcaacaagcctgtatgctgagcaggaggcagacttgcagagcttgttttgtttcatcctgtccgtaaggggtcagcgctcttgctttgctcttttcaatgaatagcacttatgttactggtgtccagctgagtttctcttgggtataaaggctaaaagggaaaaaggatatgtggagaatcatcaagatatgaattgaatcgctgcgatactggcatttccctactccccaactgagttcaagggctgtaggttcatgcccaagccctgagagtgggtactagaaaaaacgagattgcacagttggagagagcaggtgtgttaaatgggactggagtccctgtgaagactgggtgaggataacacaagtaaaactgtggtactgatggacttaaccggagttcggaaaccgtcctgtgtacacatgggagtttagtgtgataaaggcagtatttcagactggtgggctagccaatagagttgggacaattgcttactcattaaaaataatagagccccacttgacactattcactaaaattaatctggaatttaaggcccaacattaaacacaaagctgttgaaatattgatgaaaatgtaagaatttttgtgaccacggggtaggagaagtttctttaaagacgtaaaaagaaaaaaaccataggctgctctgcctgtggagtagccattctttattcttttactttttaaaataataacaatcacaaaggaaagatttrccaattgaataggatcaaattctacaacttttcctaaggcacccacaaataaatgacaagtgagacaaaaagcactagtataaagattatataaagacctataaatcattaagacaactgagtttttaaaaatggacaaaatccatgaacaatttataaaatagaaatatagccaaaaatgtctaaaagatgtttatgatgtaaggaattatcaattacaacagtgagaaaccatatttccttctatccgatgagtaaaaagtttctaaagtgttggcaaggctt

SEQ ID NO: 37019 - DNA, 512 bp, Homo sapiens
aaccccagtctgcctgggtgtctggtcttaagtcttagataaggtaatctgagagcgcttctcatggattgcccaaccacttcacttaagtgtgtaagtgaaaattgcactataaatcaaattattacagagcaaatcatagcctccctgaggaaactgctataatataaatgagctttgtttttctgaacaagaatctagcatggagggaagtaatgatccagtacaaaaacatagtaaatttgtgtgaacggttaaaagtatcaaaaacatatktcacattataagctttcagaactggaaatatctttggaaatgattcaattatgatttttagatgacaaaactgagggccatatgccttctttcccaaggtcagatagttagtgggtatcatagactgcaccaaatctcacatcttctattcccagcccaggccactagcttctttaacaacatggtaatgagtgtattctcttattatagaaaaattatgtattatgtaaggagca

SEQ ID NO: 37020 - DNA, 512 bp, Homo sapiens
aaccccagtctgcctgggtgtctggtcttaagtcttagataaggtaatctgagagcgcttctcatggattgcccaaccacttcacttaagtgtgtaagtgaaaattgcactataaatcaaattattacagagcaaatcatagcctccctgaggaaactgctataatataaatgagctttgtttttctgaacaagaatctagcatggagggaagtaatgatccagtacaaaaacatagtaaatttgtgtgaacggttaaaagtatcaaaaacatatgtcacattataagctttyagaactggaaatatctttggaaatgattcaattatgatttttagatgacaaaactgagggccatatgccttctttcccaaggtcagatagttagtgggtatcatagactgcaccaaatctcacatcttctattcccagcccaggccactagcttctttaacaacatggtaatgagtgtattctcttattatagaaaaattatgtattatgtaaggagca

SEQ ID NO: 37021 - DNA, 585 bp, Homo sapiens
ttgaaggctgaagcaggagaatggcatgaacccgggaggcagagcttgcagtgagccgagacactgcactccaggctgggcgacagagggagactacgccgcataaaaaacaaaaaacaaacaaacaaamaaaacatttgaaaggaaagacaggttccttctttctgtagcccataataattttttgaaagccagataaatcaaaatcaaacatattccataaaatattccaatgattaatggaaatagtatatattcttaaatttacctaaaaagaaaatatttaattgaatttaacccagaaatcaaaaccagatcaaatctaagaagcaaaaagttgccaaagatgagatccagaaaaattaggctttttttatttcttggagaaaattgtctggatcatggtggtgacatgtattactaatctactttttataaaacagccattggaaagcggatttcagctgatcactggtaccctatgtctcagtgttgttgtggctatctgtcccagtgtctgcaaggtctttactgtagtagaatcagcactggatatatttcaagagtaaaaggactcctagagct

SEQ ID NO: 37022 - DNA, 662 bp, Homo sapiens
gttttagtaagaaaaaaaacaaaatattggcatctcatggagaatgcagtgaagttactagaaagattattggaaccatgtatactttaaacatttaacattattctgtgttttttgaagggtatccatgccmaaaaaaaaaaaaaaaaccgaaagactgaataaagcaaaactaatatgaaaagcaactatgaactagattgtacgttcaaaaattgtattataagattataatgtttaaaatttttgtatgcaacttctattcacctgtataaagaagacattcatttgcacatatttataagtaggagcacgtatatcaacatctctttggtatttatatttcagaaaaacacataaaaacttgagctctttttatttttgcattggtctcacttccatgtgtccctaaagtattttcaaaatgttacccgttgatttataaagtgataaacattcaaccataaaaggttgaatttagaggcagatgccagcagtgccctgctcctaacaagttcatgcactctccatcagatagcaaatgcaccttcctcctctcctctgtgtcccctgtgcacaggagcatgctctgctcactcataggtcaggctgggagtgttaggaggtaggatagatagttaagacttctgggagcagccctc

SEQ ID NO: 37023 - DNA, 519 bp, Homo sapiens
agaaagttttactcactgaaaagagataacaaatgtttcatcttgaataccaactctcattagtcaatagtagctgattggagcaccatttgagagagattgaaagctctgtctaggctcagagggaaagaatgacatggctttgttaacaacggccaccacaagcatgagacgtaagagtgccacatatatsctggtcctcttttataatctttttgttgcaagtccttcattcaatgtaattgtgcaattgaaaaggatacatgagccgtgctctttttctgcttatagaaagtgaaatgaagtaacaccaaactttcagtctttgaccacaaaatctcaatcatcttttttaagaattctttttaaactttgacaaagtggctatgggagcattgatttgctagctttattggaacagatgctctgccttgataagaaaatcatcaaaagtatggagtatataaatttctaataggagtatagaactacatttatttttttaaaacctgtttggtt

SEQ ID NO: 37024 - DNA, 519 bp, Homo sapiens
agaaagttttactcactgaaaagagataacaaatgtttcatcttgaataccaactctcattagtcaatagtagctgattggagcaccatttgagagagattgaaagctctgtctaggctcagagggaaagaatgacatggctttgttaacaacggccaccacaagcatgagacgtaagagtgccacatatatcctggtcctcttttataatctttttgttgcaagtccttcattcaatgtaattgtgcaattgaaaaggatasatgagccgtgctctttttctgcttatagaaagtgaaatgaagtaacaccaaactttcagtctttgaccacaaaatctcaatcatcttttttaagaattctttttaaactttgacaaagtggctatgggagcattgatttgctagctttattggaacagatgctctgccttgataagaaaatcatcaaaagtatggagtatataaatttctaataggagtatagaactacatttatttttttaaaacctgtttggtt

SEQ ID NO: 37025 - DNA, 594 bp, Homo sapiens
tcataggaaaaatcactgatttaaaaaataattattgtgatattccatttattgataacatkaaacattctaattggtccatcaagtcaggtagagaatgtaagtacttaaaatatcttcaagtgatagatagcccagagctcagatttaaaatcctttgtacaaccaaagatggtcttatcaagaattgatgacagtggatttgtaatatattttgaaatcaggaagtgcaatgtctacagcattgttttccattctcaggattgttttgggtatttgaaatcctttgtacttccatatgaattttaggatatttttctatttctgttaaaaaatgccattgtgattttgataggaatttcactgaatttgtaaactgctttgggtagtataaacattttaacaatattaagtcttctaatccatgaacacaggatatctatttatttgtgtcgtctttaattttactcatgaattttttttgcaatctacagtgtgcaagttgttcaccttctcagttaagtttatttctaagtactttgttcttttgatgatattgtaagtggggtcattttcttaatttcttttcattgt

SEQ ID NO: 37026 - DNA, 594 bp, Homo sapiens
tcataggaaaaatcactgatttaaaaaataattattgtgatattccatttattgataacatgaaacattctaattggtccatcaagtcaggtagagaatgtaagtacttaaaatatcttcaagkgatagatagcccagagctcagatttaaaatcctttgtacaaccaaagatggtcttatcaagaattgatgacagtggatttgtaatatattttgaaatcaggaagtgcaatgtctacagcattgttttccattctcaggattgttttgggtatttgaaatcctttgtacttccatatgaattttaggatatttttctatttctgttaaaaaatgccattgtgattttgataggaatttcactgaatttgtaaactgctttgggtagtataaacattttaacaatattaagtcttctaatccatgaacacaggatatctatttatttgtgtcgtctttaattttactcatgaattttttttgcaatctacagtgtgcaagttgttcaccttctcagttaagtttatttctaagtactttgttcttttgatgatattgtaagtggggtcattttcttaatttcttttcattgt

SEQ ID NO: 37027 - DNA, 594 bp, Homo sapiens
tcataggaaaaatcactgatttaaaaaataattattgtgatattccatttattgataacatgaaacattctaattggtccatcaagtcaggtagagaatgtaagtacttaaaatatcttcaagtgatagatagcccagagctcagatttaaaatcctttgtacaaccaaagatggtctyatcaagaattgatgacagtggatttgtaatatattttgaaatcaggaagtgcaatgtctacagcattgttttccattctcaggattgttttgggtatttgaaatcctttgtacttccatatgaattttaggatatttttctatttctgttaaaaaatgccattgtgattttgataggaatttcactgaatttgtaaactgctttgggtagtataaacattttaacaatattaagtcttctaatccatgaacacaggatatctatttatttgtgtcgtctttaattttactcatgaattttttttgcaatctacagtgtgcaagttgttcaccttctcagttaagtttatttctaagtactttgttcttttgatgatattgtaagtggggtcattttcttaatttcttttcattgt

SEQ ID NO: 37028 - DNA, 594 bp, Homo sapiens
tcataggaaaaatcactgatttaaaaaataattattgtgatattccatttattgataacatgaaacattctaattggtccatcaagtcaggtagagaatgtaagtacttaaaatatcttcaagtgatagatagcccagagctcagatttaaaatcctttgtacaaccaaagatggtcttatcaagaattgatgacagtggatttgtaatatattttgaaatcaggaagtgcaatgtctacagcattgttttcyattctcaggattgttttgggtatttgaaatcctttgtacttccatatgaattttaggatatttttctatttctgttaaaaaatgccattgtgattttgataggaatttcactgaatttgtaaactgctttgggtagtataaacattttaacaatattaagtcttctaatccatgaacacaggatatctatttatttgtgtcgtctttaattttactcatgaattttttttgcaatctacagtgtgcaagttgttcaccttctcagttaagtttatttctaagtactttgttcttttgatgatattgtaagtggggtcattttcttaatttcttttcattgt

SEQ ID NO: 37029 - DNA, 594 bp, Homo sapiens
tcataggaaaaatcactgatttaaaaaataattattgtgatattccatttattgataacatgaaacattctaattggtccatcaagtcaggtagagaatgtaagtacttaaaatatcttcaagtgatagatagcccagagctcagatttaaaatcctttgtacaaccaaagatggtcttatcaagaattgatgacagtggatttgtaatatattttgaaatcaggaagtgcaatgtctacagcattgttttccrttctcaggattgttttgggtatttgaaatcctttgtacttccatatgaattttaggatatttttctatttctgttaaaaaatgccattgtgattttgataggaatttcactgaatttgtaaactgctttgggtagtataaacattttaacaatattaagtcttctaatccatgaacacaggatatctatttatttgtgtcgtctttaattttactcatgaattttttttgcaatctacagtgtgcaagttgttcaccttctcagttaagtttatttctaagtactttgttcttttgatgatattgtaagtggggtcattttcttaatttcttttcattgt

SEQ ID NO: 37030 - DNA, 594 bp, Homo sapiens
tcataggaaaaatcactgatttaaaaaataattattgtgatattccatttattgataacatgaaacattctaattggtccatcaagtcaggtagagaatgtaagtacttaaaatatcttcaagtgatagatagcccagagctcagatttaaaatcctttgtacaaccaaagatggtcttatcaagaattgatgacagtggatttgtaatatattttgaaatcaggaagtgcaatgtctacagcattgttttccattctcaggattgttttgggtatttgaaatcctttgtacttccatatgaattttaggatatttttctatttctgttaaaaaatgccattgtgattttgataggaatttcactgaatttgtaaactgctttgggtagtataaacattttaacaatattaagtcttctaatccatgaacacaggatatctatttatttgtgtcgtctttaattttactcatgaattttttttgcaatctacagtgtrcaagttgttcaccttctcagttaagtttatttctaagtactttgttcttttgatgatattgtaagtggggtcattttcttaatttcttttcattgt

SEQ ID NO: 37031 - DNA, 1091 bp, Homo sapiens
gaaaaaaatacattgggccaggcatgatggtttatgcttgtaatcccagcactttgagaggcggaggcaagaggaactcttgaggccaggagttcaagtccagcctgggcaacatagacccagtctctacaaaaattaaaaaactaggtgagtgtgatggcatgtgcctatagccccagcttactcaggaggttgaagtgggaggatcacttgaacccaggcgatcaaggctgcagtgagccatgttcatgccactccactttagcctgggcagtacagccagagcctgtctcaaaaaacaaaaacaaaagtaattggttacctcagaggggtaggtttggaagatgtggggtatggacggggctgattaagttttttttttttttaatatatccctgtattgcttcmttttgtgcacaatctttaatacttttataatacaaaaaagagaaattttaaaaatgtgtttgctctatctccaatgtctagaacagtgtttggcacatatttggcattcaataaatgttggttgcataaataaacaaatggattttgttaacatttgttgagtacctgcagcgtggtaggcattggacagcaggtactgcctcgtatttgtgtggtctataaaccatttgagttaattggattctggtatatcagagagcaaactacatgccttcaaacataacaaacggagacaaagttacagctactcctctagctaaagacactacccctgctctctgagtgcatcataaggatcctactgatgtttatttcatatctttgatatacaggcacacaccgtccacacttcaggcaatcatttacacactgagtgggagtgtgataagggcatgtggagtaggagaagttttctgatccgaactttactgactgcgctagaaaaccctgatgatatcctttccagtgtttctaagaacaattcttccatttctaagcatgattcttccatttctaagcagcatgttgtctgtttacttatgattattttttacttgttatctgtaaatgttggggtgatcagacccaacaccaggtcgtgggggcaacgaagtcctgctgag

SEQ ID NO: 37032 - DNA, 601 bp, Homo sapiens
ttctacccccttcaaatccacactctacagcttctagggattatttttttgaaaacgcaaatctaaccatgtatatcagacacatcttccctacctctgtagattctctcagcttgatcaatttcacagacccttggattattgttctatgcaagcccctgcaattccacttgaggccgaccaaccatactcttggcttctcccctacttctgggtaaagaagtcagggttaaatcctctggggcaactttgacgagcaggagaaaggagtcccttccatggacttgtccggggcayggttttcccacataccctgtccagggacatcttgtgtggccaagcagtgtactttttagcttttgagtaaagctaaaatgggctttgcctctttatggcttgtcataaagcagtaagcagttgcatttgttttcaattcttccttcacttcactgctctgaggctttacttcccaataaaattttagcaccttaatcctacccttaagctctgttttctagggaacttgggctaagatatgaagttattttctgcttgaaaagctttccttggctctttattgcttccagaagtgtttatgggg

SEQ ID NO: 37033 - DNA, 637 bp, Homo sapiens
aatgtgaataaatgatagtttttttcctccaataaatgtcaaacagtactagttgggggtgggggcagtgggttgtgtcagctttcaacttgtggctgccagaactacaatgcttcttcttggttggtaaaatatttaaaaaaaaaaaaaaaaaagcctggcgcagtggctcacgcctgtaatcccagcactttgagaggctgaggtgggaagatcacttgagctcaggagtttgagaccagcttggccaacatggtgaaacctcatctctattaaaaatataaaaattagccaggcatggtggtgggcgccagtcctccacagtgacctgagacccctcctgtatatcccagatgcatggtratgacccttttctcttgagattcttaaactggggtccacagaccctatggaagcacgtcagtggctccataaattccctgataacatatacaaaatgtgtaaatattcattatgctgaagaggtttcacggctttcatcacatttttaaaaattagtctatggtagaatcttcagagccctgcgaaagtctccctccaagttggagttgttggaagcagagggaagcatttaggccaacactgacagatgagtcctaactctctgatatccagc

SEQ ID NO: 37034 - DNA, 1303 bp, Homo sapiens
taacgtcaacctaatcatgaaaaacaaaattagacaaacccaaattaaaagacgtcctaaagacaattagccagtattcatcaaaagtgtcaaggtcatgaaagccaggaaagtaggaactgtcacagattgagggagactaagaagagagaacaaataaatgaaatgtgagattggattctggagtagaaaaagaacaatacaggaaaaatgggtgaaattcaaataaggtctacagtttagtaagttatctaaaataaggtctatagtttagttatctacagttagtattatgaaaggtctttgttctttttcatacttaattttttatattttcttaattgaaaacattacttttacaataggaaaaataattttacttgtttatcaccttttcctttctaatatgttcatttattcaaaactacatcatacagagtaatataaaagggtatataaatagcaactttgcttattggctcattttgcctcccatatatacctaccacagctcttgctgtgagcattctccttagcacgacaacattcactgtaggaaaaaggtatgggcatcaygatcactacgtgaaaagggctcagtggccaagggctctgttagtcaggggctctgcattagggaaacaggattatgggtgactttccctcctaaattttcaaatcagcctttaacaataaaaatatatttatatttttaaagtgaggtacaacatacatccaccctatgacctaacaattccatctccaaatatttattctttttttttcttcttcttttttgagacagagtctcactctgttgcccaggctggagtacaatggcgtgatcatagcttactgtagcctcaacctcctgggctcaagtgatccttccaactcaacctcccaagtagcaggtgtgcaccaccacccttggctaattttttgtattttttgtagagacaggttttgccatgttgcccagactgggatccctaaatatttactcaaggggaaaaaaataaataaagtacatatgtctatgatatacacaataacacacatgaatctcaaaattatgctgacccaaaaaagccagaccaaaaaagagtatgcaatgtatgattccatttatacatggtagctctagaagagacaaaaactatctatgctgaaggaaataaaagcaatgcttgagggaggattaactggaaaggggcacaagggaactttctgggatgaaaggatagacatcttctgtatcttaatcagaatgatagtgaaaagattatacacgcttatgaaa

SEQ ID NO: 37035 - DNA, 1303 bp, Homo sapiens
taacgtcaacctaatcatgaaaaacaaaattagacaaacccaaattaaaagacgtcctaaagacaattagccagtattcatcaaaagtgtcaaggtcatgaaagccaggaaagtaggaactgtcacagattgagggagactaagaagagagaacaaataaatgaaatgtgagattggattctggagtagaaaaagaacaatacaggaaaaatgggtgaaattcaaataaggtctacagtttagtaagttatctaaaataaggtctatagtttagttatctacagttagtattatgaaaggtctttgttctttttcatacttaattttttatattttcttaattgaaaacattacttttacaataggaaaaataattttacttgtttatcaccttttcctttctaatatgttcatttattcaaaactacatcatacagagtaatataaaagggtatataaatagcaactttgcttattggctcattttgcctcccatatatacctaccacagctcttgctgtgagcattctccttagcacgacaacattcactgtaggaaaaaggtatgggcatcacgatcactacgtgaaaagggctcagtggccaagggctctgttagtcaggggctctgcattagggaaacaggattatgggtgactttccctcctaaattttcaaatcagcctttaacaataaaaatatatttatatttttaaagtgaggtacaacatacatccaccctatgacctaacaattccatctccaaatatttattctttttttttcttcttcttttttgagacagagtctcactctgttgcccaggctggagtacaatggcgtgatcatagcttactgtagcctcaacctcctgggctcaagtgatccttccaactcaacctcccaagtagcaggtgtgcaccaccacccttggctaattttttgtattttttgtagagacaggttttgccatgttgcccagactgggatccctaaatatttactcaaggggaaaaaaataaataaagtacatatgtctatgatatacacaataacacacatgaatctcaaaattatgctgacccaaaaaagccagaccaaaaaagagtatgcaatgtatgattccatttatacatggtagctctagaagagacaaaaactatctatgctgaaggaaataaaagcaatgcttgagggaggattaactgsaaaggggcacaagggaactttctgggatgaaaggatagacatcttctgtatcttaatcagaatgatagtgaaaagattatacacgcttatgaaa

SEQ ID NO: 37036 - DNA, 597 bp, Homo sapiens
ctacatattgggtgtaactattactcgggtgayaggtacactaaaatttcagacttcaccattatacacttcatccatgaaaccaaaaaccatttgtacccctaaagccactgaaatttgtttttaatgtgaaacaatttttaaaaattcttctttcaattattttgaatatatacacagaagtgaaactgctggattatatggtaattccatttttaatattttgaggaactgtcacactgttttccatagcagctggatgattttacatttctaccaatagtgtacaagagttccaatttctccacattcttgccaacccttttttttttttttttttttgagatggagtctcgctctgtcacccaggctggagtgcagtggtgcaatctcggctccctgcaacctccacctcgcggcttaaggcgattctcctgcctcagcctcctgagtagctgggactacaggtgcctgccaccacacccgggtaatttttgtattttttttttttttagaagagatggggtttcaccatattggccaggctgatctcaaactcctgaccttgtgatccacccacctcggcctcccaaagtg

SEQ ID NO: 37037 - DNA, 597 bp, Homo sapiens
ctacatattgggtgtaactattactcgggtgataggtacactaaaatttcagacttcaccattatacamttcatccatgaaaccaaaaaccatttgtacccctaaagccactgaaatttgtttttaatgtgaaacaatttttaaaaattcttctttcaattattttgaatatatacacagaagtgaaactgctggattatatggtaattccatttttaatattttgaggaactgtcacactgttttccatagcagctggatgattttacatttctaccaatagtgtacaagagttccaatttctccacattcttgccaacccttttttttttttttttttttgagatggagtctcgctctgtcacccaggctggagtgcagtggtgcaatctcggctccctgcaacctccacctcgcggcttaaggcgattctcctgcctcagcctcctgagtagctgggactacaggtgcctgccaccacacccgggtaatttttgtattttttttttttttagaagagatggggtttcaccatattggccaggctgatctcaaactcctgaccttgtgatccacccacctcggcctcccaaagtg

SEQ ID NO: 37038 - DNA, 597 bp, Homo sapiens
ctacatattgggtgtaactattactcgggtgataggtacactaaaatttcagacttcaccattatacacttcatccatgaaaccaaaaaccatttgtacccctaaagccaytgaaatttgtttttaatgtgaaacaatttttaaaaattcttctttcaattattttgaatatatacacagaagtgaaactgctggattatatggtaattccatttttaatattttgaggaactgtcacactgttttccatagcagctggatgattttacatttctaccaatagtgtacaagagttccaatttctccacattcttgccaacccttttttttttttttttttttgagatggagtctcgctctgtcacccaggctggagtgcagtggtgcaatctcggctccctgcaacctccacctcgcggcttaaggcgattctcctgcctcagcctcctgagtagctgggactacaggtgcctgccaccacacccgggtaatttttgtattttttttttttttagaagagatggggtttcaccatattggccaggctgatctcaaactcctgaccttgtgatccacccacctcggcctcccaaagtg

SEQ ID NO: 37039 - DNA, 527 bp, Homo sapiens
taatttttttttctaaatttccccagtaataatcctggaatgcatctaggtccccggctccttttttttccttttttttcttttttttttttgagatggagtctcgctctgcacccaaactggagtgaggcagcgcgatctcggctcactgcaacctccacctccgtggttcaagtgattctcctgcctctgcctcccaagtagctgggactacaggcgcccaccaccacgyccacctaatttttgtatttttagtaaagacagggtttcaccatattggccaggctcgtctgggactcctgaccttgtgatctgcctgactcggcctcccagaatgctgggattacaggtgtgagccaccgcacccagccctttttttcttttcttttcttttttttttaaggaacaaagactacttctgaacatctacgtttttaatctgagaagtttcaccaatgagaagcagtcaggaaagtacatttggaaatttggaaattactcaaatggccacgtggcggaagcctcta

SEQ ID NO: 37040 - DNA, 684 bp, Homo sapiens
tttgctggccatatatgttgaaagtatctccactctttggcttgcctttcattattttaattgtgtcttgctgaacagaaggttttaatgtcaaggtagtttttagtcaatcccctcatttatgattggtgcattttgtcaggtttaagaagtcttttctytcccataagaacgtgaagaaaacatattctcctatgttttatagaccataggttggcaaacttttttctgtaaaggactaaatagtaaacattttaagctttgtggaccacagatagtctctgctacatattcatcttaaaaaaaaaaaaagaataacctttagaagtataaaaaccattcttagatgctgggccagagtgggccaggctgtactttgcctgttcctgttctagaagtcacagttatttgctctcacctttacagttatgatttcagttgcagttggttttgttttttgttgtttgggtttacagcatgagacatgggacatctctaaatggatatttattcatgttgagaagtccatttattccccatgtctatgcagtgacccctttgtcacaagtgaaatgagtcttgtttctcagttgtctattccattttattgtcctatttgcttattctcccaccataccgcactactttaattattgtagctttataacaaattttcaaatctaa

SEQ ID NO: 37041 - DNA, 527 bp, Homo sapiens
gtcagtggcttctgtattccctttattatatacaaatgccaaatgaaactttcagtaatgcctaatggccattgttgggtttcatgatcatttcacgtttgctcaaaagtcaattgaaataattgccttggttaaaataattgaaagtcatctgtaaagtcaaactgatttactgtgtgtgtattttctctctacaaacaagtacctgcaaataattttcaaatattttcttatgtttaaggaaaaactaaaagcaacatagtaagaatgaagggggaaatattttaaagttatattacatcatttttgactttgtttctaaaatttagactagtaagtctgatacccatttaataagtttttacatgcaggtccttatctcggttctttgattttaaacaatgtttttacccaattaaattttaattctcaagggtcagggattatgtcttcctgtttcaaaattatatcctctacctatgtgctaagtacattttagacattcaataacrtattttaaatattga

SEQ ID NO: 37042 - DNA, 611 bp, Homo sapiens
atgttgttgcataaaatcccatttgacttgattctgcttctttctgatgaaccacatatttatttgctgcatcaagttcctttagaaaaagttataagtttatcaaacacgtgggcaaatatcagataattgttatattctgtataatacatagttttatagtctacatacgtgtaataattgctgcctataattgcagaagttctgggtaagggggagaacaagaagaaatcaaacactatggccactgaccatgttgggcaattaactgagatcttttcctcttggataaaaggaggggcctggaccagctattttgtgggttcctatcaggtctgacatttcatatgacctcatgtctgccgaaacagtggtttttgtgcaattatccaagagctaaaataaaaggagactyccaaacataactagtgttaaactccatctcagcttttcatttcatgaattagaatatagtatagtttccttactttataaaggcactttggaaaattttattttctgtaacagttcttaaaacattcccttcacatctgaagggcttagtgaatatttgttgaacaagtgaatgaataaatgaaagaataatacga

SEQ ID NO: 37043 - DNA, 776 bp, Homo sapiens
aatctggactgagtctgggatttgtgattcctttataaggttaaaaataataacaggtatctcagtgttttttgtgatctttaaaaggttcaaagccattgatgagtttcctattattgagtcctcatatccaccttacatgttaggcagagtggacatcrttatccctatttgttagatgaggaaactgggctcaccagttctcaaggttgcggagacagcaggtgattaaacagagaaaaccacctcttaccttggaaatcaatgctgttgatactgtaataatttacatcatatcggcaatgggaaactatcagtctgagaccaaggctcatcttcctggagtggtgtatccatataatgtgtttgaagcaatgctgtttaaccaagaacttcttaattatcatcaaaccccctatggtaacagcacatgcttatgactagaaactcaattatctgaaagaaaggtgtataaaaagagagaatactgaaatctcaaatgagcatttgccagaagaacatggtgtgcatggtgtatgtcacatagctatcttgaaaaaacaagcttcgtgttctataggtaagtctcaatcatttgaaaaaacattaaaggcagggtgatcatgagaatagtataggacattgagggcaggcaaatgtgaattcaaactcaggagctctgaagcattttccccagtagaaagcatcttttttgttggctcactgcaatgatttctagattcctaggctaaaactcatatgcctaaaaatatact

SEQ ID NO: 37044 - DNA, 776 bp, Homo sapiens
aatctggactgagtctgggatttgtgattcctttataaggttaaaaataataacaggtatctcagtgttttttgtgatctttaaaaggttcaaagccattgatgagtttcctattattgagtcctcatatccaccttacatgttaggcagagtggacatcattatccctatttgttagatgaggaaactgggctcaccagttctcaaggttgcggagacagcaggtgattaaacagagaaaaccacctcttaccttggaaatcaatgctgttgatactgtaataatttacatcatatcggcaatgggaaactatcagtctgagaccaaggctcatcttcctggagtggtgtatccatataatgtgtttgaagcaatgctgtttaaccaagaacttcttaattatcatcaaaccccctatggtaacagcacatgcttatgactagaaactcaattatctgaaagaaaggtgtataaaaagagagaatactgaaatctcaaatgagcatttgccagaagaacatggtgtgcatggtgtatgtcacatagctatcttgaaaaaamaagcttcgtgttctataggtaagtctcaatcatttgaaaaaacattaaaggcagggtgatcatgagaatagtataggacattgagggcaggcaaatgtgaattcaaactcaggagctctgaagcattttccccagtagaaagcatcttttttgttggctcactgcaatgatttctagattcctaggctaaaactcatatgcctaaaaatatact

SEQ ID NO: 37045 - DNA, 833 bp, Homo sapiens
cccttaccatgcttttgaaaattgcgtacattgcatttgtaataatccagatgtaaggatttccaatgaccttgatattcctgatacaaaatgggattctaagcatgtccaaatacctccagaaaaactctcaaccctcacacctcaatcatgagtccctcatctatctttccttatagaaattatattttgacttcttgaagccattttaagcctttgttctttttctgtctgggaaataacagacagtgtgaccccggctgtcatcttgtttttcaactgctggagtgattctgctcaataagtagcaaccaatggtgactactgtaatttgaattataaaagggagggtggaatgatgtgcagacaaagctcagatgtgggtttgttgatatttgtagcaggaggttaattagcattagcagaagtatcagcagttgcttggacttactcataaggtacggtttgctattaacagtatagtacagaggaaaacaagtcaaaatagtttttgttcctcttacagaaaaccatttacaaaaacaaacataaagtaattggattcttttttgtttgctttcagtttctcctttccagctaagtgtttgatttagctgcttctcttgctccttccaagtcttacatggtttgaacagcaatagttgtgctttctttttctcttttgcattagctccttccctactccctctcccatcctttggttcttgttgttttcccttgaggcgaaaactttatgttcrgatgattttttttttatttgtaattactgatgggtgcatttttatgggtgctttataagtttgggattgtat

SEQ ID NO: 37046 - DNA, 578 bp, Homo sapiens
gtcggaacaaaagcaggcaaaccagtatggacaagggttaccttccgtatctccacaaatgttgagtagtagaccacaataaaaatcactggaagatacttttcttcaagatttgactttggaatcttaaaaacatttatttttaagttttattgactttgtttaatatatttggagatataattgawatttacatgtgcaattcaatttaataagtttgacataggtatataactgcaaaatgaacattacattcaagatagtgaacgtatccataactcctagaagtttcccatgtccctttgtgatctcccccaactccctatcccaagtaactaccgatttgttttctgtcactatcaattggattacactgatatacctatgtacatatatcaatctggagatttacataaatacaagtacatattatgtactcttttatatctagttctttgactctatacatgttgtgagattcattcatgttgttgcatatattgagttcaatccttcttattgctgagtagtattctgttatttaaatataccaatttgtttacccattcatttattga

SEQ ID NO: 37047 - DNA, 578 bp, Homo sapiens
gtcggaacaaaagcaggcaaaccagtatggacaagggttaccttccgtatctccacaaatgttgagtagtagaccacaataaaaatcactggaagatacttttcttcaagatttgactttggaatcttaaaaacatttatttttaagttttattgactttgtttaatatatttggagatataattgaaatttacatgtgcaattcaatttaataagtttgacataggtatataactgcaaaatgaacattacattcaagatagtgaacgtatccataactcctagaagtttcccatgtccctttgtgatctcccccaactccctatcccaagtaactaccgatttgttttctgtcactatsaattggattacactgatatacctatgtacatatatcaatctggagatttacataaatacaagtacatattatgtactcttttatatctagttctttgactctatacatgttgtgagattcattcatgttgttgcatatattgagttcaatccttcttattgctgagtagtattctgttatttaaatataccaatttgtttacccattcatttattga

SEQ ID NO: 37048 - DNA, 578 bp, Homo sapiens
gtcggaacaaaagcaggcaaaccagtatggacaagggttaccttccgtatctccacaaatgttgagtagtagaccacaataaaaatcactggaagatacttttcttcaagatttgactttggaatcttaaaaacatttatttttaagttttattgactttgtttaatatatttggagatataattgaaatttacatgtgcaattcaatttaataagtttgacataggtatataactgcaaaatgaacattacattcaagatagtgaacgtatccataactcctagaagtttcccatgtccctttgtgatctcccccaactccctatcccaagtaactaccgatttgttttctgtcactatcaattggrttacactgatatacctatgtacatatatcaatctggagatttacataaatacaagtacatattatgtactcttttatatctagttctttgactctatacatgttgtgagattcattcatgttgttgcatatattgagttcaatccttcttattgctgagtagtattctgttatttaaatataccaatttgtttacccattcatttattga

SEQ ID NO: 37049 - DNA, 671 bp, Homo sapiens
aaatggacaaagaaaatgtagcatatacaaacaatggaatgttattcagcctttaaaaagaaggaaattctgccatttgaaacaacatggtgaatgtggaggatattatgctacataaaataagccagatacagaaggacaaatatgaggaattatttgacaattatatgaagaattttaaatattggaactcttagaagcagagagtagaaaggtggcttccagcggaaggggaagagggaaatggggaggtagtagtcaaagggtacagggcttcagttatgcaaggtaaataagatctggagatctattctacagcatartgcttgtagttaaccattttgtatacctaaaaactttctaagagggtaaatcttatgtaagtgtcaaataatgatatttattaaatagggtggaagaaacttttagggttaaaagatatgttaatggcacagactgtggtgatgattttatggatacttatctccaaattcatcaagttctatgtgttaaatatgtagaactctttgtatgtcaattatacttcaataaggttttgttgataaaatatattagttggtcaaaaatgacattcaacatataataaaaattctcaataaaggaatacgaagcttaagcaataaatgaacatgacataatgaagaaacggt

SEQ ID NO: 37050 - DNA, 540 bp, Homo sapiens
ctcttaatgggaaaataactttaaaaagttatgatctagtatgtaataattttataataagagcatgcattaaatattataaaagctgaaagattttaagtttagggtatgtgcatttatcacctttaaatttataacttccaactgtaagcctgaataagatataaattcatttgtctttgagtgaattaaagtaaaatggtttattttgatcattaaactttcatatgatttacaacttcttggcaacaaacgcrtattttttattgtctaaaaggcataaaatacaactacctcagaaattatctcttgtccatctccatatacggcaaggattctggaggacaaaaaaagcactccagtttattgaagattacccaactccaatggtggtatcactatcagaagtcatctattgagtttcagcttgctgtactttctaccacttgttactagagcataccttcaacttcaataaatggaccttttgtcgtctctgatatttagctttactttatattaaggacatcctttaatctg

SEQ ID NO: 37051 - DNA, 545 bp, Homo sapiens
tgatctcttgatccacctgcctcggcctcccaatrtgctgggattacaggcgggagccaccatgccagtcgtgtcaccctctttttaagtaacatcttcactgttctttcatgtgcaatatgatctggttacccagagtgtctctccatttctctcaatgtcatcttctcacacttctttgtttttgaatttttgcgtggagagccaacttcaatctctttttcttggtgaaatgccatgagacgtttaagaacaatttagtgtttctccctctctgaagacttctctagggctaaagaatatgttagtcacctagtttatgtgtaccattagtgttttataccaatttgtataatagcgtaatagcatctctcaaaacccttctgataatttctcacatgcttattagccccaatgcacggagaagatggagactatatcttgttcaattctacattctcagttcctagcccattacaaacagacaatctgtgagtgtcagatgcacaataaattggcttaataaagagctaacagtagaaagg

SEQ ID NO: 37052 - DNA, 545 bp, Homo sapiens
tgatctcttgatccacctgcctcggcctcccaatgtgctgggattacaggcgggagccaccatgccagtcgtgtcaccctctttttaagtaacatcttcactgttctttcatgtgcaatatgatctggttacccagagtgtctctccatttctctcaatgtcatcttctcrcacttctttgtttttgaatttttgcgtggagagccaacttcaatctctttttcttggtgaaatgccatgagacgtttaagaacaatttagtgtttctccctctctgaagacttctctagggctaaagaatatgttagtcacctagtttatgtgtaccattagtgttttataccaatttgtataatagcgtaatagcatctctcaaaacccttctgataatttctcacatgcttattagccccaatgcacggagaagatggagactatatcttgttcaattctacattctcagttcctagcccattacaaacagacaatctgtgagtgtcagatgcacaataaattggcttaataaagagctaacagtagaaagg

SEQ ID NO: 37053 - DNA, 545 bp, Homo sapiens
tgatctcttgatccacctgcctcggcctcccaatgtgctgggattacaggcgggagccaccatgccagtcgtgtcaccctctttttaagtaacatcttcactgttctttcatgtgcaatatgatctggttacccagagtgtctctccatttctctcaatgtcatcttctcacacttctttgtttttgaatttttgcrtggagagccaacttcaatctctttttcttggtgaaatgccatgagacgtttaagaacaatttagtgtttctccctctctgaagacttctctagggctaaagaatatgttagtcacctagtttatgtgtaccattagtgttttataccaatttgtataatagcgtaatagcatctctcaaaacccttctgataatttctcacatgcttattagccccaatgcacggagaagatggagactatatcttgttcaattctacattctcagttcctagcccattacaaacagacaatctgtgagtgtcagatgcacaataaattggcttaataaagagctaacagtagaaagg

SEQ ID NO: 37054 - DNA, 1014 bp, Homo sapiens
agggatgtcatcttaatgttctagcccataataggtgttttgatattaattactgattctgaaggctgtgtaatcagtaacagagcccaaattcaaagccccatgtatctgcctccaaaaatttgtgtatttcccctcatatcacccagtgttcaaattttttgcaagagatagttacaatccccatcagatttactataatttctttattctgttgaggtttattctgctctttcactgcacttaaatattatgagtagccaacaatctagtttcacctgacatgacattgtcaaagaaaaaccactgacatttacctttgcaagtgacaagtgctcttttccaaggagtacataaaatggttacaaaattaaaacctcagagtttttgtctatttgtttagaatccactggggttcatactttatcattgctgtgatatttgccaaattagtgcttcagtgctaatatttttaaaagtatatttttctctctatcatactcctttcttttttttctgctgacctgtaatcataatgaaagcacttatatgtctttggtcctgtctcacttttcaaaacaagtgctaatcactctcattctggaatctgaatgtcaaattcaatcatatcaagatttacccttgtattagtccatttttgcattactataaagaactacytgagactgggtaatttattttaaaaaacaaacattttaattggctcatgattccacagcctgtataggaagtgtggctatgaagccgtaaggaaattggcaatcatggcaaaaggtaaagaggaagcaggcacatcttacatggtcagagaaggaggaagagagagaggggtgaggtactacatacttttgaaaaagcagatcttgtgagaactcactattacaagaaaaaggagaaaatccacccccatgatccaatcacatcccaccaggttcctcatctaacattggggattataatttgacacaagatttgggcaagaacacagaccaa

SEQ ID NO: 37055 - DNA, 1297 bp, Homo sapiens
cgcatcacaatttgatttttggaaaatatttattacaataagttacaactaaattaaacagtgaatggatcactcctaaggggataaactaaattaaacttggaagaaaccagagctaattgtattgcatctttataattaagcagcaagaatttttagtctgctgttatccttttggtttgctaacacttacattttattaatatagctgatgtgtctacatttttytctcagggtaatatgaactaaacccttaaaaattagagtactgaaagattacttatttttgtcaatgttctatgtttctgggattaattgttttaaaatttactaagtatacataatcatttacatcatctaatttgataatttaatccatttctatttttctgcatctatttattcaacacacatttattaagctgctatttgtgctctagatatgggaaggacaaaaaggaataacacatggtactactttcaagctggtctttgttctacttgagatgacttataaaccagtgaaaatagataaaggaacagggggtagataatagatagtaaagtctgtttagcaaagctttatagaaaatgcttttgaaatacaaaggaaaaactgatgatttttatctggaggaaatccaagaagtttcatagagaaagtgatatttaaattgagattcggaaatcaaatagagaatcaggaaaaagccaatttaagaaacatagtaactaacatttattgagctcccaatagatattttacctacgtcaaaaaactgacaaccatagaggtaagaaacatgtccagaacacacagctggtgaatggaaaaggtggaatttgaacatatgcaattttacttttgaatatacacttttaatttaggtaaaaacactgcaaatgaatgataacatacaatttgataaattgttctggaacatgagatctaagatatttgggaacctgtagtgacgagtctagaaatggtattcatggtttattatgaaagccctaaaacatcttttcaaggaatttagatttgatctattagatgtttaaaattattcaaagctcttaagctgagaagtagtaagctctgaggaaagtggttgttgaaataaagactatagacttagaattttaaaaatgaaagagaagaaagacaattactttaaaggacagcatagtgacattgcagaaaggaaggatgataatgcagcaacctaagccaaaggctggcattagcataccccagtttcctcaacaaatcacattatgagtttgattggcttta

SEQ ID NO: 37056 - DNA, 546 bp, Homo sapiens
tgcagttgtcatcatcrtggctcactgtagcctctgactcctgggttcaagtgattcccatgcctcatacacctgagttgctgggattacaggcatgtgccaccactcttggctaagttttttatattttcagtagacacaggttttcaccatgttagccaggctggtctcaaactcccggcctcaagtgatcctcccacctcagcctcccaaagtgctgggattatgggcatgagccactgtgcccagctgattccattaacttttatgaaaacaacaaggactctgttattcatctgtatatctcttgatatgctctggctgtgtccgcacccaaatcttactttgaattgtaataacccccacctgtaaagggcaggaccaggtggagatcgttgaatcatggggccgttttcccccatactgttctcgtggtagtgaacaagtctcacgaaatctgatggttttataaatgggagttcccctgcagaagcgtctcctgcctgctgccatacaagaggtgactttgctcctcattcaccttca

SEQ ID NO: 37057 - DNA, 546 bp, Homo sapiens
tgcagttgtcatcatcatggctcactgtagcctctgactcctgggttcaagtgattcccatgcctcatacacctgagttgctgggattacaggcatgtgccaccactcttggctaagttttttatattttcagtagacacaggttttcaccatgttagccaggctggtctcaaactcccggcctcaagtgatcctcccacctcagcctcccaaagtgctgggattatgggcatgagccactgtgcccagctgattccrttaacttttatgaaaacaacaaggactctgttattcatctgtatatctcttgatatgctctggctgtgtccgcacccaaatcttactttgaattgtaataacccccacctgtaaagggcaggaccaggtggagatcgttgaatcatggggccgttttcccccatactgttctcgtggtagtgaacaagtctcacgaaatctgatggttttataaatgggagttcccctgcagaagcgtctcctgcctgctgccatacaagaggtgactttgctcctcattcaccttca

SEQ ID NO: 37058 - DNA, 546 bp, Homo sapiens
tgcagttgtcatcatcatggctcactgtagcctctgactcctgggttcaagtgattcccatgcctcatacacctgagttgctgggattacaggcatgtgccaccactcttggctaagttttttatattttcagtagacacaggttttcaccatgttagccaggctggtctcaaactcccggcctcaagtgatcctcccacctcagcctcccaaagtgctgggattatgggcatgagccactgtgcccagctgattccattaacttttatgaaaacaacaaggactctgttattcatctgtatatctcttgatatgctctggctgtgtccgcacccaaatcttactttgaattgtaatwacccccacctgtaaagggcaggaccaggtggagatcgttgaatcatggggccgttttcccccatactgttctcgtggtagtgaacaagtctcacgaaatctgatggttttataaatgggagttcccctgcagaagcgtctcctgcctgctgccatacaagaggtgactttgctcctcattcaccttca

SEQ ID NO: 37059 - DNA, 1035 bp, Homo sapiens
cgcactcctgtgagaatataatgctgccactgatctgacaggagagagagcttaggtggtaatgcaggtgatgcagagtggctgtaaatagagatgaagctttgcttgctcgcytgctgcttaccttcttgctgtacagcccagttcctgacaggccacgggctggtactggttcatggttcggggtggggacccctgatgtagggtatgggaggtcaaggtgttcctactttgtcttgtgatactttgtgcttaatgggttagttacctgtataaacatctttagcgctaccagtgaaatcatccttgtgaccagctccctaaagcactgcctgtccaacagcaaaggttggatatggggaataaaacagtgctggactatggcatttccttaggttttccctggtattggttatgatggaatatgggtacttgtgcagctgtggtacatgaggggacaggttgattcattctgtttacagagaccaaagaaaacagagggacttttcccagttggtgatatggagcaagtgccatcagcaggcagactcgtgcagatcaccgtgacagagggatatgatttggtaaagttacttttggaaatttacaaaaatccttagtttgggagtacctgcaggaggaatggaattttgcttcattctctacctccaaacctcctggctttatgtagcagtggcattccgcctcagtgttccttattgttagtcttaatctccaagtcacattactgtgtgtctcaaatacccggcaatttgaatactaaatttaacaggatgaaagaaacagtggttttagtttccctagacagcagttcacgtataatttttttccctttctcctgagaaggatctgaattcttccagagtttcccttgtgattaattctatttgattaattaaaaaaacaacaacaatgtgatgtactaaaaattaggaatatgatgaaatgggaaaatattcagtatattaagtttaaaaagatcattccaaagaggatgtaattaatgagctccac

SEQ ID NO: 37060 - DNA, 631 bp, Homo sapiens
atggagcacaaatagttttcatttttctgagcatttctctaaatttttaattccatttattgttttcatttacatgtcttctatatcagcatccacaaccttttggccaccagtttggtggaagataatttttccacgaaaaatggggtcagggagggaatgctttcagaggcattagattctcattaggagaccacaacctagatccttcgcatctgcacttcacaatagggttcctgctcttttgagaatccaatgccactgctgatctgacaggaggcagagctcaggcgttaatgcttgttggttggcctgcttgcctcctgctgtgcrgccctgttcctaccaggccaggaccagtaccccggtccatggatgggggttgaaaaaccttgttctatatgacctaaaaggaggtcatcactctacactcttgatttttgcaatggatgttcaatattcccagtaaacttaagatatatcaatccaaatgaatattgatcaatcagatgagaaacatctttgtgctactgttagaagtatatacttttagcccagatcctagcctccagttttaccctccattttgcataggaaatcaggatccctgggccctatgggtttctgtatt

SEQ ID NO: 37061 - DNA, 527 bp, Homo sapiens
tacttgggaggctgaggtgggaggatggctgcatcccaggaattaaggccagcctgagtaacatagcaagaccctgtcttgtaaaacaaacaaaaccaaagcattaaaaccaaagtacttttagttttcactgaaacctacatgatgttcttatttctatataatgttttgtatattaatatacattagaaaaatacacagcatctccttttaaaagtaaatttgttttaatatttttaaaattaatttaaataaaatgttaaggcatttatagtcaaggaatatgacaaaaattgtgaaagtgctgctcaagtagccaaactttgggaaatctaattggaatgtgggtaagcaagatcctcctgtcgcgtagctggggragactttatagataacacgttagatgttacctaaggtttcttgaatgcatggttcagtttaagaagtatgtttagttattactcttggatgaagaaaatattagttttaagtgagtgttaatggactttgcccatgaactgcataca

SEQ ID NO: 37062 - DNA, 530 bp, Homo sapiens
aatataaaagttctagcagttttattagaagcacagaaagccttttcctgacttcctgtgccatgacctagattttttcagttatttattcatcattcagtatttattmagcacctcccatgtaccatacatagtccgtacctttctatgacttgcagtctaagaaaaaagataaccattgcaagtttgattattatggcgaaggactttcttgtttgtgtatggaaacataacaaagacacctaatttagacaggaagtggtaaaggaaaaccactttaaggaagaaatattatttaagttcaggcaaaaaaaaaaaaaaaaaaaaagggggggtcgcggggcaggggaagagtatcccagacagcatatgtgagagctgtgaagctagaaatcttggcacatcaacaactgacatgtctggagtgttgagaatagcggtgaaaagaggaaatggggtgcgcaatacacggacggggcccaacacaggtctcctaagccttatgaaaagtacaagtaatatcataagtt

SEQ ID NO: 37063 - DNA, 530 bp, Homo sapiens
aatataaaagttctagcagttttattagaagcacagaaagccttttcctgacttcctgtgccatgacctagattttttcagttatttattcatcattcagtatttattcagcacctcccatgtaccatacatagtccgtacctttctatgacttgcagtctaagaaaaaagataaccattgcaagtttgattattatggcgaaggactttcttgtttgtgtatggaaacataacaaagacacctaatttagacaggaagtggtaaaggaaaaccactttaaggaagaaatattatttaagttcaggcaaaaaaaaaaaaaaaaaaaaarggggggtcgcggggcaggggaagagtatcccagacagcatatgtgagagctgtgaagctagaaatcttggcacatcaacaactgacatgtctggagtgttgagaatagcggtgaaaagaggaaatggggtgcgcaatacacggacggggcccaacacaggtctcctaagccttatgaaaagtacaagtaatatcataagtt

SEQ ID NO: 37064 - DNA, 530 bp, Homo sapiens
aatataaaagttctagcagttttattagaagcacagaaagccttttcctgacttcctgtgccatgacctagattttttcagttatttattcatcattcagtatttattcagcacctcccatgtaccatacatagtccgtacctttctatgacttgcagtctaagaaaaaagataaccattgcaagtttgattattatggcgaaggactttcttgtttgtgtatggaaacataacaaagacacctaatttagacaggaagtggtaaaggaaaaccactttaaggaagaaatattatttaagttcaggcaaaaaaaaaaaaaaaaaaaaagrgggggtcgcggggcaggggaagagtatcccagacagcatatgtgagagctgtgaagctagaaatcttggcacatcaacaactgacatgtctggagtgttgagaatagcggtgaaaagaggaaatggggtgcgcaatacacggacggggcccaacacaggtctcctaagccttatgaaaagtacaagtaatatcataagtt

SEQ ID NO: 37065 - DNA, 530 bp, Homo sapiens
aatataaaagttctagcagttttattagaagcacagaaagccttttcctgacttcctgtgccatgacctagattttttcagttatttattcatcattcagtatttattcagcacctcccatgtaccatacatagtccgtacctttctatgacttgcagtctaagaaaaaagataaccattgcaagtttgattattatggcgaaggactttcttgtttgtgtatggaaacataacaaagacacctaatttagacaggaagtggtaaaggaaaaccactttaaggaagaaatattatttaagttcaggcaaaaaaaaaaaaaaaaaaaaaggrggggtcgcggggcaggggaagagtatcccagacagcatatgtgagagctgtgaagctagaaatcttggcacatcaacaactgacatgtctggagtgttgagaatagcggtgaaaagaggaaatggggtgcgcaatacacggacggggcccaacacaggtctcctaagccttatgaaaagtacaagtaatatcataagtt

SEQ ID NO: 37066 - DNA, 530 bp, Homo sapiens
aatataaaagttctagcagttttattagaagcacagaaagccttttcctgacttcctgtgccatgacctagattttttcagttatttattcatcattcagtatttattcagcacctcccatgtaccatacatagtccgtacctttctatgacttgcagtctaagaaaaaagataaccattgcaagtttgattattatggcgaaggactttcttgtttgtgtatggaaacataacaaagacacctaatttagacaggaagtggtaaaggaaaaccactttaaggaagaaatattatttaagttcaggcaaaaaaaaaaaaaaaaaaaaagggggggtcgcggggcagrggaagagtatcccagacagcatatgtgagagctgtgaagctagaaatcttggcacatcaacaactgacatgtctggagtgttgagaatagcggtgaaaagaggaaatggggtgcgcaatacacggacggggcccaacacaggtctcctaagccttatgaaaagtacaagtaatatcataagtt

SEQ ID NO: 37067 - DNA, 987 bp, Homo sapiens
ggcttacatgccatgcactatactaaacatattaggtggattatctcaattagatttcacaacaactccaagagacaccattattatacttgtcttaacattgatgaaactgagacacagagaagttaatagyttgctaaaaaccacacagcaagcaagtagtagagttggggtttaaacctattctgttgcacattaaagcccatgtgctgagtatcatgttatacaattttcatgagaagtggtggtcttttcctttctactgtgcttttgccattcttggcctaaattatgaagagggaaagggagaacagtatagttgatgatagtgtacaaaaagaaggctattctgctctgttagacctctgtcatcatgtctcaaatgtggattatttagttaaaaaatacaaacacactttttatcctttgaaataatcatgaaagttgaaaatacaggagagagaatcttatttttgaaataatttaagttgccaagctgatgcaccaatactgtcaaatactttaatgtgtgtttcctaccaacagagatattttccctgcataaccacaacaaaattcagaaattaacattgttacgttagcaccatatgatactcagtgttcgtatttagatttgtagtcccaataatccaataatattcttttttttttttgaaatggagtcttgttctgtcacccaggctggagtgcagtggcataatctcagtttacggcactctccacctctcaggttcaagctattctcctgcctcagcctcccaagtagctgggattacaggcacccgtcaccacacccagctaatttttgtatttttggtagagatggggttacaccatgttggccaggctggtttcaaactcctgacctcaggtgatacacccgcctcagcctccaaaagtgctgggattacaggtgtgagccacggtgcttggaccctataatattcctagtagcaaatggatcct

SEQ ID NO: 37068 - DNA, 987 bp, Homo sapiens
ggcttacatgccatgcactatactaaacatattaggtggattatctcaattagatttcacaacaactccaagagacaccattattatacttgtcttaacattgatgaaactgagacacagagaagttaatagcttgctaaaaaccacacagcaagcaagtagtagagttggggtttaaacctattctgttgcacattaaagcccatgtgctgagtatcatgttatacaattttcatgagaagtggtggtcttttcctttctactgtgcttttgccattcttggcctaaattatgaagagggaaagggagaacagtatagttgatgatagtgtacaaaaagaaggctattctgctctgttagacctctgtcatcatgtctcaaatgtggattatttagttaaaaaatacaaacacactttttatcctttgaaataatcatgaaagttgaaaatacaggagagagaatcttatttttgaaataatttaagttgccaagctgatgcaccaatwctgtcaaatactttaatgtgtgtttcctaccaacagagatattttccctgcataaccacaacaaaattcagaaattaacattgttacgttagcaccatatgatactcagtgttcgtatttagatttgtagtcccaataatccaataatattcttttttttttttgaaatggagtcttgttctgtcacccaggctggagtgcagtggcataatctcagtttacggcactctccacctctcaggttcaagctattctcctgcctcagcctcccaagtagctgggattacaggcacccgtcaccacacccagctaatttttgtatttttggtagagatggggttacaccatgttggccaggctggtttcaaactcctgacctcaggtgatacacccgcctcagcctccaaaagtgctgggattacaggtgtgagccacggtgcttggaccctataatattcctagtagcaaatggatcct

SEQ ID NO: 37069 - DNA, 450 bp, Homo sapiens
  misc_feature (1)...(450): n = A,T,C or G
tatatcatatatatatcatatatatcatatatatatatcttttttctggggacrtgtttttctggcaggttttcctggnactgtaggaaggtaattttgttctttcaagggagggagagtagcgtcaagcaccagtttttatatgaatttatataatatatatatttatatattatatgtttatatatatttatataatatatataatttatataataatatgtatataatttatacatatacctaatattttgatagatgataaaagaaaaaataaaataataaaagttatgaaaggataacatatgtcagaattataaaaacttactaatgaggtgattggggaaaaaatgaagatttagaaagagaaaagaaaaagataatttgaaaagagaacacaggaaagaaataaaattaaaacaaatatactttgataaataaagattaaac

SEQ ID NO: 37070 - DNA, 614 bp, Homo sapiens
attatctttatactaaaaatactcataagttatttctttatgtgttcttcaaatacaatgaagaacatttaacaattcctgatactgagacatgacagaaatttttcctgtggatacttaagaggaaataacaacataaaaagcatgcattttaaaacatccttacagcaaatacagctatttcttttaacatccctcaatgtaatgaaatggttacatagtaaaaaaaaaaaaatgttccataaaagagatcctttggagattaacgggtttagaaaacaatatagtccacatataaatttttgttggcgttgttgaatccatgratatatttcagagcaggtttttttttttttttttttttttggaaatcagacactgaagagaattgaaggtgagggggttggagagtgaatagaatatcaccatagagaaatgcacataagcacagtattttgcataggtatttccaaaagttccacaatgcacaaacataaacttcagcttttcaaactgcaggtccaaacctatcagaaattgatgaaatcactctgatgggctggaatgggcagtttacaaagcaaaatgcttctggtaaggttttggcagtagca

SEQ ID NO: 37071 - DNA, 570 bp, Homo sapiens
ttccttgtcctggtgctcacatctaccttgaccaaggacatcttacaccatataactgaaaaatgtaaactttcttatttatgttattattattattttattttactgtaagttctgggatacatgtgcagawcacacaggtttgttacacaggcatatatgtaccatggtgctatggtgcacccatcaacccatcatctaggttttaagccccgcatgcattaggtgtttgtcttaatgctctccctcccctagatccctacccctgacaggcctcagtttatgatgttcccctccttgtgtccatgtgctctcattgttcagctcccacttatgagtaaggatatgtggtgtttggttttctgtttctgtgttagtttgctgagaatgatggcttctagcttcatccatgtccctgcaaaggacattaactcatcattttttatggctgcagagtattccatggtgtatatgtgccacattttctttatcaagtctatcatttatgggcatttggattggttccaagtctttgctattgtaaatagtgctgcaataaatatatgtgca

SEQ ID NO: 37072 - DNA, 1076 bp, Homo sapiens
catatttttatgaacaaatatgaagcacaatccttaaaagcagcttggaaaggagttatataaaaattgcaaatcactcagactattcgactgtcataagaagttaaaagacacctgatacagtttggctgtgtccccatccaaatctcatgttgaattttaactcccagtgttggcggtgtggcctggtgggaagtgattggatcctgtgggtggtttctaatgggttagcactattccactagtgctgtctcatgatgaacttctcaggagatctgctcgtttgaaagtgtatagcacctcccccttcactctcccttcctcctgctcccgccaygaagatgtgcttgcttctccttcacctccaccatgactgtaagtttcctgagacctccccagccgtgcctcctatacagcctgtggaactgtgagtcaattaaacctcttttctttataaattactcagtctcaggtattctttatagcagtgcgagaatggactaacacaacacctatcactgaagggaaatcactaaaaaatactaaattagataactgaattcctgaaaagataatgaatagaggtaattagaaaggaagattttttcttttaattggagagtggaaaattataacggggaaatgtttagtgacatgtatggagaaggaatcatttacataaaatacatgcccaggactttaggaagtttttggttttatttttgaagaatttactgtggataccagaagctcttttgaaaaggcttggttagaaagagtccagtagcataaagctttgttagaaatatgccaatatggtgcctatcaattgttctctatatgcttacttatttaatattggagtgctaactactgtctgaaaacttggagaatgaaagtgaaacgctaaggcagtttcttaaatgctttatctcacagagtaaattgcaaatatggtacaataaagaacagaaggagaagataagctaatgaacgttgataagacacaagtgggtttctcaagacaagttcataataaaattaatcaattatgcttacatttaggaaggctgttc

SEQ ID NO: 37073 - DNA, 828 bp, Homo sapiens
cactcggtcctgctgccctatgaagaaggtgcctgtttctcctttgcctctgccatgattgtaagtttcttgagacctccccagcagtgcagaactgtgagtcaattaaacctctttcctttataaattacccagtctcgggtgtttcttcacagcagtgtgagaaccaacataagatgggaggagggcttgagacagggaggtcaaggctgcagtgagtcacgattgagccactgcactccagcctggtcaacagagcaagaccttgtctcaaaacaaagcatgaaaaccccacaaatctcatcatggggaccccacccttagtacctcatctatacctattaataattacatcctaaagactgtacctgcaaataccacttgtttagaatgagagcttcagcatgtgaatttgagggaggtacattcattcagtcaatagcacagatcaacaagaaacagatttcatatttctccaggccagtgagtagccagacctcttgatagtggacacccagaatcaggtaagggcattctggggattgtagtttggatgagttcaagatttcaaagagggtcaagagccaggaaaagattctttctrgaagagctgtatcaaatggaagcctctgggcctctgtaaactagcctgggagccggcacctcggaggctctcaggaggacagagtcagagaagatctgtgacggtggggcaggtgtggtgggcctctttggcactctgtgcagtgcttgggacatcatgatgcttagtaaatattggatgagtaagtcagtgttgttttgtattcttcttgaagaaatggtttg

SEQ ID NO: 37074 - DNA, 1226 bp, Homo sapiens
gtaatcccagctactcaagaggctgaggcaggagaatcgcttgaacctgcgaggcagaggttgcagtgagccaagactgtgccactgcactccagcctgggcaacaagagcataactctgtccaaaaaaaaaaagatataaacactaccaattctgagctaggaagcaaagtttatatctccaaccttctaaataatctctgaccatgataaaactgaattcccctgagcaccttttgacttgataatatgtagaattatagtctcttgatttttaaacaacatacttttacatttaaagccattcattagaaaataatatagcaaaaatctgatacttatgggtatttttaaaattcatacatagtaaatatttaagtacatactacaaagaaatatcttatgaattcaattaaaatcagtggaaataattgttataaaatgttaaaacacgttatttattttatagcaacatggtactttgttgaatcccagaaagaaaaatagcagaataatgagtaaatcaaatcaggtatcctctaagtaaactatatatatatatttttttttcagtcattctctaaaaggacagaaatttctatatgttttctaatactgctgaaattgtgaagcctcaggctattcaggaaaaatatgaaaactattacaaaaaattccattcataacttatttttttaaatagtgtaattcattcttggattataactcagttatctatcactatcattttccctttttctctggkctatagcaaagtaaataactgaatttgtttctggattagttattatatttcaatagaggacagagagcaacagtgttgcttctgagtctttttcataccttgtcttcctttcctgagctccttttgtctacactgctcttatctgaaatccatatcctctgttatattttctacaccaaattaccataacttaatgtgctaatttataattaataaagaatatctgattttctctgtgtacttaagaaataacaaagcccagatacacataatgggcctactaataaaacacatgggagggcagaaatgatagaactgaaatatgtccaagtcaagttggtcagttgcctcatgaacacaagaggctattaaagctaaattaatttttggcactaatcgttcttttaacatgttctgtttgttgatgaagtctctttcattgtttttgtttttactcttta

SEQ ID NO: 37075 - DNA, 1226 bp, Homo sapiens
gtaatcccagctactcaagaggctgaggcaggagaatcgcttgaacctgcgaggcagaggttgcagtgagccaagactgtgccactgcactccagcctgggcaacaagagcataactctgtccaaaaaaaaaaagatataaacactaccaattctgagctaggaagcaaagtttatatctccaaccttctaaataatctctgaccatgataaaactgaattcccctgagcaccttttgacttgataatatgtagaattatagtctcttgatttttaaacaacatacttttacatttaaagccattcattagaaaataatatagcaaaaatctgatacttatgggtatttttaaaattcatacatagtaaatatttaagtacatactacaaagaaatatcttatgaattcaattaaaatcagtggaaataattgttataaaatgttaaaacacgttatttattttatagcaacatggtactttgttgaatcccagaaagaaaaatagcagaataatgagtaaatcaaatcaggtatcctctaagtaaactatatatatatatttttttttcagtcattctctaaaaggacagaaatttctatatgttttctaatactgctgaaattgtgaagcctcaggctattcaggaaaaatatgaaaactattacaaaaaattccattcataacttatttttttaaatagtgtaattcattcttggattataactcagttatctatcactatcattttccctttttctctggtctatagcaaagtaaataactgaatttgtttctggattagttattatatttcaatagaggacagagagcaacagtgttgcttctgagtctttttcataccttgtcttcctttcctgasctccttttgtctacactgctcttatctgaaatccatatcctctgttatattttctacaccaaattaccataacttaatgtgctaatttataattaataaagaatatctgattttctctgtgtacttaagaaataacaaagcccagatacacataatgggcctactaataaaacacatgggagggcagaaatgatagaactgaaatatgtccaagtcaagttggtcagttgcctcatgaacacaagaggctattaaagctaaattaatttttggcactaatcgttcttttaacatgttctgtttgttgatgaagtctctttcattgtttttgtttttactcttta

SEQ ID NO: 37076 - DNA, 711 bp, Homo sapiens
ctgctattgtggagccagccttgggcaacttcatcctcactgtgagacctgccctactcttgcccactatggtagtttgcccatcctaccttgatatgcaaaggcattttgcattcaggctgcccctactcacagtcactttcatttttccctgtacatgaggatttattktgtcactgatttaccaatgagtccaaccccagcatatgtcatgctttacagaaagtctatgagttttcttatttctaagaactggataaatattggtcaggttcaggatagcttaccatgtataggagaatcatttatttgggaacttctgatttagtaagtgctaagctacctggaacgattcatgatttccttctattagaagtatacctgggatgtgcctcctaaggcccaagattctttgtcaaaaaatagctgaagaagaatgctatagatatggatcttaagggctgaactttctggattcttactagtatattatgttaatgcacattcacaatttttctctttgtcaactttaacatatattcatcagctaacaaatttagctgtagtactcgtgaggtcaaaaacttgaggcttcttattagtagttgtaattgtggttgttgctttttaaaagactttatttttaaagttttagatttacaggaaatgttactgttttaacctacacatggtccttgtgttaatggcaca

SEQ ID NO: 37077 - DNA, 711 bp, Homo sapiens
ctgctattgtggagccagccttgggcaacttcatcctcactgtgagacctgccctactcttgcccactatggtagtttgcccatcctaccttgatatgcaaaggcattttgcattcaggctgcccctactcacagtcactttcatttttccctgtacatgaggatttattttgtcactgatttaccaatgagtccaaccccagcatatgtcatgctttacagaaagtctatgagttttcttatttctaagaactggataaatattggtcaggttcaggayagcttaccatgtataggagaatcatttatttgggaacttctgatttagtaagtgctaagctacctggaacgattcatgatttccttctattagaagtatacctgggatgtgcctcctaaggcccaagattctttgtcaaaaaatagctgaagaagaatgctatagatatggatcttaagggctgaactttctggattcttactagtatattatgttaatgcacattcacaatttttctctttgtcaactttaacatatattcatcagctaacaaatttagctgtagtactcgtgaggtcaaaaacttgaggcttcttattagtagttgtaattgtggttgttgctttttaaaagactttatttttaaagttttagatttacaggaaatgttactgttttaacctacacatggtccttgtgttaatggcaca

SEQ ID NO: 37078 - DNA, 711 bp, Homo sapiens
ctgctattgtggagccagccttgggcaacttcatcctcactgtgagacctgccctactcttgcccactatggtagtttgcccatcctaccttgatatgcaaaggcattttgcattcaggctgcccctactcacagtcactttcatttttccctgtacatgaggatttattttgtcactgatttaccaatgagtccaaccccagcatatgtcatgctttacagaaagtctatgagttttcttatttctaagaactggataaatattggtcaggttcaggatagcttaccatgtataggagaatcatttatttgggaacttctgatttagtaagtgctaagctacctggaacgattcatgatttccttctattagaagtatacctgggatgtgcctcctaaggcccaagattctttgtcaaaaaatagctgaagaagaatgctatagatatggatcttaagggctgaactttctggattcttactagtatattatgttaatgcacaktcacaatttttctctttgtcaactttaacatatattcatcagctaacaaatttagctgtagtactcgtgaggtcaaaaacttgaggcttcttattagtagttgtaattgtggttgttgctttttaaaagactttatttttaaagttttagatttacaggaaatgttactgttttaacctacacatggtccttgtgttaatggcaca

SEQ ID NO: 37079 - DNA, 595 bp, Homo sapiens
cttctcatccctgaagtcctaggctctgcagatctagaaaatcctgctccttcacagacagtaaatactcccactggagaacacaatgagagtctgtttcattgaacttttaagctctggctgtaactggccacttccggttcccataccaagagaacagtagatgaagaaagtcaycacacttgtaggagtaattcacattggccttcagcagaaagagactgttaagaagtcagctgccaagctgtcagttcttggatgatttttttttctatttgtttttaagatattttcttcatcttggttattccgaaatttcagaagtggattttttttattaatcttgatatttattgaatctactgagacttgtgtttttcgccaattttgcaaagttctcatctattatctcttcaaatcttgctttccttctattttctcactgtagaaccccaactaaacaatccattggaaaatactgaccaggggcacattaaactaaattttttactttggggcttttggtccaaagtggtagagtgaattccagcaccaatatggacataggtaggtttgtggttggaaattctcaaag

SEQ ID NO: 37080 - DNA, 595 bp, Homo sapiens
cttctcatccctgaagtcctaggctctgcagatctagaaaatcctgctccttcacagacagtaaatactcccactggagaacacaatgagagtctgtttcattgaacttttaagctctggctgtaactggccacttccggttcccataccaagagaacagtagatgaagaaagtcatcacacttgtaggagtaattcacattggccttcagcagaaagagactgttaagaagtcagctgccaagctgtcagttcttggatgatttttttttctatttgtttttaagatattttcttcatcttggttattcygaaatttcagaagtggattttttttattaatcttgatatttattgaatctactgagacttgtgtttttcgccaattttgcaaagttctcatctattatctcttcaaatcttgctttccttctattttctcactgtagaaccccaactaaacaatccattggaaaatactgaccaggggcacattaaactaaattttttactttggggcttttggtccaaagtggtagagtgaattccagcaccaatatggacataggtaggtttgtggttggaaattctcaaag

SEQ ID NO: 37081 - DNA, 1077 bp, Homo sapiens
ggatccggcctttctctcctgtgtctgcctcctgcagaaccatgagcagcttcagggccgaggcagtgcctttccatccgtgaatctcctgatccatcagaatactcgagagagagtgatgcccaagaaatactgactgagtgtattcatgaaagaattaatgttcttacaggatcacttgttgttgaactgacctgacatgtgtatagtgatctcatgaacaagagggaagctgtgcatccattcacttcaattggatttagcaatcgcagtaggataatgatatttccacaatgtatatgctctgtccctttaaatttaactttttgctttttagacagaagctcatcagtcttagggagttctgaaggcggatttctcagccgcgttcaagctgamgagttcgccagttcttccccagacagtgcagagcggcaggtaggtggctgagtggcttctgtgagggcggcccacccggttcccctcagggagacctgagaaggtgaccttttcgtcctggggaagtgagattcggagccggtgtcatgagatggttgcatcttcccatcttctcaacaagaacagaaaattaagatgattccaaatgtctctttatttcctgaagttcagcctttcaaacagagacttttttttatagatttaagttggttgcatttagcccaaacaagattaatgttttttatgacttaagagttcccctagtcagagtttcattttttatcattttgatttacagttctcagttgacattaatagactcgaaggcaagaatagcaaacatacttctaagccctagctaggggcccacttgtaacatgctatattttacaaaaaaaaaaaagtcaataaaataaaattattttctctacgccaggaaatttgggctgtgaacttacgtatgatgtaaaactagacacctggcggggaagtctcagaacacaggtcccgcttgttttctgttctcctgcgaaaagcccacattctgttctgccctctccgacgtcttcagtggggggacgagtgggaatatttttcttgggattttattttgtttgg

SEQ ID NO: 37082 - DNA, 1077 bp, Homo sapiens
ggatccggcctttctctcctgtgtctgcctcctgcagaaccatgagcagcttcagggccgaggcagtgcctttccatccgtgaatctcctgatccatcagaatactcgagagagagtgatgcccaagaaatactgactgagtgtattcatgaaagaattaatgttcttacaggatcacttgttgttgaactgacctgacatgtgtatagtgatctcatgaacaagagggaagctgtgcatccattcacttcaattggatttagcaatcgcagtaggataatgatatttccacaatgtatatgctctgtccctttaaatttaactttttgctttttagacagaagctcatcagtcttagggagttctgaaggcggatttctcagccgcgttcaagctgaagagttcgccagttcttccccagacagtgcagagcggcaggtaggtggctgagtggcttctgtgagggcggcccacccggttcccctcagggagacctgagaaggtgaccttttcgtcctggggaagtgagattcggagccggtgtcatgagatggttgcatcttcccatcttctcaacaagaacagaaaattaagatgattccaaatgtctctttatttcctgaagttcagcctttcaaacagagacttttttttatagatttaagttggttgcatttagcccaaacaagattaatgttttttatgacttaagagttcccctagtcagagtttcattttttatcattttgatttacagttctcagttgacattaatagactcgaaggcaagaatagcaaacatacttctaagccctagctaggggccsacttgtaacatgctatattttacaaaaaaaaaaaagtcaataaaataaaattattttctctacgccaggaaatttgggctgtgaacttacgtatgatgtaaaactagacacctggcggggaagtctcagaacacaggtcccgcttgttttctgttctcctgcgaaaagcccacattctgttctgccctctccgacgtcttcagtggggggacgagtgggaatatttttcttgggattttattttgtttgg

SEQ ID NO: 37083 - DNA, 705 bp, Homo sapiens
aagagagaataggcaagaaaaaacactttggtttgtttttcttgtatcttcttacacaacattaaaaaataacctcacggactcttatgctaaaatatctcacacgccaactaggatttacatagaacctattttgtctttaagcctatgccatatgccataaaaaaatcaaagaataagaaaatgtaagatcaaagtacttgttaggattaacaatctcaccctttaaaaaaaataaaatcttttggtttagttccttcagttacttataccatattacacatcactttactcagcctgctaggttcctcacaagatgatttcaaaatcgataaagaaaatagcaatgttcacagccatgaaaaagaatgaaatcaagtcctttgcagcaacaaggatgcagctagaggccattatcctaagtgaactaatgcagaaagagaaaaccaaatattgcatattctcactcataagttggagctaaatcttgggttcatgtggacataaatatggaaactatcaacaccggggactctaaagggaaggagggacrcagcaagggctgaaaaacttcctgctggaactagtatgttcactatctgggtgacagcatcaatagaaacccaaacctcagcaccatacaatatacccttgtaacaaacctgaacacgtacctctgaatctaaaataaaaatagaaatttaa

SEQ ID NO: 37084 - DNA, 657 bp, Homo sapiens
atctctatcctgcaaatgcacaatagactttatgttttatatggtggagataacctcaattctatttactctctctgtttcttttgtaaaatgagaaaggagctaaggagtttatgtgttaagggaatgagctcccaaactcaactggaagttggaaatagaattgagagggagcaaggaagctatagtgagtcttcaggtgttaggatgcgtgctgcacatgcttggggtctgagagtggtcatattctgtaggactcaccatattctgtaatgaatgcagtagagagtgtgactgagatgcacatggagaaaacacagggtctgagccctccaagctccccagtgtcctgttctgatcctcctggggtcactacagtcctacccatggtcctgtgaagcactctagtaactttaaatcagttcctgctcacctctgtttcttggaacaaatggagacttaactatcccaggcagaataaacaaacaaacaaacaaaaataggatggaaaataggcaggagtttataggaaggacccgccttccattcaaagctccaaataggtcttagcaaagagccaggttgtctaagtcccttgatgtaactaaccccaggygcgggagccccggagagtgcttggcttggttatcaggcatc

SEQ ID NO: 37085 - DNA, 1030 bp, Homo sapiens
taccctcaaatgccttacagtttggtagacagaaaaataagtctcttccaacgatactgttaaactaatcagaaacttggttaaggtcatttgatcatctaaggctctacaacagtacagttttacagctcttattttaaaatgttcccctctaatccataaagatatctcaagatagggcaatgccattacttggtgtattatagttaaccaatactgtatgtggaacataatgtggtgtgatacttttgaatttgtgtctatctgctgttaaagagcctggctgctaattgagtttctggaaaaagttgagaaatgtcttagctcaggctggtataacaaaataacagaggctgtaactacaatcacacttgcaagtagaagatctttgcttcaaacctagcagtctggctctagaaatcaggacttggatgagggtgaagtgagtgagggcctagggcataaaatttaaggagatacttactctgcaggtagttcaagtgctgaccacacatttgcaagacgtgagagtgagtgtcttcttaatgtgcattaagtgccttgcttaccttacctatctagwcccagccctatccagagcctaccttttacaactctaccttttaaagcttagcatcctctacaaaattatactatggagtagaaaggttgtactgtgaactgagctggcattattctcacacaagctatgtacttcagcatcaaagatagtattaaaatagatgcaatcataacataatctccatacactgcagttagaaagttatttatgaagcatctggtatatctggacatacaatcatcaagtcacctgatagccctagagctggaatgaaatttgagaggatcatttggtaaaaggcatatactttaaaaaaactgaggcttaaaaaagtaaaataattttcacaaaacgacagagccagaattggcagaaatgaaagtagatcactagttttctaatcccagtttcactcgatatctctgattgtgtattagtcaggatcca

SEQ ID NO: 37086 - DNA, 1030 bp, Homo sapiens
taccctcaaatgccttacagtttggtagacagaaaaataagtctcttccaacgatactgttaaactaatcagaaacttggttaaggtcatttgatcatctaaggctctacaacagtacagttttacagctcttattttaaaatgttcccctctaatccataaagatatctcaagatagggcaatgccattacttggtgtattatagttaaccaatactgtatgtggaacataatgtggtgtgatacttttgaatttgtgtctatctgctgttaaagagcctggctgctaattgagtttctggaaaaagttgagaaatgtcttagctcaggctggtataacaaaataacagaggctgtaactacaatcacacttgcaagtagaagatctttgcttcaaacctagcagtctggctctagaaatcaggacttggatgagggtgaagtgagtgagggcctagggcataaaatttaaggagatacttactctgcaggtagttcaagtgctgaccacacatttgcaagacgtgagagtgagtgtcttcttaatgtgcattaagtgccttgcttaccttacctatctagacccagccctatccagagcctaccttttacaactctaccttttaaagcttagcatcctctacaaaattatactatggagtagaaaggttgtactgtgaactgagctggcattattctcacacaagctatgtacttsagcatcaaagatagtattaaaatagatgcaatcataacataatctccatacactgcagttagaaagttatttatgaagcatctggtatatctggacatacaatcatcaagtcacctgatagccctagagctggaatgaaatttgagaggatcatttggtaaaaggcatatactttaaaaaaactgaggcttaaaaaagtaaaataattttcacaaaacgacagagccagaattggcagaaatgaaagtagatcactagttttctaatcccagtttcactcgatatctctgattgtgtattagtcaggatcca

SEQ ID NO: 37087 - DNA, 1319 bp, Homo sapiens
gacttggtgtcttgaatggcagcagtctgctaagctcaatgctctgtttctcatgtttcgaatgtggtgaataagtcacaagttagtgggatgataatagccatagacttatagtcaatagacttgggtattctgattcagttccttgtcagttgagaggtttctgtcaagatatttatccagatcctcaattacctcattggtaaaatgagagtaataaaaatccctttgcagtattgctctgatgattaaacattttagagtgccaagtgtaatacctgatatatggctgcagaataaataattatcattaaaagtgataaaaattatagaaggttataattattcttcagatagtttcacccatcagtagactcattgcacagatattaaaacaagttttgtataaatacccaaagatgtctcctgagtattgagtatcagtttctctacatgtgtaatgatgccaaatattacatattagaggctttctcatgtaaaaggagtttgtgcattctgtaaataaaaacgataaggtctgggaataataagagccttgcctgagatcatgccggtgatagcatgtttatatctccagcatagaatgcttactaagcctccagcccttggaatttccttttggcatcttaagtatcttgctgagcatttccaagttgtattcttccatcactgaaattagaacagagatggttctctaatttgtatgagtgtggcttagaggggttgatggggcagttgatggggatatacaaggaaaataatttgtcaccgcatttaaaaaccagtcatatgatttacttagattaggtgtgaagttagtttttcagtaggtagaatgtggatcggtgctaaactctaccccaagctaccctaaacaatgctacttaatttagccattgtttttgtcaaaatcaatcatctcaagtcctcctcattcctttcagtaacttgtcacactttcacattgacttgaaatttsagctattatttcttcattcattttctaactgtctacatccatttaactttacgtttgttgatgctgctttgaaaacatctctcatgtctatttctcttttcattcttaccaatatggctttactccagctgctatgtgtttgccaattagactgatgccaaaatatttcaattggtgccttgtcccacatttctctcctttctcatcaagtcataaactgtagactaaatcatgtgaaaacaccactttccatttatcaccaccttatttagagcccttcactggaacttccagatctgtgaaatgaaacacagattct

SEQ ID NO: 37088 - DNA, 1164 bp, Homo sapiens
tgtgtgtgtgcgtgtgtgtgtgtgtgtgtgtgtgtgcctgtaatggaaataaatgccttagattccattcttctcctatcttaaactatatactgatttgctaagttttgccatcggttacatcagaatttactggaacttaccggaacatgatatttgtacataacagatatcaatggcatgcactcattttgtctaagaaatgcaaaggaatactactatactgcccaaggtgttgatgagataatgtccagattttttttttttttttttgagaaactgcgtggaggttcgacatagcattttcttggctaaataagttttaactgcagctacacacatctcagattcatggtgcatctaattaggccaaaacaacatctacttgttgaggagaggaattaagtgttgtattggaataaaacatatttaatggcttaagctagaataatgtagtagaatgctagtgcccaggctttaggagccatatcctcctaattctttgcctatggaattcatgcttgaaaagttaacctgtggagaaatccttttacaaattgcttgattcttaccagctaccagtggaataagcaatctgttcctacattaataggctgctacctagaggaaacatttaggcaaaactgcaagctgtcttaaaattctggaaagcaaaaatgtcaaagatgcccaattttaccaagctggtctctgaatcctaaactgcttattaagacttgcatgtttggaacacatgtggaacacagtcaccratttatcccatgtaggacaagtagccaaaaccaaaacctaaactaaatatttggtcctttggttggaaaacggttatttctaagttgtcttatttagtggactctattatgcttgaatgagcaagtgttttgtttgtttatttttgctgactgccctgcattgaatgctagcctctgcttaaagtaagaatgcctctaaaaagatatataagtttacatatcaagacatgcttgctgaaatcatggtcagcaccattctgttttatagttcatcacctggtgcttaccaaaacttgcccttctaaactacatttcatttttcagtagctatatgttcattaaaaaaaaaaaagatctggaataattcaatccccaaaacatatgtggttat

SEQ ID NO: 37089 - DNA, 1164 bp, Homo sapiens
tgtgtgtgtgcgtgtgtgtgtgtgtgtgtgtgtgtgcctgtaatggaaataaatgccttagattccattcttctcctatcttaaactatatactgatttgctaagttttgccatcggttacatcagaatttactggaacttaccggaacatgatatttgtacataacagatatcaatggcatgcactcattttgtctaagaaatgcaaaggaatactactatactgcccaaggtgttgatgagataatgtccagattttttttttttttttttgagaaactgcgtggaggttcgacatagcattttcttggctaaataagttttaactgcagctacacacatctcagattcatggtgcatctaattaggccaaaacaacatctacttgttgaggagaggaattaagtgttgtattggaataaaacatatttaatggcttaagctagaataatgtagtagaatgctagtgcccaggctttaggagccatatcctcctaattctttgcctatggaattcatgcttgaaaagttaacctgtggagaaatccttttacaaattgcttgattcttaccagctaccagtggaataagcaatctgttcctacattaataggctgctacctagaggaaacatttaggcaaaactgcaagctgtcttaaaattctggaaagcaaaaatgtcaaagatgcccaattttaccaagctggtctctgaatcctaaactgcttattaagacttgcatgtttggaacacatgtggaacacagtcaccgatttatcccatgtaggacaagtagccaaaaccaaaacctaaactaaatatttggtcctktggttggaaaacggttatttctaagttgtcttatttagtggactctattatgcttgaatgagcaagtgttttgtttgtttatttttgctgactgccctgcattgaatgctagcctctgcttaaagtaagaatgcctctaaaaagatatataagtttacatatcaagacatgcttgctgaaatcatggtcagcaccattctgttttatagttcatcacctggtgcttaccaaaacttgcccttctaaactacatttcatttttcagtagctatatgttcattaaaaaaaaaaaagatctggaataattcaatccccaaaacatatgtggttat

SEQ ID NO: 37090 - DNA, 1164 bp, Homo sapiens
tgtgtgtgtgcgtgtgtgtgtgtgtgtgtgtgtgtgcctgtaatggaaataaatgccttagattccattcttctcctatcttaaactatatactgatttgctaagttttgccatcggttacatcagaatttactggaacttaccggaacatgatatttgtacataacagatatcaatggcatgcactcattttgtctaagaaatgcaaaggaatactactatactgcccaaggtgttgatgagataatgtccagattttttttttttttttttgagaaactgcgtggaggttcgacatagcattttcttggctaaataagttttaactgcagctacacacatctcagattcatggtgcatctaattaggccaaaacaacatctacttgttgaggagaggaattaagtgttgtattggaataaaacatatttaatggcttaagctagaataatgtagtagaatgctagtgcccaggctttaggagccatatcctcctaattctttgcctatggaattcatgcttgaaaagttaacctgtggagaaatccttttacaaattgcttgattcttaccagctaccagtggaataagcaatctgttcctacattaataggctgctacctagaggaaacatttaggcaaaactgcaagctgtcttaaaattctggaaagcaaaaatgtcaaagatgcccaattttaccaagctggtctctgaatcctaaactgcttattaagacttgcatgtttggaacacatgtggaacacagtcaccgatttatcccatgtaggacaagtagccaaaaccaaaacctaaactaaatatttggtcctttggttggaaaacggttatttctaagttgtcttatttagtggactctattatgcttgaatgagcaagtgttttgtttgtttatttttgctgactgccctgcattgaatgctagcctctgcttaaagtaagaatgcctctaaaaagatatataagtttacatatcaagacatgcttgctgaaatcatggtcagcaccattctgttttatagttcatcacctggtgcttaccaaaacttgcccttctaaactacatttcatttttcagtagctatatrttcattaaaaaaaaaaaagatctggaataattcaatccccaaaacatatgtggttat

SEQ ID NO: 37091 - DNA, 535 bp, Homo sapiens
tgacaaatataattcattttattatcataatrcatatttttgaagatacaaatgatgccataaaaatatattcttaactcgcaaaggagtcagtaagccattccaatgtgcagaattcaaccacaggctgtttaacaggaacacaattgctaatcatcaagcctaaaaagcagaacaataaatgttccaatctgctgtgggtcagcaaccaaagaataaatctcacaattttttttttctttttttttttttttttgagatggagtctccctctttcacccaggctggagtacaatggtgcaatcctggctcactgaaacctccgcctcctgggttcaagtgattctcgtgcctcagtctcctgagtagctgggattacaggcacccaccaccacatccagctactttttggatttttttagtagagacagggtttcaccgtgttggccaggctggtctcaaactcctgatctcaagtgatccaccctccttagcctcccaaagtgctgggattacaggcctgagccaccatgcc

SEQ ID NO: 37092 - DNA, 535 bp, Homo sapiens
tgacaaatataattcattttattatcataatacatatttttgaagatacaaatgatgccataaaaatatattcttaactcgcaaaggagtcagtaagccattccaatgtgcagaattcaaccacaggctgtttaacaggaacacaattgctaatcatcaarcctaaaaagcagaacaataaatgttccaatctgctgtgggtcagcaaccaaagaataaatctcacaattttttttttctttttttttttttttttgagatggagtctccctctttcacccaggctggagtacaatggtgcaatcctggctcactgaaacctccgcctcctgggttcaagtgattctcgtgcctcagtctcctgagtagctgggattacaggcacccaccaccacatccagctactttttggatttttttagtagagacagggtttcaccgtgttggccaggctggtctcaaactcctgatctcaagtgatccaccctccttagcctcccaaagtgctgggattacaggcctgagccaccatgcc

SEQ ID NO: 37093 - DNA, 1603 bp, Homo sapiens
cgggcacccccattccataccaggcctatcatctcctacatcggatggcttacatcactctacaccacgagggagcaggaaggtgttcagggtggaacctcggaagaggcacacccatccccttttgcaccatggaggcaggaagtgactaggtagcaacagaaaaccccaatgcctgaggctggactgcgatgcagaaaagcaggggtcagtgcccagcagcatggctccaggcctagagagccagtgcagagcctctgcaggagttatggggtgggtccgtgggtgggtgacttcttagatgagggtttcatgggaggtaccccgagggactctgaccatctgttcccacattcagcaagttcattcctgagggctcccagagagtggggctggttgccagtcagaagaacgacctggacgcagtggcactgatgcatcccgatggctctgctgttgtggtcgtgctaaaccggtgagggcaatggtgaggtctgggaagtgggctgaagacagcgttgggggccttgtgcaggatcacactctcagcttctcctccctgctccctagctcctctaaggatgtgcctcttaccatcaaggatcctgctgtgggcttcctggagacaatctcacctggctactccattcacacctacctgtggcgtcgccagtgatggagcagatactcaaggaggcactgggctcagcctgggcattaaagggacagagtcagctcacacgctgtctgtgactaaagagggcacagcagggccagtgtgagcttacagcgacgtaagcccaggggcaatggtttgggtgactcactttcccctctaggtggtgccaggggctggaggcccctagaaaaagatcagtaagccccagtgtccccccagcccccatgcttatgtgaacatgcgctgtgtgctgcttgctttggaaactgggcctgggtccaggcctagggtgagctcactgtccgtacaaacacaagatcagggctgagggtaaggaaaagaagagactaggaaagctgggcccaaaactggagactgtttgtctttcctggagatgcagaactgggcccgtggagcagcagtgtcagcatcagggcggaagccttaaagcagcagcgggtgtgcccaggcacccagatgattcctatggcaccagccaggaaaaatggcagctcttaaaggagaaaatgtttgagcccagtcagtgtgagtggctttattctgggtggcagcaccccgtgtccggctgtaccaacaacgaggaggcacgggggcctctggaatgcatgagagtagaaaaaccagtcttgggagcgtgaggacaaatcattcctcttcatcctcctcagccatgcccagggtccgggtgcctggggcccgagcaggcgttgcccgctggatggagacaatgccgctgagcaaggcgtagcccmccatggctgccagtcctgccagcacagataggatctggttccggcgccggtatggctcctcctcagtctctgggcctgctggtgtctggcgttgcggtggtacctcagctgagggtcaaggaaggaaggtgtgttaggagaactagttctt

SEQ ID NO: 37094 - DNA, 923 bp, Homo sapiens
aatcttgtgttaggtggtggttttctcttgcataagcctcttcatttgttgaaaccatagattctaagtttgctctatcaaagtgatcattagaaaaatataatgtacttagtgtataaattttagaaaatttcctttttagtcctgttattttgattgaatatgtgcattttgaattatgaatataaatatgaatatrtatggcataagaaatatgacttgacatcacagagtaaccttagatcgtggcaatgtttttttctgaaagcacctgcagaaatgtatcttctttctagtttccaaaaaactcagaggccatgggggaagaggggactttggtggtcagatagtgcatgaggtacattaggatatagtaattgcatcataattcatatccataattcacagtgaggaaacctgaaatttgctaccagctaccaataaatgaaaggtggggcggggtcgctggggggcgcggctttgtgagccagtgcctggactcccacgtcacaaatggaagggcagcgcgtggagggaactcaaggcctgattggttcttcctaagcaggacacgatcaggttggcacggcaaccggccttcagttggtggccttcagtgggtgccttaagttggtggcatttggttgcctttcctggggagaggcggcaggtgctcagctctgcagacgtaggggcaagcgaaggcccaagctgcctcgagaagagcagagatgccccatggggaccacgatgacgggtcgcatgtgcaccaaagccagcccccagcagggccagcgcaggggttctgcggggccgtcctgtggctctgatatctatgagtcgtcggccagcaaaggcacaggcaccagcagaaaggagcagagatgcccagaacatgctgtcccccaatgccagccccaagc

SEQ ID NO: 37095 - DNA, 923 bp, Homo sapiens
aatcttgtgttaggtggtggttttctcttgcataagcctcttcatttgttgaaaccatagattctaagtttgctctatcaaagtgatcattagaaaaatataatgtacttagtgtataaattttagaaaatttcctttttagtcctgttattttgattgaatatgtgcattttgaattatgaatataaatatgaatatgtatggcatawgaaatatgacttgacatcacagagtaaccttagatcgtggcaatgtttttttctgaaagcacctgcagaaatgtatcttctttctagtttccaaaaaactcagaggccatgggggaagaggggactttggtggtcagatagtgcatgaggtacattaggatatagtaattgcatcataattcatatccataattcacagtgaggaaacctgaaatttgctaccagctaccaataaatgaaaggtggggcggggtcgctggggggcgcggctttgtgagccagtgcctggactcccacgtcacaaatggaagggcagcgcgtggagggaactcaaggcctgattggttcttcctaagcaggacacgatcaggttggcacggcaaccggccttcagttggtggccttcagtgggtgccttaagttggtggcatttggttgcctttcctggggagaggcggcaggtgctcagctctgcagacgtaggggcaagcgaaggcccaagctgcctcgagaagagcagagatgccccatggggaccacgatgacgggtcgcatgtgcaccaaagccagcccccagcagggccagcgcaggggttctgcggggccgtcctgtggctctgatatctatgagtcgtcggccagcaaaggcacaggcaccagcagaaaggagcagagatgcccagaacatgctgtcccccaatgccagccccaagc

SEQ ID NO: 37096 - DNA, 923 bp, Homo sapiens
aatcttgtgttaggtggtggttttctcttgcataagcctcttcatttgttgaaaccatagattctaagtttgctctatcaaagtgatcattagaaaaatataatgtacttagtgtataaattttagaaaatttcctttttagtcctgttattttgattgaatatgtgcattttgaattatgaatataaatatgaatatgtatggcataagaaatatgacttgacatcacagagtaaccttagatcgtggcaatgtttttttctgaaagcacctgcagaaatgtatcttctttctagtttccaaaaaactcagaggccatgggggaagaggggactttggtggtcagatagtgcatgaggtacattaggatatagtaattgcatcataattcatatccataattcacagtgaggaaacctgaaatttgctaccagctaccaataaatgaaaggtggggcggggtcgctggggggcgcggctttgtgagccagtgcctggactcccacgtcacaaatggaagggcagcgcrtggagggaactcaaggcctgattggttcttcctaagcaggacacgatcaggttggcacggcaaccggccttcagttggtggccttcagtgggtgccttaagttggtggcatttggttgcctttcctggggagaggcggcaggtgctcagctctgcagacgtaggggcaagcgaaggcccaagctgcctcgagaagagcagagatgccccatggggaccacgatgacgggtcgcatgtgcaccaaagccagcccccagcagggccagcgcaggggttctgcggggccgtcctgtggctctgatatctatgagtcgtcggccagcaaaggcacaggcaccagcagaaaggagcagagatgcccagaacatgctgtcccccaatgccagccccaagc

SEQ ID NO: 37097 - DNA, 683 bp, Homo sapiens
aatttttcatgtctcacattactaatgagcttaagcatctcttcatatgcttgagaaatttgggagtttccttttctattaattgcctattcctgtcctttgaccatttttttttttctatttagggttcttctttttagtctgatgaatttgcagaagttccttggatgatctagatactagacccgttgtcagttttagrcacttctaattttcatcttttatctttagacaaaattttactcctgatttcgatagccaaattgatatcagtagacagatctgttatagacaactcaaatttaacatgtataaatagcaacttttctaatttttcctgaaaattgtttttcctgtgtttagtctctgcatgagtcacctattatctaaataataaaccttggaataatccctcattccagatgtaccactaatcactgggttttgttagaaggatcccttaaatgtttttaaatcattatttcttctccattcctacttttcctttcctaatttacgttctcattatcttttgcttggactattgtaatagtcaataaactgttcccacttcctctagacttcctcttcttcatttcctcttctgtactgtcccaagggcagttgttctaaagcagaaagtcgtgcattttcttcccttgtttaaaatgggttggtgggct

SEQ ID NO: 37098 - DNA, 533 bp, Homo sapiens
aatgaaaaactccccacagcctgaacttaagcgcaaggttgtttattccctgccctggcaaattgaatgaggactggattcactaccaaggcatttacaagatgcataaggtggccttcctttatggtttgtgtgttgacctactggaaaggatgctgagactggttcaagtctgtaattgtgtgtttctaagagttggtgtctaatgggaaagtgatctcaggcctgtagttagtaaaaagcatttatgtattaactggctagagtgagaggaataaatttttaacacttaagactataaactgtaggagatttggagatagtggctaaatcctcttggaaatgcyggatgcatcatcttttattcaatttttctgagccatcttgggtttctgctatctgagttagtcagaaaaacacttagatgaatgttaagtaacccaagtgctaaaatatatagtcgtcatcactctcccatgagaactgaaagacgaaccttttttggaagtcagctctcttttatctgctgtatt

SEQ ID NO: 37099 - DNA, 1032 bp, Homo sapiens
ccagtccctaaataccgcaggttcactaagaccttccgacgtgcccgaagaagatacacttgcagaggagaaatgatgatgcagaggcctgctctgagatgcaggaggaagtctaattgcctgtgaatttgactgggatggaagggatgaaacgaggtttgaaaggaaatagagattgttaaattcctgactaggcaataactgccgtccttctcttctatctgcccctgtgactaggcgataactgccgtccttctcttctatctgcccctgtgactaggcgataactgccatccttctcttctatctgcccctgtgactaggcgataactgccgtccttctcttctatctgcccctaccttgggccccaaatgactcagcactaaagtgccttgagcaggctccagtccaaaagtggcctctatgggcaccacctcctgctctgctgccctgcctcgctttcctcctcggccttcccggatgaatgacagatgtcattcccaggttccctaacactcaagtctagcccctcagtttctagcaagcatcaagcttcactgtatgtctagcctctcaggagtcagacctcagaagtacagcttggtgtaaattcagaggcagggaagaaagaaggaaagcagaccctgagctgggttcatacacatcatcgcaattcatccacaccgcagtcctgtgagttatgtgccactgtactcagaaaactgaggctcaaagagattgagcaacttatctaagacctcacaggtcctgagagcagaccctggatttcaaacacctggaagactctgaaatccatgttagctcttctatacatgggcccaaaatgcagctgtacaccagcaagactgacttcctcttgtggcttatcactatctctgaayacaagaatcctcaaaatgctttataaccaacagtagcatcatgggaataagttggcaagttcccagcattactgctttagatgcacttgaactttttctccatgtatagagtcaagaataagaaaaaag

SEQ ID NO: 37100 - DNA, 848 bp, Homo sapiens
tctaatacaaatacagctattaatgttttccaaatctacagttacccagaaaatggaggataatcaaaggaatatttatggaatacacatgtgactatgaagcagggtctttccttgaaaagacacagtctcctcttcaatctagggaccaggtctggaaactagtttagtgctaaaaactgtgttaaagacataaattcccactaccatgaattatgcttcttaaatttttcctttgatgtatgtcaagcaacaccttaacctggtatatatttatttttagataccccgtgattagttagccatcactggagatcgctcattaaatagtactttgcaactattttaaccctgtggcttaccgtgattcttgttctcatgtaatctcagacagttaaaacaaatcagcttctactcctccrggataatcacgtcatttctactgagatgatggaatagaattccatcccaggatcccacacgtcgtctctgacctacaaaggtgaggcaccacaaaaggcttcaaagttgctggtaccccctcagcctagataatggaacatcctctagtactttgtaggattcactaagcagtttgcccataatagatttgacctaagaaacctattttctgcaacctaagattttcccctccatagtagacctagaaaattcaacaatttcaaagttattaaatttagtccaatatttagtttaggctttgtttacgcaacctagcagactcttgagatcactccagggaactcaagtcaacatattgaatcttggtttctagaaaggtacatatttgtaaggaattttacccatatgagtcttatatttactcc

SEQ ID NO: 37101 - DNA, 1240 bp, Homo sapiens
tttgccctcagaagaaatcaagctccgtatctcaggcaggcatacatgttttgattcctttttctttcacttatttccttcctaccttgggaacttttcctctgtctgaagaaggaatatattcggacttattctatacttgaatctcttcaagaactaggcttctgagacacataaaccaatgtttttctctttggtactgttttgtgctatgaaacgatgtctttgagacatttaaggtcagaattcccttgctatctaagtgagaaagtgataaatagttatagcacatgaagaaaatatccaaaaaatcaatatatatttttaaatattatggctaattcatattgatacattatagtgttgaaaaattcacacaggtaatttaatatagtgatagattatctctggttttcttgttaaaaattaaaatattataaactttcaagtcaacaattggcttttgagtatcaataataatagggacaagtataaataagaatagtaatatcaacaggtaatataaaataattttccactaattcttagtatatgtcaaatttattttaaaagtaagaaagttgattaaattttttatatatcccttctaaccttcattttttacctgtgagatgatgtgtattaatcatttatcaagaatctattagtaactgctaccagcacagttctctctctgcctttgggatgaaataaaacaagcttatcactctaatgggaaagaatagtgcacgtaaaaaacagaaactgaagcttgtgatttgaaagacatggatagagcaaggtcatgacacaaagtggaaatacactttctttaataagagaaaggtggtakatagaatgccacaaaatttattcagaaatagcctcatttaacaatgaagtcttctgaagctgacgtgtgagtcattatctagaatagtgcccatgaaaagagaaatgatcattctggtacaaacatttaaaaacaccattacgtgacatagagttctcattagtttgtcaatgcagaagagctaaaatttttatagcaacacaagtatatgactttaaagtcatttatttcttagatgaaaattgtagttcataatttaattaagatatgtattattttaaaactgtaagatgaatcattatttaatgtccttttgtgtgagtgtttaattatcctacgactcattatttgctgtagatatgtggtacactctaaccaaaagatgca

SEQ ID NO: 37102 - DNA, 1349 bp, Homo sapiens
tatgttcacattagtagatactgccagttttaaagtgataccaacttacactcttgctactaatggagaagagtttttattgctccttaatcttgactagactttttattttttgtctttcattttagaaactctggtaggtgtttagtggtatctttaacccctcttaatatttactggtcattcgaatattctcttttatataaaattccttgtccaaatttcccatccatttttctgttgatttgtaggagttctttatatattctgaagatgactcttttgttggttacatgtgctgtaaatatgttgtctcaccctgtggcttcccttttcactctttataatcatgtactttgaatacaagtttttaattttaatgtagacaaatttattagtctattattttatgatgggtgtgtttctgttccaattaagaaatatctacttacctctaggtcatgaagatagtcatatattttgttctagaagccttgtcattttgtccgtcacatttagatgtataatyacttggaatattttttcctaaatgttgcaaggtagattcatattcaatttttaaaattaaattaaatatggatagtcaatggatgcagaatgatttcttgaaacaaaatccccttgtgaatttgctactctgacatatctgaccaggccaagggctttagctttcaccttcatggctggccagaaggaaggaagtactgttatatcttgcttcatttcatttcaggtacaagcacagaaactcctacatgaccacagtccagtaaagaaaaagctaggccgggcgcggtggctcacgcctgtaatcccagcactttgggaggccgaggcaggcggatcacgaggtcagcagatcgagaccatcccggctaaaacggtgaaaccccgtctctactaaaaatacaaaaaattagccgggcgtagtggcgggcgcctgtagtcccagctacttgggaggctgaggcaggagaatggcgtgaacccgggaggcggagcttgcagtgagccgagatcccgccactgcactccagcctgggcgacagagcgagactccgtctcaaaaaaaaaaaaagaaaaagctatacctgttaataatattttattgaaggttcaggaatactgaaagggtggttatactatggaaattaacaagtacagcacagacccaaactttcctaggaattatttttttcctttttttttttgagacaggctcttgctctgtcattcaggcaggagtgcagtggtgcaatcccagcttgctgcagctgcaatctccctggctcaagcaattcccccatctcagcctcctgagtagctgg

SEQ ID NO: 37103 - DNA, 574 bp, Homo sapiens
atctatctagaacaggaagatcattttaaatatataccatccaaaactatgcagatctttttttatatatactttaagttctagggtacatgtgtacaacgtagcaggtttgttacatatgtatacatgtgccatgttggtrtgctgcacccattaactcctcatttacatcaggtatatctcctaatgctatccctcctcccaccaccccacgacaggccccagtgtgtgatgttccccatcctgtgtccaagtgttctcattgttcaattcccacctatgagtgagaacatgtggtgtttgcttttctgtccttgcgatagtttgctcagaatgatggtttccagcttcatccatgtccctacaaaggacatgaactcatcattttttatggctgcattgtattccatggtgtataggtgccacattttcttaatccattctgtcattgatggacatttgggttggttccaagtctttgctattgcagatagtgtcacaataaacacacgtgcatgtgtctttatagcagcatgatttataatcctctgggtatatacccagtaatgggatg

SEQ ID NO: 37104 - DNA, 574 bp, Homo sapiens
atctatctagaacaggaagatcattttaaatatataccatccaaaactatgcagatctttttttatatatactttaagttctagggtacatgtgtacaacgtagcaggtttgttacatatgtatacatgtgccatgttggtatgctgcacccattaactcctcatttacatcaggtatatctcctaatgctatccctcctcccaccaccccacgacaggccccagtgtgtgatgttccccatcctgtgtccaagtgttctcattgttcaattcccacctatgagtgagaacatgtggtgtttgcttttctgtccttgcgatagtttgctcagaatgatggtttccagcttcatccatgtccctacaaaggacatgaactcatcattttttatggctgcattgtattccatggtgtatakgtgccacattttcttaatccattctgtcattgatggacatttgggttggttccaagtctttgctattgcagatagtgtcacaataaacacacgtgcatgtgtctttatagcagcatgatttataatcctctgggtatatacccagtaatgggatg

SEQ ID NO: 37105 - DNA, 603 bp, Homo sapiens
ataaacataaaacaataaaaaaggaacctttgtcagaaacacatggataggctctctgtgcttgtctctcatggctgttgcttaacttgaataaaaaytcacatcatgtcaaatattacaagcaacatatctgtgacatagtctattgaagcagtcacattggcattggggagatacacaaacaaagtgaaccatagccatctggtattctcagcttgtttacaaaatcacttaatgaggctaagttgaagatgtggaaatagaggtgcatctgggagtgaatggtctcacctgtccccgacttacttttctctctctccatttccctcagggctcaatgaagagggagtcatgaagaatttggaagagcaagtgccccagtcctatgtatttatgtctccccactgatgtacagtgctccatctgccataaatgtctattgactcaattctgagtcatttactggacttctattttttttcctttgggctatttcatttatcaggagatttgccccatgctgtcttgaaggctaacattatggattttgattggtgtacggcagttccttacatcttattattattatttttattctacaga

SEQ ID NO: 37106 - DNA, 603 bp, Homo sapiens
ataaacataaaacaataaaaaaggaacctttgtcagaaacacatggataggctctctgtgcttgtctctcatggctgttgcttaacttgaataaaaactcacatcatgtcaaatattacaagcaacatatctgtgacatagtctattgaagcagtcacattggcattggggagatacacaaacaaagtgaaccatagccatctggtattctcagcttgtttacaaaatcacttaatgaggctaagttgaagatgtggaaatagaggtgcatctgggagtgaatggtctcacctgtccccgacttacttttctctctctccatttccctcagggctcaatgaagagggagtcatgaagaatttggaagagcaagtgccccagtcctatgtatttatgtctccccactgatgtacagtgctccatctgccataaatgtctatygactcaattctgagtcatttactggacttctattttttttcctttgggctatttcatttatcaggagatttgccccatgctgtcttgaaggctaacattatggattttgattggtgtacggcagttccttacatcttattattattatttttattctacaga

SEQ ID NO: 37107 - DNA, 2327 bp, Homo sapiens
tttttaatatatgcctacaaatacattttattaatagtgtaaatttaatttcctctgagaatttattcaaagaagttctatctgagtttgtgctcagaaaatgccaggatgattccttgtcacaatgtatttggtgtttaaagttccctctaatttacacagcaagacaacattcaattttctacacttctgcttaagcatatgtaaaagaaacacactcctcatgagatatgtttacaaatataaatggaatagtcacagtggagcatgaataaaccattacatggttatttctctacagtggatgctaaagagagaatcaagtccaccataataagaaataaactaagagttgtagttaaaacataataaaaatcttcttaaacgyttctttactttgccaattttctcatccaaatagggataattaaataatctgggacaacaaaatgtatactgtggcagaacaaaagaatccaaggtaaaaaaaaaaggacatggcagaatctaaggtctttgataaataatactcagatattgcaaggggtatacaaagagttcaaacactgtcaaagtcaggtgtgacttgttcaaggcacacaaagatcataccaagggaaacccagcaggacaagaaagccgaagtgatcaacttattcctgtcaaatacattcttggagtttcaaatgtgaacaaatatgcttattctgaattttacttccttctgcaaagtattaatcaattataattattttgttaaatgaaaatccaatgagagtcaccaaggagcaatacaaggaaaaaggcagactcaccatctcttcgattaagccttgaaaaccccgggccgtggctgctggacagctctgaggagctgctgaaggatgacctaggcaaggcagaggccagtggggcatcacagtcagctgccaggaaaaataccgtgatatggttaacactcagattgcagcttgggagaaataatagtccaaaaatatatatgaatatattctaggatgtatggcaatcatcactccttttttaattctttacaatttttaaaatttacattgcagcataatttacagagagtaaaattccagagaatttatttgatgtttttaaagtgtacagctctattcattttgacaaatgcattcagccttgtaacctccaccataatgaagacataaaacaggtccattagccctcaaagttccctaatgtcccacattttctcaattctgcaagatgtctgggtacatcacccatccaacactactttaaactcaatttgatgcttaggttctttaggtacacacatacagaggtagtgtgaattctgtgcccaaacctcaatagcggctagaaattctcacagtgccccagcacagaacctgtgggggatgggaaaagtgaaatgcaccaggtgttcaggtcagagttacctgcgtgaagccaggacccatgagaggcaacacctgtagtgatgaactggaaaaagcccactctgtagacccctccagagggaattactgcgggctacttgcctacaggagatggaggctcctcctttttgcctgataacttgagcattgcaggaatttgctctgcctttccaacccaaggacccctgcatgtcaccatgtcaccctcacctcagggtgactctctattgcttcagctctggtctaaaagaattgctgggggttaagtagtgtttgacccagatcatcttatttgtcctaagaccataaggaccctcagagccttcttgcccctggtgttccccaccgtcaaacttgaggagcccctgggaccattcccaccttgggtagctcttttcctatgcgtagccatgggtaacagaagcaacccagaggttacctctgagtcccgcagtccaatcctgtaatcactgtactttcaggcatgtcatattattttctcataaaaagggtacctcttccagcatggttattgatctaataatgttacacataagttttctgtcacacattaagatatgtctgtgaaagaggaatgttataccttgaatatatcattagatgattctgaactgcatattttggatacactttttttctttgtgagcaacttgttaagtcacagaaagaaggcaaccagaattaattagattgctacgacttagcaaaatgtcaactatgttcagtgagatagataagaggtaattcagggtctctcctgatttgtttggttgagtacatgatactgcaacaacagaaagaaaattcagtgcacataatttgcctgagtgaatatcatttcataaagaaatactggaa

SEQ ID NO: 37108 - DNA, 580 bp, Homo sapiens
ctctaaatcttacatgcctgacaaaaatttctttttgctatttcgtctacttgtgccttatatctttcttcctttccartgttacttctgctgctgcaagtatcacatcccaaatttaccctgctagaagttctttctcagcactcggaatttctacttcactttgtttcttactactttgaaagtattttgtatttccttatattatagtcatctaaatatgtcatatattttatttctgtatttgcatcagtcttggtgcctagcaccatgcaagattcacaataaggtctgaattaatatttgctgaataaatgaataaaaggtagacataacaatgtcagtccatcaggaataacagatactctattgagaatgcctttttaaaatttttattttttaatttttaaaaattttttgagacagagtctttctgtgtcgcccaggctgcaatgcagtggcgcaatcttggctcactgcaacctctgcctcccgggttcaagtgattatcctgcctctggataatcactagtagctgggactacaggcgtgcaccaccatgcctggctaattttttgca

SEQ ID NO: 37109 - DNA, 1953 bp, Homo sapiens
tggggcagctgcatccgctgtggcactgccaaaagcctgaggtcccctatggcatcagcagtattcaggtaggccagaagcctgggacagccacagttggcataacactggtttgggccagaaaccaggggctgctaaggccagcctgctgtggagggctgtctggatcttggggctgctgatgtcagcccagcattgatgtggagatcaactttgctacacctggggctatgtgattctctttgtcactgaagtaggtctagcctgacacctggggctatgtgattctatttgacactgaagtaggtctagagactcagttcatgggtaccaacctgaaatatggggccacaggaacctacctgatgctggattttactgtcgtgggcccagcattgaggttcaagacaaactcctgtgctcactttcctctctatctgtcaagcagacagtgtctttccccaagctgggctgcctgaggttgagggatgggtgatgcaaataatgtaaaactatcctgcataccttcttcaatgcatcttttcttatttttgtgctacaatcagatattctgatctcttatctggtttcctaagttattgtgaagatattttcatgtctagatagttattcaaattgatgtttatgcagggggacaatagctagagagttttactctgccatcttacgctgttactctcaaggaattgttatttaaatactagtaaagatatttcatttgataagctcatgtggtagggcagaaggagctgcttgtcaagtatrattaccaccattctcataagatgaagcagaggcttctttaaaaaggaacaaaatattctttgaatatagaatttagggaacttactaaactgggtggagtgtctttaaggctaaatgtgtagggcaaaaacttgaagctgatgtaagatgaagtataaatttgtttgaaatggaaagagaaaaacaacagtaacaatttttgaaaatacattggcaaatgaacacaatgagtaatgctgaactttgatgttttatattttacatgtaaagaaaatgtttaaaagaacatgacacatttccaaatacagcaaaatatgtttaagtgggggtgtatatagtcctaaactggtttttaaatgtagtgatagagctttaacagagttctcaagatgggactatatcactcattgcttttgatcatcttaatatacccctatctgtaacatatccacaattctattaacttttattataaaactcaatatatttaaagaggtatgacttgatttatggaacattgctctgaagaaaactgtaataaagaaaaacaagtaaagctggaaatataaaataatactttccaaagctccatttttttatttacttatgtatctaggttcttattttttaatacttcagagaaattttaaggcatataaaagtaaaaaatataattttaaaattacccctatcattactactttaattttatatatattgacatcatgtcttattttcttagatatttttaaataaataaataaattattatgggaaaaataaaattcatttgtacttcgctcccgattccattcagtttcttccctccacaagggctttagccatcctaaatttaatgtctacctttcctcttcattttttgcttgctattttatcattattttttagcttttctgtattcatatgtgaaagtaaataataaatacaaatatgttttttaaaagacatccatactgcatatatttctgcatatttttcatgcatcattttgagaactattgatgtctacacatataaacttattcagttagtttaattgctgtataattgtcaacatccaactgtatcatatttatcctatttgattcgctcattctttttttttttatttgctcattcttttaccattgctatgtgcaactttgt

SEQ ID NO: 37110 - DNA, 556 bp, Homo sapiens
gacttagggcaaattaactstctttcctcagtttccttatctgaaaaatagggataataataacaaaacctacctcacaggtttgtgagttattagacataaagcactcaggacataagcctcgcatatggtaagccctctgtaagtgtttgatgttgtaatttattattattcatcaacacaccttgttgagcatcctaagtataggcactgggaagatcaagatgaattagcgactatgctcgcctttaagcagtgcacagtctaagagggaaggcagagaagtgaagacataagtacagtgaagggctgcaagtgttgtgaaagctctctgcagagtacctgggggacaagagaggggtggcattttacatacctcccttaactgttttgccccctgctagcccagagtcagcattctactaaactgaaaattccttaggagctgagtctgaagaagagcttcctccatagcagagtttgagctgacttaaggtgtcccaggcaagcaagggggatcagagtgaggaacaaccatatggcatgaaacaaccta

SEQ ID NO: 37111 - DNA, 590 bp, Homo sapiens
atgatttaaattgcttaaacacgatcaaggcatttctgcatccttgtgggcatttgycattactacaggcaatatttgagtgacggagacggctagttatccttaggatatagagttgtcattggaaagcagccagggacaatatttcccaatcccctttgcatctgggtacagcctgtgattcattctgcaaatagaatgtgagcaaaagcaatgtgtattagctctgcacaaagcagttgagaaacatgtgcgccttttccattctccttcccctgccaccactggatgcagacatcaacgatgaggccccagggatggaggaaagctgtcagtcaactggcaatgcagcgctagaggagataaacttctattatgcaagcctctgaaatgtgagcgttatttgttacagtggctagcgttactctaatagagtattcaacaaaaaaaatatagtctttgaagggcaggtctcccaaactgatatattaaggggcagttaatctcacttgtaaattctctgagagcagggatcatgtgctacacattttcttaatcttcgataatgctaagtaccatgttgagcaaat

SEQ ID NO: 37112 - DNA, 582 bp, Homo sapiens
taacattcaacagttaaaaaagatctcccagatactttacttttaaaagaagttgtggatacattgtaggtgtatatatcaatggggtatacaggatgtcttgttacaggcatgcaatgtgaaataagcacatcatggagaatggggtccagatactttaagttaaaaaaaaaaaaagagataaagcagtgtgtataataggccttattttgtgttacaaaaatgtatatatatatagaccagatgcggtggctcacgcctgtaatcccaacactttgggaggccaaggcaggcggatcacttgaggttaggagttcaagaccagcctggccaacatggtgaaaccccggctctactgaaaattaaaaaaattagctgggcgtggtggtgcacgcctgtaatcccagctacttgggaggttgagtcaggagaattgcttgaacccgggaggtggaggttacagtgagcagagatcaygccactgcactccagcctgcgtgacagagggagactccatctcagaaaaaaaaaaaaaagaatatatataaatacgtgtgtgtgtgtgtgtgtgtttatttgtaa

SEQ ID NO: 37113 - DNA, 905 bp, Homo sapiens
cccgcgcggaggggtcacccgaggagtttgcggggggactgcaggggcccactttccccttctgtccctaaagttttttcttcctcttgcctcccycagcccttttgaaagctccccgcgtcgtcctcctgctgccccggctccttagcagcttctgggacgcacgggagggaaaagccgcggggaccccccccaccccagcctcccagccgggtgagatttggttgctgtgtttcctcctcacttgggcatttaaaaaatattttaacacgaattgtccgcggaattttcatgttgggctcgggtagcttcttagttttctcggtaaaaaggcgttttactacctctggtgtgaaggctgggaaatggcaagtgggaagttggttgataaaattaggagtttggctgtctttattactactttttttttttttttgctctccccatctctcattttatgaacatcgacccagttcgtcatggtttaaataaactgcttgtcttgtacctgccttaacaaaactagccatgggtcgttgggagacttagttgcttcctaggcagtttgagggcatctagggtggaaaagttaaccgagagagcgagcatctacctcactggcaggatctgggattcccaaatggaatgacacggaagctatgagattctctcgaagtcgaaacttttttccccctcccgaatgcgaagacttcctttttgcaatatttgagcagggcttcaaaaccaacctgtttttgttattaagcctgtacggtaaagaaacaggaaggagagtaccagctgtcttgctgcagtggttttaaatggagttgaatgagatgcgtgagagtggtagtagtattgagtaagattgctgcatctctttgatttaaatgcctggcctc

SEQ ID NO: 37114 - DNA, 905 bp, Homo sapiens
cccgcgcggaggggtcacccgaggagtttgcggggggactgcaggggcccactttccccttctgtccctaaagttttttcttcctcttgcctcccccagcccttttgaaagctccccgcgtcgtcctcctgctgccccggctccttagcagcttctgggacgcacgggagggaaaagccgcggggaccccccccaccccagcctcccagccgggtgagatttggttgctgtgtttcctcctcacttgggcatttaaaaaatattttaacacgaattgtccgcggaattttcatgttgggctcgggtagcttcttagttttctcggtaaaaaggcgttttactacctctggtgtgaaggctgggaaatggcaagtgggaagttggttgataaaattaggagtttggctgtctttattactactttttttttttttttgctctccccatctctcattttatgaacatcgacccagttcgtcatggtttaaataaactgcttgtcttgtacctgccttaacaaaactagccatgggtcgttgggagacttagttgcttcctaggcagtttgagggcatctagggtggaaaagttaaccgagagagcgagcatctacctcactggcaggatctgggattcccaaatggaatgacacggaagctatgagattctctcgaagtcgaaacttttttccccctcccgaatgcgaagacttcctttttgcaatatttgagcagggcttcaaaaccaacctgtttttgttattaagcctgtasggtaaagaaacaggaaggagagtaccagctgtcttgctgcagtggttttaaatggagttgaatgagatgcgtgagagtggtagtagtattgagtaagattgctgcatctctttgatttaaatgcctggcctc

SEQ ID NO: 37115 - DNA, 668 bp, Homo sapiens
accttctcaagaaagccttgcttgcaaatcactgtattcaaaggggatgttgaaggtttcccctagaaaccttcctggttttacagttctaatgaaacctttcttttcagattttgcaaagccacagaacaatgtgtgaccagcagaagcagccacagttccctccatcttgtgtgaaaggttcgggactaggggctgggcagggtagcaatggtgcctctgtgaaatgcccagttccatgccagacccaaactgtctgtgtgacaggccctgctccatgccctactcaaacttatgtgaagtaccaagttccatgccagactcaaacctacgtgaagtgcccagctccctgccagaggacctatgtgaaatacccaacaccctgccaaacctatgtgaagtgcccagctccctgccagacaacctatgtaaaatgcccaactccctgccaaacctacgtgaagtgcccagctccctgccagatgacctacatcaaaagtccagctccctgccagacccagacgtgctatgtccagggtgcttctccttgccagagctattatgttcaagctcctgcaagtggctcaacctcccagtactgtgtcmctgacccatgctctgctccctgttccaccagctactgctgtctggctccccggaccttcggg

SEQ ID NO: 37116 - DNA, 563 bp, Homo sapiens
ttacaaatatatcttaagactgaaattgtctaatttatgagtcatttaagagaaaattatttttaaaggagaagaagcagtcattctctctggtcataatttgcaagacgattttactttggaaggtcagcattgtgcaggatcttggagactactaggtcagtaaactcacttcaatagagacagataaacttagcartttctgcagactagtacttgaaccctgaccccctgatctcaggttggagctcagacttcctcactcaccacctgctcaggctgatgggatgacacggtgggtctcaggcttggtgtgtcctaaccaagctgggaagtttgtgaacaaatctcagacccatgaaaatgtggggttcataaaccccaaagagtctttagtcccatgtccacagctccagttcttcccttgcaggcagagacagggttgtatcttcagaggtgggcttccctcctgtgggctgccagagtggagcaggtctctgtgcttcaaagttcccactctggaacacccacctcatcccagagcagtttgtttcctctagagt

SEQ ID NO: 37117 - DNA, 563 bp, Homo sapiens
ttacaaatatatcttaagactgaaattgtctaatttatgagtcatttaagagaaaattatttttaaaggagaagaagcagtcattctctctggtcataatttgcaagacgattttactttggaaggtcagcattgtgcaggatcttggagactactaggtcagtaaactcacttcaatagagacagataaacttagcagtttctgcagactagtacttgaaccctgaccccctgatctcaggttggagctcagacttcctcactcaccacctgctcaggctgatgggatgacacggtgggtctcaggcttggtgtgtcctaaccaagctgggaagtttgtgaacaaatctcagacccatgaaaatgtggggttcataaaccccaaagagtctttagtcccatgtccacagctcyagttcttcccttgcaggcagagacagggttgtatcttcagaggtgggcttccctcctgtgggctgccagagtggagcaggtctctgtgcttcaaagttcccactctggaacacccacctcatcccagagcagtttgtttcctctagagt

SEQ ID NO: 37118 - DNA, 516 bp, Homo sapiens
gtgtagaagaagaatgatatttagataatacaatcacatcagtaacctgaaagaaacaacttgaatctttcctctmgataaaagtacgtagataaaaaatcaacagaatgagcttcttactcttcctttcaggggaaactgcgattgctctatcctcacaagcccgaatagagtattcacagctccctgaagtacctattcctttaatacaagccctaaggacaagctgggtgttgcaggacataccaaggggtcctctggaaaatattttgcaatgaaacctccagataaaagagcctggcttgaagtatttgccagtttccatggtgtaaatatgcccaacacagcagttttgaagttaccaacatgaagtcactgaacacagaattggaaaagatgtgcacagttagctttccccacctatatgagctccggtaggcctcagagcctcaacagattcgaggcaggctgagtcccattcctgctcagtatggcagaacacaagcacacaactct

SEQ ID NO: 37119 - DNA, 1147 bp, Homo sapiens
tggttatgtccttggggtatgagcagcttgatttctcctgagcagagatgagtcaaatgtatgtgtgattttcttcaggaatttttttaaaataaaattttaatacaaaaatatatggttatttttcagtggaccgtacagtggtgtttttcagatgaaaatcattacttattaggtgaatggtgaaataaattggtgattcttgaccagcattgtctttaatacgtaagaagaatgaaggagggaagacaaaatattatagaataccccacattgtaagggtaagtgtatggtagacacacctgatagcaataacttaagtgtaatctgagaatgtggttgcacctgatccacataaactgcatgcatcttacaaatgagaacagttctcctgttcagcccactgtcactggaatgctttgtatgtaagtcccctcaattaaaccccgtgttttgttttttggctccaggtctcttctttggcctctcaaacctggtgtcatccctattaaagccagcagggggtctggcatgaaagtaagtattatattttttcaagaactgaaactcctgtttcagttatatacctgtaaattttatttttgccgttagttgtgttttaaaagattgaaagccatcatcttagagccatcatctgtcagcttacctttactccaaatcttccaaaaactataamaacttagtgataatttactatgacttcaagattcagataagaagtcagccagctgttttggtacaaaaagtcgatctgcacttatattctttgtgaccccgctcatcgattaaatcctcaagtttctatttctaatcaggttgtaacattggattttgtttggttctcttttgtcttgtctctccttattgcttattggacttcctaaccatagagctctttctattgtgcagtttacttattttttcccgcaatcactttgagaccctcttcaaagttttttgaagctgttgtttcctttataggagaaaggaagcatcaatggtaaaataaaaagctggaaaggaacagaaatcctgtaggtcatctgtgttctggactgctgttaccttagggagttcacaaagggtgtcccatggggtaggatggtttgaagggaatcgctttgga

SEQ ID NO: 37120 - DNA, 1173 bp, Homo sapiens
tgcataagtaactgtacgctgcatgtcaatgagttttctctaagcagccaggcattgaaaaccatttacgtggcactgggtatgtattttaatagcatcagtctaaaggtcaagcaatgcaaagaaaagcagacaggaagcaggccaacagctcaggcaggtaattgagcgtgcaaaagcactctcctaccatagcgactactgacatctttgtttatctctccactacctggtgtggaaatggtattcttttattttctcttctctgtttatgttagaaagtagctatcaagataaggattatccttctagaaataatattgctattggcaatagtctatcagcaaaagatgggctttcactatacagaagagagtcagggagtgtcaggtgtcagatctcagaagaaaactcaagtatcacagggaagatcagaacaaaactgagagtggaggtggacctttaaaaatatggaaatccccaatgttaattccagtttggagtcctggcagatcagaatgttgagggaatacttttataattcattgcaaggtctgcttgctgcagctatagagaatgacatccatccatctatctgtccattcatccaacatacaagcatatatttagcacatgaataatagtgataattatatgtagctacaatttcattcatttctcattacattccaggaactgagaatatatatatatgcttctttgatgcttgtaacaacccccacacttcagtttgacaaaagtggaaactgagactcagaaaagattaagtaaggctgcttgaggagtcaaaaagtagtgggactggacctaagggcatgtctgactctagagtccaggctgttaatcctgaactgatgtctactttacttcacatgagactctgctaggtgccatggaaggcactgccctccaggaacttaaagtgtagtagagaagaggaacaatgtaaatcactaagaaatactagtaagaaaaatagcatctttcccgagggctgtacagagtttcaaagctcatcaggttttccagggtgtagtgaaagatttcatggaagaaggaacaattgaataaattctctgttrtccattttagaaagccaagaagtactaaaaagaactttctaggtattagaaatttatctagagtagtgca

SEQ ID NO: 37121 - DNA, 522 bp, Homo sapiens
gtctccttcatgactaagacttattccctgggctactctcgtatagtttcaacttattccactccactggcttttcctcaacaacggataaaatttaagtctcttcaatgttttagaaacaaatactttgatcctacatctctccctacccactcactccctttctctctttttcactccacagccaaactgcctgcccactatctccactcccygccagctcactcattccttggccttctgtcatcagactgctgctgcaacctcatagcaaccactctgggacataacaccaacgatcttccactgggcaattccaatggactctttcttgtcatgtttgaccttcaggtggcatttgatggtggtgaccattcctttcctaaaagctccctttttctttggcttctctgataacactgcactccctggttcatctctgcctctttgaccagtactctcacctcaaaattttttaaactgatttttaattgacacataataattgtacatatttatgga

SEQ ID NO: 37122 - DNA, 765 bp, Homo sapiens
caagacttgctgcatcagaatcacccaggagttaaaaatacagactcttggacccaccagagaatgcagatctttggagtggagactaggaatgattccagccattcatgtcacttccttcactccctctgctacctgatctctcgtctattttgcttcttgtttgcaagctgcagctctggagaggcctgataccctaattcctccaggaatccccaccctctttcatccacagagaagtgggtggaccctgtggccgcaaatggactttgcaggacatgtcacagtgagtggyagagattcacatggagcaagtcaggaagtggtgttggagctagggaagtggaggatgcttgtggctgccctgtcactcaggggatggtgtgggccctggtcctgcatctgtagaatcccattcagggagtctcaaaagctgaatccagctactctgaggcttcctaaaccctcaggtcagcctatttcttgaaccctccagtgtttaagtattaaatagagggatagctttaaatcagaacattttcattttaggagaggaattataacatgcctttgaataaggagctaggttagcatacttaaattgtcattaggcttgcaacacacacactctccccaacttgcccaactctctctctctcattgcgtccctggaacccaacatgtgtctggtgcatagcaggcttcagtgaatgaatgaagttttaagagctgtcctattaatttgtaatcttgcatctgtacctg

SEQ ID NO: 37123 - DNA, 765 bp, Homo sapiens
caagacttgctgcatcagaatcacccaggagttaaaaatacagactcttggacccaccagagaatgcagatctttggagtggagactaggaatgattccagccattcatgtcacttccttcactccctctgctacctgatctctcgtctattttgcttcttgtttgcaagctgcagctctggagaggcctgataccctaattcctccaggaatccccaccctctttcatccacagagaagtgggtggaccctgtggccgcaaatggactttgcaggacatgtcacagtgagtggtagagattcacatggagcaagtcaggaagtggtgttggagctagggaagtggaggatgcttgtggctgccctgtcactcaggggatggtgtgggccctggtcctgcatctgtagaatcccattcagggagtctcaaaagctgaatccagctactctgaggcttcctaaaccctcaggtcagcctatttcttgaaccctccagtgtttaagtattaaatagagggatagctttaaatcagaacattttcattttaggagaggaattataacatgcctttgaataaggagctaggttagcatacttaaattgtcattaggcttgcaacacacacactctcccyaacttgcccaactctctctctctcattgcgtccctggaacccaacatgtgtctggtgcatagcaggcttcagtgaatgaatgaagttttaagagctgtcctattaatttgtaatcttgcatctgtacctg

SEQ ID NO: 37124 - DNA, 459 bp, Homo sapiens
  misc_feature (1)...(459): n = A,T,C or G
tgagggatttgggataacaatcaccaaatgataggctgattctagtctcattcaatgatcggtgcttttaggcatgtgtatgtgcagatatcttamagggaaagttttaagagatcaaggcttcagtgagctttgatcctactaccacactccagcctgggtgacagagcaagaccctgtctttaagaaaaaaattgaaaaaagagaaggtttatggcatttatatatagcacaaataagaccaaaaataatatttnnnnnnnnnnnnnnnnnnnnnnnnnnnnnnnnnnnnnnnnnnnnnnnnnnnnnnnnnnnnnnnnnnnnnnnnnnnnnnnnnnnnnnnnnnnnnnnnnnnnttattgttattattattaatttttagacggagtctcgctctgtggcccaggctggagtgcagtggtgtgatctcggctcactgcaacctccacctcctgggtt

SEQ ID NO: 37125 - DNA, 527 bp, Homo sapiens
aactctaaccagtgaaagatttccatttaaaaacaaagaaactattttcattttagttctcaaaaaatatttagaaaagtagaaattactggagtttagatgacaatatattgaagctcaaaacaaaaataaaatttaactcttaacatgcgtacacacacacgcacataaaaaactcacgtgtggccgggcgcggtgactcacgcctgtaattccagcactttgggaagccgaggtgggyggatcatgaggtcaagagatcgagaccatcctcgtcaacatggtgaaaccatgtctctactaaaagtacaaaaattagctgggcgtggtggcgcatgcctatagtcccagctactcagaaggctgaggcctgagaatcatttgaacctgggaggtggaggttgcagtgagctgagattgcaccactgaactccaacctggcgacagagccagactctgtaaaaaaaaaacaaaaacgaaaaacacctcatgtgcacatgcaaatgcacacaagtatagatggaggc

SEQ ID NO: 37126 - DNA, 527 bp, Homo sapiens
aactctaaccagtgaaagatttccatttaaaaacaaagaaactattttcattttagttctcaaaaaatatttagaaaagtagaaattactggagtttagatgacaatatattgaagctcaaaacaaaaataaaatttaactcttaacatgcgtacacacacacgcacataaaaaactcacgtgtggccgggcgcggtgactcacgcctgtaattccagcactttgggaagccgaggtgggcggatcatgaggtcaagagatcgagaccatcctcgtcaacatggtgaaaccatgtctctactaaaagtacaaaaattagctgggcgtggtggcgcatgcctatagtcccagctactcagaaggctgaggcctgagaatcatttgaacctgggaggtggaggttgcagtgagctgagattgcaccactgaactccarcctggcgacagagccagactctgtaaaaaaaaaacaaaaacgaaaaacacctcatgtgcacatgcaaatgcacacaagtatagatggaggc

SEQ ID NO: 37127 - DNA, 596 bp, Homo sapiens
tgagcctccacttgttgaaaaacagaagaaagccaagggttaagccagtagaggaaggaaccacaaaggtgtttttgcatggttaaaacaaggagatggtcgaartatgatttcatggatctgtggtttatccacatgcaaagagaatttttttcttaggttcagaacactaaaagaagataacattgtgaacaaatctcccagggaatccactcgagagatgaggcacactgaccacagatgagtgaggtcctcaattattaaagtctagttgctccattaggatgaaagtctctgtgggaagtaacttctaattaaagctggaggtgttcctttatactagcagttcttgagggaaactgggttggccatcacagtggagactagagaaggctggggtggtccctggatactagagggaagttggggagaagtggtggacagtgcagccctgtcacagcacaagctcctggtcattggagaatggctgacagaggaaaccctgccatgacctaagctcttaaagtgtctgtcaaactcttaggtttattagacttgaagtccagtagtcaagctcagtaactcataccgggtct

SEQ ID NO: 37128 - DNA, 686 bp, Homo sapiens
cccagctacttgggagactgaggcaggagaatggcatgaacctgggaggcagagcttgcagtgagctgagatcatgccactgcactccagcctggtgacagagtgagactccatatcaaaaaaataaaaaaaaatataaataaataaataaataaatattgactatgcaagttataggaggttataggagttcatgtgactaagtaaatcaaggggaggagtgtaatcaaggcatctgtccccctgataggtagactttgaatgggtagaggaaataagaatgggcaggcatctaagacaggccaaatgccccaaggcataaatgaacatggtaygtttgtgtggaagaaaagggatgggccaaatagatctgaggtgctgagttgaagtgtgtcaaatgatgcttctgtaaggtgtgataaggtcagattatagaaggctgtgctaacctaatggagagaaaagctcacagataataaaatgagggagtcactaggtctaagcagagataaagaaatacaaactttcacagattataagcaatagaagatattctttaaaaaattaaatgcatacaaatgaaaatatctgcataagaagactagagctatataaggaacacaacgaagttgggaaatattgtgaataatactaccatcatgaagacaactctctatattaagtaa

SEQ ID NO: 37129 - DNA, 686 bp, Homo sapiens
cccagctacttgggagactgaggcaggagaatggcatgaacctgggaggcagagcttgcagtgagctgagatcatgccactgcactccagcctggtgacagagtgagactccatatcaaaaaaataaaaaaaaatataaataaataaataaataaatattgactatgcaagttataggaggttataggagttcatgtgactaagtaaatcaaggggaggagtgtaatcaaggcatctgtccccctgataggtagactttgaatgggtagaggaaataagaatgggcaggcatctaagacaggccaaatgccccaaggcataaatgaacatggtatgtttgtgtggaagaaaagggatgggccaaatagatctgaggtgctgagttgaagtgtgtcaaatgatgsttctgtaaggtgtgataaggtcagattatagaaggctgtgctaacctaatggagagaaaagctcacagataataaaatgagggagtcactaggtctaagcagagataaagaaatacaaactttcacagattataagcaatagaagatattctttaaaaaattaaatgcatacaaatgaaaatatctgcataagaagactagagctatataaggaacacaacgaagttgggaaatattgtgaataatactaccatcatgaagacaactctctatattaagtaa

SEQ ID NO: 37130 - DNA, 530 bp, Homo sapiens
gaagttaaagaataaaatgctcgttattttgactcaaggctctttcaacctgccattcattgatactatacagtgtttctcctgtagctaggggaaggttacctgaaagtgttttctcacatatgaatattaggaaatgtgtcgatataaggcaaaacatagattctcccaaataaaaattttatcgcttgaaaacattacacattttacactgattttatttccctctttgtttggtcaaacaaaccttcagcttacctttagcaactgtgcagaactggacagtatacattttctactattcatctccccttgtttatgttttgtgcatctattttgtcatcaagttttgattttattccttttgtattatgtgcatttgtataaataagaaaataaatgaaataaaaagtaataagtaagtaatttatatttyagtggagtagcttggtatgcttttttccaaacttccactaagtactgttgaaaacagataaacgcagaaactagcaatggcacttcaagttaaa

SEQ ID NO: 37131 - DNA, 650 bp, Homo sapiens
gcacgatctcagctcactgcaacctctgtctcctgggttcaagcaattctcctgcctcagcctcccgagcagctgggactacagtcgcacaccaccacgcccggctaacttttgtatttttagtagagacggggtttcaccatattgcccatgctggtctcgaactcctgacctcatgatccacccgcctcggcctcccaaagtggtgggattacaggmgtgagccaccgcgcccagccagtactttcttattaactgaatatcgaggtagaggatgagtggcaggagagatagtgaaaaaaaagctcagggtaactccacgtctgatttacataactgaagggacataatgccatttattaaaacagggatgtctgcaaattatttgattgaggaaacagagaaaatgagttcagttttgcatatctgtttttgagatgtttgtctttggtgcttaactatttgtatagcatttgcccaggagatagaactggccagagatttggggttatcgccaactgagaccaataagtagtttagatcctcactattcaaagtgtggtgtatggcccaggagcatggacatcatttgaaagcttgtttgaaatgcacgatttcatccttcatcccagacctattgaataagaata

SEQ ID NO: 37132 - DNA, 650 bp, Homo sapiens
gcacgatctcagctcactgcaacctctgtctcctgggttcaagcaattctcctgcctcagcctcccgagcagctgggactacagtcgcacaccaccacgcccggctaacttttgtatttttagtagagacggggtttcaccatattgcccatgctggtctcgaactcctgacctcatgatccacccgcctcggcctcccaaagtggtgggattacaggagtgagccaccgcgcccagccagtactttcttattaactgaatatcgaggtagaggatgagtggcaggagagatagtgaaaaaaaagctcagggtaactccacgtctgayttacataactgaagggacataatgccatttattaaaacagggatgtctgcaaattatttgattgaggaaacagagaaaatgagttcagttttgcatatctgtttttgagatgtttgtctttggtgcttaactatttgtatagcatttgcccaggagatagaactggccagagatttggggttatcgccaactgagaccaataagtagtttagatcctcactattcaaagtgtggtgtatggcccaggagcatggacatcatttgaaagcttgtttgaaatgcacgatttcatccttcatcccagacctattgaataagaata

SEQ ID NO: 37133 - DNA, 529 bp, Homo sapiens
cttaggaggctgaggcaggagaattgcttgaatctgggaggtggaggttgcagtgagccaaagtcatgccactgcacttcagcctgggtgacagagcaagactctattttaaaaataataataataactaaagtggaagggaggctgggcgtggtagctcatgcctctaatcccagcactttgggagactgaggcaggcagatcacttgaggtcaggagatcaagactagcctggccaacatggtaaaaccccatctctactaaaaatacaaaaattagccggtgcggtggtatatgcctgtaatcccagctactcaggaggctgaagcaggagaatcgcttgaacycgtgaggcggagactgcagtgagccgtgattgtgccactgtactccaccctgggtgacacagcaagaccctgtctcaaataagcaaacaaacaaacaaacaaagtggaaaggaaagcataatgtgagggagacatattgttaagtgagaaaattatagataattttaatcattttgtgaaac

SEQ ID NO: 37134 - DNA, 1121 bp, Homo sapiens
ggattacaggcgtgagccaccgcgcctggccctcccatacctttcttttataatttctttgcttttgagaaagaaacacatgacttattgtctcatatgtttaaaaattctatcactgcaaatgtgagttacttacataatgcttcatgagaaaatgaaataatacttyttagagctaaaagcagttaaagaatgattagaaaatctatttactctgtttcccatgttgaaatggtctttctgcattcgtgataagtctgtcaatttaatgcctgatagagttctgaaacatcttcagtgatgaatctttgtaatttctaggttcacaatagtctaaatatccatttgtctctgacaaagccaccaaatgtttattgtcatttaacaatcgttaatggagaatcaagagtttataatttggttaatcacaatagaaactagttggatgtggaactcaaggacttgtggctcagagtccttgtcattgggtcaggtgttgacaatttgataacagcacaaacaaaatatagtctctttcactgataagcaatagtaataaatatgatattttatttaaaataaaatattttgaaaaagtatcttagtattgtggtccatgaatgctgaatatggatgctgaaataatatttgtcacctttgtaaaaaaaaaaaaaaaaaaaggtagttttggccaggtgtggtggctcgcgcttgtaatcccagcactttgggaggctgaggtgggtggatcacctgaggtcaggagttcaagaccagcctggccaacatggtgaaaccccctctctcctaaaaatagctgggcgtggtggtgggtgcctgtaatcccagctacttgggaggctgaggcatgagaatcgcttgaacctgggagatggaggttgcagtaagctgagactgtgccattgcaccccagcctgggcaacaagaatgaaactctgtctcaaaaaaaaaaaaaatgattgtgtttgttgatcacttactatgaggcaaacattctaagtgtaatgaactcacttacagtggtttacaaactgatgcatggagagaataatttatccagactcacccagctgttaactggcagaattaggattttaaca

SEQ ID NO: 37135 - DNA, 1380 bp, Homo sapiens
attttggtactgtaaatttggacataatttctgagtttattactactggcattttctttttcccttttttttttttttaaccgtaagtgcacgatgcaggtgcataggccccagaccaaactagaccaccagcatgttcatgtccagacctcggcagtggcgtgcactgcttgtgcacctcagttcctccagtgttggtttgtttgttttttaattcagcatcctgctggttttactttccaagcaagatctgttgcgactcccaaatgcgttttaatgagctcatccttatttgcctttcttcttacgtattttgtgtattagattgtgcaggagatattctagaaggcattaatggtttgcattcaaaacgatgtggtttgtccaagttattttctgtctttattactgagacggattaatctccttatttttttcttgatgatttgaagttgtaasagttgtccagctattgcttaataaaattttgcagatcaaaaaagttgtgtgcagaattcttgagccttgtgaggagaaatcacctcgctccattggcatgacctacccaccctccagttgcttcctgggtctcttggtaactgctagcagctactggagaccctgagatcccggtcatcatgttgcccatttggggaagtcagagattgtgctgtcttcttgatgatctggtttagatttgctttttcatggctttttaaaagaggactcgattggccgggcacggtggctcacgcctgtaatcccagcactttgggagcctgaggcgggcggatcatgaggtcaggagatcgagaccatcctggctaacacagtgaaaccccgtctctactaaaaatacaaaaaattagccgggcgtggtggcgggcgcctgtagtcctagctactcgggaggctgaggcaggagaatggcatgaacccgggaggcggggcttgcagtgagccgagatcgcaccactgcactccagcctgggagacagagcgagactccgtctcaaaaaaaaaaaagaggactcgattaaaagtgcacctgtatagcatctaaagatcagagatgccaaatattaacacctttgttaatttgtaggaaacttaaacctaggttttaagcaattcaactctaggtgctcatataactattaactattgttgttactcataagtgcttagtgagcctgcttcctctgccctaaagttccctatgaccatgggaggtgggaaggtggggcatgggaggtttatctgtgataatacatgtgtgcatgtacagaactacctttttggtgtttttcaaagaataaggaatcaattttgctcgaacctagctcccaaaactcactgtagaagagaaataactgtctc

SEQ ID NO: 37136 - DNA, 531 bp, Homo sapiens
gtagtcccagctattcagaaggctgaggtgggaggttcgcttgagcctgggagtttgaggtttcaagtctacaatgagctatgatcatgccactgcactccagcctgggtgacagagcgagaccctgtctcaaaatacatacatacatacatacatacatacatacacgtataccagggtttatttcttggctgtctgtcctattccattggttaatatgtctatctttatgccagtaccacactgttttgattaccgtagctttgcagtaggtttgaacatcaaggaaaggtaagaccttcaactttatttttctttttcaagattgttttggctatttgggatgccttgaaattccytatgaattttaagatgaaacacactttcttgcttttagaagaggcagaaatgcttcttaggaatatctcatatcctgatgaagtgatggcattctacaaacatacacacactgcctgttacattagatgtcttatttttcatcattcataaattgtcatcatgggcttgttg

SEQ ID NO: 37137 - DNA, 531 bp, Homo sapiens
gtagtcccagctattcagaaggctgaggtgggaggttcgcttgagcctgggagtttgaggtttcaagtctacaatgagctatgatcatgccactgcactccagcctgggtgacagagcgagaccctgtctcaaaatacatacatacatacatacatacatacatacacgtataccagggtttatttcttggctgtctgtcctattccattggttaatatgtctatctttatgccagtaccacactgttttgattaccgtagctttgcagtaggtttgaacatcaaggaaaggtaagaccttcaactttatttttctttttcaagattgttttggctatttgggatgccttgaaattccctatgaattwtaagatgaaacacactttcttgcttttagaagaggcagaaatgcttcttaggaatatctcatatcctgatgaagtgatggcattctacaaacatacacacactgcctgttacattagatgtcttatttttcatcattcataaattgtcatcatgggcttgttg

SEQ ID NO: 37138 - DNA, 2058 bp, Homo sapiens
ttttttttttttttgtgacagagtcttgctctgttgcccaggctggagtacagtggtgtgatctcggctcactgcatcctccgcctcctgggttcaagtgattctcctgcctcagcctcttgagtagctgggaccacaggcatgcgccaccctgctaattttttttttttttttttttttgkatttttagtataggcgagtttcaccatgttggccaggatggtctcactctcctgacctcgtgatctgcccacctcggcctcccaaagtgccgggattacaggcatgagccaccgtacccggcttcaaaatcttaatgttgtctcattcatttattttatatagtatcaggatttggaagaaaagatttttgaaaccaacatcaaattatctgtgtgccttatttagtcatagaccatttactgtgggatatgaactctgttttaaactgcttttaatttctctcagatatttatttcaggtaaaagtgaaaaaccaggccaggcacaatggctcatgcctgtaatcccagcactttgggaggctgaggcgggtggatcacgaggtcaggagttcaagaccagcctggccaagatggtgaaaccccgtctttactaaaaattcaaaaattagctgggcctgctggcgggctcctgtaatcccagctactcaggaggctgaggcagagaattgcttggacccgggaggcggaggttgcagtgagccgagatggcgccactgcgctcctgcttgggcaacagggcaagactccatttcaaaaaaaaaaaaaaagtgaaaaaccaggcttgaacacattcattagccaattaaggaagctgaatatgtttctactttacttttagacagaatttaaaaaataacttcctatttaagtataacatacatatagaaaaatacccatcataaatgtaacagctcagcgaattttcatgaactcagccatatgggacaaccaacattcagattaagaaatgtgtttgccaggtgcggtggctcacccctgtaatcccagcactttgggaagctgagggaaaatcacttgagccccggagttcgagattagcctgggcaacaaagcaagacctcatctctacaaaaaaaccaaaaaacaaaaaacaacacaaaaaaattagccagacatggtggcttgtgcctgcagtcccagacttgggaggctgaggtgggaggatcacttaagcttagaagttcaaagttagaatcaggtcactgcactccagcctgggccacagagtgagaccctgtcttaaaaaaaataaaaaagtagtatgacattgctagcacccagtaagaaccccttgggcttctttctcattactgtccttaccatgagtaataattttttttatttttaatatcataataaatttttcctctttgtggtctttatataaatgaagtcagaataggtactctgtttttctggctccattaattcagtgttgttcgtgaggctttttgtatgtttgtttgcttttgaggtggagtttcatccttgttgccctggctggactgcaatggcatgatctcagctcactgcaacctccgcctcctgggttcaagcgattatcctgcctcagccttccgagtagctgggattacaggcatgtgctaccacacccggctaattttgtattttcatttcagacggggtttctccctgttggtcagtctggtcttgaactcctgactttgagtgatctgcccgcatcagcctcccaaagtgctgggattacaggcgtgagccactgtgcccagccagagctttttttttctttttttttttttaaactgtaatacatggtattgcgtgtaatcatagttcacatttttaaggataagttttaaaattggaagtgtcattttcaggcataaatatgtttaaaaatatttaaaacaaactgcttaatatttgtttttaaaagtataaaagtaatgaatgggaattgttttttcatttttaatttttgtggatacatagtgtatttatgggatacatgagatgttttgatacaggca

SEQ ID NO: 37139 - DNA, 1932 bp, Homo sapiens
tactattttctcaataagtttgagattataaactcaacaactcagaagcagctcagagggtatggaggggaagtttgaaaagaggaaaggaccaagatagtcatcttggagagaaagggagcatgctggcaatttcaaatgctcattttagatttgtaattattggcaaaaaataaaatcagcttggttgtgtaaacatttttagtaatatgcagctgtataggaatggagaaggcagatattttgactcaatttgaaatccaagtagaattcttcagactagtttggtaggagagagagacaacagttaatggcatttgcaaaggttttgataatactgatgcacctgagctagatacacaggaaagtaaggacagcattctggtggatgttgggtatgtgttgaggccaaatgaagtggagatctcagtggggtagaagaactggttcaatgactgtgttagagcatatgacatggatgaatcagaaatggtggatggagaatggaagtctcaagatttcagtggtcgcacactttctgatgatgacaaagtctagtatgtgatcatattaaaaaggattggttgaggtagaattgaaggaaagtggggcaaaaacggactaggttgttggctttttggccacatagatgttgctgttgctgagaacggtgacagtaggtaagaggagaacaagaaccaggtttacaaggaataagacactgagagtttggctgatgaccaaaaggcagtggtcaagctaaatagcataagcttcaaagaagccagcattattttttagaaaggatggagagaaatagtctggaactagtgatgggcaataatatgaagttctcccacctctttgagcagtttgtaagggaaatgatgtgttcaggagtagctacaatttagttaagagaaaaaaggtgaaggtaactctaaagagaagaactttattaatgccagactttttttttttttttaacagacttaagccagattgggttttgagaagagataacatggaagaaatcacaaatcccctgcaagctattcaaatggtgatggatacgcttggcattccttattagtaaatgtaaacattttcagtatgtatagtgtaaagaaatattaaagccaatcatgagtaygtaaagtgatttttgctctccgtgtacaacttttaaaatctgactttgttttaaaaaaacataaactgttcattacattcttcatttttatcatttatagttttatgcatgtaataaactaatatgtcataagatgattatattattcctgtctattatcttaaagtattatagtagtttcaatgtaatcttattactaaaaggaaataatagctgattacaccttttttataggtaagttgaggaattttcataaaacaaatgttagaaattgaagttctgtctactcactaagaagtgagactaggataaaataatctcacaaattcatatcaatggcatccttatctatatccttgactggctaaagcatccagataagcaagtgagcccttctaggctcacaaaaagaatacacccaccactgtatttactaaaaattcttaccattgaactgatgggggttataatttgaagtggaaggaacatgctattgcttataatagaatcttgttgtgtagttatacaccacagacctgaaaatgattcagtattgaaatgtgattttttttctactctttgagtcactattactagtatctgtggtttcagggccacagatgtctaattcttatggctgaaatctgaatagagtctcaaagtctgcccatgggagttagaatccctgggctcatccttttctttcatcactttgttcagtgaacttaggagtatcaactaacttcattatattccttggttctccacatatggtcaaa

SEQ ID NO: 37140 - DNA, 1932 bp, Homo sapiens
tactattttctcaataagtttgagattataaactcaacaactcagaagcagctcagagggtatggaggggaagtttgaaaagaggaaaggaccaagatagtcatcttggagagaaagggagcatgctggcaatttcaaatgctcattttagatttgtaattattggcaaaaaataaaatcagcttggttgtgtaaacatttttagtaatatgcagctgtataggaatggagaaggcagatattttgactcaatttgaaatccaagtagaattcttcagactagtttggtaggagagagagacaacagttaatggcatttgcaaaggttttgataatactgatgcacctgagctagatacacaggaaagtaaggacagcattctggtggatgttgggtatgtgttgaggccaaatgaagtggagatctcagtggggtagaagaactggttcaatgactgtgttagagcatatgacatggatgaatcagaaatggtggatggagaatggaagtctcaagatttcagtggtcgcacactttctgatgatgacaaagtctagtatgtgatcatattaaaaaggattggttgaggtagaattgaaggaaagtggggcaaaaacggactaggttgttggctttttggccacatagatgttgctgttgctgagaacggtgacagtaggtaagaggagaacaagaaccaggtttacaaggaataagacactgagagtttggctgatgaccaaaaggcagtggtcaagctaaatagcataagcttcaaagaagccagcattattttttagaaaggatggagagaaatagtctggaactagtgatgggcaataatatgaagttctcccacctctttgagcagtttgtaagggaaatgatgtgttcaggagtagctacaatttagttaagagaaaaaaggtgaaggtaactctaaagagaagaactttattaatgccagactttttttttttttttaacagacttaagccagattgggttttgagaagagataacatggaagaaatcacaaatcccctgcaagctattcaaatggtgatggatacgcttggcattccttattagtaaatgtaaacattttcagtatgtatagtgtaaagaaatattaaagccaatcatgagtacgtaaagtgatttttgctctcygtgtacaacttttaaaatctgactttgttttaaaaaaacataaactgttcattacattcttcatttttatcatttatagttttatgcatgtaataaactaatatgtcataagatgattatattattcctgtctattatcttaaagtattatagtagtttcaatgtaatcttattactaaaaggaaataatagctgattacaccttttttataggtaagttgaggaattttcataaaacaaatgttagaaattgaagttctgtctactcactaagaagtgagactaggataaaataatctcacaaattcatatcaatggcatccttatctatatccttgactggctaaagcatccagataagcaagtgagcccttctaggctcacaaaaagaatacacccaccactgtatttactaaaaattcttaccattgaactgatgggggttataatttgaagtggaaggaacatgctattgcttataatagaatcttgttgtgtagttatacaccacagacctgaaaatgattcagtattgaaatgtgattttttttctactctttgagtcactattactagtatctgtggtttcagggccacagatgtctaattcttatggctgaaatctgaatagagtctcaaagtctgcccatgggagttagaatccctgggctcatccttttctttcatcactttgttcagtgaacttaggagtatcaactaacttcattatattccttggttctccacatatggtcaaa

SEQ ID NO: 37141 - DNA, 1932 bp, Homo sapiens
tactattttctcaataagtttgagattataaactcaacaactcagaagcagctcagagggtatggaggggaagtttgaaaagaggaaaggaccaagatagtcatcttggagagaaagggagcatgctggcaatttcaaatgctcattttagatttgtaattattggcaaaaaataaaatcagcttggttgtgtaaacatttttagtaatatgcagctgtataggaatggagaaggcagatattttgactcaatttgaaatccaagtagaattcttcagactagtttggtaggagagagagacaacagttaatggcatttgcaaaggttttgataatactgatgcacctgagctagatacacaggaaagtaaggacagcattctggtggatgttgggtatgtgttgaggccaaatgaagtggagatctcagtggggtagaagaactggttcaatgactgtgttagagcatatgacatggatgaatcagaaatggtggatggagaatggaagtctcaagatttcagtggtcgcacactttctgatgatgacaaagtctagtatgtgatcatattaaaaaggattggttgaggtagaattgaaggaaagtggggcaaaaacggactaggttgttggctttttggccacatagatgttgctgttgctgagaacggtgacagtaggtaagaggagaacaagaaccaggtttacaaggaataagacactgagagtttggctgatgaccaaaaggcagtggtcaagctaaatagcataagcttcaaagaagccagcattattttttagaaaggatggagagaaatagtctggaactagtgatgggcaataatatgaagttctcccacctctttgagcagtttgtaagggaaatgatgtgttcaggagtagctacaatttagttaagagaaaaaaggtgaaggtaactctaaagagaagaactttattaatgccagactttttttttttttttaacagacttaagccagattgggttttgagaagagataacatggaagaaatcacaaatcccctgcaagctattcaaatggtgatggatacgcttggcattccttattagtaaatgtaaacattttcagtatgtatagtgtaaagaaatattaaagccaatcatgagtacgtaaagtgatttttgctctccgtgtacaacttttaaaatctgactttgttttaaaaaaacataaactgttcattacattcttcatttttatcatttatagttttatgcatgtaataaactaatatgtcataagatgattatattattcctgtctattatcttaaagtattatagtagtttcaatgtaatcttattactaaaaggaaataatagctgattacaccttttttataggtaagttgaggaattttcataaaacaaatgttagaaattgaagttctgtctactcactaagaagtgagactaggataaaataatctcacaaattcatatcaatggcatccttatctatatccttgactggctaaagcatccagataagcaagtgagcccttctaggctcacaaaaagaatacacccaccactgtatttactaaaaattcttaccattgaactgatgggggttataatttgaagtggaaggaacatgctattgcttataatagaatcttgttgtgtagttatacaccacagacctgaaaatgattcagtattgaaatgtgattttttttctactctttgagtcactrttactagtatctgtggtttcagggccacagatgtctaattcttatggctgaaatctgaatagagtctcaaagtctgcccatgggagttagaatccctgggctcatccttttctttcatcactttgttcagtgaacttaggagtatcaactaacttcattatattccttggttctccacatatggtcaaa

SEQ ID NO: 37142 - DNA, 557 bp, Homo sapiens
aaattcatcttaaaaatgacatctttattttgattgagtgacaaataacatcttatgactttaagcagaaatttacgtatatgctcccagcagtcaattcttcagggtagagcatttgagaataaaaaatttccactgcagccccttgctccttactaatactgttgctaagtttggcagaaatgttccttaatgttcttaggtaacaatggggaaaytacacagaggagcatcaggaaaaaatgatgggaaaagtgttgggctaccctgatggaataatacagaaactgaaacaatgtcatccaagccacaatcaaaatatcctatctatccaattgagttacctgagaaagggacactcatgatttagacagtatttaaagcaagaaagtctgtaagagttggaaggtggcaaaatttgatgatgatcatttgagttgagatcactcgaagagtaaaaatatctgtccaatggagtctcatcatgaagttaaaaacagccacagcctgggcaagtatgtgccttcattctctcttttagtgaatcagttagtcaa

SEQ ID NO: 37143 - DNA, 640 bp, Homo sapiens
cttggggtggtaagaagaggaacagaggagttaggagtatcggaggacaggagaggaaagaatttcaagagagaaaggatcatatatttaatgtggtgaagagttgacaatcaaaaactgagtgtggaatgtgtcatggaggaggaacagacaatacagtgtgaaggagtgagtggtggataggcagattcagtggtgatacagaaatcttccagaaagagttttcagaagatggaagctcattatgactgcagagtgtaagggatgagaatcatgggaaatgcttgagccagagatggagaaaccagacaagagggagactattcaggttgtagccttttcagataggcttctttcacttaagaatatgcatttaagggttcttcttttctttctgtggcttgagaactcatttttcattgctcagtaatattccattgacaactaatgatttgttatgttcttttgttttccttawaatgacagactccatggatcaagaattttagagtagggaggggtggtagaggttatcaagtcagatcccctcattttgcagcaaaggaaatggagctccagagaagataagcctagctggtcacaggagagtgctcttttctgtggtcaatccaaaattatt

SEQ ID NO: 37144 - DNA, 500 bp, Homo sapiens
gaggtgattctttccacaaccmcgcccatcatgagtcaggacttagaaataaacaaacaccagctcggagcaacaaaagccctggggctttgtaaccagagagacctcagttcacatttgaaccctggccctccaacctccctgctgtgtgaccttggcctggttactcaacctctcttagtttcagctgtctcatctgttattgccccataacagggcccctgtctcagagctgtcctgaggattaaagagatcatgcagtgccaggcacctaactggggatggattctttatagctggtattttaatctacctctctgagtgtgtttcgtcattgatcaaatgtgggccaagccagggcatatgcaaagctcagtacatgtgtgtttcttccttcttctattttcagaagggtaaagaggactgtcctggtcacaccatgggccagtggcacatagtagggctaaataaatgtgtcactttatccatcagagttaaag

SEQ ID NO: 37145 - DNA, 500 bp, Homo sapiens
gaggtgattctttccacaaccccgcccatcatgagtcaggacttagaaataaacaaacaccagctcggagcaacaaaagccctggggctttktaaccagagagacctcagttcacatttgaaccctggccctccaacctccctgctgtgtgaccttggcctggttactcaacctctcttagtttcagctgtctcatctgttattgccccataacagggcccctgtctcagagctgtcctgaggattaaagagatcatgcagtgccaggcacctaactggggatggattctttatagctggtattttaatctacctctctgagtgtgtttcgtcattgatcaaatgtgggccaagccagggcatatgcaaagctcagtacatgtgtgtttcttccttcttctattttcagaagggtaaagaggactgtcctggtcacaccatgggccagtggcacatagtagggctaaataaatgtgtcactttatccatcagagttaaag

SEQ ID NO: 37146 - DNA, 500 bp, Homo sapiens
gaggtgattctttccacaaccccgcccatcatgagtcaggacttagaaataaacaaacaccagctcggagcaacaaaagccctggggctttgtaaccagagagacctcagttcacatttgaaccctggccctccaacctccctgctgtgtgaccttggcctggttactcaacctctcttagtttcagctgtctcatctgttattgccccataacagggcccctgtctcagagctgtcctgaggattaaagagatcatgcagtgccaggcacctaactggggatggattctttatagctggtattttaakctacctctctgagtgtgtttcgtcattgatcaaatgtgggccaagccagggcatatgcaaagctcagtacatgtgtgtttcttccttcttctattttcagaagggtaaagaggactgtcctggtcacaccatgggccagtggcacatagtagggctaaataaatgtgtcactttatccatcagagttaaag

SEQ ID NO: 37147 - DNA, 656 bp, Homo sapiens
agttattacaggtgtgaccacgcaggttttattacctagcaggcctagtacatatggaatggattcagataaaacaatgcactgtcttggccgggcgcggtggctcacgcctgcaatcccagcactttgggaggcygaagtggacggatcacaaggtcaggagatcaagaccatcctggctaacacggtgaaacactgtctctactaaaaatacaaaaaattagccaggcatggtggtgggtgcctgtagtcccagctacttgggaggctgaggcaggagaatagcgtgaacccaggaggtggagcttgcagtgagccgagatcatgccactgtgctccagcctgggggacagagtaagactccgtctcaaaaaaaaaaaaaaaaaacaaaaccaaaaaacaaaaaacaatgcactgtctcaatcctgggagtcagaaattcccatatgcctgattcaggcaagaagcaagctgtttaaggaaagaaaggtaaaatcatgttttcaaaattatgtcagtaaaagaaatctgacatagttggctccatcttgcttctaactttcaagctgtccttggtcattcctaggcgtaggccaagctaatttgggaagaatttagtttatagtttaaccttaaagcaaggatggtaatagccc

SEQ ID NO: 37148 - DNA, 656 bp, Homo sapiens
agttattacaggtgtgaccacgcaggttttattacctagcaggcctagtacatatggaatggattcagataaaacaatgcactgtcttggccgggcgcggtggctcacgcctgcaatcccagcactttgggaggccgaagtggacggatcacaaggtcaggagatcaagaccatcctggctaacacggtgaaacactgtctctactaaaaatacaaaaaattagccaggcatggtggtgggtgcctgtagtcccagctacttgggaggctgaggcaggagaatagcgtgaacccaggaggtggagcttgcagtgagccgagatcatgccactgtgctccagcctgggggacagagtaagactccgtctcaaaaaaaaaaaaaaaaaacaaaaccaaaaamcaaaaaacaatgcactgtctcaatcctgggagtcagaaattcccatatgcctgattcaggcaagaagcaagctgtttaaggaaagaaaggtaaaatcatgttttcaaaattatgtcagtaaaagaaatctgacatagttggctccatcttgcttctaactttcaagctgtccttggtcattcctaggcgtaggccaagctaatttgggaagaatttagtttatagtttaaccttaaagcaaggatggtaatagccc

SEQ ID NO: 37149 - DNA, 631 bp, Homo sapiens
  misc_feature (1)...(631): n = A,T,C or G
tatgggtggtgatacctgccccgacattggatggagacatgcacttaggggtggccattaattgcattcacggtccaggataatatccccctccccagtaatctagatgcttacaaacctcgctggttacaaatgcactggactccctggtggtggtaccctatcacagtattctcccctgccactggtataatcctgctacaacaacaaattaaaatattaagcttacatgtagaaaaagctcttaatgatagtagcactgggcttatgtttttatyggatgaatttgctcagcttcatactgttgtgttacaaaattgaatggcattacctatgcttaccacagcccaaggaggggtttgcaccttactgcatactgaatgttgtgtgtatattcctgatgattctcacaatattactgtccttgcccaagatatgcaaaaacaagtaaaacagttagaatctaaccatcagcaccccatcttggactggctgtctaactggcattggcattggccgtggtaggtatannnnnnnnnnnnnnnnnnnnnnnnnnnnnnnnnnnnnnnnnnnnnnnnnnnnnnnnnnnnnnnnnnnnnnnnnnnnnnnnnnnnnnnnnnnnnnnnnnnna

SEQ ID NO: 37150 - DNA, 2006 bp, Homo sapiens
atttctctccagtttgatgataatataacaataataatttataatatctatcatgtgctgaatagttcctattatgtgctgggtatagttctataagtgcgataaataaatacactatatttgtatggatagctcttagaactatacctgtagcacttatatagaactatggcatgcatacatatgataatagagagagagaaaatgtattgaatatagcaatcaggactgtacctgacacatagaaactgctcaatacatgacagatgatagaaataatatatgcacagacacacagatacatgtgctcacacatatgtgtaaactcatatagcttcaccacaaccttacaggcagaggatatttttattcccatcatatagatgaggcaactgaggcaagagatgttgagtgacttcccccaaccacggaggtgacaagacaggcggcaggctcagtttcaggtggtctagaccctgatggagtgtgctctctaaaacttgcacccaccacaccttcccagaacaataataccaattatgctcaaataactaacaagataaaagacaaatgactttctcttgagggcctctaggcagctcagagtgggccacaaagtgtgaaggggagttgaagagagggtctgtcagtgctgagaggctgagggagttgggaatggagagggactgggtgagcaccaactaagaggaatggctactcaccgcacagagggagagcgggccttcaggaggctcagggctggccccacagcgcaggcacaagggaagagccccatgccagtcttccacaactgaacactttcctctttccacagtggcctctgaccccaggcatctcaggaacaaggtgagtctccccttctgcatgccctcccccacccccaggcccaccctggtcctcacgcatgtgctcttgcctcctagggttcccctatcatctactctgaagttaaggtggcgtcaaccccggtttccggatccctgttcttggcttcctcagctcctcacagatgagtccacacgtctctccaactgctgtttcagcctctgcaccccaaagttccccttgggggagaagcagcattgaagtgggaagatttaggctgccccagaccatatctactggcctttgtttcacatgtcctcattctcagtctgaccagaatgcagggccctgctggactgtcacctgtttcccagttaaagccctgactggcaggttttttaatccagtggcaaggtgctcccactccagggcccagcacatctcctggattccttagtgggcttcagctgtggttgctgttctgagtactgctctcatcacacccccacagagggggtcttaccacacaaagggagagtgggccttcaggagatgccgggctggcctaacagctcaggtgctcctaaactccgacacagagttcctgctttgggtggatgcatttctcaattgtcatcagcctggtggggctactgcagtgtgctgccaaatgggacagcacacagcctgtgcacatgggacatgtgatgggtctccccacgggggctgcatttcacactcctccacctgtctcaaactctaaggtcggcacttgacaccaaggtaacttctctcctgctcatgtgtcagtgtctacctgcccaagtaagtggctttcatacaccaagtcccaagttcttcccatcctaacagaagtaacccagcaagtcaaggccaggaggaccaggggtgcagacagaacacatactggaacacaggaggtgctcaattactatttgactgactgactgaatgaatgaatgaatgaggaagaaaactgtgggtaatcaaactggcataaaatccagtgcactccctaggaaatccgggaggtattctggcttccctaagaaacaayggaagagaaggagcttggatgaggaaactgttcagcaagaggaagggcttctcacactttcatgtgcttgtggatcacctga

SEQ ID NO: 37151 - DNA, 1004 bp, Homo sapiens
ttgaaaaaaggaagtgggagtacccgtcttcagctgctaatcacagtttcctacccgatgatcaaagaaaaaaaaaagttaaggttttaaaaaatcaaatacccttgaccctacatttttgctattgggaaattaccctgaaggaagtatctgaagagagtactataagaacgtttattgtagcattcattattgcctaaacactggaaacaaaacaaaaaaccatgatatggggactgtttaagaatattctgattcatccgtatggtgacaagcaatcattaaagaataaggtaaatctgaacatgccaagaagggaagaccaccttgtttgatgtgaagagaataaaagtgagatatagattggttttgtagtattatcccattgggtaaatataaaaaatargatatatgtgtacatcaactcttttaagtatactttcttcttttcctggaaagtacacacaaaaatattgattatgtttgaggagcaataggtgggaagaacacaatttattttatgtatttctgtaccgtttgattttttaaaaaattaccaggtgaatgtatagctcttatgattttctaaaagtcaagtttccatcctggtatactggtcaacagaggttcctaagacattagctgccacgaggagtgccagtttctttctttcaaatattttctcaccctttctctctgggcccataccttggtcttcctaagggggcatttaattttatatctacaaatgcacatcaccttaggtatattatgtcacatctgacccactgcaccctgaggcaagaaaaccatacaggggttacaggggtgaatagagattaagaggagaacttcaaagggaacacagaatctttacctacttttggtgctaaaacaaatagtgctgctatgaacattcttgtatacatttattggggcatatgcgcacataattctgttgggtatatatctgggagtggaagtcctggctcataaggtatgca

SEQ ID NO: 37152 - DNA, 721 bp, Homo sapiens
cctgttccagggctgatttattcccaagtaggatgcttgcaagagactcgttacctattctggtgcagatacaagtcttgaaggtgccaaaaatctgggacaacttcagcaacaggaatccaaagctggtggatcagtgctggtgggaatgtaaattagttcagtcattgtgaaaagcagtttggcaatttctcaaagaacttaaaacaggattaccattcgacccagcaatgccattattgggtatatgcccaaaggaaaataaattgttctgttgtaaagacacatgcacacatgtgttcatcacagctttgttcacagtagtaaagacatggaatcaacctaaatgcccatcaatggtagactagattaaaaaaaaatggcacatatacacagtggaatactatgcagccataaaaaagaacaagatyatgtcctttgcagcaacatggatggagctggaggccattatcctaagcaaactaacacggaaatagaaaaccatatacctcacgttctcacttgtaagtgggagttaaactttgagtacatatggacacaaagaagggaatggtagaccccgaggcctacttaaaagtggagggtgggaggaggaagaggagcagaaaactatctattaggtactatacttattacctgggtgacaaaataatctgtacaccaaatacccatgacatacaatatgcctatataacaaacc

SEQ ID NO: 37153 - DNA, 721 bp, Homo sapiens
cctgttccagggctgatttattcccaagtaggatgcttgcaagagactcgttacctattctggtgcagatacaagtcttgaaggtgccaaaaatctgggacaacttcagcaacaggaatccaaagctggtggatcagtgctggtgggaatgtaaattagttcagtcattgtgaaaagcagtttggcaatttctcaaagaacttaaaacaggattaccattcgacccagcaatgccattattgggtatatgcccaaaggaaaataaattgttctgttgtaaagacacatgcacacatgtgttcatcacagctttgttcacagtagtaaagacatggaatcaacctaaatgcccatcaatggtagactagattaaaaaaaaatggcacatatacacagtggaatactatgcagccataaaaaagaacaagattatgtcctttgcagcaacatggatggagctggaggccattatcctaagcaaactaacacggaaatagaaaaccatatacctcacgttctcacttgtaagtgggagttaaactttgagtacmtatggacacaaagaagggaatggtagaccccgaggcctacttaaaagtggagggtgggaggaggaagaggagcagaaaactatctattaggtactatacttattacctgggtgacaaaataatctgtacaccaaatacccatgacatacaatatgcctatataacaaacc

SEQ ID NO: 37154 - DNA, 1949 bp, Homo sapiens
tggagagtctcagcacagctctggaatgctgccacacaactggggaatcagaatcagaaatcatgaaatcatcggaccctcaaagatacagcttatccaggcttgtgagtcagggctatgctgctgtaacaatcaactcctaaatgtcagcagcttaatccaacagagctttatttctctaatctgtatcattctcactccaggacccaggctgatggaacagcctccatgaaaagcgctactagttcctgttgtagaggaaaggaggacctagcaaatcacacagctagttcttaaatcttccacctgaaaatggccagtgttacttataactacattacgttggccaaagcaagtcatatggtcactcctaatttcaacaaagcagggaaatgcaaatctacatctrcccataagaagaaacagaaatatttggtaaatggcactatatattacctttgcaaactcattaaggtagggacaggttgataaggtgatattctcagtgcaccagctgtgcgtgggagggggttagaaaaaagagggacttgatggattaatacttcacttataggatttcattgaaattaacttctgcctggtggattgcctagccactgaacacaaagcattttagaaagttcctagagttgaatttccaacactttcactcttcctctaagacagtgccatgaagtgccaatttggggcaactactgactttctaaaggcttatatagaaggctctgtatgacatagtaatatctaatatagatgactttgttttaatgtctgcttgcaggctaagaatgtaagaaaataaagaggataaaatcattaaaaagcagttcagttggatgaagcaaccaactaataagctctttaaaatattgtattttcatcccttggtatccatgggaggttggttctaggatacacacataccccccaaattaaaatttgtgggtgctcaagtttcttgtataaaatggcatgatatttgcatacaatctatgcacatcctcctgtatgctttaaatcatctctagattaatatctaatacagtgtaaatgctatatgaataatttttactgtatttttatttgtattattttaattgttgtatggttatttttatggggtgttttgtttttaatatttttgatgtattggttgaatccttggatgcagaactcacagatgctgagggctgagtgtgctagaccctggtctttttttggcactgaaccagaaaaattctgatgaatttacagcttctgcctaaatcctcttttcacttaatttcctgagtctgtagtattggcatgtccactttaacttcagagtggtggcttagctttggaattgagaagttccagaaacccagaaaaagacagaatcacagggaaacgtcaataaacgtgttgattttcctgtaactaccgccaatttcttagcctagattccctaaattgcagagcacgaggcaaagacttctgggctggcactttatcagggagtattaatctcaggaaaacaggagtaggagaaaggagagtgaggcagagaaggagggagagcaagtggaaggcagtacattactgagcaggccacagctttatgaaaaactgattgcttggtgtcataggacatcttcaaaggggcaacatgaagctacttcatcctcaaatagttcttccaaggggagaaagggaaaatgatttattcattagctgccatctcccattggtcaaagtattccctcactgggtattaactcccttacacttcaagggtacacatgcatgagcatcaagtaggtgctgcagtgctttctctgccttgacagaaacaagggaattccactataggaagcacatggcacaaacaaattgtgcactgttttttgtgctaatgaacgatatgaggacctagaagaaaccattgc

SEQ ID NO: 37155 - DNA, 1870 bp, Homo sapiens
tgtcacccaggctggtgtgcaggggcgcaatctctgctcactgcaaccttcgcctcccgggtccaagccattttcctgcctcagcctctcgagtagctgggactgtagtcatgtgccaccacgccctgctaattttgtattttttttttttcagtagagacggggtttctccatgttggtcaggccggtctggaactcctaggctcaagcgatctgcctcgctcagccttccaaagtcctgggattacaagcgtgagccaccacgccaggccaatttattcctttctgattaataaattaaccgagcgacaatttatcatcagaaaatgtggattacctcactaaaccacctcccaaacctctcctctcggtttcctgaattggttactttgtaattttttatttatttatttacttttgagagggagtcttgctctgtcgcccaggctggagtgcaatagtgcagtctcggctcactgcaccctccacctccggggtccaagccattttcctgccttagcctcccgagtagctgggattactggcgcgtgccaccaagcccggctaactttcgtatttttagtagagacgggttttcaccatgttggtcaggctggtctggatcctgacctcgtgatctgcccacttgggcctcccaaagtgctgggattacaggcataagccgccgtgcctggccgtaattttttttttcttttccttgagacggagtttcactcttgttgccaaggctagagtgcaatggagcgatctcggctcactgcaacctccgcctcccaggttcaagtgattctcctgcctcagcctcctgtgtagctgggattacagtcatgtgccatcgtgccctgctaattttgtgtattttttttttttgtagagacagggttgctgcacgttggttaggctggtctcaatctcccaacctcgggtgatctgcccgcctcggcctcccaaagtgctgagattacaggcatgagccaccgtgcccagccgcccggccccatgttcttaattgttatgtttctctacatctctggcaggtgggttgcccagtttctttctgttagaatgtgtacctcacagcaggagtatgaagtgagctccaaggtatctcttcttccacttcagggatggcagttggcaaatcatgcatagtttataataacagtgcagagcagttcagatctatcagccttgaagacagtgaaacatactcctgactctaaaaatactctgacgtgtatcattggttttcaatgctacttgggtttttatctcttttaaggcattcggtattttagcagagttgcatttgggtaaagtaggaacttgtaatatttccaggttaaacattttaacctggcaattaacactggatgcatattttacaaaaaggagaaaatgctattattttggctgctggcaaaataattttcctttgagacctgattttgtttggaacaagctttgatgagacagtttgggttagaagctgagcctccaggagttgggtgtagacaggtggtaggctacagaaagagtgagaaggttctcttaatcatagaagaaggagaatagtkgtacagagaaatgtgtgcagagaatcctgaatgtggacaaagtaaaagacagaaagagagtgctggtgaaattatatgcagcctctttttattaacactcaagttaatctagtgtttttaaaaatcagagggtatttagtataactggattattgaaaaaaaatggtgaaggaactacattttgcaactcagggactggttgaaacagagggaaaatggggtggaacaaagccagcatgctcttcttcaagtgcttcaggacagcaccgcag

SEQ ID NO: 37156 - DNA, 633 bp, Homo sapiens
ttggcaatgtgtgttaagttaggcattctgttccaaaacactgacttgcttgaagagttataaaataaaacttaagaagttgctgtgtttatgaccacagagcaagagtcagaagtggaatcctgggagctgatgaaaatttatttcacaatattgcttaaaactagccccaagagggaagagagagtggaaaatggctctaatttcatctttctcacttgaaattatggggtgatatttacagtcctgcctcagtcaactgacagcaaatcttttcctatgattgcagaaagtttcttctcttaagtgaggagaatgtgttaaaggaacacatggtagggagagagaggcaaacaccgaggaaaaatgcttccattgataaaaattcatgccaagacttgatgatatggccataaagcaagccctagaatggaagkgtttcactctggaatcccttgaggcctaacacatgaacttgcaaagtgtgaggctttaggacctggtgacaaatgcagtcatcgagaaattctggcattcagtgaattctgtcaaggtggtttcaatgtgggggctatgcaacacagacacatttattccatgcaagaccatacaagtgaggagttgttgtgttgg

SEQ ID NO: 37157 - DNA, 633 bp, Homo sapiens
ttggcaatgtgtgttaagttaggcattctgttccaaaacactgacttgcttgaagagttataaaataaaacttaagaagttgctgtgtttatgaccacagagcaagagtcagaagtggaatcctgggagctgatgaaaatttatttcacaatattgcttaaaactagccccaagagggaagagagagtggaaaatggctctaatttcatctttctcacttgaaattatggggtgatatttacagtcctgcctcagtcaactgacagcaaatcttttcctatgattgcagaaagtttcttctcttaagtgaggagaatgtgttaaaggaacacatggtagggagagagaggcaaacaccgaggaaaaatgcttccattgataaaaattcatgccaagacttgatgatatggccataaagcaagccctagaatggaagggtttcactctggaatcccttgaggcctaacacatgaacttgcaaagtgtgaggctttaggacctggtgacaaatgcagtcatcgagaaattctggcattcagtgaattctgtcaaggtggtttcaaygtgggggctatgcaacacagacacatttattccatgcaagaccatacaagtgaggagttgttgtgttgg

SEQ ID NO: 37158 - DNA, 633 bp, Homo sapiens
ttggcaatgtgtgttaagttaggcattctgttccaaaacactgacttgcttgaagagttataaaataaaacttaagaagttgctgtgtttatgaccacagagcaagagtcagaagtggaatcctgggagctgatgaaaatttatttcacaatattgcttaaaactagccccaagagggaagagagagtggaaaatggctctaatttcatctttctcacttgaaattatggggtgatatttacagtcctgcctcagtcaactgacagcaaatcttttcctatgattgcagaaagtttcttctcttaagtgaggagaatgtgttaaaggaacacatggtagggagagagaggcaaacaccgaggaaaaatgcttccattgataaaaattcatgccaagacttgatgatatggccataaagcaagccctagaatggaagggtttcactctggaatcccttgaggcctaacacatgaacttgcaaagtgtgaggctttaggacctggtgacaaatgcagtcatcgagaaattctggcattcagtgaattctgtcaaggtggtttcaatgtgggggctatgcaacacagacacatttattccatgcamgaccatacaagtgaggagttgttgtgttgg

SEQ ID NO: 37159 - DNA, 513 bp, Homo sapiens
acatgctctcttgcctgctgccatgtaagatgtgcctgcttcaccttctgccatgattgaaagtttcctgaggcctccccagccatgtggaactatgagacaattaaamctcttttctttacaaattacctggtcttgggcagttctttctagcagtgtgagaacagactaataaacagcaagcctttcctgggtattgtgtaaggttttacagtgtaaatcagaatttataagctaattagtgctcaatgaaattaagggttgctttcgataagaattttattccatagccataatattaaagaggaaacaaaccttagttaatctcacgtcacgtttattgcatagcaatgttacgcaggaatctagatttctagacatacatatgtctgctcctcagggtgctgtcattttaaacacttctcccaaagttgaattaggaatggaataataattgttaagtaaaaattctgaaatcatggaattcttcctattgaaaaaaaacactaactt

SEQ ID NO: 37160 - DNA, 584 bp, Homo sapiens
aatgaaaatctgttttagattttatgttcctaaaactcaggttttgaaaattccaaaaagcatgtgaggccaagaagaaaatgcacacatgcttgtctaggaaaaaataaacgaaatggcttgttccatctttacacttgacgaattcccaaaattcagagggaatgggcacagttgtttattctaatattgtggctcacagtggttttatgaggagaagcagggcatttataggagtcttgactcaagtctctttaaggagcatttgtttgccaagctgcagaggtttcttttctgtttctttctaacattagggttgagaaatacatgtttgggcttttactttcattaggtctcrttgtattttgttgcttttagcaaaacccaatatgcacttttaccacttgtaaaacttatattctctccattttaaagatttgctaatttaccccacttaactgatttcaaaaatattttacacacctaattgacttttaaaaaatgatttcaaccccaaaataaaatgtaaccaaagtcaaggtaattctgatttcataaactgtatcattatgctttgaaatttg

SEQ ID NO: 37161 - DNA, 584 bp, Homo sapiens
aatgaaaatctgttttagattttatgttcctaaaactcaggttttgaaaattccaaaaagcatgtgaggccaagaagaaaatgcacacatgcttgtctaggaaaaaataaacgaaatggcttgttccatctttacacttgacgaattcccaaaattcagagggaatgggcacagttgtttattctaatattgtggctcacagtggttttatgaggagaagcagggcatttataggagtcttgactcaagtctctttaaggagcatttgtttgccaagctgcagaggtttcttttctgtttctttctaacattagggttgagaaatacatgtttgggcttttactttcattaggtctcgttgtattttgttgcttttagcaaaacccaatatgcacttttaccacttgtaaaacttatattctctccattttaaagatttgctaatttaccccacttaactgatttcaaaaatattttacacacctaattgactyttaaaaaatgatttcaaccccaaaataaaatgtaaccaaagtcaaggtaattctgatttcataaactgtatcattatgctttgaaatttg

SEQ ID NO: 37162 - DNA, 463 bp, Homo sapiens
tgcatgtgtgtgtgtatatatatatatatatatgtatgcacacacacacacacatttaaaatgactttctgaaatgaatgtattagatactgaatgtgtacccgtatgtatactgtttacatagacacaagcacatgtacaaaattcactttggtaaatatttacctcagtgaaaaatggtttagaaatacagttggatttttctgtaaagatgaggcactgtaattatgaagaaaagaaaaacccttagatactctttttgtgtgtagtgggtaaatttcacagaccagaaatttaaaaatgcaccaatgtgccgtgttcttcattttctctgattgggcytaatttaggatttaaatccaatgagccttgtagccagaatgcagcctgacagtgataaattaattctagtttgtttagggcactaattctagtttgcttagggcaaacataattatatcaa

SEQ ID NO: 37163 - DNA, 962 bp, Homo sapiens
cttcatgaatattcagagctcctcctattccctgttgaatatgtatatgtggcccaccagatcaacataaatccctgttcccccctcccctccctggaaacgtacttttcaggtttcagcaggagggtatgcctccctgtctgtcggaatggccaccttgcaggctgtaaccatttataaaaaataaaatctcccttctaaatttataaattgtgtgatttttcagttgacagctttcagtcagacttttcactgactgggaaaattcatttgcaatatatttattttaaaaatgactcctcagcatacaaaattcttgtgcaaagatcacaagcattcttatacaccaataacagacaaacagagagccaaatcatgagggaactcccattcacaattgcttcaaagagaataaaatacctaggaatccaacttacaagggatgtgaaggacctcttcaaggagaactacaaaacactgctcaacaaaataaaagaggatacaaacaaatggaagaacattscacgctcatgggtaggaagaatcactatcgggaaaatggtcatactgcccaaggtaatttatagattccctgccatccccatcaagctaccaatgactttcttcacagaattggaaaaaactactttaaagttcatatggaatcaaaaaagagcccgcattgccatgtcaatcctaagccaaaagaacaaagctggaggcatcacgctacctgacttcaaactatactacaaggctacagtaaccaaaacagcatggtactggtaccaaaacagagatatagaccaatggaggagaacagagccctcagaaataatgccacacatctacaactatctgatctttgacaaacctgacaaaaacaagaaatggggaaaggattccctatttaataaatggtgctgggaaaactggctagccatatgttgaaagctgaaact

SEQ ID NO: 37164 - DNA, 543 bp, Homo sapiens
gtgaatttgtcacatctgcccagatccaacatcttgagagtaggattagggtgccacaggcatggcctgagactaggaagagagccctgctcactgacccatcccttgcctgggcttccaagtggaactagagtttcattcaacctacatgtgcctataggtcctccctgtggcaatgacatctctcagctcagtaagggccatttgcagtaggaatatgaccctaaccagaagactcagtggatccttatcaccttcatagaaaggtactcaccatccatgtcaagagcccagccaacacrctgttgctccaatatgtaaaaggcacttctgtagggctggcatgagtcagtcagttcaagataacctgaaggagttgaataacatctatccagtgagtcctgcaagacttcaggccctttctcatccagcagctccctgctgagcctggaacagtgggaaaaagtaaagaataagccagggggaatcagaaaccacacagccccagctagatttcatggctaacataaggaagagtttgaa

SEQ ID NO: 37165 - DNA, 522 bp, Homo sapiens
gttttttttttcaacaacacacactagcaaaaacaaaggcacagtaaacattgaggcmgaaagtttccagcgtagagatatgaatataataatagacacaggcagggatgattaataaatgataaaatgtttacaggatgatcatcggaatacaggacatttctaattttgaaaaccaccctcccaaatacttcattataagtaaggtgtctctaaaagggacagatctcctagacccctccttaaccaagtaaccagtcctgatatcatgataatgctgatggacaaactagaccttctctgcccgcagatgggctaaggttggaaactcacagcattgtctctgcagtgttcccggcaaaacgtttaggctgaatttaatcatgaagacattttcagacaacttcagaatgtagatcattgagccagacagctgacctgtcctctataaacaagtccatgtcaccaccatcaatgacaacaacaaaaagatgaggaaatatttggggttcaaaataacta

SEQ ID NO: 37166 - DNA, 771 bp, Homo sapiens
tccagccacagagcctgctccagctgcagggaagggccctgggtgagagtcctgggcctcctgggaaggcaggctcaggcctctgtagggggtggcaggctgggcccagacccacaatgccttgtaggctgatagcctggcgccctggggagcagcacatgtgggcaagcccaggggcagtgcacgtgtgcatggggtgatgcagccatgcacgggcacgcagatggggcatgcatggacacatgcaggtgagcccacaaacccaaaccatgcargcaaagctcaaaggtgcacctgggttctaccgcaggggtctcagtacaccatgtgcctctcctccagaacacttagccctgtcgtggtttctgtttattacattgatgcctgtgtcttcccaccatgcccccaccccagtgtgagctcagaaagcctggattttttgttcctcattgtatcttagtgctataatggtggctgtggaatggcatggctcacgctcagtaaatatttcttgtgatggtgaattaatggcatgagctcatgggaatacattcaaacagaggtgtcaatccgcctatgcatatctgagcttaaaaatatgcacacacataacacatacaggcaacctcaaacatccccagggggacacgaaggaaccccctcatatgcacagcattaagatttgtaagaggtgcacacagatgttgccctatacggcgcctgcatattaatgcccacttctggctgggtgcagtggctcatgcctgtaat

SEQ ID NO: 37167 - DNA, 598 bp, Homo sapiens
ttttcttttaaggctaagaatgccttttgacaggttccaagctccgactcctgggttcacaccatgctcccacctcagcctcctgagtagctgggactacaggcgcccaccaccacagccagctaattttttgtattcttagtagagacggggtttcactgtgttagtcaggatggtctggatctcctgacctcctgatccacccgcctcggcctcccaaattgctgggattacagacgtgagccaccgcacccrgccaacaatttttttttttctttaatgaacagagcatcagtgaatgatagtgcaagtttaagacacctaatagacaagttaaaggagtcctccaggcagaaggaaagtgacacgggatgaaaatctggatgaaaaaaaaaagacactagaaatgacatctacaaaggcaaatatgtaattttaacatctgactgtttagccgggcacgatggctcacgcctggaatccggcactttgggaggccgaggaaggcggatcacttgaggtcaggagttcgagaccagcctggccaatatggtgaaccttcctctctatgaaaaattcaaaaattagtcagatgtgg

SEQ ID NO: 37168 - DNA, 834 bp, Homo sapiens
ccagatccacaaaacagctgctgcataactgcatgttgcaagcaagccctaaattgctgattttgaaacagcctgatgggttcacaaagacaatttctgaatagtcttaagagcagaggtgcactaaagccactgtgccctgcaggcccggatcccagtaagttcttyaaggagtaagtcttacttccatttatggaagatttttggagttgtccttggtcacccccaggaatgttttggttaggagtagaattttagatgtcatcaatttaaaaattaaaactaaaacgctggaactcatagagagataaaattaagagaatacattcactatcctgagtagaaagatttcttatagaacataacaggctttaaaaatacagaaaaaatatggcaaaatttcatcaaattaaatgctttgagaactaaaattaaaatccaaagccactcaaccaactggacagactgcttcttggccaaggagaccccagagaagtcttaaatactgagttcctgcccagtagttggaatctcagacacctctccttatactctctccctttgtggtttagacacaactgaccagcattattgttaaaatagagatcctaagactgacagaacagactccttgcagtagtaagatatggtatgataaacgagacctaaggccacgccaggcaaggtggagtcatgcgcccctcaacttaaagaataaactatgttccaattgccacaggtttttttcttcttcctttttttctctagctaaacaagcactggccttgagataagcaatgctgaagcacttgcagctcacccattaccataaac

SEQ ID NO: 37169 - DNA, 834 bp, Homo sapiens
ccagatccacaaaacagctgctgcataactgcatgttgcaagcaagccctaaattgctgattttgaaacagcctgatgggttcacaaagacaatttctgaatagtcttaagagcagaggtgcactaaagccactgtgccctgcaggcccggatcccagtaagttcttcaaggagtaagtcttacttccatttatggaagatttttggagttgtccttggtcacccccaggaatgttttggttaggagtagaattttagatgtcatcaatttaaaaattaaaactaaaacgctggaactcatagagagataaaattaagagaatacattcactatcctgagtagaaagatttcttatagaacataacaggctttaaaaatacagaaaaaatatggcaaaatttcatcaaattaaatgctttgagaactaaaattaaaatccaaagccactcaaccaactggacagrctgcttcttggccaaggagaccccagagaagtcttaaatactgagttcctgcccagtagttggaatctcagacacctctccttatactctctccctttgtggtttagacacaactgaccagcattattgttaaaatagagatcctaagactgacagaacagactccttgcagtagtaagatatggtatgataaacgagacctaaggccacgccaggcaaggtggagtcatgcgcccctcaacttaaagaataaactatgttccaattgccacaggtttttttcttcttcctttttttctctagctaaacaagcactggccttgagataagcaatgctgaagcacttgcagctcacccattaccataaac

SEQ ID NO: 37170 - DNA, 731 bp, Homo sapiens
gcatgtcaaatgtggagtgagaacgagccagaaaaagctgtttgaaggttagaagtactatgagcagtttaaaagaacagcaataaataaaacttgttaatgcccctaacactgctagtcaaaaatagtcatgaattaacagatgttactagtataactacatgcccaagtgtcgggcaaattgagttatctaaataggtgatctacaaataaagataggaagaatgaataattaataacagaccatgtggaaaagagatctcacacatttaaaacaccaacaaaaggcacccaataaaacggctttcagaatacaaagagtagatctcatattttcatcacctgaaaagtagaccctgcataagttatgttttcattgatccaagtgatactaaaagtttagagaagtacttcagaatttttaaaaattaaactttgttaataatcacaaattatacatgtaattactatatttttcagtttatcaaatttagtaaaattattttggaaatcagaataagaaataaggccaatagaaggtttacaaaaaaccgaagtgtgggaggaggaagagcagagggagagaaaaagyatattctgaccaatcatgcttacatacttgatgcaaaatccttcttgactgaatactttcccattgtttttgtccctggggcttgctgacagagacattgtgtccatgtgaagggaaaacctgttttttcccccaccta

SEQ ID NO: 37171 - DNA, 608 bp, Homo sapiens
tggcataacaaggtactayaaataaaacaagatataatcctagaaaatgttcaggcttcccacaggggtctaagaaaaaagaaacagaagaacaagaaacgaaagaagcacacagaaaacaacagattgcccgtagatgtgacttgaaaaaggcaacggaagagatccttgtggtgacagaattgtttttcatcttgactgcatcaatgtcattattctggttgtgatattattctatcatttttcaagatgttaccattgaggaaaaatgggcaaagggcacatgagatctctattatagctgcatgtgaatttgtagttatttcaaagtaaaaagttcaattaaaaatatacaaccacagtgcgatactaccacatccctattagattgtttaaaatgaaagactgatcctaccaactgctggcaatgatttggagtaactggaattctcatactgctgatgagaatgtaaaattatgcactttggaagcagtatgttcatttcctaaaaatatttacccatacacctgccacatgatgtagccattccatacctagatgtttgtcaagatgtcaaagcatgtacccatccaaacatttgttcaag

SEQ ID NO: 37172 - DNA, 671 bp, Homo sapiens
caaccagatcccatgaaagtgcacttagtatcatgagaacagaaatggggaatccacccccatgatccaatcacctctcaccaggtccctcctccaacattggggatttaattcaacatacaatttgggcagggacacaaatccaaaccatatcaatatgtatgtataactatcctagtcacctcactatcaacacttaaaacaaaaagacaagagaaagattgaacaggcagctcaaagtgatgacatatcacctaatgatctgttcattaataaaatttcaacctaagtgattcactctcttgtgtgttgatatcaaagttcagatatgtggtggcttatgcctctaatcccagcactttgggaggctagcaagggcaaatcacctagatcaggagtttgagaccagcctggccaacatggtgaaacttcgtctctactaaaaatacaaaaactagcagggtgtggtggcacatgcctgtaattctagctattagggaggctgagacacaagaattgcctgaacctgggaggcagaggttgcagtgagctgagatcgcaccactgcacyccagcctgggtgacagagtgagactccatttcaaaaaataataataataataagtgtagatatctttgcaacgcttcagtctttattagctaatgtaata

SEQ ID NO: 37173 - DNA, 671 bp, Homo sapiens
caaccagatcccatgaaagtgcacttagtatcatgagaacagaaatggggaatccacccccatgatccaatcacctctcaccaggtccctcctccaacattggggatttaattcaacatacaatttgggcagggacacaaatccaaaccatatcaatatgtatgtataactatcctagtcacctcactatcaacacttaaaacaaaaagacaagagaaagattgaacaggcagctcaaagtgatgacatatcacctaatgatctgttcattaataaaatttcaacctaagtgattcactctcttgtgtgttgatatcaaagttcagatatgtggtggcttatgcctctaatcccagcactttgggaggctagcaagggcaaatcacctagatcaggagtttgagaccagcctggccaacatggtgaaacttcgtctctactaaaaatacaaaaactagcagggtgtggtggcacatgcctgtaattctagctattagggaggctgagacacaagaattgcctgaacctgggaggcagaggttgcagtgagctgagatcgcaccactgcaccccagcctgggtgacagagtgagactccatttcaaaaaatartaataataataagtgtagatatctttgcaacgcttcagtctttattagctaatgtaata

SEQ ID NO: 37174 - DNA, 770 bp, Homo sapiens
agggaagcagagatcagggaagaaagagaaaagtaaaataataattaaaaggggaaaaatctaattgtaacaatatacaaacgcatagctcctactatccatcagtcagaggtctaagtattttttgtacaataaccattttacccttacaacaggcttgcagtggtaggcaccattgctaaccctagttaacagagagctgtcgccaaggccacatggccactaagtgatagagccagtgtttgagagaagcagttcttagtcacggctgcactgacaagaaccgacgcatccggctaactcaactytctctgcccttaaagtacgatcgagacaactaaaaacaactaagaaaataaaataaaagctagtaatgcttggcagggcacttgaaataatttgagtaaggcacttaattttccctccagtagcaccgagaatcttgatttcctaggtcatgtcaggtaaagaacttgattgcgggagcttcttaaaatggcctgaggcgttctggctgcctgcccaatctggctgcagcccgaggctctgcctcagttatctgcagcacccaggttgtcagagccaacgatctctgcaaattgcctttgtttgtgggttgagctgaccaaatatgtggacaggaagcccacctgaagggtattcgcatggctcatcacttcccaatgaaaaggctgaaagggggaggtgagtaccaggggcaagggggatcatttgtgttgttgggaggaagaggaaaataactgttgcca

SEQ ID NO: 37175 - DNA, 770 bp, Homo sapiens
agggaagcagagatcagggaagaaagagaaaagtaaaataataattaaaaggggaaaaatctaattgtaacaatatacaaacgcatagctcctactatccatcagtcagaggtctaagtattttttgtacaataaccattttacccttacaacaggcttgcagtggtaggcaccattgctaaccctagttaacagagagctgtcgccaaggccacatggccactaagtgatagagccagtgtttgagagaagcagttcttagtcacggctgcactgacaagaaccgacgcatccggctaactcaactttctctgcccttaaagtacgatcgagacaactaaaaacaactaagaaaataaaataaaagctagtaatgcttggcagggcacttgaaataatttgagtaaggcacttaattttccctccagtagcaccgagaatcttgatttcctaggtcatgtcaggtaaagaacttgattgcgggagcttcttaaaatggcctgaggcgttctggctgcctgmccaatctggctgcagcccgaggctctgcctcagttatctgcagcacccaggttgtcagagccaacgatctctgcaaattgcctttgtttgtgggttgagctgaccaaatatgtggacaggaagcccacctgaagggtattcgcatggctcatcacttcccaatgaaaaggctgaaagggggaggtgagtaccaggggcaagggggatcatttgtgttgttgggaggaagaggaaaataactgttgcca

SEQ ID NO: 37176 - DNA, 770 bp, Homo sapiens
agggaagcagagatcagggaagaaagagaaaagtaaaataataattaaaaggggaaaaatctaattgtaacaatatacaaacgcatagctcctactatccatcagtcagaggtctaagtattttttgtacaataaccattttacccttacaacaggcttgcagtggtaggcaccattgctaaccctagttaacagagagctgtcgccaaggccacatggccactaagtgatagagccagtgtttgagagaagcagttcttagtcacggctgcactgacaagaaccgacgcatccggctaactcaactttctctgcccttaaagtacgatcgagacaactaaaaacaactaagaaaataaaataaaagctagtaatgcttggcagggcacttgaaataatttgagtaaggcacttaattttccctccagtagcaccgagaatcttgatttcctaggtcatgtcaggtaaagaacttgattgcgggagcttcttaaaatggcctgaggcgttctggctgcctgcccaatctggctgcagcccgaggctctgcctcagtyatctgcagcacccaggttgtcagagccaacgatctctgcaaattgcctttgtttgtgggttgagctgaccaaatatgtggacaggaagcccacctgaagggtattcgcatggctcatcacttcccaatgaaaaggctgaaagggggaggtgagtaccaggggcaagggggatcatttgtgttgttgggaggaagaggaaaataactgttgcca

SEQ ID NO: 37177 - DNA, 770 bp, Homo sapiens
agggaagcagagatcagggaagaaagagaaaagtaaaataataattaaaaggggaaaaatctaattgtaacaatatacaaacgcatagctcctactatccatcagtcagaggtctaagtattttttgtacaataaccattttacccttacaacaggcttgcagtggtaggcaccattgctaaccctagttaacagagagctgtcgccaaggccacatggccactaagtgatagagccagtgtttgagagaagcagttcttagtcacggctgcactgacaagaaccgacgcatccggctaactcaactttctctgcccttaaagtacgatcgagacaactaaaaacaactaagaaaataaaataaaagctagtaatgcttggcagggcacttgaaataatttgagtaaggcacttaattttccctccagtagcaccgagaatcttgatttcctaggtcatgtcaggtaaagaacttgattgcgggagcttcttaaaatggcctgaggcgttctggctgcctgcccaatctggctgcagcccgaggctctgcctcagttatctgcagcacccasgttgtcagagccaacgatctctgcaaattgcctttgtttgtgggttgagctgaccaaatatgtggacaggaagcccacctgaagggtattcgcatggctcatcacttcccaatgaaaaggctgaaagggggaggtgagtaccaggggcaagggggatcatttgtgttgttgggaggaagaggaaaataactgttgcca

SEQ ID NO: 37178 - DNA, 770 bp, Homo sapiens
agggaagcagagatcagggaagaaagagaaaagtaaaataataattaaaaggggaaaaatctaattgtaacaatatacaaacgcatagctcctactatccatcagtcagaggtctaagtattttttgtacaataaccattttacccttacaacaggcttgcagtggtaggcaccattgctaaccctagttaacagagagctgtcgccaaggccacatggccactaagtgatagagccagtgtttgagagaagcagttcttagtcacggctgcactgacaagaaccgacgcatccggctaactcaactttctctgcccttaaagtacgatcgagacaactaaaaacaactaagaaaataaaataaaagctagtaatgcttggcagggcacttgaaataatttgagtaaggcacttaattttccctccagtagcaccgagaatcttgatttcctaggtcatgtcaggtaaagaacttgattgcgggagcttcttaaaatggcctgaggcgttctggctgcctgcccaatctggctgcagcccgaggctctgcctcagttatctgcagcacccaggttgtcagagccaasgatctctgcaaattgcctttgtttgtgggttgagctgaccaaatatgtggacaggaagcccacctgaagggtattcgcatggctcatcacttcccaatgaaaaggctgaaagggggaggtgagtaccaggggcaagggggatcatttgtgttgttgggaggaagaggaaaataactgttgcca

SEQ ID NO: 37179 - DNA, 505 bp, Homo sapiens
tttgtgaaatagcctgatttcatgaacaaattgatatccttgttcatttggtttatttactgatggaagcattataaggactagtgcagactacgaaatggcttttagatagaacatcttcaactctagctttgagtctactttgactggcttcaagggctattgcagaagtaaacagtttggtaggatctttctgaactttagtaagttcttcactaattatttttcctacttcagtggaaattttactccacaaagtatcaagtatggtgtcaagatctttaactggtgcatcatcaaatataayagagaaagcaaaggtatatccagagcagacacatcatgattctgaatattggagttctctggaatctcaagaaatagtccctctgtacacttaatattataattccatttgcaaagtaaatatcttccttttaaattttcagggtggtatcacagagcaaaaagtagtgttgttcaattgaaggtccatgggttacgt

SEQ ID NO: 37180 - DNA, 3660 bp, Homo sapiens
  misc_feature (1)...(3660): n = A,T,C or G
gtgatgcttgttgcattgagctgataaggacatactgctacagactcagcaattgagttgattttgtggatggcacggtcactctctcagccatgctggggcacaaccttaaataggagtctaagtgggaacatggaactcasgaaagtggcactccgcaggacggggtctcctggctgcattaaagcagtgagaaatataagaactgacttcgtttttttactgtctgttgcataatatgcactgcattaagctctttgggtagagttacttcacttaatcctcacagcaattccttatggtatgagataagaaaactgagatttggagaagttaaatgacacatccaaggtcacacatttaataagctgtcagatgaagccctgaccctaagaccctgtttcttccattagaccaatgtgttgtctcttcctttttgttgtttgctgtgcagaatcacatcattctacttaaagagtgtgcctctaccatagttgcactaggatgatttgagaggccaccagcttgaacctgttaaattctaggaaactctcattaagatgaaaatgagtggggcttcacaatatctcagctccatgtacttctaatgcagaggagaagagcattatacaaatgaattgagcatcagatatcaagattttcttttttgttacatcactaggaagataagaaatattttttaaatgctgatgactaaatggaaaatcaaatttccagcatgctcagggagaaatattagtcaaacggaataattcagcatttcaatgtttactgtagctatctagctatcaaaaagggagactagaaatgatagttttaaaaatcagtgttctatttaaacaattgaaagagttggccaagaatgtgtacagtaaacatttcaagtttataccaaaaatcattctgataattatcctggtttatctgcagtatctgttgtgggaatcttaacccctggcaatattcttttctatgatattatcatttaattaagcagcttatttcagttgtccaagggcttcttacacctttatttaaaaaaaaggtaaagaaggccctttagaatcttttgatctcatcttgaatctgtacaagtttgtggcatcactcaaaacaatcatgttatttttatgccactagtaataaggagattcattctaagacaactgtttttctaccttttaatataaggcatatataaataaaataaataaaaataaatctgtaaaataacattggaaaaaaatctataaggagaacaaatgatgcctgttttatgttttacccttaaaaattctattgaaacatttctgaaaacatcccaatgagtaatttgcattattcagatacagttaacttgattatttaaagcataatttcatgactcatgagtatcacttctctcagtgtggcacactacatagacagtcttcaactttgccagtgttactggggaaaacatatgatagtaagggtgtcatattttcctgtaaggacaatgttgtaagtaggaggctgtgtaattttgcccaatgggtcaatgtcataaattactgatgaactgttgaaatgatgtaatttataattttgaaattatttcaaatagtaaaacacattttaatcaatgcatttaaacagtaaaggttttttattttttatttttattttgagacacggtctcaatctcactctcactcaggctggagtgcagtggtgtgatcaaggctcactgcagcctccacctcctgggcctaggtgatcctcccacctcagccccctgagtagctgggactgtaggcaagtactatcatgcccagctgatttttttttttgctgttgttagagacagggtctcactctgttgccaaggctggtctcaaactcttggccttaagcaatcccatgcctcggccttccaaagtgctgagattacaggtgtgagctaccacacccggcctaaaggtgtttttttctaaatcttgcaaaatcaacattaatgtaatgtacctattgattatttaaagaatgtcaatgtaaccattagatggacatctagcacataattataattgttttggaggtcacaatttgacttatctaccctttatatgctacttaaatgaaacattttcttagcagtttctttttgtcattggaatgtaggaagactttgagttgatgttttgatggtccaagtatcttaatgtgggaactaggactcttttctcttgttaaaattccctatagcaaggagaatattcagaacttttctattattacttaagagcaataatcactttgagttgatctttgaagacatgaaaataaaagttatttctgtagctccaataaggactttagctccggaggtttggacagcaggtgcctgaactgtctagtcttttggttcactttcttttcattgtttcccatttcagtgacaattttatgacagcctagaaggaaaaaaggagacacaaatgaggaggtctagaatctggtgtagaagcttgaaggctgggggtggcaggtcgggagagcagagcccagagagtggaaaatagcagttatgcacgtgtgtgtgtatagacagataaatagataaacagatagaaagattgctttacctagaaatacctatctcttttgaagctgatgagcaaaccagttgcttgaaaaccattgattcctcataaataatgtgttaaaccatgcatcataaattgacaacttcttctcaatgccaatgagaataagatgaaggatttcagacccacatgggcaacttgagctttgcagatattcaaagatggttaactttgaatattcaaagatggtaaactgacattaaatgaaggagatggtatgagtaacagacttcatagtaggtatgacatgtggtagactatcaatcaataaagttccctttactcttcactgaaaacaggtcaagtctgtattaatatttgtatacaatgttttagctggtcataaaagtcatttgtttctttgcatcgatggagtgcagtagaaacaaaataattttaaagtcaaacagacataggtgtgaatttcagctctatcctcacttgctacgtgaccttgagcaataatcactttgagtcaatctttgaagacatgaaactaaaagttatttcttagttggtgtctctgaacccaaggttcctcttacatgaaatgagatttaaaatttaacaagaatcaggccaagcgcagtggctcatacctataatcccagcacattgagagcctgaggcaggataaccacttgaggccaggagtttgagatcagcctgggcaacatagcaagattccatcgctacaaaaaattttaaaacgttagccgaatgtagcagtacacacttgtcctcccagctacttgggaggctgaagcaggagaaccccttgagcccaggaagttgagactgcaatgagctgtgatcacaccaccgcactccatcctgagtgacagagcaagaccctatcccccgcccccaaaaaaacacaaataaataaataaaataaaacattaacaagagcaactatcgcactgtgaggtcagagaaaatataggttaaggcacccaggtcgtgatgccttttatgatannttgggcaa

SEQ ID NO: 37181 - DNA, 3660 bp, Homo sapiens
  misc_feature (1)...(3660): n = A,T,C or G
gtgatgcttgttgcattgagctgataaggacatactgctacagactcagcaattgagttgattttgtggatggcacggtcactctctcagccatgctggggcacaaccttaaataggagtctaagtgggaacatggaactcacgaaagtggcactccgcaggacggggtctcctggctgcattaaagcagtgagaaatataagaactgacttcgtttttttactgtctgttgcataatatgcactgcattaagctctttgggtagagttacttcacttaatcctcacagcaattccttatggtatgagataagaaaactgagatttggagaagttaaatgacacatccaaggtcacacatttaataagctgtcagatgaagccctgaccctaagaccctgtttcttccattagaccaatgtgttgtctcttcctttttgttgtttgctgtgcagaatcacatcattctacttaaagagtgtgcctctaccatagttgcactaggatgatttgagaggccaccagcttgaacctgttaaattctaggaaactctcattaagatgaaaatgagtggggcttcacaatatctcagctccatgtacttctaatgcagaggagaagagcattatacaaatgaattgagcatcagatatcaagattttcttttttgttacatcactaggaagataagaaatattttttaaatgctgatgactaaatggaaaatcaaatttccagcatgctcagggagaaatattagtcaaacggaataattcagcatttcaatgtttactgtagctatctagctatcaaaaagggagactagaaatgatagttttaaaaatcagtgttctatttaaacaattgaaagagttggccaagaatgtgtacagtaaacatttcaagtttataccaaaaatcattctgataattatcctggtttatctgcagtatctgttgtgggaatcttaacccctggcaatattcttttctatgatattatcatttaattaagcagcttatttcagttgtccaagggcttcttacacctttatttaaaaaaaaggtaaagaaggccctttagaatcttttgatctcatcttgaatctgtacaagtttgtggcatcactcaaaacaatcatgttatttttatgccactagtaataaggagattcattctaagacaactgtttttctaccttttaatataaggcatatataaataaaataaataaaaataaatctgtaaaataacattggaaaaaaatctataaggagaacaaatgatgcctgttttatgttttacccttaaaaattctattgaaacatttctgaaaacatcccaatgagtaatttgcattattcagatacagttaacttgattatttaaagcataatttcatgactcatgagtatcacttctctcagtgtggcacactacatagacagtcttcaactttgccartgttactggggaaaacatatgatagtaagggtgtcatattttcctgtaaggacaatgttgtaagtaggaggctgtgtaattttgcccaatgggtcaatgtcataaattactgatgaactgttgaaatgatgtaatttataattttgaaattatttcaaatagtaaaacacattttaatcaatgcatttaaacagtaaaggttttttattttttatttttattttgagacacggtctcaatctcactctcactcaggctggagtgcagtggtgtgatcaaggctcactgcagcctccacctcctgggcctaggtgatcctcccacctcagccccctgagtagctgggactgtaggcaagtactatcatgcccagctgatttttttttttgctgttgttagagacagggtctcactctgttgccaaggctggtctcaaactcttggccttaagcaatcccatgcctcggccttccaaagtgctgagattacaggtgtgagctaccacacccggcctaaaggtgtttttttctaaatcttgcaaaatcaacattaatgtaatgtacctattgattatttaaagaatgtcaatgtaaccattagatggacatctagcacataattataattgttttggaggtcacaatttgacttatctaccctttatatgctacttaaatgaaacattttcttagcagtttctttttgtcattggaatgtaggaagactttgagttgatgttttgatggtccaagtatcttaatgtgggaactaggactcttttctcttgttaaaattccctatagcaaggagaatattcagaacttttctattattacttaagagcaataatcactttgagttgatctttgaagacatgaaaataaaagttatttctgtagctccaataaggactttagctccggaggtttggacagcaggtgcctgaactgtctagtcttttggttcactttcttttcattgtttcccatttcagtgacaattttatgacagcctagaaggaaaaaaggagacacaaatgaggaggtctagaatctggtgtagaagcttgaaggctgggggtggcaggtcgggagagcagagcccagagagtggaaaatagcagttatgcacgtgtgtgtgtatagacagataaatagataaacagatagaaagattgctttacctagaaatacctatctcttttgaagctgatgagcaaaccagttgcttgaaaaccattgattcctcataaataatgtgttaaaccatgcatcataaattgacaacttcttctcaatgccaatgagaataagatgaaggatttcagacccacatgggcaacttgagctttgcagatattcaaagatggttaactttgaatattcaaagatggtaaactgacattaaatgaaggagatggtatgagtaacagacttcatagtaggtatgacatgtggtagactatcaatcaataaagttccctttactcttcactgaaaacaggtcaagtctgtattaatatttgtatacaatgttttagctggtcataaaagtcatttgtttctttgcatcgatggagtgcagtagaaacaaaataattttaaagtcaaacagacataggtgtgaatttcagctctatcctcacttgctacgtgaccttgagcaataatcactttgagtcaatctttgaagacatgaaactaaaagttatttcttagttggtgtctctgaacccaaggttcctcttacatgaaatgagatttaaaatttaacaagaatcaggccaagcgcagtggctcatacctataatcccagcacattgagagcctgaggcaggataaccacttgaggccaggagtttgagatcagcctgggcaacatagcaagattccatcgctacaaaaaattttaaaacgttagccgaatgtagcagtacacacttgtcctcccagctacttgggaggctgaagcaggagaaccccttgagcccaggaagttgagactgcaatgagctgtgatcacaccaccgcactccatcctgagtgacagagcaagaccctatcccccgcccccaaaaaaacacaaataaataaataaaataaaacattaacaagagcaactatcgcactgtgaggtcagagaaaatataggttaaggcacccaggtcgtgatgccttttatgatannttgggcaa

SEQ ID NO: 37182 - DNA, 3660 bp, Homo sapiens
  misc_feature (1)...(3660): n = A,T,C or G
gtgatgcttgttgcattgagctgataaggacatactgctacagactcagcaattgagttgattttgtggatggcacggtcactctctcagccatgctggggcacaaccttaaataggagtctaagtgggaacatggaactcacgaaagtggcactccgcaggacggggtctcctggctgcattaaagcagtgagaaatataagaactgacttcgtttttttactgtctgttgcataatatgcactgcattaagctctttgggtagagttacttcacttaatcctcacagcaattccttatggtatgagataagaaaactgagatttggagaagttaaatgacacatccaaggtcacacatttaataagctgtcagatgaagccctgaccctaagaccctgtttcttccattagaccaatgtgttgtctcttcctttttgttgtttgctgtgcagaatcacatcattctacttaaagagtgtgcctctaccatagttgcactaggatgatttgagaggccaccagcttgaacctgttaaattctaggaaactctcattaagatgaaaatgagtggggcttcacaatatctcagctccatgtacttctaatgcagaggagaagagcattatacaaatgaattgagcatcagatatcaagattttcttttttgttacatcactaggaagataagaaatattttttaaatgctgatgactaaatggaaaatcaaatttccagcatgctcagggagaaatattagtcaaacggaataattcagcatttcaatgtttactgtagctatctagctatcaaaaagggagactagaaatgatagttttaaaaatcagtgttctatttaaacaattgaaagagttggccaagaatgtgtacagtaaacatttcaagtttataccaaaaatcattctgataattatcctggtttatctgcagtatctgttgtgggaatcttaacccctggcaatattcttttctatgatattatcatttaattaagcagcttatttcagttgtccaagggcttcttacacctttatttaaaaaaaaggtaaagaaggccctttagaatcttttgatctcatcttgaatctgtacaagtttgtggcatcactcaaaacaatcatgttatttttatgccactagtaataaggagattcattctaagacaactgtttttctaccttttaatataaggcatatataaataaaataaataaaaataaatctgtaaaataacattggaaaaaaatctataaggagaacaaatgatgcctgttttatgttttacccttaaaaattctattgaaacatttctgaaaacatcccaatgagtaatttgcattattcagatacagttaacttgattatttaaagcataatttcatgactcatgagtatcacttctctcagtgtggcacactacatagacagtcttcaactttgccagtgttactggggaaaacatatgatagtaagggtgtcatattttcctgtaaggacaatgttgtaagtaggaggctgtgtaattttgcccaatgggtcaatgtcataaattactgatgaactgttgaaatgatgtaatttataattttgaaattatttcaaatagtaaaacacattttaatcaatgcatttaaacagtaaaggttttttattttttatttttattttgagacacggtctcaatctcactctcactcaggctggagtgcagtggtgtgatcaaggctcactgcagcctccacctcctgggcctaggtgatcctmccacctcagccccctgagtagctgggactgtaggcaagtactatcatgcccagctgatttttttttttgctgttgttagagacagggtctcactctgttgccaaggctggtctcaaactcttggccttaagcaatcccatgcctcggccttccaaagtgctgagattacaggtgtgagctaccacacccggcctaaaggtgtttttttctaaatcttgcaaaatcaacattaatgtaatgtacctattgattatttaaagaatgtcaatgtaaccattagatggacatctagcacataattataattgttttggaggtcacaatttgacttatctaccctttatatgctacttaaatgaaacattttcttagcagtttctttttgtcattggaatgtaggaagactttgagttgatgttttgatggtccaagtatcttaatgtgggaactaggactcttttctcttgttaaaattccctatagcaaggagaatattcagaacttttctattattacttaagagcaataatcactttgagttgatctttgaagacatgaaaataaaagttatttctgtagctccaataaggactttagctccggaggtttggacagcaggtgcctgaactgtctagtcttttggttcactttcttttcattgtttcccatttcagtgacaattttatgacagcctagaaggaaaaaaggagacacaaatgaggaggtctagaatctggtgtagaagcttgaaggctgggggtggcaggtcgggagagcagagcccagagagtggaaaatagcagttatgcacgtgtgtgtgtatagacagataaatagataaacagatagaaagattgctttacctagaaatacctatctcttttgaagctgatgagcaaaccagttgcttgaaaaccattgattcctcataaataatgtgttaaaccatgcatcataaattgacaacttcttctcaatgccaatgagaataagatgaaggatttcagacccacatgggcaacttgagctttgcagatattcaaagatggttaactttgaatattcaaagatggtaaactgacattaaatgaaggagatggtatgagtaacagacttcatagtaggtatgacatgtggtagactatcaatcaataaagttccctttactcttcactgaaaacaggtcaagtctgtattaatatttgtatacaatgttttagctggtcataaaagtcatttgtttctttgcatcgatggagtgcagtagaaacaaaataattttaaagtcaaacagacataggtgtgaatttcagctctatcctcacttgctacgtgaccttgagcaataatcactttgagtcaatctttgaagacatgaaactaaaagttatttcttagttggtgtctctgaacccaaggttcctcttacatgaaatgagatttaaaatttaacaagaatcaggccaagcgcagtggctcatacctataatcccagcacattgagagcctgaggcaggataaccacttgaggccaggagtttgagatcagcctgggcaacatagcaagattccatcgctacaaaaaattttaaaacgttagccgaatgtagcagtacacacttgtcctcccagctacttgggaggctgaagcaggagaaccccttgagcccaggaagttgagactgcaatgagctgtgatcacaccaccgcactccatcctgagtgacagagcaagaccctatcccccgcccccaaaaaaacacaaataaataaataaaataaaacattaacaagagcaactatcgcactgtgaggtcagagaaaatataggttaaggcacccaggtcgtgatgccttttatgatannttgggcaa

SEQ ID NO: 37183 - DNA, 3660 bp, Homo sapiens
  misc_feature (1)...(3660): n = A,T,C or G
gtgatgcttgttgcattgagctgataaggacatactgctacagactcagcaattgagttgattttgtggatggcacggtcactctctcagccatgctggggcacaaccttaaataggagtctaagtgggaacatggaactcacgaaagtggcactccgcaggacggggtctcctggctgcattaaagcagtgagaaatataagaactgacttcgtttttttactgtctgttgcataatatgcactgcattaagctctttgggtagagttacttcacttaatcctcacagcaattccttatggtatgagataagaaaactgagatttggagaagttaaatgacacatccaaggtcacacatttaataagctgtcagatgaagccctgaccctaagaccctgtttcttccattagaccaatgtgttgtctcttcctttttgttgtttgctgtgcagaatcacatcattctacttaaagagtgtgcctctaccatagttgcactaggatgatttgagaggccaccagcttgaacctgttaaattctaggaaactctcattaagatgaaaatgagtggggcttcacaatatctcagctccatgtacttctaatgcagaggagaagagcattatacaaatgaattgagcatcagatatcaagattttcttttttgttacatcactaggaagataagaaatattttttaaatgctgatgactaaatggaaaatcaaatttccagcatgctcagggagaaatattagtcaaacggaataattcagcatttcaatgtttactgtagctatctagctatcaaaaagggagactagaaatgatagttttaaaaatcagtgttctatttaaacaattgaaagagttggccaagaatgtgtacagtaaacatttcaagtttataccaaaaatcattctgataattatcctggtttatctgcagtatctgttgtgggaatcttaacccctggcaatattcttttctatgatattatcatttaattaagcagcttatttcagttgtccaagggcttcttacacctttatttaaaaaaaaggtaaagaaggccctttagaatcttttgatctcatcttgaatctgtacaagtttgtggcatcactcaaaacaatcatgttatttttatgccactagtaataaggagattcattctaagacaactgtttttctaccttttaatataaggcatatataaataaaataaataaaaataaatctgtaaaataacattggaaaaaaatctataaggagaacaaatgatgcctgttttatgttttacccttaaaaattctattgaaacatttctgaaaacatcccaatgagtaatttgcattattcagatacagttaacttgattatttaaagcataatttcatgactcatgagtatcacttctctcagtgtggcacactacatagacagtcttcaactttgccagtgttactggggaaaacatatgatagtaagggtgtcatattttcctgtaaggacaatgttgtaagtaggaggctgtgtaattttgcccaatgggtcaatgtcataaattactgatgaactgttgaaatgatgtaatttataattttgaaattatttcaaatagtaaaacacattttaatcaatgcatttaaacagtaaaggttttttattttttatttttattttgagacacggtctcaatctcactctcactcaggctggagtgcagtggtgtgatcaaggctcactgcagcctccacctcctgggcctaggtgatcctcccacctcagccccctgagtagctgggactgtaggcaagtactatcatgcccagctgatttttttttttgctgttgttagagacagggtctcactctgttgccaaggctggtctcaaactcttrgccttaagcaatcccatgcctcggccttccaaagtgctgagattacaggtgtgagctaccacacccggcctaaaggtgtttttttctaaatcttgcaaaatcaacattaatgtaatgtacctattgattatttaaagaatgtcaatgtaaccattagatggacatctagcacataattataattgttttggaggtcacaatttgacttatctaccctttatatgctacttaaatgaaacattttcttagcagtttctttttgtcattggaatgtaggaagactttgagttgatgttttgatggtccaagtatcttaatgtgggaactaggactcttttctcttgttaaaattccctatagcaaggagaatattcagaacttttctattattacttaagagcaataatcactttgagttgatctttgaagacatgaaaataaaagttatttctgtagctccaataaggactttagctccggaggtttggacagcaggtgcctgaactgtctagtcttttggttcactttcttttcattgtttcccatttcagtgacaattttatgacagcctagaaggaaaaaaggagacacaaatgaggaggtctagaatctggtgtagaagcttgaaggctgggggtggcaggtcgggagagcagagcccagagagtggaaaatagcagttatgcacgtgtgtgtgtatagacagataaatagataaacagatagaaagattgctttacctagaaatacctatctcttttgaagctgatgagcaaaccagttgcttgaaaaccattgattcctcataaataatgtgttaaaccatgcatcataaattgacaacttcttctcaatgccaatgagaataagatgaaggatttcagacccacatgggcaacttgagctttgcagatattcaaagatggttaactttgaatattcaaagatggtaaactgacattaaatgaaggagatggtatgagtaacagacttcatagtaggtatgacatgtggtagactatcaatcaataaagttccctttactcttcactgaaaacaggtcaagtctgtattaatatttgtatacaatgttttagctggtcataaaagtcatttgtttctttgcatcgatggagtgcagtagaaacaaaataattttaaagtcaaacagacataggtgtgaatttcagctctatcctcacttgctacgtgaccttgagcaataatcactttgagtcaatctttgaagacatgaaactaaaagttatttcttagttggtgtctctgaacccaaggttcctcttacatgaaatgagatttaaaatttaacaagaatcaggccaagcgcagtggctcatacctataatcccagcacattgagagcctgaggcaggataaccacttgaggccaggagtttgagatcagcctgggcaacatagcaagattccatcgctacaaaaaattttaaaacgttagccgaatgtagcagtacacacttgtcctcccagctacttgggaggctgaagcaggagaaccccttgagcccaggaagttgagactgcaatgagctgtgatcacaccaccgcactccatcctgagtgacagagcaagaccctatcccccgcccccaaaaaaacacaaataaataaataaaataaaacattaacaagagcaactatcgcactgtgaggtcagagaaaatataggttaaggcacccaggtcgtgatgccttttatgatannttgggcaa

SEQ ID NO: 37184 - DNA, 3660 bp, Homo sapiens
  misc_feature (1)...(3660): n = A,T,C or G
gtgatgcttgttgcattgagctgataaggacatactgctacagactcagcaattgagttgattttgtggatggcacggtcactctctcagccatgctggggcacaaccttaaataggagtctaagtgggaacatggaactcacgaaagtggcactccgcaggacggggtctcctggctgcattaaagcagtgagaaatataagaactgacttcgtttttttactgtctgttgcataatatgcactgcattaagctctttgggtagagttacttcacttaatcctcacagcaattccttatggtatgagataagaaaactgagatttggagaagttaaatgacacatccaaggtcacacatttaataagctgtcagatgaagccctgaccctaagaccctgtttcttccattagaccaatgtgttgtctcttcctttttgttgtttgctgtgcagaatcacatcattctacttaaagagtgtgcctctaccatagttgcactaggatgatttgagaggccaccagcttgaacctgttaaattctaggaaactctcattaagatgaaaatgagtggggcttcacaatatctcagctccatgtacttctaatgcagaggagaagagcattatacaaatgaattgagcatcagatatcaagattttcttttttgttacatcactaggaagataagaaatattttttaaatgctgatgactaaatggaaaatcaaatttccagcatgctcagggagaaatattagtcaaacggaataattcagcatttcaatgtttactgtagctatctagctatcaaaaagggagactagaaatgatagttttaaaaatcagtgttctatttaaacaattgaaagagttggccaagaatgtgtacagtaaacatttcaagtttataccaaaaatcattctgataattatcctggtttatctgcagtatctgttgtgggaatcttaacccctggcaatattcttttctatgatattatcatttaattaagcagcttatttcagttgtccaagggcttcttacacctttatttaaaaaaaaggtaaagaaggccctttagaatcttttgatctcatcttgaatctgtacaagtttgtggcatcactcaaaacaatcatgttatttttatgccactagtaataaggagattcattctaagacaactgtttttctaccttttaatataaggcatatataaataaaataaataaaaataaatctgtaaaataacattggaaaaaaatctataaggagaacaaatgatgcctgttttatgttttacccttaaaaattctattgaaacatttctgaaaacatcccaatgagtaatttgcattattcagatacagttaacttgattatttaaagcataatttcatgactcatgagtatcacttctctcagtgtggcacactacatagacagtcttcaactttgccagtgttactggggaaaacatatgatagtaagggtgtcatattttcctgtaaggacaatgttgtaagtaggaggctgtgtaattttgcccaatgggtcaatgtcataaattactgatgaactgttgaaatgatgtaatttataattttgaaattatttcaaatagtaaaacacattttaatcaatgcatttaaacagtaaaggttttttattttttatttttattttgagacacggtctcaatctcactctcactcaggctggagtgcagtggtgtgatcaaggctcactgcagcctccacctcctgggcctaggtgatcctcccacctcagccccctgagtagctgggactgtaggcaagtactatcatgcccagctgatttttttttttgctgttgttagagacagggtctcactctgttgccaaggctggtctcaaactcttggccttaagcaatcccatgcctcggccttccaaagtgctgagattacaggtgtgagctaccacacccggcctaaaggtgtttttttctaaatcttgcaaaatcaacattaatgtaatgtacctattgattatttaaagaatgtcaatgtaaccattagatggacatctagcacataattataattgttttggaggtcrcaatttgacttatctaccctttatatgctacttaaatgaaacattttcttagcagtttctttttgtcattggaatgtaggaagactttgagttgatgttttgatggtccaagtatcttaatgtgggaactaggactcttttctcttgttaaaattccctatagcaaggagaatattcagaacttttctattattacttaagagcaataatcactttgagttgatctttgaagacatgaaaataaaagttatttctgtagctccaataaggactttagctccggaggtttggacagcaggtgcctgaactgtctagtcttttggttcactttcttttcattgtttcccatttcagtgacaattttatgacagcctagaaggaaaaaaggagacacaaatgaggaggtctagaatctggtgtagaagcttgaaggctgggggtggcaggtcgggagagcagagcccagagagtggaaaatagcagttatgcacgtgtgtgtgtatagacagataaatagataaacagatagaaagattgctttacctagaaatacctatctcttttgaagctgatgagcaaaccagttgcttgaaaaccattgattcctcataaataatgtgttaaaccatgcatcataaattgacaacttcttctcaatgccaatgagaataagatgaaggatttcagacccacatgggcaacttgagctttgcagatattcaaagatggttaactttgaatattcaaagatggtaaactgacattaaatgaaggagatggtatgagtaacagacttcatagtaggtatgacatgtggtagactatcaatcaataaagttccctttactcttcactgaaaacaggtcaagtctgtattaatatttgtatacaatgttttagctggtcataaaagtcatttgtttctttgcatcgatggagtgcagtagaaacaaaataattttaaagtcaaacagacataggtgtgaatttcagctctatcctcacttgctacgtgaccttgagcaataatcactttgagtcaatctttgaagacatgaaactaaaagttatttcttagttggtgtctctgaacccaaggttcctcttacatgaaatgagatttaaaatttaacaagaatcaggccaagcgcagtggctcatacctataatcccagcacattgagagcctgaggcaggataaccacttgaggccaggagtttgagatcagcctgggcaacatagcaagattccatcgctacaaaaaattttaaaacgttagccgaatgtagcagtacacacttgtcctcccagctacttgggaggctgaagcaggagaaccccttgagcccaggaagttgagactgcaatgagctgtgatcacaccaccgcactccatcctgagtgacagagcaagaccctatcccccgcccccaaaaaaacacaaataaataaataaaataaaacattaacaagagcaactatcgcactgtgaggtcagagaaaatataggttaaggcacccaggtcgtgatgccttttatgatannttgggcaa

SEQ ID NO: 37185 - DNA, 1196 bp, Homo sapiens
caaaatatataatatgggtttttataacctaagcaaatgtggaattgaagtgcaaagattaggcaagatttgaacaaaggaaaagaaaaaaaagaaaagcactccaggtatggaggtcagcatgagaaaagacaataggtaaaagcaaattgattcattgattggcagggtcagaggtttcatgttcgcggaacaggcaagctgtggctcaaaaggaaatttggagcttttgattatcaggctrtgaaatgtgatcttttatcatgtagatttttaaaaaagaaatgaaatggcgtagtgaaggtcattatctaagggggatattgagcctcagtttcttcatctgtaaaatggagctattaagagtacctgacaggtagtctgggcgaaggtgtgtaaagtacgaagcacagtgccaggaatagcgtaagtttgcaacaaatggtagttatctgactgtggactaagagctgaattgtgtagggaagaacttgacaacagggagctgcgtgaaaggcggcagatgtaaaaaaggaaggacagtgggggctcttgttgccatggtgaatattaaggaagagggcgatgctgtatgctgagtgactctcaagtttccagcctaactggcactcatggaagaggtggagaatttaagatagagtgagctgatttttgtggaagggttgcatttggcgctgaacctgcagggacaatggtgatagctaggaggcgagtggagataagaagagctctttaaaatgtcactatgtgtggtcctgagtttggagtcatctatgtagatgtcacatacctccttgctccactccctggaatactcttcccccagacatgcccgtgattggctcttcttatcattcagggattagctctagtgtcacctcttaagaccctcttccctctccatttcatcaccccaatttgtttacttcataacgtcatcactcttcttcccccaggagagtgtgagctgcaagcagacaggagcttggtcctgttgcccacggaatctctagggcccagaaaagtgtctggaacacagtaggactcgcgatgtcctaagtaaatggtactaaacactattaaactcagtaaatagacatacacttgaatacgtgaataaataaagctatgatgtcccatgccagcagagagtgagaaagaagggcaaaaggtca

SEQ ID NO: 37186 - DNA, 1196 bp, Homo sapiens
caaaatatataatatgggtttttataacctaagcaaatgtggaattgaagtgcaaagattaggcaagatttgaacaaaggaaaagaaaaaaaagaaaagcactccaggtatggaggtcagcatgagaaaagacaataggtaaaagcaaattgattcattgattggcagggtcagaggtttcatgttcgcggaacaggcaagctgtggctcaaaaggaaatttggagcttttgattatcaggctgtgaaatgtgatcttttatcatgtagatttttaaaaaagaaatgaaatggcgtagtgaaggtcattatctaagggggatattgagcctcagtttcttcatctgtaaaatggagctattaagagtacctgacaggtagtctgggcgaaggtgtgtaaagtacgaagcacagtgccaggaatagcgtaagtttgcaacaaatggtagttatctgactgtggactaagagctgaattgtgtagggaagaacttgacaacagggagctgcgtgaaaggcggcagatgtaaaaaaggaaggacagtgggggctcttgttgccatggtgaatattaaggaagagggcgatgctgtatgctgagtgactctcaagtttccagcctaactggcactcatggaagaggtggagaatttaagatagagtgagctgatttttgtggaagggttgcatttggcgctgaacctgcagggacaatggtgatagctaggaggcgagtggagataagaagagctctttaaaatgtcactatgtgtggtcctgagtttggagtcatctatgtagatgtcacatacctccttgctccactccctggaatactcttcccccagacatgcccgtgattggctcttcttatcattcagggattagctctagtgtcacctcttaagaccctcttccctctccatttcatcaccccaatttgtttacttcataacrtcatcactcttcttcccccaggagagtgtgagctgcaagcagacaggagcttggtcctgttgcccacggaatctctagggcccagaaaagtgtctggaacacagtaggactcgcgatgtcctaagtaaatggtactaaacactattaaactcagtaaatagacatacacttgaatacgtgaataaataaagctatgatgtcccatgccagcagagagtgagaaagaagggcaaaaggtca

SEQ ID NO: 37187 - DNA, 566 bp, Homo sapiens
atgagtaaaatgggaytttaattactttattaaaggtaataaatatgtctatgcccttgagatcatataaaaatagcttaaaatcattggccatagttatattttccacgagctgagttttaaaatatgtataaagtctgtggtaaattaagagagatttcagcctactaacaattcctaaaccattctaaatgggtcaggaattcaactgggatatctatgatttttttgtttcttcttatttcctgataatgccatatgttttataatttagcatcttattaaggaggtgagagccttaaaacttttaaagtcaattcctgtttttaactattaaaaataatttttagtggagagtttgcttattattattttgacacaatgcctgcattcattttaagatttaggggattactgagctattcttttacatatctccagcatatcatgcagcatctggaacagagaagacattttcatttatgtttattaaataaccaaaacatacatatgaattaacaaataaactatatataaaggcaatagttagggctttcttttagcat

SEQ ID NO: 37188 - DNA, 745 bp, Homo sapiens
tttaaggttgtccatatatctattaaatcaaagatgagaatatcttagtctcagccctctcctagaatcaaaccaccttttgcctctcattctgtttacagctctcaatgctgtctctgctatccaaaggtagtcagtcaaccctgaaactctttctttggaagtaaagtcagcagggaaaatgatttcctcgtgctattgagacccatctcttgccaagaacttttgctgcaaatcaaggaggcaacttcccatgtggtcatttcatgcttcagttctactgaatttttggtgctctttgaaccctaatttgaaattgaaattctatttgcttgtattaggagtggtggaggagaatatctggaaatgcatttgtgtttmaacacgagtcctccaagttgctcaatgctttggtcttggttttatgaagaaaagtaaaatcaactggaatggcctggctgccacagctcaagtcagaatcactttgattcctggccttccagccttgacttgctctaatgtaatcttgtctgctgaagcaaggtgtgtgaccactgtgttattatctgcatttcagctctaaacccctaacggcagggctttctctctccagcatatctctcaatcttattacaccaggctgtgcaagtgaaccctggcctctctacttgccccttctgcagctgttcagcctgtatcttgaatgttctagcaacctcttcgaatgccactgttatgcacattc

SEQ ID NO: 37189 - DNA, 825 bp, Homo sapiens
attgaattatattttattgtaattataattaaatataatgaattacttatttaatatttaacataggtaatatattctattaatataattaattttaattattaatgctattgcataaatagaaaaaactcaaagaatatatcacaagagattaactggaaacaagattacgtgtgatttttatatttttctctttgcgtttctgtttttctacaattttatggattgcatacacaataattatatatgcattcacccatatatacaccttagttacttgaaccaaaatcaaaaacctttacacaactctttattattcttaayttcactttacgagaaaacatctctcgatacataaaaagtccagataaatacatataaatatactctaaaaacaaatattttaatatgtaagtggttttaagttactgacattaatcattaagttaataataaccttgatcctgtgagacagtcagaatatgctcattttcagcatagtacacttgctaaggcagcaaaatggaacagaatacttgaacaagattttcaatgatcatgggcaaaataaaaagacacagttaaccagaatattcaattagtcagaatatattctttaaacatctattagtcaggcaagtttcacttttcagggccttgtatcaaagcttttttttaaattataaaaacccataaacaatgctaattattcacatttacaaattaaacaccaaagtccattcccagattaaaacagaatctaaattgatgtgcttttaccaagactttatgtgatcattatccatcccttcccgctattgctga

SEQ ID NO: 37190 - DNA, 467 bp, Homo sapiens
ttgatttacctcctggttattcctatcgatcatactagcacataagtgactgttaaaaatctgttaaaagctcatctggtttctcttgatccccaactaagggaaattcctcttctttctgctgaccctttggatgataacagctataggtctcttctcttctaccyggggccatgtttctggaatttatttcgtttagattatttttattgtgggtgaatcttcagcaatctgaaaagtttaaaacaactctgatttttgtaacttatccagtttgttttgattgttgagtagaggtgatggtcttttgaaatattctacattctaagcagaaacaaatatttctaggaactgtaactcacaagtattgacatgcagaattttattattttctatagtacattgtgattgagtttaaaaattttcagctgtctttgtttaaattttcttattgctgatttctaatt

SEQ ID NO: 37191 - DNA, 1301 bp, Homo sapiens
aggtgatggataagctaactaccctgatttgattattatacaaamtgtatgcactgaaatgtcaaattgtacctcataaatacgtataattatgatgtgttaattaacaaataaaaataataataataaacaaacttgaagtagctccatagtacttgcctgagaagtgtttgtgtttgttttggtttgttttttaaatacttctgagactttattaagctgtatcatcatcatcatcataatcaccaccattatcaatatttattatgtatagtattatatttataatgtcccatcctacaattttacatttttagtgacctttcctaattctccttcaaatgaatgattatcataattatagtttcaccttagcataagctttattaacctctactactgcaaatgactagaaaaacactttcagtttagatttagccagacaaatgctggccaataatttctggttgcaaagcaacaaaaacttgaaaataatatacttgcataatataagttaggcatgaacaggattcattgaaatatatgtagcctgcaacatctatacagtgccggagattaatgttcttgtttatgacttaaacctcaaggtaggtgaggccagatagtgaccatggtgagaccactatgggaattactggatgctgtaaggattgggtttacaaaagcctattaaatgctgaccttaaaagaatataatgttggaaagaaagagtaatgtgtaatgtacattgacaaatctttagtgtgggtcaggcttaaagatatcttaaaaacagaagcttggctttaatatatttgattgacaagccaaaaagcatacaacatgtaaatagataaaacataatataatagggattttatttctgaaaactgtatttcaccagttctttattttactctaacccaatatctgtgtcaacatgacctacactttctaagtgaactgtaaacatgactggtgagtgatgaaaagagacagacaacaaaaatgtgttctatagcactacctacagattgtctatggctgggtatgaatgacaagtcttctgtttttctgatcctatttttaaaagtagattatatcaaagaagataacagattataacatattatatttgtgctcctataggaccatgctgaagataatcttgtctttatgtaaataagtttgggtctggcataaatactgtcttaatagtgtcaaagaatagagctactcagtaacggctttcctactctctggaaagaaaataatactggtatctcatctgaagtacatg

SEQ ID NO: 37192 - DNA, 967 bp, Homo sapiens
attttatttttccatgccataggatgtaaagccatataattactccacaggggaaatgtgctttgatgtcactctaaatagttggttctttggcttttataaaaaaaaaaaaaaaaaagttaaaataggctacatctctaaataagggttattttctttcaaaatatagaatagcaaagccatgaagagaaataaagtgatgctctgaactgcagtaaactgaacaatgactagaatatctatgaaatattaggtgtccaaagaaaaawaaacaaataaaaaacagcctcacgtatattttttaagaatacagcaaattgaaaagatagatttttttaatgaaagactgttttgcatgtgtttagccattttatattttttattcagccaaaatggtaatgataaaggcaaaaactattcacctggttgtcaaatacatgaaatgaaagatatctcacatattctatatttgatgataaaagaatggatggaacattggtgctcacaataaaagttgaaaataacctggccagcagattatggcatatgaaaaaactagaatatttattttgctagtaaaagactgacaaacagagatgtaaagacctaactaaagcatgagaaactgaaagatcctatgaaggccgtggaaaataatgcagccataagaaaagaaaatttaatccagtaagaacataaggtttatataggactaatctactgtagatttaaacaaactctcaccaacatgaaagtgacatcaattgaaaactagtttcattttactttgaaacagagcttacaaatcctcgatcctataaatttcaatttggattaaaatcgttttgtacacagagttcattacactgaaccagatataatcattatatagataatatttatgaagaaacacttgttgttttattactttcttaagctgatgacattcaatatgctctgagattcc

SEQ ID NO: 37193 - DNA, 967 bp, Homo sapiens
attttatttttccatgccataggatgtaaagccatataattactccacaggggaaatgtgctttgatgtcactctaaatagttggttctttggcttttataaaaaaaaaaaaaaaaaagttaaaataggctacatctctaaataagggttattttctttcaaaatatagaatagcaaagccatgaagagaaataaagtgatgctctgaactgcagtaaactgaacaatgactagaatatctatgaaatattaggtgtccaaagaaaaataaacaaataaaaaacagcctcacgtatattttttaagaatacagcaaattgaaaagatagatttttttaatgaaagactgttttgcatgtgtttagccattttatattttttattcagccaaaatggtaatgataaaggcaaaaactattcacctggttgtcaaatacatgaaatgaaagatatctcacatattctatatttgatgataaaagaatggatggaacattggtgctcacaataaaagttgaaaataacctggccagcagattatggcatatgaaaaaactagaatatttattttgctagtaaaagactgacaaacagagatgtaaagacctaactaaagcatgagaaactgaaagatcctatgaaggccgtggaaaataatgcagccataagaaaagaaaatttaatccagtaagaacataaggtttatataggactaatctactgtagatttaaacaaactctcaccaacatgaaagtgacatcaattgaaaactagtttcattttactttgaaacagagcttacaaatcctcgatcctataaatttcaatttggattaaaatcgttttgtacacagagttcattacactgaacyagatataatcattatatagataatatttatgaagaaacacttgttgttttattactttcttaagctgatgacattcaatatgctctgagattcc

SEQ ID NO: 37194 - DNA, 538 bp, Homo sapiens
tgtaattagtttatgaggattctgtctcaccagactcaggcaagttggtaaccagtagacagtgaacctgcttgacagatatgtcaagtgctgtgtgactgcttttacctccaagttgtttatcactgttttagtagtattctatgatgttatggctacatatggctgtttccatgccattaagcatcaggagggaaatcaactcagctgatatttggtgtaacatctagctatttcaatttttcagagtcttaaggattcaattaaatatgatggtgttgatgagtgatggcaatcatatcaaacattgcttgagtagttaccatgaagaattattgtataaagcacttggcatatagtaacttttaaatccacactatcattctaataatataaggcaggttcttttgttttgttttgtttttttagctgggcatggtggtgcatgcctgtaatcccggctactcaygaggctgaggcatgagaatcgcttgaacccaggaggtggaggttgcagtgagctgagatcgtgccattg

SEQ ID NO: 37195 - DNA, 618 bp, Homo sapiens
ccccyttttttttgagacagggtcttgctttgttgcccagcctagcgtgcagtggtgtgactctagctcactacagcctctgacctcccaggcataagtgatcctcctgcctcagcctcccaccatcaggactgcagggatgcgccactacaatcagtgaatatttttaaaatttatttttgtgcagagaccgggccttactatgtttcccaggctggttttaaactactgggctcaagctatcctcctgccttggcttcccaaagtgctggaactgcaggcaagagccaccatgcccagcttcttctctcttttaactttatttgtacattgccttaatctttcagaacaatgtttaacaatgaacataataatggctgttttatgtaatttttaaattaaattttaattaaaattataatttttaaaaacaattacaaattaaaatgcaacagattggtagttttcaagtataatctgtgagaattttgaggaaattagcatcttgtaaacatatctatgacctcatcatgctcctagttccctgatggagacacatatctatgatagtaaacagccagcggattcaagaaaaagcatcggttgccagtgaatctt

SEQ ID NO: 37196 - DNA, 618 bp, Homo sapiens
cccccttttttttgagacagggtcttgctttgttgcccagcctagcgtgcagtggtgtgactctagctcactacagcctctgacctcccaggcataagtgatcctcctgcctcagcctcccaccatcaggactgcagggatgcgccactacaatcagtgaatatttttaaaatttatttttgtgcagagaccgggccttactatgttkcccaggctggttttaaactactgggctcaagctatcctcctgccttggcttcccaaagtgctggaactgcaggcaagagccaccatgcccagcttcttctctcttttaactttatttgtacattgccttaatctttcagaacaatgtttaacaatgaacataataatggctgttttatgtaatttttaaattaaattttaattaaaattataatttttaaaaacaattacaaattaaaatgcaacagattggtagttttcaagtataatctgtgagaattttgaggaaattagcatcttgtaaacatatctatgacctcatcatgctcctagttccctgatggagacacatatctatgatagtaaacagccagcggattcaagaaaaagcatcggttgccagtgaatctt

SEQ ID NO: 37197 - DNA, 618 bp, Homo sapiens
cccccttttttttgagacagggtcttgctttgttgcccagcctagcgtgcagtggtgtgactctagctcactacagcctctgacctcccaggcataagtgatcctcctgcctcagcctcccaccatcaggactgcagggatgcgccactacaatcagtgaatatttttaaaatttatttttgtgcagagaccgggccttactatgtttcccaggctggttttaaactactgggctcaagctatcctcctgccttggcttcccaaagtgctggaactgcaggcaagagccaccatgcccagcttcttctctcttttaactttatttgtacattgccttaatctttcagaacaatgtttaacaatgaacataataatggctrttttatgtaatttttaaattaaattttaattaaaattataatttttaaaaacaattacaaattaaaatgcaacagattggtagttttcaagtataatctgtgagaattttgaggaaattagcatcttgtaaacatatctatgacctcatcatgctcctagttccctgatggagacacatatctatgatagtaaacagccagcggattcaagaaaaagcatcggttgccagtgaatctt

SEQ ID NO: 37198 - DNA, 618 bp, Homo sapiens
cccccttttttttgagacagggtcttgctttgttgcccagcctagcgtgcagtggtgtgactctagctcactacagcctctgacctcccaggcataagtgatcctcctgcctcagcctcccaccatcaggactgcagggatgcgccactacaatcagtgaatatttttaaaatttatttttgtgcagagaccgggccttactatgtttcccaggctggttttaaactactgggctcaagctatcctcctgccttggcttcccaaagtgctggaactgcaggcaagagccaccatgcccagcttcttctctcttttaactttatttgtacattgccttaatctttcagaacaatgtttaacaatgaacataataatggctgttttatgtaatttttaaattaaattttaattaaaattataatttttaaaaacaattacaaattaaaatgcaacagattggtagttttcaagtataatctgtgagaattttgaggaaattagcatcttgtaaacatatctatgacctcatcatgctcctagttccctgatggagacacatawctatgatagtaaacagccagcggattcaagaaaaagcatcggttgccagtgaatctt

SEQ ID NO: 37199 - DNA, 570 bp, Homo sapiens
gacttcgttggctgctatttggaaagttaaggcaactggaagaaaaactgctaaggcaaaactaattctagattactctttcttacacaggataaacatttgctccagaacagtgaaacatcagatccctgaactactagcagaacagctcactcataatgtttattctgcctgatgttccttaactttggcaagtaagaagagctaattataatctgttctcacatttcacaaagtttcacagatatgagttattattagcaggaataactattggaaaaacayaagactcaaagtaatagaaataaatccatctatgcaatagttccctataataattccaacaaataacttcatttagggcaagattaaaacaacaattaacccaaaatatgtggttctaataattatatgtatcatgactttatacttttacttgataaagtaacatcattattttttcccaattacaaacaacacagttttaagaagacatttaaaaatatggaagaaaaataccatgaagaaaagaaaaataattcatatttctatttttcagagacagatatt

SEQ ID NO: 37200 - DNA, 526 bp, Homo sapiens
tttctctttgacattcccctctatagtagatttgagtttacttcaaatgtcacataataaattacttaacctttcttgccaaatcttcaaataaacccaatgaattacatcagatttatttcacggtattgcataatccctaagacattgctgtggatatctgtataccccagtctgaggagtactgatttaatttatgattttctaaaagcatctgcctgaatcaataatgaagtcgtgctgtagaagctatgccttaagactctggattttggaggagagaatggggcttgggagaggtacktttattacacaaaatgacaaagttcaaggtttaataccaaaggtcttagtgttttgttttgtttttaaatcgtccttgacaggaaagtctgttctataacacactgggaaagatgaacctttatactttagtgaatgttaggttgttgttcacacaatcagttttcattgttagtatgttattttgaaaaacagtaatttcttaggctacatttcctaggcc

SEQ ID NO: 37201 - DNA, 630 bp, Homo sapiens
gctgatttgtatttagctcttcaacgttraccccacattatttgaaagagaccaagtaattagaaataggagtaatcagaaataaagcaccaagaaaatgtctcttcatagcaaaatgacccatgtagcatttaatgttagttagcccgacacttagaggcttttctctcaatgaacagtatcactgcacagaccaccttcagaatgccttcaaaacaccttccctcaaattgaaagaaaatttatactgcaagacagcaaacaggaaaaaaaatgaatttctaagctgaattactgttcttttagtaggttcttcaaaagttgtaaatatttagaaaactcatttctggttctgatggctaactgaaaacacacacttacctatactctccaaaaatgttccactggaaagacaggaaaaacactgacataaatcaacagaagcaatggaaaatcaggatcacaggtactagcttacagaaatagttaggactttttggaggttttaaatcaaatggaaactttttgatgaaaatacataaacagaactgaggcatttgcaaacacctacaggtaaaagaaaagatcagtaccaatgacaaaaatgtgaactgttctagccaaattctg

SEQ ID NO: 37202 - DNA, 602 bp, Homo sapiens
attgagatatttcttccagcctggtacctaacaacatttcaagtacttgaaaaatattctaacaacatcgcaggtacttggaaaattactgcacacagatggaaacagtaatatatgtattaytgctttcttaaatagccatagttattttctaatggggtgtgtgtcttttgggccctacacaaattcccaaaccttgaaatcagactgaacatcaccttctttcctattctacattttccccagtaaatgtcacttttgtgacagcaactactaaaaccagcttagcaaagatatgacttcgtagaaagaaatgttatacaatctaatgtttgcattttagggctatgtcatgaaacacaatgtaaagaaatttaattcactgggaatgataatccactatttcgctgcagcatatttattttggcacaggacaatcaatgtcatgtaaggcccaatatcaaagctaaccattccaattattaattaagggactctgggctgagttatcaaagtatatcgccacttaacatcttcaaatttgcatactcaattttggtcttacaaaattgtgcagtctaacacaaaagtcagaaaactga

SEQ ID NO: 37203 - DNA, 933 bp, Homo sapiens
caagcaatcttcccacctcaacttcctgaatagctggaactacaggtgcataccatcatgtcatgctaatgtttttattgttatctttgtagagacaaggcctcattatacctcccaggctggtctcaagctcctgggctcaagcaaatcttccacttctgcctcccaaaatgttgagataagcattgtgcaccaccacacccagccctaatcaatttctttaaatcaatctcaatgttgcccaggcacggtggctcacacctgtaatctcagccctttgcaaggccaaggtgggtggattgcttgagttcaggagttggagaccagcctgggcaacataatgaggacacatctctacacaaaaaataccaaaaggagtcaggcatgatggtgtgtgcctgtagtcccagctgcttgggaagctgatgtgggaggatcacttgagcctgagaggtggatacagcagtgagccaagatcatgccactacactgcagcatggacaacagagctagaccctgcctccccaaaaatttcaatttaaaatgtgagaacaaagagagatacaaacaaaaaacaagcctaattagtcaatgaaatatgagcttaagccaagaaagaaaacgaaaarcatgaagtacaataaagtacatggggaaatagatctataacagagccttcggtctttcataactctgataatactaattaatatttatgctgcaattagttttttgtaagtacttctgtgatagtgtttcttactataagacattcaattagctaaatatggtcatctaccattacctgaaagaacattattataacagagagagaaaactggaactttccatcaactttccacccagaaaaagaattggtcaccagaattctaaagagtaatgtatggcagacacatgaaaaaatgctcatca

SEQ ID NO: 37204 - DNA, 892 bp, Homo sapiens
cacctccccatatccaccacccactgtttccaagcagaagcctgaggcagagacagatccccttggaaaacctctactagggcagtacagaaggaaaatatgggcttggagyccccacgccaccatcctccagacccaagagtcatagacccaccaacagctcacacccccggtatggaatagctacaggcactcaacaccagcccagcccatgagggcagcagcaggtgctaaaccctgcaaagccacaggtgcactgccttagtagaggttttccatgagcctctgcctctgtggcaggctactcccttcctgctacaccccaccctacagccagcctactcctcctcaccttacccatctgtttttacttccaaccccacccctctcccatccatgaataaatcacttcccaccaggctccacctgcaacattcgggattacaattacatgtgagtttaggtagggacacacagctaaaccatattattctgaccctgatcccccaaatatcatatccttctcacagagtaaaatacaatcatgccttttcaaaagttgccaaaagtctttagtcatttcagcattaactcgaatgtaaaaagttccacgtctcacctgagaaaaggctgcagtcccttttgcctataagtcccggaatttaaaagggagttcttttctttcaaggtacaatgatggtacaggcattgggtaagttttctcaatccaaagggtagaggtttgccaggaaaataacacaaatgggatcgcagggccaatgcaagtccaaaacccaggaggccagtatccattaaatctcacagctccaaaactatcacgagaatcaccatcatgaggaaaggattaaggagatggtgtttaactatttgt

SEQ ID NO: 37205 - DNA, 272 bp, Homo sapiens
cctacgtcctgcgtctttttggggaatcctcgacaggtgctggaaaattgtgttattgtaattatttaccggtatctctctttcatggttctccatcagttgtaagcatctattggtttatcccaggtcactaagtatattttaattagstacacctgtttttctttatacacctgtttctggagtatagggtcgcatactcataaacccagtgtaactcagaaacgcatctaatattccaatagacccatcataacgttgaaaaatcataa

SEQ ID NO: 37206 - DNA, 587 bp, Homo sapiens
tattttatgtatttattaagctattgttcattatgtgtaatatataattaatgcccttaataagtgtatgtttacacaagttatgttttcctgtgaaatctagtcccagaagtggagttgttgagttaaagggatgtcaggttatttgaaattttgatacacagcactaagttacccttcagaaataatttaccaatttcatataccaacagtgtatgagaatgcctttttcctcacatttgccaatggtagtaattactttttcaataccagcatgactttacaaaatatatcttattttatgttaatttgcacttttctgattaccaggcagggctaaatatctctggtraaaatataaaacttgttaatcataaggaatattagtccaattttgaattagtttatagcacaatgacaattgtctgctgcgaaatactgctataggtggccaggcacggtggctcactcctgtaaacccagcactttgggaggccgagatgggcagaacgcctgaggtcaggagttcgagaccagcctggataacatggtgaaacctcatttctactaaaaatacaaaaagttag

SEQ ID NO: 37207 - DNA, 587 bp, Homo sapiens
tattttatgtatttattaagctattgttcattatgtgtaatatataattaatgcccttaataagtgtatgtttacacaagttatgttttcctgtgaaatctagtcccagaagtggagttgttgagttaaagggatgtcaggttatttgaaattttgatacacagcactaagttacccttcagaaataatttaccaatttcatataccaacagtgtatgagaatgcctttttcctcacatttgccaatggtagtaattactttttcaataccagcatgactttacaaaatatatcttattttatgttaatttgcacttttctgattaccaggcagggctaaatatctctggtgaaaatataaaacttgttaatcataaggaatattagtccaattttgaattagtttatagcacaatgacaattgtctgctgcgaaatactgctataggtggmcaggcacggtggctcactcctgtaaacccagcactttgggaggccgagatgggcagaacgcctgaggtcaggagttcgagaccagcctggataacatggtgaaacctcatttctactaaaaatacaaaaagttag

SEQ ID NO: 37208 - DNA, 587 bp, Homo sapiens
tattttatgtatttattaagctattgttcattatgtgtaatatataattaatgcccttaataagtgtatgtttacacaagttatgttttcctgtgaaatctagtcccagaagtggagttgttgagttaaagggatgtcaggttatttgaaattttgatacacagcactaagttacccttcagaaataatttaccaatttcatataccaacagtgtatgagaatgcctttttcctcacatttgccaatggtagtaattactttttcaataccagcatgactttacaaaatatatcttattttatgttaatttgcacttttctgattaccaggcagggctaaatatctctggtgaaaatataaaacttgttaatcataaggaatattagtccaattttgaattagtttatagcacaatgacaattgtctgctgcgaaatactgctataggtggccaggcacggtggctcactcctgtaaacccagcactttgggaggccgagatgggcagaacgcctgaggtcaggagttcgagaccagcctggataacatggtgaaacctcatttctactaaaaatacaaaaarttag

SEQ ID NO: 37209 - DNA, 514 bp, Homo sapiens
aattagtcagatatattaaaagtgtaagttgagcaaagcaatttaacgcctcagagggtggaaaaaggcctcatctgcttttactttgaagaagaaaatctctagattttgtctatctttaggacacaatgtacagaactcaactttctactaaagaatcaaaggataaatttttatctaagaaattatgcttcttacatgataaaaatcacacatgccaaaacttatgatactttattaaacaacataatgtaaggactgattcaacagaaatattggagtggtgattttttaaaatatgtggaagtatatatttgttttcaaaatattggaaataaccatgatggaactataagttcaaacagtttgagctaagcagatgaacttrcatgcatgaaaatacattaaacagactcatttggctgggaatattcatagcaactctcaaggctagacgtgtttttgtggctcgtctcagtcattgctttcctcccattgtattcccaatctatca

SEQ ID NO: 37210 - DNA, 514 bp, Homo sapiens
aattagtcagatatattaaaagtgtaagttgagcaaagcaatttaacgcctcagagggtggaaaaaggcctcatctgcttttactttgaagaagaaaatctctagattttgtctatctttaggacacaatgtacagaactcaactttctactaaagaatcaaaggataaatttttatctaagaaattatgcttcttacatgataaaaatcacacatgccaaaacttatgatactttattaaacaacataatgtaaggactgattcaacagaaatattggagtggtgattttttaaaatatgtggaagtatatatttgttttcaaaatattggaaataaccatgatggaactataagttcaaacagtttgagctaagcagatgaacttgcatgcatgaaaatacattaaacagactcatttggctgggaatattcatwgcaactctcaaggctagacgtgtttttgtggctcgtctcagtcattgctttcctcccattgtattcccaatctatca

SEQ ID NO: 37211 - DNA, 529 bp, Homo sapiens
tcatattgactgcctccagtagggcttccagaagagagaagccatcaagcctgtccagatctcctaagatgtgatgttagcccaagctcagagattgcagggcagaagctccgtgtgctgcacacagcacttctatcggggaatgttgtaatatctaacagagtgaaatgatagggtataactttcttgagctaaagtaaaattcaagacttcctatgggaagaattattcaagtaattagaatcaaataaatagaaacttgaccaaatatatattcctgtgaaattttaggtatttactaaataaatcctaaaagtattaccccagaggaagrgagagggacacaaaaaatgtggcaaggcaatggagaaacaaacacagagtttaaagggaagaggttttaatcaaataatgagtaactccaaggcaatgattcaaatttttaaataatcaaaattttaaaaaattcataaaatagatatgataaaaaacagaataattgtttcaatagtaatccccaatatgtcta

SEQ ID NO: 37212 - DNA, 1220 bp, Homo sapiens
tgattaaaaaaacatataatattttgttattacataggttcctaagtctctattcactatttttttacagcctattttctctctgttgtgctgattggcttagttttatggatctgttttcaagttcactgattctattctctgtcatcttcactccactagataattttaactgattcatctcagcatttgtgtcagataattggcttgtttcatggcagttgtgatttttttggttcttggcatgatggatgcttttctatgtatactcaacatatttttctgtagaagacattgggcccaatttaaatatggtattttaggaagcagtcatcctgtttaattttagcagacaggctgtggcctacttytgtacgctattgctctgtgctgagcaggtatattcagacctacccccaaaggctgagggagctgaaaggttgaaggaagaggctgccaaacttggttctcagaaagaaacatttgatagtgacttacaaacataaaagatgtctcaggcagttgtgatataattcatccctacacccacacccccccctcaattccaaaaatgtcttttatataataagttctttgctaaaacatgtgtagctagtcatgcctcggactttcttgaaaaactcatgaccattagagaggttagatgagcatctttatgaggtattatctattgtataggcattgcttctttaagaggggttatctatgctatgagaacgtcttgttaggcatgagtcaaccatcagtcattatggcgattttacctcaagatgacatcattcttgccatgaaacaggctgtcttcccacagttatggttccaagacagtttaacttacagagttgttgtgatgttattttgctctccttggtttatctgacaatgctaggtttgtgactaacctctactggttttgcttatgggacagaaggggttcccacaggctgggtctcatcagatgtagatgtcactcagtgttggagggtaatctgaggcctgatgtctaagagactttctaggattggctgcttgttttcatcctgggtctgtcttgctgcctcagcccatccaccgaactgtttctgggtgtgagaggaaattcttagggccacatttgctgggctgagccaattgctgtggctgagcatctctcacttggtctattcacctatttctgtgtctctcggcagaaaagggga

SEQ ID NO: 37213 - DNA, 1220 bp, Homo sapiens
tgattaaaaaaacatataatattttgttattacataggttcctaagtctctattcactatttttttacagcctattttctctctgttgtgctgattggcttagttttatggatctgttttcaagttcactgattctattctctgtcatcttcactccactagataattttaactgattcatctcagcatttgtgtcagataattggcttgtttcatggcagttgtgatttttttggttcttggcatgatggatgcttttctatgtatactcaacatatttttctgtagaagacattgggcccaatttaaatatggtattttaggaagcagtcatcctgtttaattttagcagacaggctgtggcctacttctgtacgctattgctctgtgctgagcaggtatattcagacctacccccaaaggctgagggagctgaaaggttgaaggaagaggctgccaaacttggttctcagaaagaaacatttgatagtgacttacaaacataaaagatgtctcaggcagttgtgatataattcatccctacacccacacccccccctcaattccaaaaatgtcttttatataataagttctttgctaaaacatgtgtagctagtcatgcctcggactttcttgaaaaactcatgaccattagagaggttagatgagcatctttatgaggtattatctattgtataggcattgcttctttaagaggggttatctatgctatgagaacgtcttgttaggcatgagtcaaccatcagtcattatggcgattttacctcaagatgacatcattcttgccatgaaacaggctgtcttcccacagttatggttccaagacagtttaacttacagagttgttgtgatgttattttgctctccttggtttatctgacaatgctaggtttgtgactaacctctrctggttttgcttatgggacagaaggggttcccacaggctgggtctcatcagatgtagatgtcactcagtgttggagggtaatctgaggcctgatgtctaagagactttctaggattggctgcttgttttcatcctgggtctgtcttgctgcctcagcccatccaccgaactgtttctgggtgtgagaggaaattcttagggccacatttgctgggctgagccaattgctgtggctgagcatctctcacttggtctattcacctatttctgtgtctctcggcagaaaagggga

SEQ ID NO: 37214 - DNA, 602 bp, Homo sapiens
tcaggtaggaaacgtttgaaagaatgcaccaaggtttttgttttgtttagctttgttatttaatgtaactgtgaatcacagtgaaatagggaaacataaaaattttgtggaataaagggatatcaggagatgttaggaaagagaatcactacagaaactttattagtckgaaaggtaacctgtgatttggtagactttgattaattgttcatataaatcccaagtgaaatgtagacttgagacttgaatgtgaaatcattgtgtcatggatacataatgtgattgacattttttatttgggggaaataagattcatatagtttttttgtttttttgtttttttaaaaaaacaaagagggaatgattttctgtgtcatatgttgataggtcagacaaaatgaagaactaagagttgaccactgggtttagcattattggtccattggtggcctttgacaaaactgtttctttggaacagtgagggtgaaaatctcactggactggcttcaagagataatgagaggagatgattggaaacaacgactacagtcaactctttgcacaggtggagggaatgtgagttgaaaatttgtttttgtttg

SEQ ID NO: 37215 - DNA, 1238 bp, Homo sapiens
atatccatcactttggcctatattgtcttggccagagctcagtctcatggccacacatcctgcaagaggggctaggaaaggtagtccaagtccaagacaaaaggagaacaggttttggcatgcacrtagcagtggctgccttataggccaggactctggactgagggaataatggccagcagagaattataatggctcattagtgggggtggcagtgggcagcctgccctggtagaagaggtgctgtcaggcattagctagtatgattcaaaagatatacaaataccttcattaatgcagtaagcatttactgcatgtccactatgtgccaggcagtaggccagacactggggccttgggaggagaacaaagctccccttggagctctgggtgagccattctactcctaacccttgtgctggaggcctagaggccagagagcctgggaaaggaagagggaagtggctaggtctttttaacttggctggtttgaatgcctcctacaacccaagaaatgcagcccatataggtcagcctggttcccactattagcaagcatccctctgcggtatattgaatgaaatgtaatatgggggaagagaaggcaacacatagtggacattctctttatagcttgctccctggttgttttcataggacgttgttttccttctgtgaggcatctaaggaaggtggtgggtctaggatatagggttatgtgtttgtgtctggctgctggtaaagttagggaattggcaccgtgtctcagaaccccctcagcagagctgatggcagcacagggaggacccagtgctctacatccttgcttttttcgtattattggctattcatgttagaagctgttgctgttgttaatttcctagtgggcctggctgaaattgaagcggcgggttgagctctgggcagacacagcatttagtcaacagccattgggcatccgctctctgcccgatctctgtccaagtccaccggcactcctctcactggagcggccagtgatgcgggcttggtaactgatatgtaggggaatggcagtagcctccaggaaggtcttcaaaatgagctaagaaaataggcgtagaggacatatttaatacagattggaatagaccatggagggaaggtttttattcttttttggagatttttgggtagaaaatcatatcactagaagcaagaatgtagcctgggtaatatctggaacactttcaaactgc

SEQ ID NO: 37216 - DNA, 562 bp, Homo sapiens
ctgacagtaatggaaattcagagaaaacatttctattgctatgttattgctacttaagtctcgctccggactttcttcagtgaagggcatttaagctattcatgtattctagccaagggtaaagttaaggtgattgcagtgagaaaatagaacattactacctaaatattttttaaaggttttcatgtgttatttgattttttagttttcacaagttattaatttaaaakattctagagttaaggcaaatcagatattgtctatactctaaatattcatacacacaattttactgaagaacacagcaaattaattcaacattgatgcatgatatctaatctgcttgctcttttactttcaatgtccttatgtgcctaaaaaaaaccaacgagggtttataagccaaagaatgcacaaaaatatttattttgagctgtagaaaaatattctaaacaaattacggaattaattgcatttatctgttttaatgttgagatcaacaaaataaaatttaattaaattttagaaatatatcaaatatggaaaagaaatgattgtagaa

SEQ ID NO: 37217 - DNA, 562 bp, Homo sapiens
ctgacagtaatggaaattcagagaaaacatttctattgctatgttattgctacttaagtctcgctccggactttcttcagtgaagggcatttaagctattcatgtattctagccaagggtaaagttaaggtgattgcagtgagaaaatagaacattactacctaaatattttttaaaggttttcatgtgttatttgattttttagttttcacaagttattaatttaaaatattctagagttaaggcaaatcagatattgtctatactctaratattcatacacacaattttactgaagaacacagcaaattaattcaacattgatgcatgatatctaatctgcttgctcttttactttcaatgtccttatgtgcctaaaaaaaaccaacgagggtttataagccaaagaatgcacaaaaatatttattttgagctgtagaaaaatattctaaacaaattacggaattaattgcatttatctgttttaatgttgagatcaacaaaataaaatttaattaaattttagaaatatatcaaatatggaaaagaaatgattgtagaa

SEQ ID NO: 37218 - DNA, 562 bp, Homo sapiens
ctgacagtaatggaaattcagagaaaacatttctattgctatgttattgctacttaagtctcgctccggactttcttcagtgaagggcatttaagctattcatgtattctagccaagggtaaagttaaggtgattgcagtgagaaaatagaacattactacctaaatattttttaaaggttttcatgtgttatttgattttttagttttcacaagttattaatttaaaatattctagagttaaggcaaatcagatattgtctatactctaaatattcatacacacaattttactgaagaacacagcaaattaattcaacattgatgcatgatatctaatctgcttgctcttttactttcaatgtccttatgtgcctaaaaaaaaccaacgagggtttataagccaaagaatgcacaaaaatatttattttgagctgtagaaaaatattctaaacaaattacggaattaattgcatttatctgttttaatgttgagatcaacaaaatraaatttaattaaattttagaaatatatcaaatatggaaaagaaatgattgtagaa

SEQ ID NO: 37219 - DNA, 642 bp, Homo sapiens
ctctatgcataataagctattggaaaaatgcgcagaacttacagtttagtttatcatatataccacacctaagaaatggtcttcaatattcaagtcatatattcaattagagaaatgtatgtgcaaatatatagtattatactacataatggtatgttacttagcagtaatttttttataaactacagccaatagkttataaagatttataaagcttaagtgcaataaatatttttgaactgaactattaatattctataaaacattttcagaatataataaaaattacatttttgtaaaggctatttttgaacaataagatgtgttctacacatacttgcatttttgctttcttgacctaaaccagaaggttaatataagcaacacatttcaactctaaagaagatttcaaataaaaaaaaataccgttacataaaactgcaagatattcattaataaactgtcttttgttgttcatcagtttcatctgtaagtttgacaagttactacaaatgatagatttgagtggcacaggaccgttatgttttcaaaagtctctttcagaaagatttctacatagtaaattgtcactagagacttgtgtttgaattcttcatacttaatgatccatggtgctgcatt

SEQ ID NO: 37220 - DNA, 642 bp, Homo sapiens
ctctatgcataataagctattggaaaaatgcgcagaacttacagtttagtttatcatatataccacacctaagaaatggtcttcaatattcaagtcatatattcaattagagaaatgtatgtgcaaatatatagtattatactacataatggtatgttacttagcagtaatttttttataaactacagccaatagtytataaagatttataaagcttaagtgcaataaatatttttgaactgaactattaatattctataaaacattttcagaatataataaaaattacatttttgtaaaggctatttttgaacaataagatgtgttctacacatacttgcatttttgctttcttgacctaaaccagaaggttaatataagcaacacatttcaactctaaagaagatttcaaataaaaaaaaataccgttacataaaactgcaagatattcattaataaactgtcttttgttgttcatcagtttcatctgtaagtttgacaagttactacaaatgatagatttgagtggcacaggaccgttatgttttcaaaagtctctttcagaaagatttctacatagtaaattgtcactagagacttgtgtttgaattcttcatacttaatgatccatggtgctgcatt

SEQ ID NO: 37221 - DNA, 642 bp, Homo sapiens
ctctatgcataataagctattggaaaaatgcgcagaacttacagtttagtttatcatatataccacacctaagaaatggtcttcaatattcaagtcatatattcaattagagaaatgtatgtgcaaatatatagtattatactacataatggtatgttacttagcagtaatttttttataaactacagccaatagttwataaagatttataaagcttaagtgcaataaatatttttgaactgaactattaatattctataaaacattttcagaatataataaaaattacatttttgtaaaggctatttttgaacaataagatgtgttctacacatacttgcatttttgctttcttgacctaaaccagaaggttaatataagcaacacatttcaactctaaagaagatttcaaataaaaaaaaataccgttacataaaactgcaagatattcattaataaactgtcttttgttgttcatcagtttcatctgtaagtttgacaagttactacaaatgatagatttgagtggcacaggaccgttatgttttcaaaagtctctttcagaaagatttctacatagtaaattgtcactagagacttgtgtttgaattcttcatacttaatgatccatggtgctgcatt

SEQ ID NO: 37222 - DNA, 642 bp, Homo sapiens
ctctatgcataataagctattggaaaaatgcgcagaacttacagtttagtttatcatatataccacacctaagaaatggtcttcaatattcaagtcatatattcaattagagaaatgtatgtgcaaatatatagtattatactacataatggtatgttacttagcagtaatttttttataaactacagccaatagtttayaaagatttataaagcttaagtgcaataaatatttttgaactgaactattaatattctataaaacattttcagaatataataaaaattacatttttgtaaaggctatttttgaacaataagatgtgttctacacatacttgcatttttgctttcttgacctaaaccagaaggttaatataagcaacacatttcaactctaaagaagatttcaaataaaaaaaaataccgttacataaaactgcaagatattcattaataaactgtcttttgttgttcatcagtttcatctgtaagtttgacaagttactacaaatgatagatttgagtggcacaggaccgttatgttttcaaaagtctctttcagaaagatttctacatagtaaattgtcactagagacttgtgtttgaattcttcatacttaatgatccatggtgctgcatt

SEQ ID NO: 37223 - DNA, 642 bp, Homo sapiens
ctctatgcataataagctattggaaaaatgcgcagaacttacagtttagtttatcatatataccacacctaagaaatggtcttcaatattcaagtcatatattcaattagagaaatgtatgtgcaaatatatagtattatactacataatggtatgttacttagcagtaatttttttataaactacagccaatagtttatamagatttataaagcttaagtgcaataaatatttttgaactgaactattaatattctataaaacattttcagaatataataaaaattacatttttgtaaaggctatttttgaacaataagatgtgttctacacatacttgcatttttgctttcttgacctaaaccagaaggttaatataagcaacacatttcaactctaaagaagatttcaaataaaaaaaaataccgttacataaaactgcaagatattcattaataaactgtcttttgttgttcatcagtttcatctgtaagtttgacaagttactacaaatgatagatttgagtggcacaggaccgttatgttttcaaaagtctctttcagaaagatttctacatagtaaattgtcactagagacttgtgtttgaattcttcatacttaatgatccatggtgctgcatt

SEQ ID NO: 37224 - DNA, 659 bp, Homo sapiens
gcttcccaaagtgttgggattacaggtgtgagccactgtgcccagcccagcaaaatatttataattgaagctagttgacagactggtgttttaaatacgtatatgtttraaatagtaaaaataaaagttaaaaaaatagcctttcctcattctgcatctgaatttttactagtataagtaatctctatgttgagaatgtattgtttattaaagtagtatatgtacatgtaggaaaatggaaaaatacagaaaaacgtgaagaagagaataaaaaattgctcataaggttatcaaacaggaataacctttttttttttttttttttttgagacagagtctcactctgtagcccaggctggagtgcagtggcgctatcttggctcactgcaacctgtgactccttggtttaagctattctcctgccacagcctcccaagtagctgggattacaggcacgtgacaccatgcccagcgaatttttgtatttttagtagagacggggtttcaccatcttggccaggttggtctcaatctcctgaccttgtgatctgcctacctcagccttccaaagtgctgggattacaggtgtgagccaccgcaccctgcccaggaatatcctttttatgatttccttttggtctttctgttttatgtgagtg

SEQ ID NO: 37225 - DNA, 659 bp, Homo sapiens
gcttcccaaagtgttgggattacaggtgtgagccactgtgcccagcccagcaaaatatttataattgaagctagttgacagactggtgttttaaatacgtatatgtttgaaatagtaaaaataaaagttaaaaaaatagcctttcctcattctgcatctgaatttttactagtataagtaatctctatgttgagaatgtattgtttattaaagtagtatatgtacatgtaggaaaatggaaaaatacagaaaaacgtgaagaagagaataaaaaattgctcataaggttatcaaacaggaataacctttttttttttttttttttttgagacagagtctcactctgtagcccaggctggagtgcagtggcgctatcttggctcactgcaacctgtgactccttggtttaagctattctcctgccacagcctcccaagtagctgggattacaggcacgtgacaccatgcccagckaatttttgtatttttagtagagacggggtttcaccatcttggccaggttggtctcaatctcctgaccttgtgatctgcctacctcagccttccaaagtgctgggattacaggtgtgagccaccgcaccctgcccaggaatatcctttttatgatttccttttggtctttctgttttatgtgagtg

SEQ ID NO: 37226 - DNA, 659 bp, Homo sapiens
gcttcccaaagtgttgggattacaggtgtgagccactgtgcccagcccagcaaaatatttataattgaagctagttgacagactggtgttttaaatacgtatatgtttgaaatagtaaaaataaaagttaaaaaaatagcctttcctcattctgcatctgaatttttactagtataagtaatctctatgttgagaatgtattgtttattaaagtagtatatgtacatgtaggaaaatggaaaaatacagaaaaacgtgaagaagagaataaaaaattgctcataaggttatcaaacaggaataacctttttttttttttttttttttgagacagagtctcactctgtagcccaggctggagtgcagtggcgctatcttggctcactgcaacctgtgactccttggtttaagctattctcctgccacagcctcccaagtagctgggattacaggcacgtgacaccatgcccagcgaatttttgtatttttagtagagacggggtttcaccatcttggccaggttggtctcratctcctgaccttgtgatctgcctacctcagccttccaaagtgctgggattacaggtgtgagccaccgcaccctgcccaggaatatcctttttatgatttccttttggtctttctgttttatgtgagtg

SEQ ID NO: 37227 - DNA, 454 bp, Homo sapiens
tgttgaaatcttaatatttgatttatatatgtacaatatatttaagttttaaagcataatgattttgaatatcccaaactcaccatgcagtcaacaactacaacattaacagcactgctcagggaccaaccactcttttktagtcctttcctgctatgccacccccatcactctggggtggcctgaattttgtgtttgatttcttgccttgtaaaaaatagttttctcatgcatgcacgtattttaacacaatatgtttagtttggcttatttttgaccttattaaaaatagtatcactttgtgtagttttctgggtctttgatatttttcacctaacagtatttcccagttgatccatattattttgtaagctattgtaatgttcattcattttctttgctgtataatattctactttgtgaatttacaactttttttttattctgctgccag

SEQ ID NO: 37228 - DNA, 1732 bp, Homo sapiens
cattggattcacaccaacaattgttaaagtaaaatttatttttcctgtgttttagatgaagagatttaggcaggttatgtaacacacccaaggtaatatagtcaaataattgagccagaatttgagcccaagtctctttctgactctaggcttagagctttagggctatttcacaaaagggctgttcctaggtcaggcatgacaacttctatattaccttygtaaaagaagcaatataatctaccactattaaattttgcaggttaattttatattatgtttaaatacagaaaactttatttaaaactcagttgaatttctcttgagaaattggccatgtagtaaattatatttaatagaagagtttgtgtacttcccagggagcagagtattggcctgatcaaagcacctttcagcctttgtctaacagcatgtgggtaggctacattttttttactctcagagaaagggggtgggcaggggtgtgatatgggtttttgtctctgggagttctgttgcatgatttgacctcccaaattgttttgtggggcatatccaactttgggttgaaactaaaatgggttcttggtaatcccagattgaaaatatgtctcagcagtaacattgtttatctttaggtttaggtaaatacagacatttgccatgtcttcttggtagcactgtaagaatgagtagggctgtgaaaaatgcacagggcattcattatgaagactggctggttaaaactgatacactaaagaaattgcattcttttccacaagctgagtcatacagctgaaattgtggaatcatctgagccagcagctgtaatatgatacttaatctccataagtgacagatatctaagataacacgaacacccagacgacaactcaggcaaccccagcacagtgttttggtatgagaacaggagaaatgttagtagagtgaacatttttccacagagaactcaaatatggtaacattctcatagctttgataatccccaataaactgtggttactaaaatgcatgacaaaaagaacttctatctataaagaacttctttatacatttccaatacttgggttatgatcaaggagaaaaaagtttatcagttaattaagagttaggtagctagtttgcccacagattaatttgtatgaggtaaaggaaatctcacctaactgggaaaaagcaagcttaccctcaaggtatgcttatcccaaccccaccctgccaagtgcattccttattcctcaggtgtgcctgtttatcccaaggacctagccacacctacatcttgttctggccccacaccaaggaacatataaaagttccctctctggccgggcgcggtggctcacgcctgtaattcccagcactttgggaggctgaggcgggcggatcacgaggtcaggagatcaagaccaccctggctaacacggtgaaaccccgtctctactaaaaaatacaaaaaattagccaggtgtggtggcgggcccctgtagtcccaggtactcgggaagctgaggcaggagaatggcgtgaaccctggaggaggagcttgcagtgagccgagatcgtgccactgcactccagcgagggcaacagagcgagactccgtctcaaaaaaaaaaaaaaaaaaaagtccctctctttatatctcagggtatcttggagtcactactgatccttgacctccctcctttctctgaccatgtctagacaa

SEQ ID NO: 37229 - DNA, 1732 bp, Homo sapiens
cattggattcacaccaacaattgttaaagtaaaatttatttttcctgtgttttagatgaagagatttaggcaggttatgtaacacacccaaggtaatatagtcaaataattgagccagaatttgagcccaagtctctttctgactctaggcttagagctttagggctatttcacaaaagggctgttcctaggtcaggcatgacaacttctatattaccttcgtaaaagaagcaatataatctaccactattaaattttgcaggttaattttatattatgtttaaatacagaaaactttatttaaaactcagttgaatttctcttgagaaattggccatgtagtaaattatatttaatagaagagtttgtgtacttcccagggagcagagtattggcctgatcaaagcacctttcagcctttgtctaacagcatgtgggtaggctacattttttttactctcagagaaagggggtgggcaggggtgtgatatgggtttttgtctctgggagttctgttgcatgatttgacctcccaaattgttttgtggggcatatccaactttgggttgaaactaaaatgggttcttggtaatcccagattgaaaatatgtctcagcagtaacattgtttatctttaggtttaggtaaatacagacatttgccatgtcttcttggtagcactgtaagaatgagtagggctgtgaaaaatgcacagggcattcattatgaagactggctggttaaaactgatacactaaagaaattgcattcttttccacaagctgagtcatacagctgaaattgtggaatcatctgagccagcagctgtaatatgatacttaatctccataagtgacagatatctaagataacacgaacacccagacgacaactcaggcaaccccagcacagtgttttggtatgagaacaggagaaatgttagtagagtgaacatttttccacagagaactcaaatatggtaacattctcatagctttgataatccccaataaactgtggttactaaaatgcatgacaaaaagaacttctatctataaagaacttctttatacatttccaatacttgggttatgatcaaggagaaaaaagtttatcagttaattaagagttaggtagctagtttgcccacagattaatttgtatgaggtaaaggaaatctcacctaactgggaaaaagcaagcttaccctcaaggtatgcttatcccaaccccaccctgccaagtgcattccttattcctcaggtgtgcctgtttatcccaaggacctagccacacctacatcttgttctggccccacaccaaggaacatataaaagttccctctctggccgggcgcggtggctcacgcctgtaattcccagcactttgggaggctgaggcgggcggatcacgaggtcaggagatcaagaccaccctggctaacacggtgaaaccccgtctctactaaaaaatacaaaaaattagccaggtgtggtggcgggcccctgyagtcccaggtactcgggaagctgaggcaggagaatggcgtgaaccctggaggaggagcttgcagtgagccgagatcgtgccactgcactccagcgagggcaacagagcgagactccgtctcaaaaaaaaaaaaaaaaaaaagtccctctctttatatctcagggtatcttggagtcactactgatccttgacctccctcctttctctgaccatgtctagacaa

SEQ ID NO: 37230 - DNA, 2310 bp, Homo sapiens
tgtgtatatttatatatgtgtgtgtatacatttatatgtgtatatgtatttatagtaaatatatcacatgtatttatatatagtaaaaaagaggggactataatatatctttatatgttagcatttattttaaaaagaaaacacaggaatatctaaaagaaactattacttataggggttatgggaaatgccatgggcaagaattttttttttttttatcaccatgctttctgaaacaacacgatatgtatcacctttataaaaataaaataaaataaaaaatgaaaaacaaagtccacttgtaaccacatgtcagtagcatgtttgctttcagggtacatcaaatgcattctatagcacaggatgttccagtcactctaacaaaagatgtcctgtttggaacaccaactctgtatcagttacttcagacactttctctcattgagtcccttcagcaagcccttttaggtttatgttcttagatgaggaaaccaagtcttagaaacattaactggccaaactaagatcagagagttagaaatgtcagagcccagaactggcatcttctgacttcagatcccatgtactttcccctacactgtgctgaccacacctccattactacagatgtgttgattacatctaggggccaaagtacacattcatccaataaatgcttactgaatgcttaccgtgttcagggcactgtggcaatcttttgtaatgcaagaaaaataagagtagtgaagacagtcaaggaaacaaagaagcctaatactaggcaagaagtgcttttgatggaattaagcacaatgagggtgttagtacagaaaggacatttaattgaactgggaaagttcatggcagttttcccagagatgagtcttgaaggacaaatggtatttagccaggaggaaagggggtcaagtgtattccagggagagggaacaacatgtacaaaagcacagttttgaaagaacactccatttttgaggaatagccaatagctgggcacgtctagagcatagggtagtagagagaaaggaggccggaaatgggaagagacttgaatgccacattcagttatgtggacttcatcttgtagcaatgggagcctacaaaattttaagtagaggaataaaaagattccatctaaaacttagaaaaattactttggcaggataagagacaatgaattgacggggagctgggtttgatagcaagaaactgtttgggagactgttctaattacatattttcttgtttttagatgcacatatacgtacttttttagctggtcatttctttctgaaattggaatgaatcttacaatcaatggcatgttataatttmattggcagcattatttgtctcttaagggcccccaaataatagtgtgtcacataactgatagcatctcaaattagatgaaatacagtagtccaggcaagaaatactgagatggtggggtggtaaagagggaaaagatttgagccacatttagatcctgatgtggtattaattattaagtaaaaaaaaggaatgtgcagtacatattcagtatgccacaagttgtggaaaaaaggtgtgcatggatagatgcacatgtatgtattcataaagttaatgtggatgcataaagcgtctctagaatgatacacaagaaacaaataacacccgtggcttttagtggggggcattgggtggctgagggagaacagcggtaggaaaatttttcattgtgttctattttgtacatttgatagtttgaactagtcgtattatgcacttcaaatatgtaaaaagataaaaagtaagagatatttagaaaggagcattgacacatttgttgacagattggttatgggataaaggcgatagtattttattgactatattttattcttttaattattcctctaatttcttaaaacaactttattgaggtataacttccacggtataatttcacccattttaagtgcatgaattcagtgatttttagtagagtcattgagtagtgtaaccattcctacaatggttatagcacatttttatcatcctaatgagatccttcatgctcatttatttaatctccattcccatctccatccccaggcaaccataatcttccatgtttttaaaatagctttgcctatttttggatgtttcatacaaatggaatcatacaaaaggtggtgttctgtgtctagcttctttcccttaggataatgttttctggtttataaatgttgcaaatgtcagtatgatacttcattcctttttatttgtgtctacaaaatactctat

SEQ ID NO: 37231 - DNA, 542 bp, Homo sapiens
ctaaattcatgagattatagactattaaggtggaatggacctcagagatggtccttgctctcatctgaggcttcagttgggccagtcagaaatgtgggaaaattgaggcaggtcaaataaccaggagtacaaacaaacacaatctatccagaaaactagaaatcttactagtgactattcacaggttactttctgcattctggggttttcattctagaacagatgtgtgtgtgtgtgtgtgtgtgtgtgtgtgtgtgtgtgtgtgtgtgtggtgcktgaagagaggggaggggtgcccagaaaaccatacccactttcccacatatcccaactatgactgggcaattatgtcattatcaccactgatatatagctggaagagtttagtgttgccctgctaagatctggattttcttttctggagcttggctattggggcattgagaagtccagccaggaggttggtcagaggctaacccaaaaagctttgcttaactctgggctacagctgggggttgccagagagaagtgcctggcattcc

SEQ ID NO: 37232 - DNA, 542 bp, Homo sapiens
ctaaattcatgagattatagactattaaggtggaatggacctcagagatggtccttgctctcatctgaggcttcagttgggccagtcagaaatgtgggaaaattgaggcaggtcaaataaccaggagtacaaacaaacacaatctatccagaaaactagaaatcttactagtgactattcacaggttactttctgcattctggggttttcattctagaacagatgtgtgtgtgtgtgtgtgtgtgtgtgtgtgtgtgtgtgtgtgtgtgtggtgcgtgaagagaggggaggggtgcccagaaaaccatacccactttcccacatatcccaactatgactgggcaattatgtcattatcaccactgatatatagctggaagagtttagtgttgccctgctaagatctggattttcttttctggagcttggctatkggggcattgagaagtccagccaggaggttggtcagaggctaacccaaaaagctttgcttaactctgggctacagctgggggttgccagagagaagtgcctggcattcc

SEQ ID NO: 37233 - DNA, 795 bp, Homo sapiens
cttcrgctaagcatgattatttactattttcagctattagttatgtcttgttgaaaaagtatgaaaagagctgcccaataaattagagtgtatgctcaacattctcttagcttctttatctctttccaaaattggatcaaatgacattggacatgatcaacttcttactgttttgacaaacatctgaggatacttttataattgataatttggactagattatgcaatgtgtgatgagacacaaggtagtctgtactccccatgatatgtatatctgtttgatatactcaaacggtgtatatcaaacggatataagtttgagtaggtatggagatgagccagggtttatttcttcaactagtatttactgaatggtcttatgtgccacaactgttctggaaactgtgatacattaattaacagataaagcctttccctcacaatgcataacagacccaacagagtatgaatgtacatacaaactagtaaataagaaaacaaataaaagtattcagatagtgctataactactgggatgaaaatcgagcaggaaggaaaatatagcctgcttgatgtggaagacagggatagcctctctgaggaggtgacatttgacccaagacctaaatgaggagaaggagacagtgagatgaaaatgagggaaacagcaatggcaaatacagagaacttgagacaacttggcccattggagggacagagacaaagccaatgtgggaccacaggggatgaaagggaggctgattggagaaataggcagtgctgaggccataaaag

SEQ ID NO: 37234 - DNA, 795 bp, Homo sapiens
cttcagctaagcatgattatttactattttcagctattagttatgtcttgttgaaaaagtatgaaaagagctgcccaataaattagagtgtrtgctcaacattctcttagcttctttatctctttccaaaattggatcaaatgacattggacatgatcaacttcttactgttttgacaaacatctgaggatacttttataattgataatttggactagattatgcaatgtgtgatgagacacaaggtagtctgtactccccatgatatgtatatctgtttgatatactcaaacggtgtatatcaaacggatataagtttgagtaggtatggagatgagccagggtttatttcttcaactagtatttactgaatggtcttatgtgccacaactgttctggaaactgtgatacattaattaacagataaagcctttccctcacaatgcataacagacccaacagagtatgaatgtacatacaaactagtaaataagaaaacaaataaaagtattcagatagtgctataactactgggatgaaaatcgagcaggaaggaaaatatagcctgcttgatgtggaagacagggatagcctctctgaggaggtgacatttgacccaagacctaaatgaggagaaggagacagtgagatgaaaatgagggaaacagcaatggcaaatacagagaacttgagacaacttggcccattggagggacagagacaaagccaatgtgggaccacaggggatgaaagggaggctgattggagaaataggcagtgctgaggccataaaag

SEQ ID NO: 37235 - DNA, 795 bp, Homo sapiens
cttcagctaagcatgattatttactattttcagctattagttatgtcttgttgaaaaagtatgaaaagagctgcccaataaattagagtgtatgctcaacattctcttagcttcttyatctctttccaaaattggatcaaatgacattggacatgatcaacttcttactgttttgacaaacatctgaggatacttttataattgataatttggactagattatgcaatgtgtgatgagacacaaggtagtctgtactccccatgatatgtatatctgtttgatatactcaaacggtgtatatcaaacggatataagtttgagtaggtatggagatgagccagggtttatttcttcaactagtatttactgaatggtcttatgtgccacaactgttctggaaactgtgatacattaattaacagataaagcctttccctcacaatgcataacagacccaacagagtatgaatgtacatacaaactagtaaataagaaaacaaataaaagtattcagatagtgctataactactgggatgaaaatcgagcaggaaggaaaatatagcctgcttgatgtggaagacagggatagcctctctgaggaggtgacatttgacccaagacctaaatgaggagaaggagacagtgagatgaaaatgagggaaacagcaatggcaaatacagagaacttgagacaacttggcccattggagggacagagacaaagccaatgtgggaccacaggggatgaaagggaggctgattggagaaataggcagtgctgaggccataaaag

SEQ ID NO: 37236 - DNA, 795 bp, Homo sapiens
cttcagctaagcatgattatttactattttcagctattagttatgtcttgttgaaaaagtatgaaaagagctgcccaataaattagagtgtatgctcaacattctcttagcttctttatctctttccaaaattggatcaaatgacattggacatgatcaacttcttactgttttgacaaacatctgaggatacttttataattgataatttggactagattatgcaatgtgtgatgagacacaaggtagtctgtactccccatgayatgtatatctgtttgatatactcaaacggtgtatatcaaacggatataagtttgagtaggtatggagatgagccagggtttatttcttcaactagtatttactgaatggtcttatgtgccacaactgttctggaaactgtgatacattaattaacagataaagcctttccctcacaatgcataacagacccaacagagtatgaatgtacatacaaactagtaaataagaaaacaaataaaagtattcagatagtgctataactactgggatgaaaatcgagcaggaaggaaaatatagcctgcttgatgtggaagacagggatagcctctctgaggaggtgacatttgacccaagacctaaatgaggagaaggagacagtgagatgaaaatgagggaaacagcaatggcaaatacagagaacttgagacaacttggcccattggagggacagagacaaagccaatgtgggaccacaggggatgaaagggaggctgattggagaaataggcagtgctgaggccataaaag

SEQ ID NO: 37237 - DNA, 1071 bp, Homo sapiens
tgcattgtagaatgctgtcttagcctcagacactaacatgattatcataggtttgtaagttttagggtcttccaacttgaatctttgttttctataggaccttttataaaatacatgatttttgtcattaaaagaaaatgtaaatttgtttaaaaggaaggtctctggatggatcatcatacatggagagattcatgggtgttgatctttgctcccgcttaatttttaatttttattataactttgaaccttatctcctacatctaaaccagtcttcatggtgctaaccgagcaactggatggattgaaaacatgctcaattctgtagattctgagacatctttttagttaaacagaaccctttctgttgactcacataataagaatatggtcttattaagtcatactcatctcaatttgaccagttcagaaaacagataactgaattacctttgtgtctttgtgtgtgtgtgtgtgtgtgtgtgtgtgtgtgtgtgtgtgtattttatcagctgatccattgatccatatcagatgaagaaatgaaccacagtctcaagattcggtcttcctgctagggccagtttgcttgttgctgatgcaatgagtgaaaggaactttgcttgttgcttagttttatgatgaatgaagggaacaaacacactggtttttacttttataaattcccagtgatccccaagaaagtaactggatcctccaggaaatcccagtggcctagtttctatcagtgtaaaataaggatcagatgatatgactcatagggctgttgccagcagaatgtatgtaaaatttctgccacgatatttagcaatcaaaaagtttgcaacaaatgcttgttttctcttctctcttcccaaaaataaaaggaagctgtcttttccatttttactatattctaatgttagagagccaattctggcatcagactgcctagattcaaatccagctctactcttggatttgggcaagtgatayaagtaaactctttgtgactcagcttttaaatctgaaaattgggatactaatagtgcctacttatagactgttatg

SEQ ID NO: 37238 - DNA, 880 bp, Homo sapiens
ctatacctccatatcaagctgtgcccagaaatgaggtattagtgccagggcacctgtatgctgtaaagatttccttttcaagaatgtagtatcttcaattgtatacataaagacccttttgaaaactactaactttctgtaagctaaacaaaaataaattcattcatcatgctaacaatagcatggtgcatttttattgtccagaggttatggaggcttcacttgaactagctctagaactgatagggagccagcagagatatagaaatatcatggtcctctgcaaacactggcccagttccacctgtatcttcccttcacagacccatttcactcacaacgtcagtaacagatgtctagagactctaaaaaattgttccaaaatttgttaccttgtgaaaagattatcttcttttaatttatgagttcttcgtaggcttctgtttaaattatgaatgtgtcatatctgataatatgaggataaaaataatagctagtattttttagtatttaatgtcaggcacaagcctacatattttacatacatatataagtgtatatatagatatatagatttatatatgtacaaatttaatcttcacaacaaaagtaaaatcaggtgctattattccctccccccttttgtaaagaagaaaactcaggcatatagaggagaaataccttaaccattaccacacaccttgtaagggctgggacaaataaacacaagtaattttcaaatatattaataataatattctgagtattaattcctgtttccaaatagattactcttttaaacayagcactactacttacctaatgaaatttagttgctattaatggatgaattttgtatctaacaggcttgattttgatt

SEQ ID NO: 37239 - DNA, 1176 bp, Homo sapiens
cccaccatgatgtgaggaccacagtcatgatttaacctcaggctaaaatggattttattacaaactgtgcagctagtgaaatgtcaagggttgtttcacaggatcttaactaacacaagaaaaacttcctagcagcagctgatgcaaactcctttaaatgtatacgtctaatttatctatccagataataaatatacgtggtatatgcaggctgaaaacaaaatccctggagtgtttcgatgtgagtataatatacctagaagcaaaaacttcactgatataaaggatgcattttatgagtctccacaaaaatctccaactttttatgaaatgtaaggccttcttaagtagtgtttactacatasagctttcatagttcctatatgaatacctactctccatgatttatcagccttctagagtcccagtaggatgctgccaaattgcaaatttggagaattagttttaagaaacattgtatataactgcctttggaagaaaattcaggtagattagcaaagattttaagcaagtcctttcacaaaaacctgcagaatttcaaggagtctggggtttatgaaatcatcaaatcaataccaagtttaacacatttatgttactcttataagcataactctttgggaataaaggtattacaaaaacaagatttggaaaaggaggctagctcttgtttaattactgtgaagagcagagaattgaaagaaaaactacacactagttggaaaagtgctactcgggtttaaaaaatagaaaaagaaaatctgagattgggattggacgataagcaggtagcagaagcaacaaaatgtctctttcattttcagctcagggggccccttaaaggagcaggctgaaatgtacagcccacaaaccagaggaaggcctgcacaggaagtagagtggaaattacagttgaatggactctgaaacaggatgaagccagtccatgtgaggttcatgaaaaccaagtagacaatatgaacatccaagtgtttccttgtgtcattaactcaatattacattctgatttcaaacaccatggaaccacagtgaaaaagctgcaaaaacggtagccgttttttcaaaacttctttctgctgtttgcttgtcagagctgatcagactcttccttgagcactttgcaggtcacacact

SEQ ID NO: 37240 - DNA, 1176 bp, Homo sapiens
cccaccatgatgtgaggaccacagtcatgatttaacctcaggctaaaatggattttattacaaactgtgcagctagtgaaatgtcaagggttgtttcacaggatcttaactaacacaagaaaaacttcctagcagcagctgatgcaaactcctttaaatgtatacgtctaatttatctatccagataataaatatacgtggtatatgcaggctgaaaacaaaatccctggagtgtttcgatgtgagtataatatacctagaagcaaaaacttcactgatataaaggatgcattttatgagtctccacaaaaatctccaactttttatgaaatgtaaggccttcttaagtagtgtttactacatacagctttcatagttcctatatgaatacctactctccatgatttatcagccttctagagtcccagtaggatgctgccaaattgcaaatttggagaattagttttaagaaacattgtatataactgcctttggaagaaaattcaggtagattagcaaagattttaagcaagtcctttcacaaaaacctgcagaatttcaaggagtctggggtttatgaaatcatcaaatcaataccaagtttaacacatttatgttactcttataagcataactctttgggaataaaggtattacaaaaacaagatttggaaaaggaggctagctcttgtttaattactgtgaagagcagagaattgaaagaaaaactacacactagttggaaaagtgctactcgggtttaaaaaatagaaaaagaaaatctgagattgggattggacgataagcaggtagcagaagcaacaaaatgtctctttcattttcagctcagggggccccttaaaggagcaggctgaaatgtacagcccacaaaccagaggaaggcctgcacaggaagtagagtggaaattacagttgaatggactctgaaacaggatgaagccagtccatgtgaggttcatgaaaaccaagtagacaatatgaacatccaagtgtttccttgtgtcattaactcaatattacattctgatttcaaacaccatggaaccacagtgaaaaagctgcaaaaacggtagccgttttttcaaaacttctttctgctgtttgcttgtcagagcygatcagactcttccttgagcactttgcaggtcacacact

SEQ ID NO: 37241 - DNA, 525 bp, Homo sapiens
aggatgaatgataggtggggtggggtggggcgatgaaggggtgtgtcccccagcaccttctgtgagttcatgataggagatggcagaaattcatgttaatagctcacacaccttacatttttcacatgcattatttcatttgatccttacaacaatttcatgaggtcggtattatcacctcctttcactaaatggagaggctgaggcttagaktgctgacatggcttgcctatgatcaggcgggaggaagcaactgcagagccaggattccaactgccagatgggtaatcaaataccctgcactgttttcatccagactagggcgtagtcgaccaggtgttacacctctgatctcgtcatctgttgaaactgtagggagccaatcaataacactcttttttttttttttttttttttttgagatggagtcttgctctgtcgcccaggctagagtgcagtggtgccatctcagctcactgcaccctttgcctcccaggttcaagcgattctcctgcctcagcctcc

SEQ ID NO: 37242 - DNA, 525 bp, Homo sapiens
aggatgaatgataggtggggtggggtggggcgatgaaggggtgtgtcccccagcaccttctgtgagttcatgataggagatggcagaaattcatgttaatagctcacacaccttacatttttcacatgcattatttcatttgatccttacaacaatttcatgaggtcggtattatcacctcctttcactaaatggagaggctgaggcttagattgctgacatggcttgccyatgatcaggcgggaggaagcaactgcagagccaggattccaactgccagatgggtaatcaaataccctgcactgttttcatccagactagggcgtagtcgaccaggtgttacacctctgatctcgtcatctgttgaaactgtagggagccaatcaataacactcttttttttttttttttttttttttgagatggagtcttgctctgtcgcccaggctagagtgcagtggtgccatctcagctcactgcaccctttgcctcccaggttcaagcgattctcctgcctcagcctcc

SEQ ID NO: 37243 - DNA, 1795 bp, Homo sapiens
  misc_feature (1)...(1795): n = A,T,C or G
gtctttaatacaggtggctttacaacttgctttggccaagataacagtagcaaaattgaagygggaacatacttgaaaattgctcctgtgttaagcttgccatctcactgcctggggaactctgatgtcatgtgaacaaccctagacaagccagctagcggataacacacaggagacacttcatctaccccaaccatcccagaccaaaatgttataaaccagccagccccacatattattaccctgtagatgataacagctgtgaaaggatgaggccaaataagaacaactgcccatctgaaacaaacccaaagtttttactcacaaagcatgagtgaaataactgattattgtgttaagccttaaattctggggtagatgtttacacaggactagataactgatacaactggaaaatagagagtttccttcagcatccaagtattgaccataagagagaatgagaaacagcagctggaaagagggggggaaaatgatgatatttacatgtgaatgattgacagtagatggaagcagaaagttcagatatatcctgcctgataaattctattatctgcatgaaatgagaggttgggtcttctgagaatcaggtggtgagatagtgagatgcatgagagtaataaaagtttgaaatatatcttgagggaaagggaaacagagatgtcaagggactcttgaaaatgcttaatgtcctactgaattcagggaatctgaaattgttgggggatttgtcatagattaacatgagccattccctagaagttattacacttttgaagtcccagagaaagtaaaaaggaagacagctagcagaatctaggggtcttacttcagcaaatattatacccccaagcaattgaattcagtgaaaatctgagtccataatttggctcaaaaagagaaatctttaaaatgatttcctaaaccaaaaactaaactcctatcaatatccctgtgtacagccatcagatatcacccactggcaaacagggaagaattttgagaggaggttattagttgagactattttgagatggttctgaattcttattacccaatagcttttatctatagtannnnnnnnnnnnnnnnnnnnnnnnnnnnnnnnnnnnnnnnnnnnnnnnnnnnnnnnnnnnnnnnnnnnnnnnnnnnnnnnnnnnnnnnnnnnnnnnnnnntgatttcgaattcgagctcggccccctaagtaaaacagccagacctttaataacaaacacaatcactcccatataatattctaactgagattttggactagcattactgacatttaaatatacttatgtgattctatagctgagagtgagacatcaaactcatatgagcagagagtagaatggtgtttattagagactggaggtgggggaatgcggagatgttggccaaagggtacaaagttgcagttagatagaagaaatacgtgacaaatatttaaggtaatggatatgttaattagcttgattcaatcattccacactgtatacatacaacataacatcactgtgtaccccataattttttataattgtaatttgtcaaaaaataaaataataaaaaagaaactcccatccttaatatgaatattctaattcaatttcctgggaataaaaaggaaataatttttacaaatctctggctagtcaacctcaaggattaggtaatcactcttctcccacatgatcaaaacaaaatttcctaggtttcagacctccctttaattacaatgcaggatcaataaatatcattaacactata

SEQ ID NO: 37244 - DNA, 642 bp, Homo sapiens
atattttaaaatcatatgactttgtaccactctgtgaagctctgtttgttatataattcaatgcaagatttttgaagttcaataaatacttcaacaggtcagacgatttttaaattttaaatcattgtgagtttttaaagggtaaaatttacctgctctcatatttaatttgaaaaatccattagagggcctggaaattatataatcattatttttgcactgggaacggtggctcactcctatcatctcagcattttgggaggatgaagtgagaggatcactcgatgccatgagttcgagaccagcctggctagcatacagagtctctgtctctactgaaaagtaaaaaattagctgcatttggtggcacgtgtctgtattcacagctacttgggaggctgaggcaggaggatcacttgggcccaggagttcatagctgcagtgagctaggtaggtgacaatacaccacagcctgggtgacagagtgagactctgtctcttaaaaataaaatgtttttgaacaaattaatctatgcttaatttatacatcaatcattgcaaaacagaaagaaacaaaattaaattttattttagaaattawaataatattactctacttcctttctcctaagaattctttct

SEQ ID NO: 37245 - DNA, 598 bp, Homo sapiens
catattaaacaaaacaaaaatcacttgaattttagcgacggtatatttctttttttactaaatgatgttattttgtaatgtataatatacaacactttagaatcagatgtgatagaaaataactctgattattgatacgtttacttaaaacaatcatttaaagggatatagaatgaaagtaataaaaygtggtggtttcatatttcatagaaaagataaaagaaaataaaaatgaatgaatataattagagtaaaattgtttataaataaataataatgtattataataaattatatataatttaaacttctatcatctggcataaaatagaaaattctacagattgaaaaccatacatatttaatgtttacctattttagctagcttttgcaaaactgggatgtaaagtaatattaccatattattttctttaaatttgcaatttagagaagattcatatatgaacttaggaaggattcttagtttaaacctcccagtagagaatgctgctttacagaaatgtaatgggcttatgatttttaatgtgcaaactttaaaaatataattaaattattagtcatcttatttcttagaaaa

SEQ ID NO: 37246 - DNA, 561 bp, Homo sapiens
ttagaattcataattgaatagtagaagaaagtaaaaatgcataggaatcatcaacatgaaacacaggaaaaataaatgaaacataggcaggtgattgtctgcagagcaagaaagtagagtttattaaggagggcagtatgagaactatctaagatattttaggataagaagcrgttttgtgaatttgaattcattaaataacgctttctattttgttttgttattcatcatttaactttttttaaaaatataaagaattctcataagtatttttaaactagaagacaaataagtggaatgaaacatctaaatgtcaaattttggtgtgtacttcctattaatttctaagcagggacacctggcaaacagaaataactctgaggacatgtgggattttgaatttttggacacctctgtaaagttatttggcaagcaataataatagctaccacttatttatcaagtgtttactaatgtactaagcattgccatatatggtttattacttctatcctatttagtattcaaatcaatatgatgtctatttttgttctgttttaa

SEQ ID NO: 37247 - DNA, 770 bp, Homo sapiens
cagtctctaaattaataccaggcctcagatggtccttaggagccatgtgggcattagtcatcaggaagttacctaggcccaaagtggacatcaggccccatgttgacacaagatctagttggaagtcaggccccaggtggacacccaggccctaggtaaatacttaggtcccaagttgacagcaggccctatatgaacactcagaactcaggtggacatcaggcctcaggtggacatctgagttcatctggaacctcatgttacaggccccatgtaaacaccaggccttagatggatacccaatctctaggtagacatcagagctcagattgacacaaagactccagtagacataatgtaccaatgaatatccaggcgcccggtaaatacccaggccccagattgacaccacggtctatgtggacacasaggccctgggtagtaaacaggcccaaggtggacactggactggacatcagatcctaggttgacaaccatgctccaagttgacaccaggccccaagcgaacatctggccccagctggacactagtcccctggtgaatacctagtctcaaggttgacatcagaccctatgtgaacactagaccccagataaacacttatgccctaagtggacatcaggcctcaggtggttacccagtcccaaggtgaacatcaggaccccgatggcaccagttatcaagtggattcctaggccccaggtgaatatcaagccctaggtggatactgagccccaggtggatacct

SEQ ID NO: 37248 - DNA, 770 bp, Homo sapiens
cagtctctaaattaataccaggcctcagatggtccttaggagccatgtgggcattagtcatcaggaagttacctaggcccaaagtggacatcaggccccatgttgacacaagatctagttggaagtcaggccccaggtggacacccaggccctaggtaaatacttaggtcccaagttgacagcaggccctatatgaacactcagaactcaggtggacatcaggcctcaggtggacatctgagttcatctggaacctcatgttacaggccccatgtaaacaccaggccttagatggatacccaatctctaggtagacatcagagctcagattgacacaaagactccagtagacataatgtaccaatgaatatccaggcgcccggtaaatacccaggccccagattgacaccacggtctatgtggacacagaggccctgggtagtaaacaggcccaaggtggacactggactggacatcagrtcctaggttgacaaccatgctccaagttgacaccaggccccaagcgaacatctggccccagctggacactagtcccctggtgaatacctagtctcaaggttgacatcagaccctatgtgaacactagaccccagataaacacttatgccctaagtggacatcaggcctcaggtggttacccagtcccaaggtgaacatcaggaccccgatggcaccagttatcaagtggattcctaggccccaggtgaatatcaagccctaggtggatactgagccccaggtggatacct

SEQ ID NO: 37249 - DNA, 770 bp, Homo sapiens
cagtctctaaattaataccaggcctcagatggtccttaggagccatgtgggcattagtcatcaggaagttacctaggcccaaagtggacatcaggccccatgttgacacaagatctagttggaagtcaggccccaggtggacacccaggccctaggtaaatacttaggtcccaagttgacagcaggccctatatgaacactcagaactcaggtggacatcaggcctcaggtggacatctgagttcatctggaacctcatgttacaggccccatgtaaacaccaggccttagatggatacccaatctctaggtagacatcagagctcagattgacacaaagactccagtagacataatgtaccaatgaatatccaggcgcccggtaaatacccaggccccagattgacaccacggtctatgtggacacagaggccctgggtagtaaacaggcccaaggtggacactggactggacatcagatcctaggttgacaaccatgctccaagttgacaccaggccccaagcgaacatctggccccagctggacactagtcccctggtgaatacctagtctcaaggttgacatcagaccctatgtgaacactagaccccagataaacacttatgccctaagtggacatcaggcctcaggtggttacccagtcccaaggtgaacatcaggaccccgatggcaccagttatcaagtggattcctaggccccaggtgaatatcaagccctaggtggatacygagccccaggtggatacct

SEQ ID NO: 37250 - DNA, 1070 bp, Homo sapiens
agtgctggtgaactagtgtgatttttgaggggtgttgatgagccttgttttgtcatattactagggttggttttctggttccttctcatttgggtgggctctgtcagagggaaggtctagggccgaaggctgttgttcagatcattttgtcccatggggtgtttccttgatgtagtactctccctttatcctgtggatgtggcttcctgtgagctgaactgcggtgattattgtctctcttctgggtctaaccatccagcgagtctacctaactctggactgatactggccattgtcggcatagattcctgtaatgtgaaccatctatgggtctctcagccatggataccagcacctgttctcgttgaggtggcgaagggcacgatggactctgtgagggtccttagctttggtggtttaatgctctatttttgtgctgcttggcctcttgcccagaggtggcattttccagaacagctatagtgtggagagggatgggcagtgggcggggccctagaactcccaagattatacgccctttgtcttccactaccagggtgggtagggaaggaccatcaggtgggggcagggctaggcatgtctaagctcagagtctccttgtataggttttgctgtggctgctgtggaggatgggggacaggttcccaggtcactggagttgtgtacctaggaggattgtggctgcctctgcctagtcatgaaggttgtcagggaagtaggggaaagccagcagtcacaggcctcacccagctcccatgcaaactgaagggccagtctcactcccaccatgcccccmacaacagccccgagtctattcccaggtggcgggtgagaggggcttgaaaacttgccagatttctgcctcccagctgcaaaagaaaagggctttagttcttcccctgcttgtgaactctgcaagcgggattggcgccctcccccaagttctggccaggaggcttctcgcctggttcaagttgttacaaagttcagctacagaattccttctccctttggagttttgcccccgttcctctggccaccctcctgat

SEQ ID NO: 37251 - DNA, 1187 bp, Homo sapiens
ctttttgagacagggtcttgctctgtcacccaggctggagtgcatggcaygaccgtggctcactccagccttgacctcccaggttcaagcaatccggccatctaagtctcccaagtacctgggactacaggtgtgagtcatcatgcctggctaattttgtgtgtgtctgaagacgggagcctccctgtgttgcccaggctggtcttgaactcctgggatcaagggatccctccaccttgacttcccaacttgtgattacaggcgtgagctactgtgtccacccctgccctgaaacttcttagattctttttgtgattcagctctaattgattgataaggagatgtcaaaaaattacctcctatttctgtgtgaattgacttaagccactgcagcaattgaatacatctaatgtttgccaaatttcctcttcatgttgcactgttgatacagtgttggtgttggatttttgataaggtatgtgaacatgaaactgtgattataatgcaagcaaacatgtaataccttgtgtatttttaaacagtattagtgagttttcaagggaaaatgattttcaaaaggcaactatgcctaaccaacttttcaaagttgcaaataatttaattgcttatcattgttatgctcatttaatgactatctgggttcaaacatattctgactgtttatctgtaaacgagctacagcaattagacaaaaattgagcaatataccaggttccaagtgcaattatgtgacttgatttcaaataagtaatgttttggggttaactatcttcagttaatttttattctccccactactaagttatcttgttctacttcatgttgtcatttcattcttatattgcagctcacattaagcatgtcacttcatggcatccaattagagaatccttagataaacatgacctggcctgcctacataaaaatatttttaaaaatctagctaaattccttttcctatctgtaattaagcccaccagaactttttggattaactcgtgggctgtaatgtaacaaagaagggctttattctctattactaaatctggtccctactttgaagttaaccaaattccatctttggttagattcttgactacagtgtgaaactaatcaatgggagacttttttaaaaattactcatactgaagttataggtgacaaaa

SEQ ID NO: 37252 - DNA, 1187 bp, Homo sapiens
ctttttgagacagggtcttgctctgtcacccaggctggagtgcatggcatgaccgtggctcactccagccttgacctcccaggttcaagcaatcckgccatctaagtctcccaagtacctgggactacaggtgtgagtcatcatgcctggctaattttgtgtgtgtctgaagacgggagcctccctgtgttgcccaggctggtcttgaactcctgggatcaagggatccctccaccttgacttcccaacttgtgattacaggcgtgagctactgtgtccacccctgccctgaaacttcttagattctttttgtgattcagctctaattgattgataaggagatgtcaaaaaattacctcctatttctgtgtgaattgacttaagccactgcagcaattgaatacatctaatgtttgccaaatttcctcttcatgttgcactgttgatacagtgttggtgttggatttttgataaggtatgtgaacatgaaactgtgattataatgcaagcaaacatgtaataccttgtgtatttttaaacagtattagtgagttttcaagggaaaatgattttcaaaaggcaactatgcctaaccaacttttcaaagttgcaaataatttaattgcttatcattgttatgctcatttaatgactatctgggttcaaacatattctgactgtttatctgtaaacgagctacagcaattagacaaaaattgagcaatataccaggttccaagtgcaattatgtgacttgatttcaaataagtaatgttttggggttaactatcttcagttaatttttattctccccactactaagttatcttgttctacttcatgttgtcatttcattcttatattgcagctcacattaagcatgtcacttcatggcatccaattagagaatccttagataaacatgacctggcctgcctacataaaaatatttttaaaaatctagctaaattccttttcctatctgtaattaagcccaccagaactttttggattaactcgtgggctgtaatgtaacaaagaagggctttattctctattactaaatctggtccctactttgaagttaaccaaattccatctttggttagattcttgactacagtgtgaaactaatcaatgggagacttttttaaaaattactcatactgaagttataggtgacaaaa

SEQ ID NO: 37253 - DNA, 525 bp, Homo sapiens
gtgcaattgaaattagatttggtatgttttaaacagctcattctagacagaagttaactgaaattcataaatgttcttagttattccctgccaccctttscccacacacacacttgaactgttctgcactttgaaacacaaagcaacttgtcagttcagtttattcagtcagggtcagttctgtgaaaacaaagccaaggcaattgtttgatttaattgactagacaaactggttatacaggttagtagaacttagttttatttttgtccagctgcatatttgaatgttcataaagtaacttagtaaaataataagattccagtgacattgtaatatattttaaagaataattaccaaagcaaagaaaaaaaacattctaaaacccaaactatagaagctattcatggtatttttttctttatggctccactttcactataatgaaatgtgttcccccaaaaaagtagccttcttttctttcactattcatttccttctttttttttttttaatttttttttgaa

SEQ ID NO: 37254 - DNA, 592 bp, Homo sapiens
gattggtctcatttaacagcattctaaaaatcaatgtgctggtttttaaggtgtctatcaagctaataaagtaaggagcaatgctttcagctcttttgattagttttcatcacctttgcttgcattgccttgtcctgattagcctttttcttcttcttttcttttccattcattttcttttcttagcgcttgagtgggtacagatatatctgtgcatatgtgtttgtgtctttcaagatgtccctgttatttcctctgtaggactttttaggacaggcattaaggttgatacttgcctttgagagcagcctactcctccttctgttggtrtaaccctattgtttactattctgctctgtcactgaaattcataatggattttaagtacaaatattgctttgtagctttggggatagaagtagattgattggaattaatcattgctaataaatagcaactgaaaccattttaagtgttcctaactacttctggaataaactaccaagcaacgcagatactcaatatatatttgattaaatagatatgagctgttttctctatagagaatagtttacaaaaacttttgtagaaa

SEQ ID NO: 37255 - DNA, 1100 bp, Homo sapiens
catatgcaattgcatttgtaagtacaccaaaatggaaaaacatgtatgtgtatatatgtatatgtgtatacaygaaattttatgcttaaatttatttttcttattgttttatgtttacctgtattagtttttatgtgaacttaggcagtcatattatgcttttaagtattcaatataatgtaaacacatcaatattttagtaactatttaatgagcattcactgacagcctttgtagtttcaatctaatttgaaaatatagcaaatgtagtcatgtttcctcagaggttttgcagtagaaataatattttactaaacttttgatcattctgagactaatcatatactgtggtgaaaccatatggcttagtgaagaccctcaggtattttcaaacagacaattctagtccaatgtttaacttgacaaacaagcaacctatacgtaaataatctgaataaaagaacatctcaaaatgcaaaatttttgcacacatttagacataaaatgtagcattaaactttgctgaatttttaaatttcatatgcactaaaactgaattatttaaaaagtctgcaaagaacctgaaacatgatttctgaatttattcttaaagaaatgaaaaatgtatgtttattccatgtaattacagactttgatttatgtctcatagttcaaagcatatttatgacagctatatctacctcatttgctgtgccatgtataacataaagcatttcatcagttgatgctttgccaaaaactattctaaaagtttatgagtttttcttccactttccagttccaccaagactgtattctgttaagatttttcttagttcttgtagcagtcatttcatattgccaattcttgcttcatatcacttcttcaggcaaggcttttaattttaaaattagcaattcatctctcacagtcattttcatggttcatactgttcacaacacccaaaggcctgcttactatttcaaatcacaatttcaagaataaggataattaataacacttaaattctgaacagaaccctaacaaaatgatttcttatgtagaaaaaaggtaatatgcaggacatcaaaaatatgca

SEQ ID NO: 37256 - DNA, 974 bp, Homo sapiens
caccttctattagatttttatttctttgcatcattgtgacatctgctcaggtgttttcaatctcatttcttagatgtgtttctccatcaatgttagatttttaaattaaaataatactttacagaaaagaaaaagtcacctttctttgggcaaaatgactagtccaagatcatttgtacagatctcaacaactatataatggcaagtctggatatctcatctgctacgaaatttctgaatgactccggaaagtttttagatagatcatggttataagtgcaaattcaaattgtcaaaattatcagctgatactcgagcttacatcaatagaaccactgcagtgtttatattattttttttttattttattctattttttgagacggagtctcactctgtcacygggctggagtgcagtggcatgatctcagctcactgcaacctctgcctcctgggttcaagtgattctcctgcctcagcctcctgagtatctgggactacagggatgcaccaccacgcccagcttatttttgtatttttagtagagacggggtttcaccatgttggccaggatggtctcgatctcctgaccttgtgatccacccacctcggcctcccaaagtgctgggattacaggtgtaagccaccgtgcccagcctatattattaatataatgggaatgcagaatgattcaaatgaaactgaatggcatcgatgttaggctctgggttattgttgagtgggttgtgacaaaaatttggggttttgctattcttgggtcctggttgataaaatagttcaaataagggtgacctcgaggccaagtaggtggcaaataatcagttcagaatctcaaacagcagtggaggttgtttgtggagttgtgtagcagaaatgcttatgcagcccagttcagtaaacatgttacatcaccttgcatgagggatatataaagacagtgtttactgccattg

SEQ ID NO: 37257 - DNA, 963 bp, Homo sapiens
tggctatttaaataagtcattgcatttgtaagactgaccactggatgcttttgtcatttcaattgccttgcaagccaggacaggttcccatgtgcttttctagtaaatgaaggaaggaaaaaaaacatcaaatattagatgtcattagagattgcatacagattaaggaagaaattataatatggatccaaagcactagaactactcttaaatggagaaataatttgaaaggactcatatggttagcttggtgaagaaaatataataggagtagcatcttctaaggctttagtccagacttaattatttgcttcaggagagtgaattcagagaatcactcttgaatttamtgataatttctagattttcttttgaatctaatgaattatatctggcatttaagtctttacataacataaaagggacccaacactttttgagatgggtgaaacaaacattctacatataggtttgctctcaatcaatataggctagaaaattgcgagactattttcaggattttgacgtcaatttctgtacctattggcataaaagactaatatcccattttctcattttgtatgatgttttgatttcaggaatgcaagttctatttaacatttaagtatctacaatactcaaaatactgatatttagatatattaggaatggtctttgtccaaaagacaggcatctcataaaaatgtaacttaacctcaaaaagaaattgagcttgtcacccagggtacagtttcctttttttttatggtttttttaaatactttaatttctgggatataagtgcagaatgtgcagttttgttacataggtatacacataccatggtggtttgctgcacccatcaacccgtcatatacattaggtatttctcctaatgctatccctcccctagcccaccacctcctgacaagcccctatgtgtgatgttcccctccttgtgtc

SEQ ID NO: 37258 - DNA, 963 bp, Homo sapiens
tggctatttaaataagtcattgcatttgtaagactgaccactggatgcttttgtcatttcaattgccttgcaagccaggacaggttcccatgtgcttttctagtaaatgaaggaaggaaaaaaaacatcaaatattagatgtcattagagattgcatacagattaaggaagaaattataatatggatccaaagcactagaactactcttaaatggagaaataatttgaaaggactcatatggttagcttggtgaagaaaatataataggagtagcatcttctaaggctttagtccagacttaattatttgcttcaggagagtgaattcagagaatcactcttgaatttaatgataatttctagattttcttttgaatctaatgaattatatctggcatttaagtctttacataacataaaagggacccaacactttttgagatgggtgaaacaaacattctacatataggtttgctctcaatcaatataggctagaaaattgcgagactattttcaggattttgacgtcaatttctgtacctattggcataaaagactaatatcccattttctcattttgtatgatgttttgatttcaggaatgcaagttctatttaacatttaagtatctacaatactsaaaatactgatatttagatatattaggaatggtctttgtccaaaagacaggcatctcataaaaatgtaacttaacctcaaaaagaaattgagcttgtcacccagggtacagtttcctttttttttatggtttttttaaatactttaatttctgggatataagtgcagaatgtgcagttttgttacataggtatacacataccatggtggtttgctgcacccatcaacccgtcatatacattaggtatttctcctaatgctatccctcccctagcccaccacctcctgacaagcccctatgtgtgatgttcccctccttgtgtc

SEQ ID NO: 37259 - DNA, 963 bp, Homo sapiens
tggctatttaaataagtcattgcatttgtaagactgaccactggatgcttttgtcatttcaattgccttgcaagccaggacaggttcccatgtgcttttctagtaaatgaaggaaggaaaaaaaacatcaaatattagatgtcattagagattgcatacagattaaggaagaaattataatatggatccaaagcactagaactactcttaaatggagaaataatttgaaaggactcatatggttagcttggtgaagaaaatataataggagtagcatcttctaaggctttagtccagacttaattatttgcttcaggagagtgaattcagagaatcactcttgaatttaatgataatttctagattttcttttgaatctaatgaattatatctggcatttaagtctttacataacataaaagggacccaacactttttgagatgggtgaaacaaacattctacatataggtttgctctcaatcaatataggctagaaaattgcgagactattttcaggattttgacgtcaatttctgtacctattggcataaaagactaatatcccattttctcattttgtatgatgttttgatttcaggaatgcaagttctatttaacatttaagtatctacaatactcaaaatactgatatttagatatattaggaatggtctttgtccaaaagacaggcatctcataaaaatgtaacttaacctcaaaaagaaattgagcttgtcacccagggtacagtttccttttttttwatggtttttttaaatactttaatttctgggatataagtgcagaatgtgcagttttgttacataggtatacacataccatggtggtttgctgcacccatcaacccgtcatatacattaggtatttctcctaatgctatccctcccctagcccaccacctcctgacaagcccctatgtgtgatgttcccctccttgtgtc

SEQ ID NO: 37260 - DNA, 1168 bp, Homo sapiens
ggcactattcacaatagcaaagacatggagttaacctgaaggtccatcaatggtggactggacaaagaaaatgtagtgcatatacaccatgaaatactacatagccataaaaaatgaatgagatcatgtcttttgcagcaacatggatagagctggagagcattcgtctaaccaaacttacacaggaacagaaaaccaaataccacgtattcacatttgtaagtgggagttaaacattgagtgtatatggtcacaaagaagggaacaacagacaccagaatctacttgaggatggagggtgagaggagggtgaggattgaaaaagtacctatcargtattatgcttctttcctgcatgacagaataatctgtacatcacaccctcgtgacatgagtttacctatataacaaacctgcacaggtacccctgaacctaaaatataagtttaaaaaaaataaagaacacagattctttttgaaagtgttgcccaagaatcactatcaataataataatccaggtgattctgatgctcaggcaagtttgagaatcctccatctagaagacttgctatactaaggaagaatatctcctgagattcacaggaataattctcttgccttcaggtgagattataatccatttttttctgggttggtttagatattaaggacacagaatctactatgtcttttaaatatagaaaattcttccttatagctattttgaatcctgtatgtcacagtttaagatttttcttctgtttcatcctgaaggaaggtgaaaaacagtttggatgtttcacatcaaaatataaagtctatatgctcttaaatctcctttgattatttttctaggttagaaagtcccatcctctttcatctttcctcatgtctcattttgcaactttttacatcatccttataggtccaaaccctctttcatgtacttacaaaattgaacccatttttcaaagcctaaaaaaagtctgaacaatactttaaaaaacttttctagtaaaatttcagggttaagagtcatgaatagaaattgtcatatgtcttgaaactgaacaattccatttcatttatacaggatcatcaagaggtaactaaggcccttggaaccagatccctgctctgtgaaatacttgtgatagaacacagcag

SEQ ID NO: 37261 - DNA, 1168 bp, Homo sapiens
ggcactattcacaatagcaaagacatggagttaacctgaaggtccatcaatggtggactggacaaagaaaatgtagtgcatatacaccatgaaatactacatagccataaaaaatgaatgagatcatgtcttttgcagcaacatggatagagctggagagcattcgtctaaccaaacttacacaggaacagaaaaccaaataccacgtattcacatttgtaagtgggagttaaacattgagtgtatatggtcacaaagaagggaacaacagacaccagaatctacttgaggatggagggtgagaggagggtgaggattgaaaaagtacctatcaggtattatgcttctttcctgcatgacagaataatctgtacatcacaccctcgtgacatgagtttacctatataacaaacctgcacaggtacccctgaacctaaaatataagtttaaaaaaaataaagaacacagattctttttgaaagtgttgcccaagaatcactatcaataataataatccaggtgattctgatgctcaggcaagtttgagaatcctccatctagaagacttgctatactaaggaagaatatctcctgagattcacaggaataattctcttgccttcaggtgagattataatccatttttttctgggttggtttagatattaaggacacagaatctactatgtcttttaaatatagaaaattcttccttatagctattttgaatcctgtatgtcacagtttaagatttttcttctgtttcatcctgaaggaaggtgaaaaacagtttggatgtttcacatcaaaatataaagtctatatgctcttaaatctcctttgattatttttctaggttagaaagtcccatcctctttcatctttcctcatgtctcattttgcaactttttacatcatccttataggtccaaaccctctttcatgtacttacaaaattgaacccatttttcaaagcctaaaaaaagtctgaacaatactttaaaaaacttttctagtaaaatttcagggttaagagtcatgaatagaaattgtcatatgtcttgawactgaacaattccatttcatttatacaggatcatcaagaggtaactaaggcccttggaaccagatccctgctctgtgaaatacttgtgatagaacacagcag

SEQ ID NO: 37262 - DNA, 1168 bp, Homo sapiens
ggcactattcacaatagcaaagacatggagttaacctgaaggtccatcaatggtggactggacaaagaaaatgtagtgcatatacaccatgaaatactacatagccataaaaaatgaatgagatcatgtcttttgcagcaacatggatagagctggagagcattcgtctaaccaaacttacacaggaacagaaaaccaaataccacgtattcacatttgtaagtgggagttaaacattgagtgtatatggtcacaaagaagggaacaacagacaccagaatctacttgaggatggagggtgagaggagggtgaggattgaaaaagtacctatcaggtattatgcttctttcctgcatgacagaataatctgtacatcacaccctcgtgacatgagtttacctatataacaaacctgcacaggtacccctgaacctaaaatataagtttaaaaaaaataaagaacacagattctttttgaaagtgttgcccaagaatcactatcaataataataatccaggtgattctgatgctcaggcaagtttgagaatcctccatctagaagacttgctatactaaggaagaatatctcctgagattcacaggaataattctcttgccttcaggtgagattataatccatttttttctgggttggtttagatattaaggacacagaatctactatgtcttttaaatatagaaaattcttccttatagctattttgaatcctgtatgtcacagtttaagatttttcttctgtttcatcctgaaggaaggtgaaaaacagtttggatgtttcacatcaaaatataaagtctatatgctcttaaatctcctttgattatttttctaggttagaaagtcccatcctctttcatctttcctcatgtctcattttgcaactttttacatcatccttataggtccaaaccctctttcatgtacttacaaaattgaacccatttttcaaagcctaaaaaaagtctgaacaatactttaaaaaacttttctagtaaaatttcagggttaagagtcatgaatagaaattgtcatatgtcttgaaactgaacaattccatttcatttatacaggatcatcaagaggtaactaakgcccttggaaccagatccctgctctgtgaaatacttgtgatagaacacagcag

SEQ ID NO: 37263 - DNA, 836 bp, Homo sapiens
attttagggtagaggaaacataattaggtaatggataaaactcgccagggcacactcaaatagaaagtttcttgccttttttcactacctcctcatgggatcaggtgattctctcctacagtgcactttgggacaacaacccttttcctttatccttcacacattctcttattctctaacaggccatctcaaaactgtttaggtggcaaggacattaatgaccattttgttatacaaattatacctttgtaagtagacagcatttcacaacttagcatactaatcaggttctcccagccccctctaattcagttccactctgctggactatgccatttttaatcctacccctctgtactgaacactagacaaatccttgagttggtggaagatgaatgaaagaaaacatgatgaaccaaccgaagcagaaaaagtgatcaaagagcaccccaggcctaaaaaatcaaggtcctctctatagacccaatttaaagtacrtgattcaaaattgttgttgctcaaaatgaccgagctagtctcaagagctttgctaatgactttgccatctgggaaggcagagaacttaaaagataattattttaggggtgagggactagcacaagattacaagaatatcaaatgtaaatgaaaagctttggccatagcaaacactgacaaactgtccacaggaatagcttacctaaaatccaattaaaacagtaaggccccttatttaattgcccttaaataggaagtccaacccctaaaatgtatgcctaagggcgacagaactcttcactgaaacttctcctgtaaggaaccgcaaatcactctac

SEQ ID NO: 37264 - DNA, 836 bp, Homo sapiens
attttagggtagaggaaacataattaggtaatggataaaactcgccagggcacactcaaatagaaagtttcttgccttttttcactacctcctcatgggatcaggtgattctctcctacagtgcactttgggacaacaacccttttcctttatccttcacacattctcttattctctaacaggccatctcaaaactgtttaggtggcaaggacattaatgaccattttgttatacaaattatacctttgtaagtagacagcatttcacaacttagcatactaatcaggttctcccagccccctctaattcagttccactctgctggactatgccatttttaatcctacccctctgtactgaacactagacaaatccttgagttggtggaagatgaatgaaagaaaacatgatgaaccaaccgaagcagaaaaagtgatcaaagagcaccccaggcctaaaaaatcaaggtcctctctatagacccaatttaaagtacgtgattcaaaattgttgttgctcaaaatgaccgagctagtctcaagagctttgctaatgactttgccatctkggaaggcagagaacttaaaagataattattttaggggtgagggactagcacaagattacaagaatatcaaatgtaaatgaaaagctttggccatagcaaacactgacaaactgtccacaggaatagcttacctaaaatccaattaaaacagtaaggccccttatttaattgcccttaaataggaagtccaacccctaaaatgtatgcctaagggcgacagaactcttcactgaaacttctcctgtaaggaaccgcaaatcactctac

SEQ ID NO: 37265 - DNA, 533 bp, Homo sapiens
atgttgcagtgagccgagattgtgccactgcattctagcctgggcggcagagtgagaccctgtctcaaaaaaaaaaaaaaaagagatggttgaagctaatataattatgaagagtatagaaagaatgaactcagatttatttyttattcgaatctacatttcagctacacaggagtatgaaatctcttaaagatgagcctgagtaatccagagtatattttcatccataatatcatcaataatttcagttcagtcatctcagtgacaacttagacatttggtgaaaactcattttcattttatatgatagcagcaggttgtgcaggacatgaaggctatacagttttgtgaggcctccttaagtaaaaagtaaatgcagcactgtaaatatacactgagttattgggactaggaagcctgatgagaggcccacaagcttgagctttagtagcttcaggtcagtctgcttctggttaacaaatttaatttcatttatatagagtgaaaagattcattgtaagtaaagcgtaact

SEQ ID NO: 37266 - DNA, 533 bp, Homo sapiens
atgttgcagtgagccgagattgtgccactgcattctagcctgggcggcagagtgagaccctgtctcaaaaaaaaaaaaaaaagagatggttgaagctaatataattatgaagagtatagaaagaatgaactcagatttatttcttattcgaatctacatttcagctacacaggagtatgaaatctcttaaagatgagcctgagtaatccagagtatattttcatccataatatcatcaataatttcagttcagtcatctcagtgacaacttagacatttggtgaaaactcattttcattttatatgrtagcagcaggttgtgcaggacatgaaggctatacagttttgtgaggcctccttaagtaaaaagtaaatgcagcactgtaaatatacactgagttattgggactaggaagcctgatgagaggcccacaagcttgagctttagtagcttcaggtcagtctgcttctggttaacaaatttaatttcatttatatagagtgaaaagattcattgtaagtaaagcgtaact

SEQ ID NO: 37267 - DNA, 805 bp, Homo sapiens
cttgagcccaggagttcaaagccacagtgaactgccatgccactgcagtttagcctggggaacagagtgagataccatctaattcttaagaacatttttttaggtggcatattctggtctcctgcagtagctatcacaatattgcccccaggtgaggtttaacaacgtaccccacctactaatatgtataagaatgcctgtcacttaccctcatcggcacagtatgctattaaactttatgatctttgccaatctagtgggtgaccaggggtattttagyattaccccttttcatgagtatcaaatgtaatttttgtgtttgtcttgtatgggtctgtttaagtatctttctacctgtttaaactagatttgtttccttcctttattacaaactattcatttcaactctactaagacacctgttttatatgtaattcctgggcatgaagctgtgttcttattagatcaaatctgaaaacaacaaaaatttaggaagacacttaaccagaaataaataagaagtgaagaaaatttttaaatgctcctaagagtcacaaaatatgcacatatattcacatatacacatagcataaacacacatgaacacatacacatttaaacaactgggaaggaataccatgtatttgcaaagaaatacccccaaaatatgaaagtgtcaatttcacttaatttataaatttgatatatttgtttgagagggttgataagactaagctaatctctaaagatcatcagaaaaataagcaagtaaaaattgccagaaaatttctgaaaaactaaatca

SEQ ID NO: 37268 - DNA, 1059 bp, Homo sapiens
ttacagatgtaggcagagaggggctgatgacaggtggaggagagggacgagcaccctttcaaagggagctgtccgggatgacatgggggtgctgtgtgtgagataaggaacactgacggagggccagctttggtgggcgcagggaggaggggctgggcacatcgagtctgaggtctttaaggtatgccaagtggagaacgtcaagaacaagagagctggatgttcatgttcagaaatccaaggtgggtgcggagagaatatggagtgagggcaggaggatacaggttagagactccacaaacctttactggtggtccagaagaggcagtactaggaaggagacagagaaggaacagccagaagggtttgaggaaaactacgagagagaagtgtcaggaaagccctggaatagtgtttcaaacgggaagagcgccaggagcgctagatgctgccgagcagtcggctaagatgaggcctgaaagctgcaggccacctgtcaccccaactgctgagttggagagaagagggagttagcagggaagaggctgaagagcgagtgagagataagaaaatggggaaagttaagtttagagaattagtcgaagtttggctgcaaagaagagaaaagaaggcaggggcaacagggagaagagaggctttgacaggrcagaagagaggctttgacagggcagaagagaaaccagtgtgctgagacgtcgctgggaagggtctggcagggtggagcgttctggatattgaagagttacatacacattagaacgcaaagctctgccaaggtgggcggggatgagcgctaggggctttgggtggacagaggcaaacttcccactgtcacaggagaggagacaagaacagtgcagatgcttgggaattagtggccgcaggagctctcctgtgacagcttttattttctctgcaaatgaagtaggtgatgaggtaatgtgtggagtgaccttgggctaagtcacatcactgtgctgggctgcagttacctttctgtaaaatcagggtgacagctgcctcacatagtgcttatga

SEQ ID NO: 37269 - DNA, 647 bp, Homo sapiens
taaagaaagatgacagttcctgtcatcatgaggccttccctgatcgccttgtycccaagcactggtcctgctttctgaagactccttgagctgttgatacactgtgagtgtgtttataaccttactctgcaattgtttgtttgctcttttcttcttgtgcaaggagtgagaccatgggctaaggctcgaagcagaaagacattaaggtgcactccaggaacagaaagacggccagtattacgggttcaaactcgacgcaggacgtggcaagaggcaaggctgaaggaaagagtcgtggatgtcacagtagaagtctggacttcgtccgagggcagtgggaaaacatcaagaggggcgggaccacttttgcattttttttttttttttttttttttgagacggactctcactctgtcacccaggctggagagcagtgacgcgatctcggctctctgcaaactccgcctcccgggttcacgccattctcctgcctcagcctcccgagtagctgggactacaggcgcccgccagcacacccggctaatattttttgtatttttagtagagacagggtttcaccatgttagccaggatggtttcgatctcctgacttcgtgatctgcccgtcttgggctcccaaagtgctg

SEQ ID NO: 37270 - DNA, 582 bp, Homo sapiens
cctacaatttacaagaaaaaactgcctccagctttttttggatgcaaagcaactggagtgctgttttggaacatccctgttgagggaacttggccactagaattgctggaaatgagacagcgtttgtcaagctgctcaagtcacacctcagctaaacaagtgtccctgtgtctttcaaacatttttcmaaaaaaaaaaaaaccatttatttctcttggtaaagaaaagcttttattgctgagccactcaataaagaagggtttcaaggaaaaggaaaactcctgacatttaagaagccaatttcttctcccctctccccctgagcccactgcaatttggtttcctgccaccaccttcgcctccgtgaccatcttaaagtcctcactgacttccatgttgctaagcacggtggccacctcttagtgctcatgtggcttctctctctcggcagcatttgatagagatgataatttgccttaaaacgcattctgttcctggtttccaggctgccatattgcctgggctccctcaaaatttcccactgttccttcccaggcttccctgtctccctggcctctccca

SEQ ID NO: 37271 - DNA, 556 bp, Homo sapiens
ggggtgtttatgtctgaggttgaatttttataagaatcccatctagatcaagggaaactggaaattcctacggggtacctggtgggtctgacccaggggatgttgtggaaacgcgtgagaaggcctgagcrgttgtgtttgcagatcctggatccttcccgacacgccagctggctcttctgcaggcagctcccccgctgccccggcggggccaccccatggccccagcgcacgcacaggtgggtcctgtcttgcctcgttgtgcagatctggcgtgggaggaatccctttcactgtgatccgtcgggttgagcctcctgcaggagcctccccgtggcacgtcttcagtgcaagcctggaccacccggcacccacagagacgattgtcttttgtcctggagcagccaggacacctcccgtcaccgctggggacagcctgaggagatgtccacgcgtgacacaaagcctgaggagatgtccacacgtgacacaaacccacaccaaggcggcttgcaccactcctgtttgtatttacgctctttttttttaaagggca

SEQ ID NO: 37272 - DNA, 556 bp, Homo sapiens
ggggtgtttatgtctgaggttgaatttttataagaatcccatctagatcaagggaaactggaaattcctacggggtacctggtgggtctgacccaggggatgttgtggaaacgcgtgagaaggcctgagcagttgtgtttgcagatcctggatccttcccgacacgccrgctggctcttctgcaggcagctcccccgctgccccggcggggccaccccatggccccagcgcacgcacaggtgggtcctgtcttgcctcgttgtgcagatctggcgtgggaggaatccctttcactgtgatccgtcgggttgagcctcctgcaggagcctccccgtggcacgtcttcagtgcaagcctggaccacccggcacccacagagacgattgtcttttgtcctggagcagccaggacacctcccgtcaccgctggggacagcctgaggagatgtccacgcgtgacacaaagcctgaggagatgtccacacgtgacacaaacccacaccaaggcggcttgcaccactcctgtttgtatttacgctctttttttttaaagggca

SEQ ID NO: 37273 - DNA, 556 bp, Homo sapiens
ggggtgtttatgtctgaggttgaatttttataagaatcccatctagatcaagggaaactggaaattcctacggggtacctggtgggtctgacccaggggatgttgtggaaacgcgtgagaaggcctgagcagttgtgtttgcagatcctggatccttcccgacacgccagctggctcttctgcaggcagctcccccgctgccccggsggggccaccccatggccccagcgcacgcacaggtgggtcctgtcttgcctcgttgtgcagatctggcgtgggaggaatccctttcactgtgatccgtcgggttgagcctcctgcaggagcctccccgtggcacgtcttcagtgcaagcctggaccacccggcacccacagagacgattgtcttttgtcctggagcagccaggacacctcccgtcaccgctggggacagcctgaggagatgtccacgcgtgacacaaagcctgaggagatgtccacacgtgacacaaacccacaccaaggcggcttgcaccactcctgtttgtatttacgctctttttttttaaagggca

SEQ ID NO: 37274 - DNA, 556 bp, Homo sapiens
ggggtgtttatgtctgaggttgaatttttataagaatcccatctagatcaagggaaactggaaattcctacggggtacctggtgggtctgacccaggggatgttgtggaaacgcgtgagaaggcctgagcagttgtgtttgcagatcctggatccttcccgacacgccagctggctcttctgcaggcagctcccccgctgccccggcggggccaccccatggccccagcgcacgcacaggtgggtcctgtcttgcctcgttgtgcagatctggcgtgggaggaatccctttcactgtgatccgtcgggttgagcctcctgcaggagcctccccgtggcacgtcttcagtgcaagcctggaccrcccggcacccacagagacgattgtcttttgtcctggagcagccaggacacctcccgtcaccgctggggacagcctgaggagatgtccacgcgtgacacaaagcctgaggagatgtccacacgtgacacaaacccacaccaaggcggcttgcaccactcctgtttgtatttacgctctttttttttaaagggca

SEQ ID NO: 37275 - DNA, 556 bp, Homo sapiens
ggggtgtttatgtctgaggttgaatttttataagaatcccatctagatcaagggaaactggaaattcctacggggtacctggtgggtctgacccaggggatgttgtggaaacgcgtgagaaggcctgagcagttgtgtttgcagatcctggatccttcccgacacgccagctggctcttctgcaggcagctcccccgctgccccggcggggccaccccatggccccagcgcacgcacaggtgggtcctgtcttgcctcgttgtgcagatctggcgtgggaggaatccctttcactgtgatccgtcgggttgagcctcctgcaggagcctccccgtggcacgtcttcagtgcaagcctggaccacccggcacccacagagacgattgtcttttgtcctggagcagccaggacacctcccgtcaccgctggggacagcctgaggagatgtccacgcgtgacacaaagcctgaggagatgtccacrcgtgacacaaacccacaccaaggcggcttgcaccactcctgtttgtatttacgctctttttttttaaagggca

SEQ ID NO: 37276 - DNA, 945 bp, Homo sapiens
tgggatccgggtcctggttctcaccctggttgttggtgaggtgccctcgggtggggttctgtctttggggcctgtgccctctcgatgacacgaggacatacccctccctgtccactctgaggacgggatgagatggcgcagggtgagagcccaggctcatcacatgggcatgtgctgtgagatctcatctggtggccccacgtgggtttgcatgggcttcccaccagctgggggcagggactttgccctctttatgtctgctgcacaccccccatgcacagagtatttgctttttagtgttggggagcggagcatccggcacggacacagaatagggcccagtggctggtttggctccaacagggaggacagtcagtttcccagagctgcccaaaccaagccccacagaatgggggcctgaagcaacagccgtggacgctttcacagctctgaggccagaagtccaagatccaggcgagggcaggccgggttccttccragactctgggggagaatctgtccctggtctctctccagctcccgctgctgccggccctctttggccatccttggcaaaccttggcactcttcggccctcctatgtgacccttggccctccttggccatccttggtgacctttgtccctcttaggtgacccttggctgggaggcgcatcaccctgacctctgtctccattttcccttggccttctcccctgcgtgattttctccaagtgccccctttttaagaggccgtcagtgccgctggattggggcccactctacccagtgtggcctctgcttaatccctccttaaagaccttatctcctaagagagtcccattctgaggtaccgggggctgggacttccacctgggaatgctgagggacatgattcaactcaggggttcacggggctgcaggaccaggactcctgacagaact

SEQ ID NO: 37277 - DNA, 644 bp, Homo sapiens
aggtggcacttgaaaggcttctccttgttgtggatgttccggacgtgccgctggaggttcgaagagatgctgaaggagcggtcgcagtacttacacctggaaggggcacacgcgctcctcagtgcaggccccggctctgcatggcaggccgggccacagagggtggggggaagggagcccgcgcccctgccccgtgccccgtgcacagctttgccccgccgtgtcccggaggttgctggatctcccagctgcagagccaaaggcatcctggggaagctgtccctagaaacagccccggcttcaagaagcaggggttcacgcctataatcacagcactttgggaggccaaggcgggtggatcacgaggtcaggagatcgagaccatcctggctgacatggtgaaaccccgtctctactaaaaatacaaaaaaatcagccagtcgtggtggygggcgcctgtagtcccagctactctggaggctgaggcaggagaatggcgtgaacccgggaggcggagcttgcagtgagccaagatcacgccaccgcactccagcctgggcgacagagcgagactccatctcaaaaaaaaaaaaaaaaaaaagcaagcaggcgttcaccctcctactgttctgtggctggctggt

SEQ ID NO: 37278 - DNA, 620 bp, Homo sapiens
cacacaataaatttaataacataagaaaaaattaacttcacattaatagatagaatacatgtcacaatgttaactgtggaatgaggtccacgagagaagtgagatctcagcctgctggctcagatgaccaggggagatggctgcatgagggagtttggaaacagacatggagaatggaaagaatttaagtaagtggggggtgtttcgcaaatccaaaatagcacaagcaaaaaggagtgtgagtaaataagtctggttggagtgaagaatttatattcagcaatattgatgaagcttgaaaaacagttgaaataactgtagaaatcttaaagtctgaggagttaagacttaatcctgccagcatgaatatccatccaaagatcgtaagcaagaaaatgcctggatcaaaaggcgttgaagaaaagtaattaccagcagcacgaatagcaccayttggagagagaccaaaagtatgtgtagaaggcttcagaatctattggtcaattccaaactacccctatattactcagtcttaattaaacttagattactatcatcttttctttcctacaaaggctgctacttcaaaaccatgtaaacatatttctggagcatgggta

SEQ ID NO: 37279 - DNA, 912 bp, Homo sapiens
gggcagcaacttggccaaggagcgtgcggggttggacacatccccctccctagcctggagccttcagctgccacacagcccgagggaaggtgcgctggggtcagctcacgggggccatgctccccttcctccagggaggactccagccagctctgtcctgctgcagcacggcccccaatgccagcttcacctctgtcctccagtctggaggtgcacagggccttctgccttcagccaccccatgacttctgccccacaccctgmcaccattttggctgttaatttcataaagaggccgttgttcatctagatggcctttacaaaacacgtccccagtgagtggaaacatttagttaataatttaacactgtgctggctgctgaattttcaggcccccaaataagatcgatggagctaacaattggcttattgagtgtcccggctctatttcctgaagacacagacacgcgtagaagggacagactcagagtgggggagggagccctgtgcagggggaaaaacgtagatggtattgatgcaagttgtcaaaaataattgttttattttccctcggaatgttccagacatccccagatgcactgatccatggcgctggctctccgggagcgggtgtttggtatttatggcgttttgcagcacctctgagatggggatcaggtaaacgctcctgcctcacactggtgccatctgtccccaaattgtttcaggaacggggtgaagggagggagaggccaccacctgtacctccctccgaggggcaatggtggcttggagggtgggctcgtggggtctgcttggggatttagggggtacagtgtgcaaagggcccaggtaaggactcggctaccacagcagaggatcccccgaggcagacccagacctggaagcccc

SEQ ID NO: 37280 - DNA, 1099 bp, Homo sapiens
aaccataccctctgctcctgaagcagggagggcatactgacttgttccctgtggaagccctgaggctcctgtcctagtggatcacgcgtcccttgcacccttgtgaatgcgcacccggctcttttgcaagatgagcagtcctccaggataccagcagaccaccaggtggttacaagttcctgtcacctgggacaacccatgaaagagaacaaagatcccttattttggatagaatcccctccccaatctcccaacaatcagcaccaaaagcccaagaagctgttagctacaaactcctgccttgggtgtggtcggggcctctctggggtcctgcatgtgcagctgggcttaaggtttagcttacagtggaaaaagctgatggaggaataagccactacttttttcctcatattaatagtaaaaaacacacctctaagtggagattttctacactaatgacacatgtggtgcgtgttggagctggcagacactgagcacgtgcgccaaccacaggttcacctttgcctcccggacctcaccagtattttatgaagatggatgtgcagttcccatgaaaggaattcccctcgaggcaccaggggccgcctctgcctctgagcagcccgttctgcctcagagygggctttcacttcacaatacatttctgtgcctcctcttggactcgctctcaaattcttttgtgcagcaaagtcaaaaaatcagaactagcccacccacctacctcactctcgggctgccctctgcctctagaactttctcctgaaagccatgaggagggaatgagtgtcctcagtctgggtcagggttgagccggtaacgttctataacctcaggggctgtgcgtttgctcgaaagtattacatgcattttgggctgaggctttactagattgttgtttatcagtccttgcagtggcagcgtatcgaatcaattgaaggaagagtcaggctttgtaaaatgtgatggaaaaaattcgatgttgggaaggtcttagtttacgacgcgaagtcttctatcctattatttctcacgagctcgcgcttgctgcgcgtttacagaggtagtgagcactaatcga

SEQ ID NO: 37281 - DNA, 1086 bp, Homo sapiens
atcccacttcctggaggaactgctgggtattgtggtacactgcggatatgctgattagagaaaggaggctgattagagaatggatatttccagaatcaaggaggctagagggagaccctcaggcacagcaaccttctctccagaacatgactggagggcagcagccaccttggaggagatactagggccggatgcagaaaccctcatgaatcgggtgtggctacgagaaacagtgtctctggaaacagaagcccccggacagagaagcccccggttacataaatgagtttttgcaacaggagtaaatatctaaggaagctgatgagctgagaaatctggaagttctttccatcactgtctctccatgactgtgcttctcagagcaagtttaggaaaatgaaacttatttatgtgtgaattttaaaaataaataaacgtaacttctacaaacgtggtctaggacaggcttgttcaatctgcaggccacatgcagcccaggacgactttaaatgtggcccaacacaaattcataaactttctgaaaacattatgagattttactgtgattttttattagctcatcagctattgktggtgttaatatattttatgtgtggcccaagacgattcttcttcttctggtgcggcctagggaagccaaaagattggacacgtctgggttaggacattctgtaagaaagaggagtaatgctcctttatatattagaaacatgcaaaaaaaatccacagagaaaataaaattacaatccaacactccaacgtgaattgagaaaaacgttattataacacagtaaaagtcagacaaatacagcacaatgtagaaatgtaagatctaagaaaggacagtttgacaacaggatttgatgtctgcacaatgtggaaaggtgaaataagggctgatggtcttagaaaaagtgtggataaaggcaacatcatttcaggaatgaaggctggacctgagaagctcagggagggggtgaaccgtcaccaccactaccaacctcagcctcacagtaagtcctgggggctgggatgggaacggtggatggacccaaacagtaggga

SEQ ID NO: 37282 - DNA, 627 bp, Homo sapiens
cctgcatgcattaggtgtttgtgctaatgctctccctccccttgcccccactgcccgacaggccctggtgtgtgatgttcccctctctgtgtccatgcgttctttgttcaactcccacttatgagtcagaacatgcagtgtttggttttctgttcttgtgttactttgctgagaatgatggtgtctagcttcatccgtgtgcctgcaaaggacatgaactcattcttttttatggctgcatagtattccacggtgtatatgtgccacattttctttatccagtctatcattgatgggactagttttatgattcatttctatcatggcaatttctatatgatattgctgttaatatgtagatgctattcccactgagctgtgaactactcaaggcagggggtgtgtcactcatttcagacctccagcccttagcactgttccccacatcctgagggcatccaatacacctttgtcaaatgggttgaagagttgagcttagaaatttacattctttgttcctgggaaggctaatcatagagaaggcataaacatgaaacattaaacaagagagtttartcatattttaagattatctgagaaaaaaatgaaagacaatccagcacaata

SEQ ID NO: 37283 - DNA, 551 bp, Homo sapiens
tttcccctttcctcccaaccttgaagagattagctgagagtccagcacctcttaaaggtctaaacaggaaacatttgctatctattgtttctaagggcagccacctatgagatttcgtataataagaaccttggtctccaagccccttctctttacctagacactcctttctattgattccagatctttggataataataacttgactctttcaatcaactgccagtcagaaaaccttgaatccatctatgacctgtaagcaccccacacacgcatccttccttmaagttgtcccacctttcctgacgaaaccaatgtatacttcacatgtattgattgatgtcttatgtctccctaaaatgtataaaaccaaactgtaacccaattgccttggtcactcatatttggctcagggtaaacttctttaaatatttttaaaaattagattagcttaataataattacctattaaggcattaggtggttatttcttgttttaaaccacaactcccaatggataccaaattcactatagtggcaatcttctcata

SEQ ID NO: 37284 - DNA, 631 bp, Homo sapiens
caccgycccgccgccgacgcccagtagagcccccggggcggtccccaccgacggcgcagcccgccgggaccgggagaaagcagctgcggacaccgcgcccgtgcgtctgcgcgcctggccgccaggtgacccagcagcccggccgccgagatgcccaacccgcccaggctccgggcgctgtgacttcgcgccgctgtgtgcgcctccccgagcgccggctgcgccccccagcccggcccggggcctaccgcctgcccggccccctgccactgccaggaggacggcatcatgctgtctgccgactgctcttgagcttgggctgtccgccataccgggggacctggatcccctgacggcttacctgtgagtactgcccgcctgtctccacctggtactgcgggctgctggcttgcacccagtcctggcctcagcaggacacctgcttgcttggtgccctggggcgtgggcatcccggagagggttcacccccttccaagttgaccgttgcgggactggggaggggagaagagtctgagactaaatatcaggcgagcagggagaccaggcttccctgacttggcttccccattggcctccgtgcttgtgggctgactgcgggagcccaggtttg

SEQ ID NO: 37285 - DNA, 631 bp, Homo sapiens
caccgccccgccgccgacgcccagtagagcccccggggcggtccccaccgacggcgcagcccgccgggaccgggagaaagcagctgcggacaccgcgcccgtgcgtctgcgcgcctggccgccaggtgacccagcagcccggccgccgagatgcccarcccgcccaggctccgggcgctgtgacttcgcgccgctgtgtgcgcctccccgagcgccggctgcgccccccagcccggcccggggcctaccgcctgcccggccccctgccactgccaggaggacggcatcatgctgtctgccgactgctcttgagcttgggctgtccgccataccgggggacctggatcccctgacggcttacctgtgagtactgcccgcctgtctccacctggtactgcgggctgctggcttgcacccagtcctggcctcagcaggacacctgcttgcttggtgccctggggcgtgggcatcccggagagggttcacccccttccaagttgaccgttgcgggactggggaggggagaagagtctgagactaaatatcaggcgagcagggagaccaggcttccctgacttggcttccccattggcctccgtgcttgtgggctgactgcgggagcccaggtttg

SEQ ID NO: 37286 - DNA, 1013 bp, Homo sapiens
tattccaagcacaacatgagaaagcagcaagaatctatggcaaaagctgttcttgttcacagctgctggagttatgagcaatagcctttcagcatagctctcaaggatccaagcggtctgaataattaaacctgggtccccacacggcccggcgtttctctacatgcaggtgccatttctgggtcaaatgtgaaacagccctgctggagaaacccggagaatgacttggctgccctctctgcaggcgtctggaaccaagtggtggtttggaacctgtgctgtaggctgcagtggtcctcactgtggcctctgagcagcatccgtcatgcgcggcctcctcactttctcatcacggccagtggcaccagaacatagtagagcacttagttcatgctagtcacttcctagggtgacgtaattgacattctcccaaaatgagtctcccaaaaatgaccttaacttgtgaaaagaaagtaaattctgcatctctgatccccacttgtgaacctgggtgtctggcrccttggggaggactcagggcgcataagcggcctcttctgaggaggtcacgggatgccaggctgcctgggtcatcagtgtggaaacaactggccaggaggcctgaccctcaggtactgggcacgcccctgtctgaccagaaatgcatctcaaatgctgccccaaacaggaaaaccctgttcttcagtgggaagaacacgcacatcagccggcaggcaattctgggcaagtctccagggcacttctcctggaacctggcagcccacataacgagatgcaatctctttgtgacaggccacagaacctcttctctgtcagagtaagatggatcactgttctaacaactgaaaaacggtcatttatggactacagagtcaaagagggacaaagttctttcattcctcatgctaccccaaactcaagaatgttaaaaataaactgaagataagtgcttatgcaaacataaataaaaatatcaagagaaagtccacata

SEQ ID NO: 37287 - DNA, 1164 bp, Homo sapiens
ctttagctttgactagtgcacctgcccccgggagcatctggggctgttagagaagctgtgggcagcctccactcagcccaatcagatggcacacacccacctcatggggacctgtgcacagctggatggtcccagctctgcagggmgagaggattagaccctgtgtggcataacgacaccagtttctggaaaatgttggagttctagaagtataataaaataatttttcaattaatgatgtgtagtttttgcccccgaagggatttataatctctatagaaggtcagataagccatctctacaatgattacaactcataatgataaaaccaactgtgtcatgtcagggacagttcagggaagggtgagagcacagtggctgggacccaggatggaggtgggggctgaagtgaaggctgcacagccatgtgtgaaacagggtctttccctgacctccaggtgggcgcaggacttctcccaaagggtcctgacagctatggggacgaggagtcctatgaactgctcctgagggaagcccgtcgttcccgagcctgtgtgaaacacttatgatgcccagagagtacattccatggggccacgattgcacacgtgtgtgtgactatacacacacacataagcacacacaccacacatacaaacattcacagaggcgcatgtacacatgcaaacacatgaacacacccaggacacgctaagatatgcatacacaggcacacatgtacatagttgcacaaatgcatacatatgtacaaagatgcacacattgatacacacatgcacatgtgtgcctacacacacacacacacacacacacacacacagtaccactaccaccaccaaggaagtccaacattgtagaacaaccaggggaagaaagcccgtcaactgagtagacagcaagctgcgtatctcttttaagtccgtctatgtcgtgggactgttctgtaagtggccgtggacaaacccagctctccctgtttctggctggtacctctccagaatgactggaatgcactgggaatgcaacagactgagaacaatcaggctttgtttgggccccgccccagaaacaagacatccttcaagctttagcccagcattcacaggaccccagggtataaaacccactgcgggctgctttctg

SEQ ID NO: 37288 - DNA, 1164 bp, Homo sapiens
ctttagctttgactagtgcacctgcccccgggagcatctggggctgttagagaagctgtgggcagcctccactcagcccaatcagatggcacacacccacctcatggggacctgtgcacagctggatggtcccagctctgcagggagagaggattagaccctgtgtggcataacgacaccagtttctggaaaatgttggagttctagaagtataataaaataatttttcaattaatgatgtgtagtttttgcccccgaagggatttataatctctatagaaggtcagataagccatctctacaatgattacaactcataatgataaaaccaactgtgtcatgtcagggacagttcagggaagggtgagagcacagtggctgggacccaggatggaggtgggggctgaagtgaaggctgcacagccatgtgtgaaacagggtctttccctgacctccaggtgggcgcaggacttctcccaaagggtcctgacagctatggggacgaggagtcctatgaactgctcctgagggaagcccgtcgttcccgagcctgtgtgaaacacttatgatgcccagagagtacattccatggggccacgattgcacacgtgtgtgtgactatacacacacacataagcacacacaccacacatacaaacattcacagaggcgcatgtacacatgcaaacacatgaacacacccaggacacgctaagatatgcatacacaggcacacatgtacatagttgcacaaatgcatacatatgtacaaagatgcacacattgatacacacatgcacatgtgtgcctacacacacacacacacacacacacacacacagtaccactaccaccaccaaggaagtccaacattgtagaacaaccaggggaagaaagcccgtcaactgagtagacagcaagctgcgtatctcttttaagtccgtctatgtcgtgggactgttctgtaagtggccgtggacaaacccrgctctccctgtttctggctggtacctctccagaatgactggaatgcactgggaatgcaacagactgagaacaatcaggctttgtttgggccccgccccagaaacaagacatccttcaagctttagcccagcattcacaggaccccagggtataaaacccactgcgggctgctttctg

SEQ ID NO: 37289 - DNA, 658 bp, Homo sapiens
ctgaccatcatatggaaaacaatcaaattagatctttagggtaggaaacgattccctaagacttcaaaagaccaaactataaaagattggtaaatttgggccaggtgcggcggctcacgcctgtaatcccagcactttgggaggccgaggccggcggatcacaaagtcaggaaatcgagaccatcctggctaacacagtgaaactccatctctactaaaaatacaaaaaattagccgggcatggcagcatgcgcctgtagtcccagctcctcgggaggctgaggcaggataatggcgtgaacccgggaggcgaagcttgcagtgagccgagattgcgccactacactccagactgggcgacagagcgagactctgtctcaaaaaaaaaagattggtaggtttgatttcagaatatataaaagttttataagactgaagagatctacagaagtaaagaatagaagctcctgtttgatcagatcagaatcagaacaatamtactcaggaaaatatcttgtatcacattttaaaataaaccaagtatttttatggcaacaggcatatatggtaaaattataaatataggcaaagaaaacacaatcaccaacttcaagacagtagttatccgtatgagaggcaagagtaagtgatggatgtg

SEQ ID NO: 37290 - DNA, 1308 bp, Homo sapiens
aaatgtgaaaaaaaaatgataatcttaatacacttgttttaatccccttcagcctgagaagtgctagtgaagaaagttcagttgggcttttaaaatcagagacattttaatggcatatatggatagtttctgtttgaactcagcttagaaaaatattctgagtttttggtgtgtgatgttccccttcctstgtccatgtgttctcattgttcaattcccacctatgggtggggggaagggggagggatagcattagaagatatacctcatgctaaatgacgagttaatgggtgcagcacaccaacatggcacatgtatacatatgtaacaaacctgcacgttgtgcacatgtaccctaaaacttaaagtataataataataaaattaaaagaaaaagaaaaatattctgagttttcaaggtaatacagaatatgattttcacacacatcactttctttaattcagaatcaatgcagatgaacagttttattgtggagtaccaattattacatgaataaatgttgtggtaaaacttggttttcatttttgtcaatagattgtcattgtatttcaagtataaactaatctaaattattaatacataatgaaatttgtattttcaagaaaatatattctaccaaatgttctataaattctattaaatgactataatttacagcagtctacatcgaattctggaacaaaaacattacattctaatgtaagttaaaagagaagaaaggagacacagaaagatgccaatagttcatatttataatattaaaagaatttataaatattaacttaatgaggtaaatgtgtatctttgtcttatatttactcaaatgaggtgtatctgtgaaatttctagaaaagtatttagaattacatatgtacggactatggttctaaaaacacacagctcaaatttaatgagctaaaaatttgttaacatgtataccccttagatctttcatattttatgtatttctagaaaacagtagcagcccaattgtacaacaaaactaaatatgcttaattttccatcacttaaaaatttcacttatttaaaaaggcctcaaatttcaatgcttatattgtatcatgaagcagaaaaacaaatggaactgaattacagtggctaactgttctttcagagtcctgtcttaagtgaataatggtattgaaattgtttcttacatgttattttgaactccaagtttctttggattttgtatgcactttggagagcttttgatcttttataaatatatttcaaagcaccaaaagatggaattgttttcctac

SEQ ID NO: 37291 - DNA, 596 bp, Homo sapiens
ttcatgaatagtttagcacccttggtgctgttctcatgataatgagtaagttcttgagagatctggttgtttaaaagtgtgtagcaatcccccmcacacacacccagctctctctcttgctcctgctttggccatgtgatgtgcctgctaccccttcactttccaccataattgttaagtttcctgaggcctccccagaaagggagcagatgctagcatcatgcttcctgtacagccaacagaaccatgagacagttaaacctcttttcattataaattacccagtctcaggtacttctgtacagcaatacaagaatgaactaatacagattgctttccttgatgtgtgagagtcatcatctctcctcttggttcattattgggtgtgctataaataaaatcattagcaattaaagtgagatttgcccacacacacaaaaagcaaaataaagatatttctcaaacatgcacatgatgaaagaattcctcatcagcagaactgcagtacaagaaatactaaaggaagtagttcaggcaaaataaaactaataacaaatctgcatctatacaaaggaatgatgagcatcaaaaaatgg

SEQ ID NO: 37292 - DNA, 642 bp, Homo sapiens
atagaagcatgtgtactagaggacgcatctgtaaacctgctggtatggtttggctctttccccacccaaatctcaacttgaattgtatctcccagaattcccacgtgttgtgggagggacccgggggaggtaattgaatcatgggggctggtctttcccatgctattctcatgatagtgaatacgtctcatgagatctgatgggtttatcaggggtttccacttttccgtctttctcattttctcttgccgctgccatggaagacatgccttttgcctcctgccatgattctgaggcctccccagccatgtggaactgtaagtccaattaaacctctttttcttcccagtcttgggtatgtctttatcagcagcgtgaaaacagactaatacacctgctaatattttcccgtctagaaaaactcaaattctagctttctccataccactcctcatggtcttmttcataagcaatgcagtgtttccagaggctatttgaacagcagtagtatcatgacagataatagtttttaaaaatgaaagctttgcacaacatgtatctggtaagggacttgtacccaaaatatgcaaagagctcttaaaattcaacaataaggaaacaaacacctaaatttaaaaatta

SEQ ID NO: 37293 - DNA, 642 bp, Homo sapiens
atagaagcatgtgtactagaggacgcatctgtaaacctgctggtatggtttggctctttccccacccaaatctcaacttgaattgtatctcccagaattcccacgtgttgtgggagggacccgggggaggtaattgaatcatgggggctggtctttcccatgctattctcatgatagtgaatacgtctcatgagatctgatgggtttatcaggggtttccacttttccgtctttctcattttctcttgccgctgccatggaagacatgccttttgcctcctgccatgattctgaggcctccccagccatgtggaactgtaagtccaattaaacctctttttcttcccagtcttgggtatgtctttatcagcagcgtgaaaacagactaatacacctgctaatattttcccgtctagaaaaactcaaattctagctttctccataccactcctcatggtcttcttcataagcaatgcagtgtttccagaggctatttgaacagcagtagtatcatgasagataatagtttttaaaaatgaaagctttgcacaacatgtatctggtaagggacttgtacccaaaatatgcaaagagctcttaaaattcaacaataaggaaacaaacacctaaatttaaaaatta

SEQ ID NO: 37294 - DNA, 727 bp, Homo sapiens
cttggtggctcaatggcccaaccgcctccctgcacagacaggaaaacggagtcctcagaagggcggggcctgtcgagggccacacagctgccgggggggacctcagaaggaggggtctgtggagagtactccaggtcccctatagtgtttgaacagggccttcgaaagattcctgtcctcccagaaccccagaatgtggcttatgtagaaacacggtctttgcagatgtgattagttgaggatctcaaggtgaggccattctggaccgaggggctcagatccagtgacttatacgaagagaaggaacaaacccagagacacagagaagaagccacgccgggacagacgcagagatcacagygacgctaccacgagcccagggccaccaggagctggagacggcggaggacccgctacgcttgcgggggagggtggacctgccaacaccaggattttgcattctggtctccagaacagagagaagagaccgctgtagttttgggcactcagtttgtggtattgagccccaggacacccatgcacaaatgagagggtgcaggggtcactctgggacagcaccaaagccgggggggccccaggggccactaaggaggttcccacgtggagctgtggctgcccttgctgggtttgggaccctcagccgggtccaggcggacagagtctgtttccagcacagccccgtccttttgctgggcggtttgcctgg

SEQ ID NO: 37295 - DNA, 714 bp, Homo sapiens
ataggatcgtttttaattttctgcttagtaatatttcctctctcttcatggttggattctccttggcttcacagcggggagctgtctctacaaatagcccttgtgattgactacaccagcccaagggtccctgagattgtctgttgggtcaacataatgatgtgaacacggcagtgtttattattttctcactcaacaaattaatgaaactttgcagaacatctagtatacaccaaaccttgtgctaggctctaggggtctagtagtgaacaattcagccaaagtcttagcaacatggctatggagacacagctaggcttctgtacattctttttaatgtagctacgtgctaccttatgtgccaggcaatgtccagaagaatctccctgtctcccttcccccaagcctgaccctttctggcttcagactcttcacctgaaaaatgagtaaataacaccttcctcattgtcttgttggaaagattgaagtgaaagatgcttattatgatgtctggcacagagtacactcatacatgttacctattcttactgtcatctccaataatggtaagagttcaaaaaataatatttattatctgctatgcatttatacgctaggctgtatgctgaacacttttargtacattttttgcaacactctcaacaatcctctgagatgagtctgatcatttaggtcaagggaatttaagtagtt

SEQ ID NO: 37296 - DNA, 562 bp, Homo sapiens
ttaaattcagcattatgtttccgttactcccaatcattctaaagtgatcaatgacatcaatcaactgtttcttaaggttattacacttttattatttttattattatcattatattaagtatgtttgtagcacagataaggtgcgtgtggtttattctatggatggtgataaagtaaaatgctgggatatgtttggaatattgcatttgtaagaagcttaatgttactttgacccacactgaataattcaacagggtatgatatatcaaaggtagaggcaaacaaaatctcaatccagatgactagggaaacatttcttcaatgaagtactttgaaaataacttcataaagtccttamttacttggaagtatcactgcaaatggaaggtcataggctttttggcaattattgttggatgctatagctattacctacagctcaggaagaaaggccagtacatgccaaaggcactttaagaatatgactcgatacattttataatcattttatccagggccattaaaatgctctgcaagggtcaagagccagttctttattctt

SEQ ID NO: 37297 - DNA, 838 bp, Homo sapiens
aagggaccctgggaaatgtaattccctgcttatagagaggcgagtagaggaaaggagaggaagggatctgagagcaggcagtagttgtccagcacagcttatggtttgtccattactgtttccattcaagtggtggtttaggataaccctgagatttctcattatttcaatttatattgtttgttctaaatactgagtaactacagcatgtttttaaaatgtgctaaacacacattataaatacctacataactgaatactataaatgccacaatttaataacttcacaatgtaatcataaaattttaaaatttatcagagacactgtagtctgagccttttttgttgttgttactgaaacaaattgaggttcaaagaagttaaggtgaatttcagaaaaatgcttagagatactggtttttgtatttgagtaacgtgggtgtggaaaaaagtagttatggaggaagaatgggatctaaaataaatgatcatggtagtaactgacattgtttgacacatytgtgattctccgaccttctgaataaagatatgctaacataaggggtgatggcaaatgcacacaaatgattaggaggctcacaatgctgtttgccagatctttccagttctcttcatttctggtcacatggcagcattgcaatttctggctctcttgtggttagatagggccaagtaaattgtcctggccagcgagttgtaacactctgtcacttccaagccagagcatttaattgcccgttaagaccagccagagctctgtctttcctgcagtcagaatgactggtaaaattccacacagcaactgctatgtcaccta

SEQ ID NO: 37298 - DNA, 883 bp, Homo sapiens
tgcattatttaataatagtcaaaatggaaaattaaattaagactgctagactgtttcacctagtggtttctgtgtttcgtccattatcagtctttctccccccactcccaccacctgtggattggaagaacaactgcagagtttctctattctgggaccttcacgatcatcttgatgttgtgatctgctgaccttcctaattgttgctgatccgctgatcacctctccttcccatcctgtggacttcaggctttaattcaagctctccagtttccagcctgcctgtggtctttccttcctggacactggccctgtggactttccgcttgctcagccagtccttacaattgtataatttattgtaataggtaaataaataatctatatctacatatctgtgcatttctatatccatagctctgtgtctgcacatatctctctatctccttatgtaaagtcttctactggttctgcttccttggttgaagctcttttagggacttctcaaaatagaggcttgaggacaaaggcagctcctttaatctgagtttactgttgggctgcctcccattgtccagcatagacctctcactggaagacactcgaaaaagcactggacctcagtctcccactgaggctgctatttaagagccatgaaagacaactkctctggtttcagaaagagaagtatttcccttcagatctgcaaggtcgcagtttataagactctcactctgttgacattgaaagtgccttactgtgcactcccatccctgaatgcagactggagaacacagacaatgctcatctcttctcagggttttttaaaaggggcaagaagcggccagcaaaaatcaataatctgagttttcttagtattctt

SEQ ID NO: 37299 - DNA, 571 bp, Homo sapiens
cctcattaattcagatgtcagttgttttttcccccaaatttctgaaaaattgaccagtattgagtgaggtttattattatatcattcaaatataaagtrtttattaagcacatcgacaaggtcaacaagaaaatagggaaatttcacattcttaagataaaatctttaaagatttttattgcaagaattgcatctaaattggagcgtctcattacaagtgaattttggctgttcctggaaagagattaggcagaaacccttcctagaagcactcagatagaaattacttttactgtatgctttttgtactctaatgattctattccagttttctattacttcatactggcctccaccaatttcaaatattaaggtttcttgaatttgcttggtaaaataaatagattggaagaaatcttaagctcatcattatgatttggaagtaagccaccctaaattcctgtccttcagacatttttatctgtgttgtcatgttctctgtgaagctactagactcagaaataggtctttcttttgttttcacattttcattatctcgttttattttctc

SEQ ID NO: 37300 - DNA, 569 bp, Homo sapiens
ctgcctgcattttaggtagtctcatagggcacctgagtgttggacagcatttcatagcctgtacttgcatctgatgatacaaagaaggttttctagccttgttagactttatgttgtattattcaaataagaacttctgctcttctggtctggttcctgagcagtgtgtttggtgaagtctcatccccgtctctgagataaactttctgggtccctggatcacttgtttatgaagtgttcctcacattcccgctttgtttagtttgccataggctcagcttagagcctccatggcttagtggagggcctggcatacaagaaacaccccaggaagggttcagcaatgggactgctgtgctgctccctcactttgagtaccgtggcaggctgtgctcatctgaagctcacatttaggaacagatggaatactttctgcttttgttatatttcaagaaaatgcaaactggtgattctgcaatgtggaggttggtttgtaggcttgggccttccttgcaatgatgtgttccaattcccccctccccasttatgccgcatctctccagattctg

SEQ ID NO: 37301 - DNA, 664 bp, Homo sapiens
tgcattctatttgggttttatagttatattcagtgggagagaaaaggtgaaacatgtttactccatctcatccacaaccataactccagtttcagccttttttattaaaatgtcagactgaaagtgatctaaataacttcctgtctagagagaaaaaacagtgtggtgaatgggcaggatttttctctgcccttctggtcactaaaatatttcattcttctttctacacttaaaactctccaacccaaagaaaaaacctaaagtctcagccaattacygcaaccagcttaaaatctaggctctccagttggtgttcagtcttttcctgggtgctccccttggtctgataacctatgaattaaaaaagacaagttccctgctttcaccgcacttactatacaatagagaaacaaggacaggatactcacgataatgttactatttaaaatgggaaataggctggtggcggtggctcatgcctgtgatgccagcactttgggaggcagaggcaggcggatcacttgaggccaggatttcgagcccagactggccaacgtggtgaaaccccatctctactgaaaatacaaaaattagctgggcttggtggtgcacacctgtaatcccagctgctcaggaggctgaggcaggagaatggcttgaaccc

SEQ ID NO: 37302 - DNA, 664 bp, Homo sapiens
tgcattctatttgggttttatagttatattcagtgggagagaaaaggtgaaacatgtttactccatctcatccacaaccataactccagtttcagccttttttattaaaatgtcagactgaaagtgatctaaataacttcctgtctagagagaaaaaacagtgtggtgaatgggcaggatttttctctgcccttctggtcactaaaatatttcattcttctttctacacttaaaactctccaacccaaagaaaaaacctaaagtctcagccaattactgcaaccagcttaaaatctaggctctccagttggtgttcagtcttttcctgrgtgctccccttggtctgataacctatgaattaaaaaagacaagttccctgctttcaccgcacttactatacaatagagaaacaaggacaggatactcacgataatgttactatttaaaatgggaaataggctggtggcggtggctcatgcctgtgatgccagcactttgggaggcagaggcaggcggatcacttgaggccaggatttcgagcccagactggccaacgtggtgaaaccccatctctactgaaaatacaaaaattagctgggcttggtggtgcacacctgtaatcccagctgctcaggaggctgaggcaggagaatggcttgaaccc

SEQ ID NO: 37303 - DNA, 766 bp, Homo sapiens
tttctggtagcattggaagccacatgctccagatggtgtagtcacaagatgaaagctgtttaggtccctgagcttggaggatagtcacccaagagagccacataacccatatgggactgtactgtgaaagagcaaaaaaaaaaaaaccaaaaaaccttgatatgtgaagccactgagatttttgtggttacagtggctagcattaataatcattaataattctaattaatatgcctcttgatacttgtaagagatttttagtctgggggagggaggagaagcaacagagaggataaaatgagatagaagggttgtgatgcttgagagacggggattgggggtgagcataccatgttcagagtcagtctacttctaagagaacgtcrccttaccgttcaacaagcagctgtgtttattgtccgtcctactggcatattgtgagcactttcttttcacagtagtcagtaggtccccccagatgactggctgtgacactcatctgtatttcaaaactctgtctggggccaggcgtggtggctcacatctataatctcagcactttgggaggctgaggcaggaggatcacttgagctcatgagttcgggatcagcctgggcaacatagtgagacctcatctctctctctgtataaaaactttggctggttactgtccaacataaataagttggactcctctctctcttacttcctccctccccaaatacggaaggttcctggtcttttgtgaatcaaagaacatgaaggt

SEQ ID NO: 37304 - DNA, 643 bp, Homo sapiens
tgagatcaaacccactcaaaacatcatatatagcaggtgacagggctgctgtgtagaaytgataatatggactttgtgtgaggtcacccagcccagggagggagcgcctgaaattcaactggttcatgtgtcatgccatgtgctacgtggattagtggagatcctgcctgatctctagatgcaaatccagattttagggagccagattttagggagcttatacaattggtgtagagaaaagggatttctttaagaaaaatacttataaggagaaaattagatatgaaagtagatatttatttagaataagaaatattaaatttggaaaagttaccaaggtaccacaaaatccattataataacataatatttatattacataaggcctcgatacacctctacaatacttttccacctatttactgcctgaagaatactttagtggtactttggcatatgggtgctcagttttcctagaactatctgttgaagaaaccattgaatggtcttgttgctcctgttggaaaccaattaccacatatgtgagggtttgtttctaagttctcaattctatttcattggtttatgtctctccttacgccattgctacactgtttgactactgtagctttgtaataagttt

SEQ ID NO: 37305 - DNA, 643 bp, Homo sapiens
tgagatcaaacccactcaaaacatcatatatagcaggtgacagggctgctgtgtagaattgataatatggactttgtgtgaggtcacccagcccagggagggagcgcctgaaattcaactggttcatgtgtcatgccatgtgctacgtggattagtggagatcctgcctgatctctagatgcaaatccagattttagggagccagattttagggagcttatacaattggtgtagagaaaagggatttctttaagaaaaatacttataaggagaaaattagatatgaaagtagatatttatttagaataagaaatattaaatttggaaaagttaccaaggtaccacaaaatccattataataacataatatttatattacrtaaggcctcgatacacctctacaatacttttccacctatttactgcctgaagaatactttagtggtactttggcatatgggtgctcagttttcctagaactatctgttgaagaaaccattgaatggtcttgttgctcctgttggaaaccaattaccacatatgtgagggtttgtttctaagttctcaattctatttcattggtttatgtctctccttacgccattgctacactgtttgactactgtagctttgtaataagttt

SEQ ID NO: 37306 - DNA, 643 bp, Homo sapiens
tgagatcaaacccactcaaaacatcatatatagcaggtgacagggctgctgtgtagaattgataatatggactttgtgtgaggtcacccagcccagggagggagcgcctgaaattcaactggttcatgtgtcatgccatgtgctacgtggattagtggagatcctgcctgatctctagatgcaaatccagattttagggagccagattttagggagcttatacaattggtgtagagaaaagggatttctttaagaaaaatacttataaggagaaaattagatatgaaagtagatatttatttagaataagaaatattaaatttggaaaagttaccaaggtaccacaaaatccattataataacataatatttatattacataaggcctcgatacacctctacaatacttttccacctatttactgcctgaagaatactttrgtggtactttggcatatgggtgctcagttttcctagaactatctgttgaagaaaccattgaatggtcttgttgctcctgttggaaaccaattaccacatatgtgagggtttgtttctaagttctcaattctatttcattggtttatgtctctccttacgccattgctacactgtttgactactgtagctttgtaataagttt

SEQ ID NO: 37307 - DNA, 735 bp, Homo sapiens
ctcacccacagtctttgaatttcatgctcttcattcaattatatgcaggcatataggtccaaatgccatttctgcaacacacacttcattctaggtgggcagaggtggaatttctaatgtcaaaattctacccttaatgctgtgtaggtttataagctttttgtcccagccagtagaaacaaaccacatatgctctcaattttctttggaagcttttaccaaaccacttctggtatctgtacctgtataagcccagattctttgatgtaaataagacaaacaggctctagctcacttaatcggataaattcagggattttggatgacacaaccaaaatccaaaatcggataaagggattctggatggcacatcaaatcgccaagaaaagtagggaaacctactcatgtgctacacaggaaacagtaaaaaaaaatttcataggcccggcgcgatgtctcacgcatgtaatcccaacactttgggaggctgaggygggcagatcacccgaggtcaggagttcaagtccagcctggccaacatggtgaatccccgtctctactaaaaatataaaaaactagccggaagtagtggtatgcgcctgtaatcccagctacttgggaggctgagggacgagagtcgcttgaaccctgggggtggaggttgtagtgagcagaaatcatcccactggactccagcctgagtgatagagtgagaccccatcttaaaaaaaagaa

SEQ ID NO: 37308 - DNA, 424 bp, Homo sapiens
tacaggaatctcacacatctaaaagaatgaaaattatgaagtctctttatattactcaggcaccttctccacttgcctttttgtgttctgacatattaaatatagtttaagctatgaagaataacttgaaaatttttwaaaattatatatttcaagttacaaataaccgtattatacataatcctattgttatgctaaattttctagcacagagcatgaagcaattcggttaccaaaaaaaaacacaccatagatttaaaactggtttatattttcaggtttgtcacttactagctgtgtaactagaagtatgaagctcctgagcctcaggagtattctccccagatatacacgttaaaataatttacctgcaacacctgtggaaggaacttatctttacaaatatgctttttgttttagaaaa

SEQ ID NO: 37309 - DNA, 691 bp, Homo sapiens
ccctgggagcacagcggggctgggcagaaagccgtggcttatgaatgtatgctgaaggaaggaatgaccagatgtcagcctctgggaaggagcacttgtcggatttcccatctgccattcattctgaccacacaccttatgctggtacaagtgttcatctcccagatgaaccagggagagctgcttctgctttacaggtggggaacgcaaactcaaatgatactcaggtgaaattcaccagtgacagaatgcaggcgcacaggtgaagacccagctccccaggtcagagctggtctccatcagactcatggtagcaagccygggaggaaaagaatcagagggtcccagacacacaacacctgcctcccagcctcgacctcccccggcagctcctgtgcggtggagcagggcactaggagtcaaggtggcaggggctaagggaggtaaatcaggtggacaagatgaagggaagtaacgtgttaaagggccaaacagggcctggtgcttaggtgtgtcaaatatgttggtcaaactgaagggttaaacactaaaaagctagcggatctcaaaaatacccagaacctcttccacacatcaatgtcactaaggctgtgccatgcccctaagactccctcctggaaagaggagaaaccctgaggcagctcttgttcttgggtaaactgaaagacct

SEQ ID NO: 37310 - DNA, 564 bp, Homo sapiens
cccctcctcccactacaaagatattccagactattatatcactgtaccagccttacctatgccagttacaatatccttaaaacttagtgagagagtaacaggagggaaggggtcgtcctttcccaggatgtatccggcacctttccctgctatgatttcatctatcccccgcagcaacccagtgaatggcaattcccattctatggatgagcgaattgaggcttggaaacactgcaattctttggccgaatccttagtgttctaggctgtccacrccacaccagctgcagcagaccacgctcaatggagtagaagggcaaagaaccaaccagccctgagcactggggacctgcaggtgcttctacatgtgttctttctaatccttctaataacctagagaagtgaggaagtatccttatccgcagcctacagatgagaaaactgaggctcagcgaagagctaacatccttctcaaacagcttctaaatgatgagccagatagacttaagagctagggcccatgtccccttgcacagtgacggtcaccttctccccaccctcacc

SEQ ID NO: 37311 - DNA, 549 bp, Homo sapiens
gatctcagttcaaatgtcagttcatcagagaagcgtttcctacccccaagattaggttatggcctccttgccagtttaatgtgtttatagtttgcaccttgtacttttttttttgtagtgcagttttcatttatacacttgattatttttctctctcccccatcccaacttgactatagttgctgttactgccaggaccaagtctattttaattactgatgtcaacctctgtcaacagtattttgtactcagaatgctcaattcctagtggaaggaatgaatgggctgtgagggaatagtatctacagaagcatgagctctgaaagggcttggctttttctaggaatttgtatattgttacagtgtgacagtagagaatagatggttgcattttattaagcagacatacctcttaattccacactgcaaaaaaacttgttagactactatcttcacacrgatgaatgcccattctccctaaggaaagattgtaggaaggaagaccttctctgctgctcactgttgatagtgagaatgtagtggatacag

SEQ ID NO: 37312 - DNA, 839 bp, Homo sapiens
aaagaaagggatgaaagcacttggaaaatatgtgggttatattttcccctgtcttcttttaatttatttaaacaaatatgactaaagaaaaatagaaatactgttgtggcctttataacatatatagatgagctatgtatatrtaaaaccatagcacaaagaagagggctggcaagtagaactgtaatggtatgaagttcttaaaatattttcctggatataagtcaatattaacttgaagtagattatgataaattaaaagatgagataagatttagataagttaaacagcaggcaataaatagcctaaggattaggggaactaaaatggtatactaaaatttgctgaacacaaaaggcagtgcaggaacaacagaggaccaatagagatgggacaaatagaaagctagtagcaaaatggcagacctaaccctggtcatgacaatacttaggttacacgagaagcaactaaacagtcaaaaagcatacattgtcagactgaatataaaaagcaagttccaacttgcttttggtatgttagagacacactttaaattcagtcacaggaaggttgatagtaaaaatattaaaaaacatacactgtgcaaactgtccacagaaaatatgtgcagttgattctatattagacaaaatagattgtcaaaaagaaatattgctagaggcaaattaaggacttttcatatggataagagttaatattgacataagataacagttacaaatgtatatgctcccaacagctgagctctaaaatacatgaaatccaacattcagaattaaaaggagaaataaacaaatctatgattatagttcaggat

SEQ ID NO: 37313 - DNA, 301 bp, Homo sapiens
ttttttttttttttttttttgagacggagtctcgctctgtcgcccaggctggagtgcagtggcgggatctcggctcactgcaagctccgcctcccgggttcacgccattctcctgcctcagcctcccaagtagctgggactacaggcgcccgccactacgcccggctaattttttgtatttttagtagagacggggtttcaccgttttagccgggatggtctcgatctcctgacctcgtgatccgcccgcctcggcctcccaaagtgctgggattasaggcgtgagccaccgcgcccggcc

SEQ ID NO: 37314 - DNA, 506 bp, Homo sapiens
taaaaaacaagtcctctcaccccgctccatatctttgaaaagtttactttagctgggcaaacactaggtatcaaagaaacaaataagagaaacacaaaagttyagttattccaggtgggagttaattagacaactaaagtcatcaaatggcgtctggactgtcaagttttaggataactcagtgggagtagtcttgcgttaggaatcaggagacctgattctgaccccagccagggtcaccgcttacttacaaaagcaaagagagtgactttggacttcacctccctggctcttgcaaacttctctttatctgaacaaggaggggttctaaggcaccggagggtctaagagccatccatcccttccccactttcctccttccagaacatcccctgagtacctcctgtgaaactgtggccagtaagaagtgactggtccacaacagaactcacatggagggcgaggcggggaagacacatgcggatgctggagttgtcatttctatt

SEQ ID NO: 37315 - DNA, 789 bp, Homo sapiens
ttgtggcgttagaactgttctacatattgactttatgcttatcacttttttcttaagatggagtcactctgttccccaagctggagtgcagtggcataatctcggctcactgcaatatctgcctcccaggttcaaatgattctcttgcctcagcctccagagcagctgggattacaggtgctcacgatggcaggctcatttttgtatttaaatacagacgggtttcaccatgttggccaggctggtctcaaactcctgacctcaagtgatccacccacctcggcctcgcaaagtgctgggattacaggcatgagccaccatggccgcctattatcaatatcttgattgtgaaactgcactacagctttgtaagatgttatcatcgacaacaagtatacagtggacaagggatctctattatttgtaactccatgtaaatctgcaattatctcaaaataaccattcaattaaaaaaaaaaaggaactcctattgtggcagttatcaataggtaagttaaggccaaaccttcayaagacaccgaacctgccagcacctttaccttggtacatcagagcctccagaaccaccacataagcttgtactgcttacccaggtctgtggtatattgttacagcaagacaacggcctaagacaaatgctattaccactattattttgagtcctgttccatgcatggtcaaagcaattccaagctagtatataacacacaaagaatggatgctttaaacaatcttttttttttttttaaggattcaaaagcaaactct

SEQ ID NO: 37316 - DNA, 789 bp, Homo sapiens
ttgtggcgttagaactgttctacatattgactttatgcttatcacttttttcttaagatggagtcactctgttccccaagctggagtgcagtggcataatctcggctcactgcaatatctgcctcccaggttcaaatgattctcttgcctcagcctccagagcagctgggattacaggtgctcacgatggcaggctcatttttgtatttaaatacagacgggtttcaccatgttggccaggctggtctcaaactcctgacctcaagtgatccacccacctcggcctcgcaaagtgctgggattacaggcatgagccaccatggccgcctattatcaatatcttgattgtgaaactgcactacagctttgtaagatgttatcatcgacaacaagtatacagtggacaagggatctctattatttgtaactccatgtaaatctgcaattatctcaaaataaccattcaattaaaaaaaaaaaggaactcctattgtggcagttatcaataggtaagttaaggccaaaccttcacaagacaccgaacctgccagcacctttaccttggtacatcagagcctccagaaccaccacataagcttgtactgcttacccaggtctgtggtatattgttacagcaagacaacggcctragacaaatgctattaccactattattttgagtcctgttccatgcatggtcaaagcaattccaagctagtatataacacacaaagaatggatgctttaaacaatcttttttttttttttaaggattcaaaagcaaactct

SEQ ID NO: 37317 - DNA, 639 bp, Homo sapiens
taaggtttcgtgggaacaagtacatacagtgtcataacactaacaaatgatcgaattaaactctgaccagcaagtctcggggcgataatccaggctcaagcatcagagagcttgcctcttgacctgttgaatcataacatctgctgtgagtatctgctgttaactctggggtaagtcagcatcacatcaggttctacaccaatcccatccatgccaggagagaagcagctgctatggtgcrtaacagggcaccggatgattattatttcagatgaaatagacatctaatatactgcttaaacaattgcattccggcctggaaaatctacctgctgatttcactgccaggcaaggcgtcctcagaggcagctgccgctttccacaatagcactggtgatttcatgaaattgcatctcctgattttattcccacttaaacttcacttgctcatgccagtgacggtggagagacaattgtcgcctcctaccccaccttcagcttagtcatctcaagtgatttacttgtatatgcgtaatcaccctcttctcaaaatgaaataaaataggaaatctggattctattgttgaagtgtctccttactacctcgccctttctggtttcttttcttttcagatgaat

SEQ ID NO: 37318 - DNA, 639 bp, Homo sapiens
taaggtttcgtgggaacaagtacatacagtgtcataacactaacaaatgatcgaattaaactctgaccagcaagtctcggggcgataatccaggctcaagcatcagagagcttgcctcttgacctgttgaatcataacatctgctgtgagtatctgctgttaactctggggtaagtcagcatcacatcaggttctacaccaatcccatccatgccaggagagaagcagctgctatggtgcgtaacagggcaccggatgattattatktcagatgaaatagacatctaatatactgcttaaacaattgcattccggcctggaaaatctacctgctgatttcactgccaggcaaggcgtcctcagaggcagctgccgctttccacaatagcactggtgatttcatgaaattgcatctcctgattttattcccacttaaacttcacttgctcatgccagtgacggtggagagacaattgtcgcctcctaccccaccttcagcttagtcatctcaagtgatttacttgtatatgcgtaatcaccctcttctcaaaatgaaataaaataggaaatctggattctattgttgaagtgtctccttactacctcgccctttctggtttcttttcttttcagatgaat

SEQ ID NO: 37319 - DNA, 639 bp, Homo sapiens
taaggtttcgtgggaacaagtacatacagtgtcataacactaacaaatgatcgaattaaactctgaccagcaagtctcggggcgataatccaggctcaagcatcagagagcttgcctcttgacctgttgaatcataacatctgctgtgagtatctgctgttaactctggggtaagtcagcatcacatcaggttctacaccaatcccatccatgccaggagagaagcagctgctatggtgcgtaacagggcaccggatgattattatttcagatgaaatagacatctaatatactgcttaaacaattgcattccsgcctggaaaatctacctgctgatttcactgccaggcaaggcgtcctcagaggcagctgccgctttccacaatagcactggtgatttcatgaaattgcatctcctgattttattcccacttaaacttcacttgctcatgccagtgacggtggagagacaattgtcgcctcctaccccaccttcagcttagtcatctcaagtgatttacttgtatatgcgtaatcaccctcttctcaaaatgaaataaaataggaaatctggattctattgttgaagtgtctccttactacctcgccctttctggtttcttttcttttcagatgaat

SEQ ID NO: 37320 - DNA, 639 bp, Homo sapiens
taaggtttcgtgggaacaagtacatacagtgtcataacactaacaaatgatcgaattaaactctgaccagcaagtctcggggcgataatccaggctcaagcatcagagagcttgcctcttgacctgttgaatcataacatctgctgtgagtatctgctgttaactctggggtaagtcagcatcacatcaggttctacaccaatcccatccatgccaggagagaagcagctgctatggtgcgtaacagggcaccggatgattattatttcagatgaaatagacatctaatatactgcttaaacaattgcattccggcctggaaaatctacctgctgatttcactgccaggcaaggcgtcctcagaggcagctgccgctttccacaatagcactggtgatttcatgaaattgcatctcctgattttattcccacttaaacttcacttgctcatgccagtgacggtggagagacaattgtcgcctcctaccccaccttcagcttagtcatctcaagtgatttacttgtatatgcgtaatcaccctcttctcaaaatgaaataaaataggaaatctggattctattgttgmagtgtctccttactacctcgccctttctggtttcttttcttttcagatgaat

SEQ ID NO: 37321 - DNA, 545 bp, Homo sapiens
ttagagttacttgtttaactatttgtgttgttttgttgctgctataaagagtttttatagcagttgaaacacaagtaactagaaacagctaagtttactaagctattggagagtggcttagtaaagcagagtataagtataccaaagagccaatgacactaaatagccattaaaaagtgtggatgtgaaagttgttaaacattttttttttttttttggacacagagtcttgctctgtcgcccaggctggagtgcagtggtgcaatcttggctcactgcaagctccgcctccygggtttacgccattctcctgcctcagcctcccaagtagctgggactacaggcacccaccaccacgcccggctaattttgtttttgtgtttttagtagagacggggtttcaccatgttagccaggatgatctccatctcctgactttgtgatatgcctgcctccacctcccactcccaaagtgctgggattacaggcgtgagccaccgcgcccagccaacatttttaaaagtcagattagataacctgatctc

SEQ ID NO: 37322 - DNA, 803 bp, Homo sapiens
ccaggaggctgaggcggatcaggccctggactccgggggaacaatgtaagggacaccaaaaagctcagccatggagatgaatagtattttaacatgaaatttgtgaaaatcaaaattaccgctgttcctgatcttatctttctgtaacatgttcatagtttgttcatcacgggtgtcttgccattaattctgacttttaaaaatgttgtgttaacataccgtttatctccatgactgagttttttggcatcccttacatttcgtgcccaaggtgagagtctcactggctgcaccctcatcccaggcccgactggactccagttccacagcatcctttccatgagacctggaaccagatgcagctccctcttcacccagcttcatgttcctagttgtaaaatggagacgatggtaacagcgaaaacaagaaccacagctwagagttactaagtgcacaggtatttacgggcagtagagtcctctcagccctttgatctcagtactgttattaggttcactttacagatgaggaaactgaggcccagagggctgagggaacctgctccagggcacccagccagcccagggtggagctggggctggcatctggcggtgtggctgcagcgcacccgcattctaatcgcaatgactcttccaggcaggaaactggttcagagggagatgtaaacagcaggggtcctgaagccaggatttgaatcagcagctgcctcatagggtggtcttgagcgttaaataagattcacaaaaggcactccacaagtcctttttcttgtcctcccact

SEQ ID NO: 37323 - DNA, 511 bp, Homo sapiens
cacctacactggagtgcagtggcacaatctcggctcactgcaacctctgcctcccaggttcaagcgattctcctgtctcagcctcccgagtagctgggactacatgtgcctgccaccatgcctggctgatttttgtatttttagtagagacagggtttcactatgttggccagtatggtctcgaacccctgacctcgtgatccacccacctcagcctcccaaagtgctgggattayaggtgtgagccaccacacccagcccaaagttctacttctttcatgaaaagtgttatccattttataatttattttactaagctaattacataagtctacatctggaaattttacagatgtccatacttttttgtgcaaagggataatttatagcaaaatttgtttgttacaatcggagttagaatgaattctgagggaaaattcaaactgggtttcaggaaggcctgacaaccagcattcaaaagtttgtttttcccatatcttactacgtatta

SEQ ID NO: 37324 - DNA, 596 bp, Homo sapiens
tagagttactcaatactgagtccttgatgggaaatgcaacccttaattttactactattgctttagaaactttatttggattcctgttcatctagttcatttaytattggggcttccctgaatacctgctggtgaaattgagaagttccctttttaatgcttaaattttggaagaaaatctatggtccagtaagatacacagtgaagtgataagttgcagtggcctgctccataatttattaatattcggcttagttgcttcagcaaataactatacatttactttatactgacataaagacaacacattatggatccagaatttcatagtttgctatgttctggggaaatatgccttgaaggcttcttaagtcaaagttaaaatataattgatagaactcagcagtttcaatcaaagaatgagtgttgtgatatggattgcaaatcagaaaagtaaaggtgagtaaaatttgctctgaatgtataagttttccaattgttatctcttaatcctccaataggtgtggagtccagagtcacacagggaaatggagtgcaagatggggttcacagatacagttcttttgattccttct

SEQ ID NO: 37325 - DNA, 596 bp, Homo sapiens
tagagttactcaatactgagtccttgatgggaaatgcaacccttaattttactactattgctttagaaactttatttggattcctgttcatctagttcatttactattggggcttccctgaatacctgctggtgaaattgagaagttccctttttaatgcttaaattttggaagaaaatctatggtccagtaagatacacagtgaagtgataagttgcagtggcctgctccataatttattaatattcggcttagttgcttcagcaaataactatacatttaytttatactgacataaagacaacacattatggatccagaatttcatagtttgctatgttctggggaaatatgccttgaaggcttcttaagtcaaagttaaaatataattgatagaactcagcagtttcaatcaaagaatgagtgttgtgatatggattgcaaatcagaaaagtaaaggtgagtaaaatttgctctgaatgtataagttttccaattgttatctcttaatcctccaataggtgtggagtccagagtcacacagggaaatggagtgcaagatggggttcacagatacagttcttttgattccttct

SEQ ID NO: 37326 - DNA, 1152 bp, Homo sapiens
agattaatgggctatgagaatgggactgggggctttattagaagaagagaggcctttgttcatgtgatgccctgagttgcctcagaactctcgagagagtctctaccagcaagaagtttctcaccagatgtggcttcttgaccttggccttctcagcctccctaactgtaagaaataaattcctttgctttataaattactcagtttcaggtattctgttagaagcaaagaaaacaaattaagatagtacccttttctgctaagattcaaactattgacagtctgactacagatttaataaccgtgctctctactgcaccaaggaaagcatccagcagaatgccaggaacaccatagggacttaataaacggtagcttttagtactattgtggtcactgttcttaatagtgtagctttgaagccaagttctcatcttgtttttctgtcccttttaccttcaagcccactcttgttattcctcctgccctttttgatgactcctttagtagacaggagatggtgcataatttcatccacttgccagctcccactggtcagttgggagtgttgatgaggagtccaggggcacatccgacttacaggacagcaaggccatgattggtcaaaacggcttccggggaaggacgggataagtggggcaacatcgcacaatgttgtcatctctgctttcccactctctatactcccattgctcagaggtgtctaactgctgcgtctgtcatcccactgaccagatccttcttgtattctttccaagaaagctagttttcaactaatttaagcctcyccatgaacagtagtcatgactctcagggacagaaactattgtactgaattaactccagagatattcttccctaatcaccttttctagtcattaattgccatgtactcccgtaggacttggggaagcaagaaggtgatgaggacaaagggacgtgtttgcatacagccatcctttccttgtgtctcccatcacatggcacccacctgtgggtgaagctcactttagtaataaatagattgtgaaaggaaaataaatctttgggccctaaattcactaagcttaagggaaatctcaagctgggaactgcttagggcaaacctgctttccattctattcaaagtca

SEQ ID NO: 37327 - DNA, 1015 bp, Homo sapiens
aaggatcctggattacattaaagctaagatggagaactttctgcttagaagtttgacaaagtgtatggaccaccatctggtcagattctgccagcaaattacattttatttcaggtaatcttaatggctctctgggaagctgcttctgtcagagcacttggaaaattacatccaggtgtatagggaatttattatttgaccaagagtgcatttttactcagaatagtttcctgtctatatgctgaaatgattgctgaaataattgctacgtatatggaagaaataataccatgctgaaataattgctacctatatggaagaaaacatgaggtcctttcctcactccacatacatatgtaaatttcagatagataaaagacctaaataaaaacaaaaataataatcttggaacaaattacaggggaatactttcataaccttgaggtcatggggcattcttaaccagggcaggaatctcagaaaccatcacgaaatggaaatatttgactatctaaataccaaagtaatatgtcgaatgtatcattagtaaagtggaaatgtaaaccgtatagattgttaacataactacaacagaaatgacatgataaaggttactggtactgctgttcaaataactccttcaattgttaaaattaaaaataatatacatgagtccaataagatgcttaaccatatgcaggaaattgcaaattacaaatgaattaccattttttcagtcatcataattacaatccaatgggatgagattagcttttcttgtagggggagtgtagcaaggcaaggagccactgccatacatttctggtgggagagtaagttgctaacccatttgggaaaattacctagaaatatggcttaaaattaaatatattgataccctttgtccatgccatyccactttacggaatgttgcctacagaaatcaaaacacaagaaggtaatgatatatataggagaatgtttattgcagctttgccgaggaagaaaatgaaaa

SEQ ID NO: 37328 - DNA, 602 bp, Homo sapiens
taaacatcataatgttaatttcagtgtattactgtgtatatgtagcaagggtaggaaatatgtggcccaatattttgtctaaaatagctataattgtataatttattaacagttctcttttcaggccgggcacggtggctcacgcgtgtaatcccagcactttgggaggccaaggcgggtggatcatgaggtcaggagatcaagaccatcctggctaacacggtgaaaccccgtctctactaaaaaatacaaaaaattagcctggcttggaggccggcgcctgtagtcccagctactcgggaggctgaggcaggagaatagggtgaacccgggaggcagagcttgcagtgagcccagatcmtcccactgcactccagcctgggcgacagagctagaccccgtctcaaaaaaaaaaaaaaaaaatctcttttcaaaattaagtgattcaacaaaatgtcatctaaggtgttttcaaaataaaacatgtttatgcagttaccttactaatcccgaacaattctgtcggcattacacacactacatggaaattatttgtgttgaatggtagaaacaatatatattattaagtgactaatgttatt

SEQ ID NO: 37329 - DNA, 602 bp, Homo sapiens
taaacatcataatgttaatttcagtgtattactgtgtatatgtagcaagggtaggaaatatgtggcccaatattttgtctaaaatagctataattgtataatttattaacagttctcttttcaggccgggcacggtggctcacgcgtgtaatcccagcactttgggaggccaaggcgggtggatcatgaggtcaggagatcaagaccatcctggctaacacggtgaaaccccgtctctactaaaaaatacaaaaaattagcctggcttggaggccggcgcctgtagtcccagctactcgggaggctgaggcaggagaatagggtgaacccgggaggcagagcttgcagtgagcccagatcctcccactgcactccagcctgggcgacagagctagaccccgtctcaaaaaaaaaaaaaaaaaatctcttttcaaaattaagtgattcaacaaaatgtcatctaaggtgttttcaaaataaaacatgtttatgcagttaccttactaatcccgaacaattctgtcrgcattacacacactacatggaaattatttgtgttgaatggtagaaacaatatatattattaagtgactaatgttatt

SEQ ID NO: 37330 - DNA, 2460 bp, Homo sapiens
  misc_feature (1)...(2460): n = A,T,C or G
agtctcaataatggttttataatgggaagtttccctgcacaagtagtctcttgcctgccaccaggtaagacacgccttttgccttctgccatgactgtgatgcctcactagccacgtggaactgtgagtcctttaaatctctttatcttcatcaattacccagtttggggtatgtctttatcaacagcatgaaaacagactaatatgaatattaaataaagtatttatattcacaaaannnnnnnnnnnnnnnnnnnnnnnnnnnnnnnnnnnnnnnnnnnnnnnnnnnnnnnnnnnnnnnnnnnnnnnnnnnnnnnnnnnnnnnnnnnnnnnnnnnnaaattcatatttaaaagtacacataccaaaattaatatcaatatatacacacacaactacatatccctttttaattggcttgagatatcccttgaagatgatataaaattaataatttgcactccatttaggcacacctttggcatgtacagtcttttcagtggaacatttgcgaaatgcatatggagaatgtcctttgataattactcttaacactgctactatagactctattaataagcctgtattaagaataattatcagaaattttcactgcaaagtatattttaaaagttggtattttcacattttctcacttataagttggagctatatgatgggtactcatgaacataaagatggcaacaatagactactggaggagtggggagcagagggagggagggggcaagaattgaaaaactaactcttgggtactatgctccrtactcttaatctcagcatcacacaatataaccaggtacaaaacctgcacatctactttctaaatctaaaagttaaaattatattttaaaaattgttatataatataaataaaacgtgacttttacattaataacttcaggaacattgatgcataggtctttcttacagttcaatgtctttaaattgaaccccattttgattttgaagtcgatggtggagcatttggtacaagagtttctgttaatgtatccagtaaacatcattaatacatttaaaaaagtaagaaagacctcagaataaagatatataggctgttcttgctttgttataaagaaatacctgaggttgggttagttgtaagaaaagaagtttgattgtctcatggttctgcagtggcatctgcttctgggagtgccccaggaatctcctaatcacagtggaaagtgaaggaagaccaagcatgtcacatggcaggagtgggaacaaggcaagggagaggtgccacacacttttaaataaccagatatctggagaactcactcaatatcatgaggacagcaccaaggagattgcactaaattatttatgagaaatccaccctcatgatccaatcagacaccacctccaacactggggattacaattcaacacgagatttagagagtacacaaatccaaagtgtatcaaaagagatctaagaaagggtcaaagaagagagataagaaacaattcacacactaaacacatcacatattatcagataaaaaggaaaattttgacagctatgggtagaaaaagcaaataatttacaaagaaagaaaaattagacatacatcagatttttcaaactcaatactggatttaagaaagccatgagacaacatttcaaaatgttgaaaaaaaaaacaacagtgcataggaatcaatatctggatgaacttttctttaaataacaaagcatgacaaagaaaatctttcagaaatattttcacacacacatttatgcctcaggacagctactacacaaatatcttcaatgagaatttttggacaaagtacttaaaaatacagagatacacactcaagataactttccagctttaggataactaaatacatttgttatgatctttaacttaataaatattattatatttatattatgcctttatatatgcatatgtgcacgtacttaaacacaaataaagagaaacacataaatatgtttgtaagagaatctaaattaaaaatttagacaatattaacaaaatgtctgatattgtggaagagaagaatactaagaaaggagagagtatgcgaaagttcttgttttagttgtatccaaggttggaaaaggcatagatatccatttaaaagaagagtaaaaaggagatttttaaaaagtagaaaaagtgggaaaaactaaataataaactcttatggtagaaacagtaacatattggttaatctttaaaataaacataaatgaactaaactcacaagttaaaagacaaagagacagatttattatgaaaattaaatttagccataacaagagacacgtctaaaaataaaagaaaataaaagcttagaaaaaagagatatcaacatataaggcctattagctaccatctgtacttataataatattagctacaatacgtcttaagatgaa

SEQ ID NO: 37331 - DNA, 1183 bp, Homo sapiens
ctctgatggtctgaactgaattgactcatcaaccaatactttcatagaaacagagcttggatctacaactgatcttcattttctctatgattctcaaaattactccttaaaaacactcatcataatgattattacctcttatgtcttttttttaaaaaaagtaataaaccagggacacggtcttcaaattgcaatagtgatagcatcaacaacaacaaaagaaaaagatactattgctattatactctacattttttcaacctttagaactataaataatttatatcaagcttatagatagcattgtcgatgtaacttccagtggggaaaaaaaccctyataaatcattggtatcaccagttctacaatcacacgtttaagtgtatcagcaataaaacacttgcatatatattatataacatttttagttacttgtatttattaggtgtttaatgtgtcctaggctgtgcaaagcatagtggacacaaaagcaaacaaaacaggtattgtttatataacttatattttgaacaaggaaatggataataagcaaatacctaattgtattgacataaagcaaatgaataattcatctaggaatctattccttcaagttgccaaacattagtctttgggataaaaatggctgtgttgatactttcttttttttttttttttttgtgagacagagtctcgctctgtcacccaggccggactgcagtggctctatctctgctcactgcaagctccgcctcccgggttcatgccattctcctgcctcagcctccggcgcagttgggactacaggcgcccgccaccgcgcccagctaattttttatttttttgtattttagtagagacagggtttcaccatgttagccaggatggtctcgatctcctgacctcgtgatccgcccgcctcagcctcccaaagtgctgggattacaggcgtgagccactgtgccccgcctgtgttgatactttcaaaagtcccctggtaggtacccagattttaaatgtctgaaagtatggccaagaaagttttcttgatacaaagataactttgttcctcttgaagccacagtcaccacaaaacttttgtaattgatggatgagaaagaataacagaagcatcattatgtatggtatttattgaaagcccaccacatgctaggagttgctg

SEQ ID NO: 37332 - DNA, 1183 bp, Homo sapiens
ctctgatggtctgaactgaattgactcatcaaccaatactttcatagaaacagagcttggatctacaactgatcttcattttctctatgattctcaaaattactccttaaaaacactcatcataatgattattacctcttatgtcttttttttaaaaaaagtaataaaccagggacacggtcttcaaattgcaatagtgatagcatcaacaacaacaaaagaaaaagatactattgctattatactctacattttttcaacctttagaactataaataatttatatcaagcttatagatagcattgtcgatgtaacttccagtggggaaaaaaacccttataaatcattggtatcaccagttctacaatcacacgtttaagtgtatcagcaataaaacacttgcatatatattatataacatttttagttacttgtatttattaggtgtttaatgtgtcctaggctgtgcaaagcatagtggacacaaaagcaaacaaaacaggtattgtttatataacttatattttgaacaaggaaatggataataagcaaatacctaattgtattgacataaagcaaatgaataattcatctaggaatctattccttcaagttgccaaacattagtctwtgggataaaaatggctgtgttgatactttcttttttttttttttttttgtgagacagagtctcgctctgtcacccaggccggactgcagtggctctatctctgctcactgcaagctccgcctcccgggttcatgccattctcctgcctcagcctccggcgcagttgggactacaggcgcccgccaccgcgcccagctaattttttatttttttgtattttagtagagacagggtttcaccatgttagccaggatggtctcgatctcctgacctcgtgatccgcccgcctcagcctcccaaagtgctgggattacaggcgtgagccactgtgccccgcctgtgttgatactttcaaaagtcccctggtaggtacccagattttaaatgtctgaaagtatggccaagaaagttttcttgatacaaagataactttgttcctcttgaagccacagtcaccacaaaacttttgtaattgatggatgagaaagaataacagaagcatcattatgtatggtatttattgaaagcccaccacatgctaggagttgctg

SEQ ID NO: 37333 - DNA, 636 bp, Homo sapiens
gtgatgggtggatcacctgaggtcaggagttcgagaccatcctggccaatatggtgaaacattgtctgtactctgtggtggtgtgttcctgtaatccctgctactcgggaggctgaggcaggagaatcgcttgaayctgggaggccgaggttgcagtgagctgaaatcacaccactgtgctccagcctgggtgacagagtgagactccatctcaaaaaagaaaaaaaaaaaaaagaggaagaagaagaaataaggggaataagctttttcatcatcccatgatatctattgctcagatggtgacataaccattcaaacttaaaactattattatcaacaccttcttaaacaccaaagttttttttttttagtaataggcaacttgtcacgtaataatcttgagaatgtacttgtttattttttgtcaaaaaactaaattacatgtgcaatttcagttgtgcttatttcagtgattatgtgtcatttatgaagcttgatgacaatatgtttatttagaaaatattcgagaactttatatgtcaaacttgtaattttttttctttgcttgtctaacaaactccaaatatcatcattttcagtgcacaccgatgctaacaaagggtgcaggtttcaaaa

SEQ ID NO: 37334 - DNA, 636 bp, Homo sapiens
gtgatgggtggatcacctgaggtcaggagttcgagaccatcctggccaatatggtgaaacattgtctgtactctgtggtggtgtgttcctgtaatccctgctactcgggaggctgaggcaggagaatcgcttgaacctgggaggccgaggttgcagtgagctgaaatcacaccactgtgctccagcctgggtgacagagtgagactccatctcaaaaaagaaaaaaaaaaaaaagaggaagaagaagaaataaggggaataagctttttcatcatcccatgatatctattgctcagatggtgacataaccattcaaacttaaaactattattatcaacaccttcttaaacaccaaagttttttttttttagtaayaggcaacttgtcacgtaataatcttgagaatgtacttgtttattttttgtcaaaaaactaaattacatgtgcaatttcagttgtgcttatttcagtgattatgtgtcatttatgaagcttgatgacaatatgtttatttagaaaatattcgagaactttatatgtcaaacttgtaattttttttctttgcttgtctaacaaactccaaatatcatcattttcagtgcacaccgatgctaacaaagggtgcaggtttcaaaa

SEQ ID NO: 37335 - DNA, 1546 bp, Homo sapiens
attcatttctctcttagtaaagttataaaaataaattaaagcaggaaatgcctttgaaaaccaaataaatcaaaagaaatttacagaaacattggtttggaaggcaactggaaaactgtaaattgttttaatcatatggtagcagaaacatgaggtagtaatattttgttacctgatatcataaattatgcagtaaataaaatatgtaagtctcattgacataatacataaatcaatgacataatgcattgttccaaaatgcatacattaacattaatgtgtgacttgctatggtgcacatcctaacacctcaaaagcttttaaatctattgtatgaatgatccatttttcaaaattataagatcaactgcaaattgtactaaaaatttcattatttaaatggctggcaaactattataagaatagcactaatagatgttccaagttactttgcaagtttatttagtatttacactaatatttactcatatgtggctaaatttagacactttctaattttagtgattcagtttaaagagtaaacaaagactttcacaatccgaactgtattattattattttagtttgtgtactgtttttagtgtgtgggtaggtgtgcctaaaggtatttttacctcaatgaatttaatctcctttaagctaggatccatgattttcatttctttttcttacatattattttgcacaggttcttgcgcctagtaaacacagaataaatgctattgaattgttcaaagttaaaataaaatttgcctatagtgacatgattttattttctaagaaaacattaattatatagagcaatgattatggaagtttcataaatgcatataaatgttgctgtcataagaccatgaaagactattgtttgtgtcaatgacttctgcaacagaattttctctgaatcatgtcttaatccacatcaaaagacatggtgctaatgtttccataagagatgtatttggtcctaaattataaactaagataatctaatacattgatgaacatattaggggacagtgtggtccagattgtcccctgtgaccttgacagtgacatcagttcctctgcccttggtgagggagcagttatcttccaggaccatcttgtcaagctgtttcctcatttctagaataacaactggttcagcaacagcaaatatctgatcatcacagcatttcacatagcttccaactagaaaacagaggtccctgttctccactctaagtatgggaggaatagtgagtgttctcattatgtgaagatttatgtcatgattttattgccatttactgaaactrtcacatctcatacggatttccacatcagataacagctattaaaattgacaccattactgtataaaaaagaaacaaacagtaaacaaacaagaacagaaaaaagatatatacatgaaaaatgagccaaaaaagggaaatatttacattgctattctttttataagttgaagatctcttttctgacatattcttcagggaaaataaatcagagattacttttgaaa

SEQ ID NO: 37336 - DNA, 651 bp, Homo sapiens
gactgtatactttttgaaggcaaagattctgtcttgttattattatactttgagcaacctgcattacacaagcagtagatactagtgagtaaatggctaggatmcaacatggaatcaattttgttttcccaatattattgaagaattcttgagtactcattctatacttgtcataagagtcctcttttgcacttctttttgtaatagtactgctgaggccatgtaatctaaagtggagtccataaattttgaatttaataattatttatccaggagctggcataagccaggaaggtttaggcaatggagatacagtagtaaacactaaaactcatggaacttatcttaaaagcaatgaacacaataaacaaacgagatagtgtttatgttagcttggactccctaggagatgaagtcaaagagtaattgctgactcttcagtgagatgtgtaatactatggaagaaggagtgaaggaaaagttcagtgtgttgggagagaatgggagcaaatacatgatgatgtgttatccaggtagccactgcttcactgtcatgatcattcgtctaggagggatcattctggagaggattgagggaaaactaggagcagtcattgggagataggaagggaaattatctgcctatcttta

SEQ ID NO: 37337 - DNA, 651 bp, Homo sapiens
gactgtatactttttgaaggcaaagattctgtcttgttattattatactttgagcaacctgcattacacaagcagtagatactagtgagtaaatggctaggatccaacatggaatcaattttgttttcccaatattattgaagaattcttgagtactcattctatacttgtcataagagtcctcttttgcacttctttttgtaatagtactgctgaggccatgtaatctaaagtggagtccataaattttgaatttaataattatttatccaggagctggcataagccaggaaggtttaggcaatggagatacagtagtaaacactaaaactcatggaacttatcttaaaagcaatgaacacaataaacaaaygagatagtgtttatgttagcttggactccctaggagatgaagtcaaagagtaattgctgactcttcagtgagatgtgtaatactatggaagaaggagtgaaggaaaagttcagtgtgttgggagagaatgggagcaaatacatgatgatgtgttatccaggtagccactgcttcactgtcatgatcattcgtctaggagggatcattctggagaggattgagggaaaactaggagcagtcattgggagataggaagggaaattatctgcctatcttta

SEQ ID NO: 37338 - DNA, 667 bp, Homo sapiens
tgcaacccaaactagcttcaagggaaatgggtgatacaggcttacagatatcccatgtgcccagaaagagaaaatgtgcagtgtgatatatatatatatagtaatattaatggttgtagtaatgtaaaaaatacatttataaaatttgcattaacagacaaaataataagtcataaatctgatatatttgaatttagttctatctcttcagattttggacaaatatattttatttattggcacacatttccttttagttttaacaccaatttgtctctatttctaattattgtgcagaagaattaagaaagcatatctaaatatgcattataaactgtaataactataatgcagtagaaaaccatacaattggtgacagtcaatatataatatttatcaaatatatgtatgtacaagtatacacacacacacaaacacacattgtcttacagaaactcttaaattgctatctggctcttttatttaacttgtcttgaatmttttcacaaatctccaacaagacagtaaaatactttaaggtatttggagttataagagactgagaatgctaaacacacagtcaattctcaataaatatttgttgaatgagtaaacagggtcagctggtggaggagatttcatgcctggctgaggaatttgaatttat

SEQ ID NO: 37339 - DNA, 606 bp, Homo sapiens
tgaagtcctgattctcaaaactttagaagaggaccttattttgaaatagggtgtttacaatggtaagcaaactaaaatgttgctactagggtgatccctaacaactgactgatagccttataaaaaagaggagtttggaaacagacacacatacagggagaatgccatgtgaagatgaaggcagagatggggtgrtgaatctacaagtttagaaaagtccaagattgtcagcaaatcaccagaagctcggagaaatgtctggaacagatttaccttctcagccctcagaagaaaccaaccctgccaacacgcaatcttagatatcaaatatccaaaactgagacaatacatttctgttgtttaagccacccattttgtggcactttgttgcagcagccctaggaagtgaatacactttgttttctgcaacacgtttctattcccgccactactccaccaagaaccttttttatacaagaatcatttttatacaaatctccatctcagtatttgcttctagggaactcgatctgagacaactccaggcttgtatcctttattattggtgtgtaaaaaagattattaggagataattggtgaagacca

SEQ ID NO: 37340 - DNA, 632 bp, Homo sapiens
aatatgtaatatattataaataatatatataatatataatatgtaatatatgttatataatatataatatgtaatatatgttatataatatataatatgtaatatatgttatataatatataatatgtaatatatattatattatatataatatataaaaaatataatatatataatataatatgtatattatatgagccattctttcaaatcatacctattttgtatttatgttgtatttcctaacagccagattttggtrcaacatgaatccacaataatattaattctctttatttttcttatttgtacccctgctcatagactctctacttggcttcacaaatcatgcatgtaacaataaagcataaaattataaatgttctcaatatgttcctcctctgttactccttttcattgaataagttagagacatgtatgttagtcagcttggacagctatagcaaaataaggtggaatgaatggcttaaacaacaaaaaattattttctcacagttctggagaccggaagtccaagactggggtgtcagcctgcttgggttctggtgaaggttgttttcttggctttcagactgccaccttcttgctgtgtcctcacatggagaggctag

SEQ ID NO: 37341 - DNA, 632 bp, Homo sapiens
aatatgtaatatattataaataatatatataatatataatatgtaatatatgttatataatatataatatgtaatatatgttatataatatataatatgtaatatatgttatataatatataatatgtaatatatattatattatatataatatataaaaaatataatatatataatataatatgtatattatatgagccattctttcaaatcatacctattttgtatttatgttgtatttcctaacagccagattttggtgcaacatgaatccacaataatattaattctctttatttttcttatttgtacccctgctcatagactctctacttggcttcacaaatcatgcatgtaacaataaagcataaaattataaatgttctcaatatgttcctcctctgttactccttttcattgaataagttagagacatgtatgttagtcagcttggacagctatagcaaaataagrtggaatgaatggcttaaacaacaaaaaattattttctcacagttctggagaccggaagtccaagactggggtgtcagcctgcttgggttctggtgaaggttgttttcttggctttcagactgccaccttcttgctgtgtcctcacatggagaggctag

SEQ ID NO: 37342 - DNA, 543 bp, Homo sapiens
aactataagtaaatattttatgcatgttatattttaactatgaatataaatcaatggattataaataaaatatctaagcatatgatgagaccatatacatagttttgcttgtatattttatgtttcttctcagtttaccatcagtcatgactgctgaatacatattaagctaaagtttcctaagtttgctcacagggtgttttattttttaaaagaaaatttaatatttagcagtcagttaaaatattgatattttctaaaattgaaccacattttggttaaaacacttatttttcaataaaatacaaatgaatatttttgttaattctgaaagttgtgtaacccaagtttttgattagaacacttaagcatgttaaaatacacattgtattgtcatggctattggtttcccgcatagggaagaactcagtggcatttgcctagggtgcattgcattggcctacctatcattaaattctagtttasagctgcaaactgaagtgctgcctggtttggtaaaattgaaactgcttgtttgagcca

SEQ ID NO: 37343 - DNA, 407 bp, Homo sapiens
  misc_feature (1)...(407): n = A,T,C or G
agannnnnnnnnnnnnnnnnnnnnnnnnnnnnnnnnnnnnnnnnnnnnnnnnnnnnnnnnnnnnnnnnnnnnnnnnnnnnnnnnnnnnnnnnnnnnnnnnnnnaaaacaaaacaaaacaaaacaaaacaaaacaaaacaaaattgagcttgatatctaaaagggtaaggatgtttactcaagtcattgtattttcacacactgctgcacacatcacataatttgtcccaagagtacagccaacaacagttttgatattttagcaggatgggaaaggacgtcttcaccctcctaggagatttgtcgattgcacgcgcarcgttatgcgcatgcgcggtcagtcaacggtccgttggtgccgcgagtgcgcaggcgcgtcgttccggcgccggctttggcggaggggtg

SEQ ID NO: 37344 - DNA, 515 bp, Homo sapiens
  misc_feature (1)...(515): n = A,T,C or G
cattgtctcgtgagatctctgccatggtgttacattctgtgccccagaagagtactccagtacatgacttgatcagcannnnnnnnnnnnnnnnnnnnnnnnnnnnnnnnnnnnnnnnnnnnnnnnnnnnnnnnnnnnnnnnnnnnnnnnnnnnnnnnnnnnnnnnnnnnnnnnnnnntgtcatcaaaaggttggtgctagtatttaaaggaaggagtgggccacttctgcaggcccaaagtgcagagaatgacctggggtttcaaagttgctgagtgcgttgacccagatgttcaacccaaattccaccctcctcttccttcctaattaaggctctgaccttggcatagcagacttgctgaggttgatcatttaatattctctggactcctgaggctgatcatcagctttgttctgtcctctagctatagagaagatgagagtcttttaaaatgtgataaaggggaycctctgacttttacaacttaccttaaattagtgattcatcattccga

SEQ ID NO: 37345 - DNA, 1150 bp, Homo sapiens
  misc_feature (1)...(1150): n = A,T,C or G
atgattaaatcaattgagcttgcttaattctggggtttgaaaactgagtttctggatttacaaaataagggtcaaacaataaagcacttatttatttatttatttatttattttagagacagagtctctctctctgccacccaggctagagtgcagtggatgatcatgcttccctgcagctcaaaatctggagcacaagcaatccccccnnnnnnnnnnnnnnnnnnnnnnnnnnnnnnnnnnnnnnnnnnnnnnnnnnnnnnnnnnnnnnnnnnnnnnnnnnnnnnnnnnnnnnnnnnnnnnnnnnnnaagtaagggaganaaacgctcttaggaatncgaaaacccacccccaanaaattaactcattttcctctgccgcaccctctattcccccacaggctttcttctgaacttcaacaacatcttggggtggagctttttcatcttgatatcaccactttgtagaaaaatgatagacacataattgctaccagaagaacatagyactttattttgtcatgaaaattgtagcaagaataattgtggtctttgtttttaagagtcttgtctgtgataaacagcccagtgataggctatgaaaccacgaaacatatgatccaactgttccttttagtcaggatatttcttggctagctccataaaggatatgatcctatttctgggttgtacctgagttatggtatgagtcttaaataaataatgaggctgttctttgatgcagaatttgcctttgattcatcttctaataattttcactttgttaacagatatatgcagccaactgcaggaaaaagaaagttgcatttgcagtgcttccagctctcacattggccattgcctcaagaatggatgataaatgtgtcactttctgttcttgttgtaatctctgtaataagagctgattcgtgtttttctgttttgcattctccttgtattctctgtcaggagaaatggtcatttgtgtttttcaaaatggaatatgagcacctatgcacttttaataggctgataaacagttgtattccacttggtaaatatttcctgctttgagtgactgtccattccagctcatccccattcatgtagcatgaggaaaggcaagagctaggtgagctggaaatagaca

SEQ ID NO: 37346 - DNA, 1150 bp, Homo sapiens
  misc_feature (1)...(1150): n = A,T,C or G
atgattaaatcaattgagcttgcttaattctggggtttgaaaactgagtttctggatttacaaaataagggtcaaacaataaagcacttatttatttatttatttatttattttagagacagagtctctctctctgccacccaggctagagtgcagtggatgatcatgcttccctgcagctcaaaatctggagcacaagcaatccccccnnnnnnnnnnnnnnnnnnnnnnnnnnnnnnnnnnnnnnnnnnnnnnnnnnnnnnnnnnnnnnnnnnnnnnnnnnnnnnnnnnnnnnnnnnnnnnnnnnnnaagtaagggaganaaacgctcttaggaatncgaaaacccacccccaanaaattaactcattttcctctgccgcaccctctattcccccacaggctttcttctgaacttcaacaacatcttggggtggagctttttcatcttgatatcaccactttgtagaaaaatgatagacacataattgctaccagaagaacatagcactttattttgtcatgaaaattgtagcaagaataattgtggtctttgtttttaagagtcttgtctgtgataaacagcccagtgataggctatgaaaccacgaaacatatgatccaactgttccttttagtcaggatatttcttggctagctccataaaggatatgatcctatttctgggttgtacctgagttatggtatgagtcttaaataaataatgaggctgttctttgatgcagaatttgcctttgattcatcttctaataattttcactttgttaacagatatatgcagccaactgcaggaaaaagaaagttgcatttgcagtgcttccagctctcasattggccattgcctcaagaatggatgataaatgtgtcactttctgttcttgttgtaatctctgtaataagagctgattcgtgtttttctgttttgcattctccttgtattctctgtcaggagaaatggtcatttgtgtttttcaaaatggaatatgagcacctatgcacttttaataggctgataaacagttgtattccacttggtaaatatttcctgctttgagtgactgtccattccagctcatccccattcatgtagcatgaggaaaggcaagagctaggtgagctggaaatagaca

SEQ ID NO: 37347 - DNA, 1150 bp, Homo sapiens
  misc_feature (1)...(1150): n = A,T,C or G
atgattaaatcaattgagcttgcttaattctggggtttgaaaactgagtttctggatttacaaaataagggtcaaacaataaagcacttatttatttatttatttatttattttagagacagagtctctctctctgccacccaggctagagtgcagtggatgatcatgcttccctgcagctcaaaatctggagcacaagcaatccccccnnnnnnnnnnnnnnnnnnnnnnnnnnnnnnnnnnnnnnnnnnnnnnnnnnnnnnnnnnnnnnnnnnnnnnnnnnnnnnnnnnnnnnnnnnnnnnnnnnnnaagtaagggaganaaacgctcttaggaatncgaaaacccacccccaanaaattaactcattttcctctgccgcaccctctattcccccacaggctttcttctgaacttcaacaacatcttggggtggagctttttcatcttgatatcaccactttgtagaaaaatgatagacacataattgctaccagaagaacatagcactttattttgtcatgaaaattgtagcaagaataattgtggtctttgtttttaagagtcttgtctgtgataaacagcccagtgataggctatgaaaccacgaaacatatgatccaactgttccttttagtcaggatatttcttggctagctccataaaggatatgatcctatttctgggttgtacctgagttatggtatgagtcttaaataaataatgaggctgttctttgatgcagaatttgcctttgattcatcttctaataattttcactttgttaacagatatatgcagccaactgcaggaaaaagaaagttgcatttgcagtgcttccagctctcacattggccattgcctcaagaatggatgataaatgtgtcactttctgttcttgttgtaatctctgtaataagagctgattcgtgtttttctgttttgcattctccttgtattctctgtcaggagaaatggtsatttgtgtttttcaaaatggaatatgagcacctatgcacttttaataggctgataaacagttgtattccacttggtaaatatttcctgctttgagtgactgtccattccagctcatccccattcatgtagcatgaggaaaggcaagagctaggtgagctggaaatagaca

SEQ ID NO: 37348 - DNA, 569 bp, Homo sapiens
caatattacttataccattgaaggtcctttatgctcatcatagaggtaatacccctcccgcccttttagagttaaccactggctaacttgtgtgtttctactgcttttcattataatgaaaatacacacaaatacacacacacatattcttatgtatgttcttataatttaatacatattaatctgtcagctgtaaatactctcaaaaattattttctagttgtaccagtaaataatgcaaaaacatttatcacagtttgatgtatcagttaatttgaactaatcattattttctgtctctcacttacaatttgtcattatttgctgttgtatgtcctacattataaactccaggaaagcacagatatgttttggctatcttgttttgttgagggaatgaaggactggagagaccacagggtgagacagtagaattttaytgagtgcagtcaggcccagcagcttaacatccaaaaactgagccaagaacaaagacaggtctcggcttttatacacacttcaaaaagggggctggctagtttgaagcaagcttacagtggtgtgaagtg

SEQ ID NO: 37349 - DNA, 569 bp, Homo sapiens
caatattacttataccattgaaggtcctttatgctcatcatagaggtaatacccctcccgcccttttagagttaaccactggctaacttgtgtgtttctactgcttttcattataatgaaaatacacacaaatacacacacacatattcttatgtatgttcttataatttaatacatattaatctgtcagctgtaaatactctcaaaaattattttctagttgtaccagtaaataatgcaaaaacatttatcacagtttgatgtatcagttaatttgaactaatcattattttctgtctctcacttacaatttgtcattatttgctgttgtatgtcctacattataaactccaggaaagcacagatatgttttggctatcttgttttgttgagggaatgaaggactggagagaccacagggtgagacagtagaattttattgagtgcagtcmggcccagcagcttaacatccaaaaactgagccaagaacaaagacaggtctcggcttttatacacacttcaaaaagggggctggctagtttgaagcaagcttacagtggtgtgaagtg

SEQ ID NO: 37350 - DNA, 778 bp, Homo sapiens
agggaggtggaggcaggataatcgcttgacccctggaggcagaggttgcagtgagctgagatagcatcactgcactccagcctgggcaatggagtcagtctcaaaaaaaaaaaaaaaagaaagaaaaatgtacctcaataatataacaacttaacaatagtcgtcaaagtgtgtgcagtatgcagaactctacacacaacttttctgtaaatctgaaactattaaaaaattaaaaccttatttaaatactgaaagcaaaaatacactaggaattttggcatatatgaatatacacaaaaatagcattcataatgaaaagaatatttgaaagttggtttataaactattaataatatatgttaagcamcagaattataatatctcaaaatcatggtacattagcattttgtctacacatagtgcattaggattttgtctagactggtcaaaatagagagaaagcaatatagattttcaaatgtaccctgtgggagttaaacctaaatacagtactctctgtagtattatattccctgtgacctggagattcagagctaattctgagaacaatcagttgtaagtactcccatgttctaaaactaagaagcaaaggtgtctacctgggacttgcaaggattcaaacaaaaatagttttgccaacttaattccattccccactgataagtttggatatttgtccctgcccaaatttcatgttgaattataatccccattgctggaggtggggcctggtgggaggtgattgggtgatgggggc

SEQ ID NO: 37351 - DNA, 938 bp, Homo sapiens
agtctcgctctgtcacccaggctgaagtgcagtggtgcgatctcggctcactgcaacctccacctcccgggttcacgccattctcctgcctcagcctccggagtagctgggactacaggtgcccgccaccatgcccggctaattttttatatttttagtagagacagtgtttcaccgtgttagccaggatggtctcgatctcccaacctcgtgatctgcctgcctcagcctcccaaagttctgagattacaggcataggccaacacgccctgccgaaaatttcaatttttcgtaatttaacttagtattttagctgtccacaaataacagaatattcatctcttggctgttgccttgcaaaagaatctgaaattatcagttttctattttttaaaatatgttattaattttgattaataaaaagtagtggtatgatcaagaaaatgaagtttaaattagaataaaaaacttagattttcagaagagtgttatggttcaacaggtgagcttcaatttcacaaatgaattaatgygtgctattacaattcatttctaagaaatgtaataagtttgctgggaaatggtaaggatcacatgtacgtgttactattagtaacactttcatgcatattgaaactattattttttcaaatttatttaattgacagatgtaatacaattgtatgtatttattgtgtacaacatgctgttttgaaggatatacacattgtggaatagctaaatctagctaattagcatattcattaattcacatagttaccattttttgtgatgaaaacacataacatccacttttagcattttttcagcatcactaatatagtcactatgctatacaatccatcttgtatcctttgaccaacagtcctcaatactctcccaaccatcttagcttccagtaaccaccaatctactct

SEQ ID NO: 37352 - DNA, 955 bp, Homo sapiens
tgaaccatggtatgggctctcattcaacccttgttaccttgtcacttccactactacataacttttcagcrtctatgctgacaccattccaatggcaatatcccttaaagagtctagtcagatacagttgtcccttggtttccatggggaattggtttcaagacctgctgcagataccaaaatctcaagtcctgatatgtgcataggttatatgcacatcctcccatatactttaagtcatctctagattattacaatacctaatacaatgtaaatgctatataaatacttgttatactgtcttgtttggggaataatgacaagaaatatgtctgtacatgttcagaacagatgaaatccgcagatgtggaattcatatatatggaaggccaactgtacttagtttccagttgattaaatgagattacttctaccctagagaaatagtaattcagcctcgccaaattccatacttacactgatctgaattccctgcctgcattgcctctgtcagtaccaccattttagagcctacttgcatggaaacttgcacaacattgcatcagactaaggggctgatttcacagcaaaagaggaacaacaatgagtgtctgttcaaggtatctgcccaaaggtggctgccccaacagaaagataaatttcccatggtctcacttaaatgtgggaactaaacaacaacaactgaactcatggagatagagggtataatgacgagtgccagaggctgggatgtgtagaggggaggggggtttaaaggatagggtgactatagttaacaataatttattctacatttcaaaataactaaaagagtagaattgcaatgttcttaatacaaagaaatgataaatacttgaggtgatatatatctcaattaccttgatttgatcactatacattgtatgcttgtatcaaaatatcacatgtaccctgt

SEQ ID NO: 37353 - DNA, 705 bp, Homo sapiens
ttgctgtgcactcacacctgaccaatgttgatttgttggaaagtgcatagccagctgacagtagcattatctttaaatgcaagcaagacattctttttttwtttttttttttcagacagagtttcactcttactgcccagggtggaatgcaacagcgtgatctctgctcactgcaacctccacctgctgggttcaagcaattctcctgcctcagccttctgagtcgctgggattacaggcgcctgccaacacgcccagctaatttttgttatttttagtagagatggggttttgccatgttggccaggtctcgaactcttgacctcaggtgatccacgcacctcggcttcccaaagtgctaggattacaggaataagccaccacaccaggccttttttttttttttttttttagtggagacagggtcttgctctgtggcccaggctggagggcagtggtgccatctgggctcactgcaacctccaccttctgggttcaagtgattttcctgcctcagcctcccaagtaactgggactacagtcgtgtgccaccacacccagctaatttttgtattttttagtagagatagggtttcactgtgttggccaggctggtcttgaactcctgacctcaaatggtccacccaccttggcctctgaaaatgctgggattacaggtgtgagccaccacacccagtacaaaca

SEQ ID NO: 37354 - DNA, 705 bp, Homo sapiens
ttgctgtgcactcacacctgaccaatgttgatttgttggaaagtgcatagccagctgacagtagcattatctttaaatgcaagcaagacattctttttttttttttttttttcagacagagtttcactcttactgcccagggtggaatgcaacagcgtgatctctgctcactgcaacctccacctgctgggttcaagcaattctcctgcctcagccttctgagtcgctgggattacaggcgcctgccaacacgcccagctaatttttgttatttttagtagagatggggttttgccatgttggccaggtctcgaactcttgacctcaggtgatccacgcacctcggcttcccaaagtgctaggattacaggmataagccaccacaccaggccttttttttttttttttttttagtggagacagggtcttgctctgtggcccaggctggagggcagtggtgccatctgggctcactgcaacctccaccttctgggttcaagtgattttcctgcctcagcctcccaagtaactgggactacagtcgtgtgccaccacacccagctaatttttgtattttttagtagagatagggtttcactgtgttggccaggctggtcttgaactcctgacctcaaatggtccacccaccttggcctctgaaaatgctgggattacaggtgtgagccaccacacccagtacaaaca

SEQ ID NO: 37355 - DNA, 555 bp, Homo sapiens
gccaaattgacacattttgaagatacagcttccttctccgccataagattatcaaactgcatgaataaaatagtatagcttgataatgaagtaggctgagaataatctaatacaaaaccaatagcaaattttgaaatgcatttacttgcaataaaatgttatctgtaatgcagcagattcttcaaatgtgaaccctgaaattactcagaattttaagaacaaagttaaagctaccatgagtcataaaaatatattctttactatcatcatctttgccacagaatttttgtacttcattttacttttatttttcsataattcatttttgttcctccttaaatggcacaaagttatctcctagtaaaaagtgtctaacccccttccttcattatcattccccacagtatgtcaaaaaaagtttcagagatatcatattgagttatttaggccaaagtcaataaatgggcctaggaataagactttgaaaataatattacacactatattaggcatggtggctcatgcctgtaatcctagcactttaaaaagctgtgg

SEQ ID NO: 37356 - DNA, 555 bp, Homo sapiens
gccaaattgacacattttgaagatacagcttccttctccgccataagattatcaaactgcatgaataaaatagtatagcttgataatgaagtaggctgagaataatctaatacaaaaccaatagcaaattttgaaatgcatttacttgcaataaaatgttatctgtaatgcagcagattcttcaaatgtgaaccctgaaattactcagaattttaagaacaaagttaaagctaccatgagtcataaaaatatattctttactatcatcatctttgccacagaatttttgtacttcattttacttttatttttccataattcatttttgttcctccttaaatggcacaaagttatctcctagtaaaaagtgtctaacccccttccttcattatcattccccacagtatgtcaaaaaaagtttcagagatatcatattgagttatttaggccaaagtcaataaatgggcctaggaataagactttgaaaataatattacacwctatattaggcatggtggctcatgcctgtaatcctagcactttaaaaagctgtgg

SEQ ID NO: 37357 - DNA, 648 bp, Homo sapiens
atgtgatttatgagttgtccatgaagagtttatataaaacacttcatctaattgaataacatgtattttcctgcaaataaccagttctagaagcagagactcttaataccaatatggtaagtctttatcatcataattttgtcattgtagtttatttaaaatatttacttggccaggcgtggtggctcacacctgtaatcccagcacttttggaggccgaggtgggtagatcacctgaggtcaggagttcaagatcagcctggccaacatggtgagaccctgtctctaaaaaaaaaaaaaaaaaaaaaaaaagcacaaaaattatccaggcatgatagtgcatgcctgtaatcccagttgctcaggaggccaaggcaggrgaatcgcttgaacccaggaggcaaagattgcagtgagccaagatcgcaccattgcactgtaggctgggtgacagagcaagactacatcttaaaaaataaaataaaataaaataaaataaccagtcaaaggacttatatcatattctgaaaagtttgaatgtcagaaggttttctatttagttttttaaatgatcattcattggaagcttctgcataccataagctactggggggcagataacatatttgtgtggatcctggagaacct

SEQ ID NO: 37358 - DNA, 658 bp, Homo sapiens
atgaaatacttatgaataattatgaattatttcataattctgtatgaaatataccagactcttttccacaatggctgtacctttttgcattcccaccagcaatgaatgagaattcctcttgctccatatccagcattgggcattgtcagttttctgtatcttggcctttctaatagatgtgtagtgttatctcattgtcttaatctgcatatttatgatgacatatgatgtggaccatcttttcaaatacttatttgccatctttatatatatttttagtgaggtgtcagttcatgtctttagccctatttttatatttgggtgttttcttattgttgaattttgagggttctttgtatatttgtggtaacagtctttgatcagatatgccttttgccaatgttttctctcrgtctgtggcttgcctttttactcttttgacagtatcttttgcagggcatacatttttaatttttaatgaagtctagcttattctttcatgaatcatgcctttgtgttgtatttaaaagtcaccaaattctggatgaactagatttttcttctatgttatatatctgtgttacagttttgtgttttatatttaaggttgtgatccattttgaattaagttttctaaaggttctaaggtctctgtcta

SEQ ID NO: 37359 - DNA, 543 bp, Homo sapiens
gttaaataaatcgctaagctactagaaccaagaatgggagaggcagaattggctacacctgtatagcaaatatggmattcactggtctcgaatgcaagtgtaaaaaaaaattacttttctagaactgtatttaatttgccttgaattcctaatttctctaatttgctttgaattcctaatttatctaatgcaagaaacttaattcagtcaccatgttcaggtaaattctctaaactcactgcttcttgaattcatttaggtttttaaatcatttaaaagccttttcccacattcttctcccgtctgagttttgggtgtgagttcggggaggttggaggttgaatgtggactctgaagcaggagtaagtaaggacccttgctctgctgtgctgcccacatgactgccattgtaaggccctcgctggctctggcctctgccatctgtcctcactgatgtactctgcgtcagcctatgcttatctgagccagtgttcactgaggcagtgtgaccccgttggacctcaaacccatggcattggggcc

SEQ ID NO: 37360 - DNA, 1117 bp, Homo sapiens
agaattgtaagatttttaatgactaaaaatcaatgtttttctactttgcaaaagcctaygtaagtatatgcttagcatcttgccacatagcctttgataccatctgtactaaaaattcacaaaacaatgaaaaccactcactggcagagaagagctgctaacaaaacacctaatactcaggggagcaaacaaatggctctgcgatggttctctgggcaggaggcatagcttgctccaagcctgcctgtctgtaatgacgatcagagagcttcccatgcctcctcgttgaacctactccatctccaagagaccaacaccaggaaagtggcctgttcaggccaagactcactctgtgacgctcttggattgccttttgctataaagtctaatgagaataacaacaataacaacacatgtatgttgcttagtgcagtcctatacagcactgatttgctgtaatactctggtcatagaaacatcttttaattaaaaatatagagagagactataaatccattccagtaaggaagagtgcaattattagggtgaagcatatgaagttaccaatattcaatctttttggcctacaaaaatattttcttgtatagagtgactgcagtaaataaagcgctatccgaagctctcagcccatgaactgacatctcatagggtgctttgtctcgtcaggatgaagttcaactctctgtggttgctctttcttccattatggaatattctagggtttaacgttgactcacaaaacaaccacaaagggcacacaagcaacggtgccacaggtgctgcagaggatggaagaggtagaggctgaggttgaagtgcagcttggtggccagtggccttttcaaggaaatgtcaaagaagcacagggggcacatcagctgccaagtggggagtggtgcaagacctgtgatattatgaagagcatcataagcaccatcatagcacaggaaaaacaaaataaaacagaacagaggcagctcacaactgcaggaggtatgacaagaatgaatgactgttgaggttgcctcttggtagggattatcctccaacagcttcatgcttccagaaagcattctctatgctaatcagatatgca

SEQ ID NO: 37361 - DNA, 1682 bp, Homo sapiens
tgctcttatttgggggaaaagagctaaaattgttttatttgaacagttgataataaagggaatttaggatataattcatggagatagagctgaaaaatttaggtagattataatccatgattaaataatttatagtctatatataatcagtagccttggaatgctctgtagctgaacttgatgggcttttgggctttgttagattagttgacatgtacagccaattgtggtcctgctactttcagaaacaggtagacgtggattatataaaaagcaagcaataaaaattcattttagccgggcgtggtggytcacacctgtaatctcagcactttgggaggctgaggcgggcagacatgagatcaggagttcaagaccagcctgaccaacatggtgaaaccctgtctctaccaaaaatacaaaaaaattagctgggcgtggtggcgcacacctgtaatcccagctactcaggaggctaaggcaggagaatcacttgaacccaggaggtggaggttgcagtgagctgagaccgtgccactgcactccagcctgggcaacagagcaagactccgtctcaaaaaaaaaaaaaaaagaaaaaaaaagtcattttaaatttgaagctctcaaattaatttttcttcttaataggacacataatagttaacagcttcattcaactttatatattaataaattaaaagtcttttgaatgtttgttttgtttttatccataatgattttgcttgagaagttatttctgttttctgttgtaaagtattcttatgtgcgaggtgatgcatttgaggtgctgtctactgcctttgtagaaatgccctttggggtacaatgtattttgtttccatatgtctggatctgttttgtttgtaaaatttgttttgtggagacctcttctagcttaaaaatatcttgaaatatacatgtgtattggaattgctcacctttcttcctatgtctttccttgggaaggattttggaaaaatagggcaatgtgtttataacctgaaactaccttgctagtaaggttaggaagattttcctgtgggcagagtttttaccttttagttctatcttttacaatactagcatagtattgacaacagagcctatatttttaaaaagtattgattataaacattggtgtattgaatctggtagtcattgagttcaaaattgattaccgttgcaccttattatctgaggtggaaggttcatttgttttaaagcaaaagtaaattattttgaagttggaacataggccggtgagttgtttcaaggttaggaatgtctttgattccctgcgtgttttcttcttaatgtaccaacgagactctcgttggagcaatgagaaagttatcctagattaatttttgctaaatgttgtgagatattgtgaaatattctagcctaaataattatgggatttgttttaaggagcttttcaattcatagaaaagcataaagatgctttttgtattgttcttctgtgtttgtattgtgcacgtgcatgaatgctagatatgatctgtattctggttcctactagggaataacaattttgcctttatatcactgtcttttcacatctctcaacctttgcctctggcagaacttgattcttttttagatttattcagtgtatgaatgtgtcattaatttccaca

SEQ ID NO: 37362 - DNA, 667 bp, Homo sapiens
  misc_feature (1)...(667): n = A,T,C or G
ctnnnnnnnnnnnnnnnnnnnnnnnnnnnnnnnnnnnnnnnnnnnnnnnnnnnnnnnnnnnnnnnnnnnnnnnnnnnnnnnnnnnnnnnnnnnnnnnnnnnnttggatttaaagtgttatatatcatggagaagacataatgttaagggctatataaacatttcccttaattttatttcaataaatttctaccttgggcaagtttatttaaccctagttctcagtttactcattttttraaaattagagacagatggggtcttgctatgttgcccaggctggagggccgtggctattcacaggtgccatcccactactgatcagcatgggaattttgacctgctccatttccagcctggaccagttcagccctccttaggcaacctggtagttccctgtcccgagaggttaccatattaatgccaaacttagtgcagacacccacttggcatagcacactatagcccagaactcttgtgctcaatcagttctcctgtctcagccttctgagtacctgagactaaaagtgcacaccactatgcctgtccatttactcgtttttaatactagagaagtgcactcaactatttctaagattccttacagagaaaactattaacatgctgtacacattggcttatcatgaaaaaacaatgatgatgacaac

SEQ ID NO: 37363 - DNA, 1251 bp, Homo sapiens
tacttcctaaagtatgagctgccttattttctcaggtataaaattattttagggaagtttcaataaatcaaatgttaagaaactgctaaaacatttttttgtgagttgctttcattttgcctgatttataatttcaacactctgctctaccacagagtatgtaggtttgtctgtcatatcatagctttcaaagggatattcttattttaaatctcaacatcatcattaaattgttctaataataagaggcctaaattttaaatcctcagggacatcaaggcatctcatctgctatgttattcaagcactgacagcatattgcaaaacatctaggcaatagagggcaagaacaaaacctaatgttgttaccttattgacagttcctaagatacatcataaaattataaaatgttttgtttaaagctggtaggctattttaataagcgaagaaaaggggatggaacttctaagtgtatctatttcaagatacatcttataattgaccctttttcctccttaaataaatgtattcctcccagtacatagctcagagcattgttataacatccttgagaaggagtcatttaaaaatggagttaagaaaagttcacatttcagccttgtaagtggtttagttacgtgatgaccttgaagatttagctccaattgtacagtctcgtaaagggtacctagcgtagcttagaaaagacaataccccaaaattcacttttacgctactaaatatttttgcttattatgattttgttgaggaaggattggagctggtaaaaagggcacaggcatttgtgtagtggtctgaagtttgacggccaaaaaataaacataggaaaaaaaatmatgactttcagatgtgtgactttgagatctggcacaggctgaattcaagtttacctttgcactattaaaaaaaaaagtttgctaggcagatgggtaaacagtagagtttatcttactttataatgagtgttaaactatacatgatctttagcctcaaaattgtttattcacaaataataaagagaagcattgcagccatacctaaaaaagacctcattttcatacctgattattttatctgcctttcacttatgttgctgtgtttttaaagttatagcagttgttaaaagttgtaaacttatttataaaaacttacgaaacttttagaaaacttctggtatatacacacacacacacacacacacacaaacacacaaagcaggggcgcatgca

SEQ ID NO: 37364 - DNA, 1251 bp, Homo sapiens
tacttcctaaagtatgagctgccttattttctcaggtataaaattattttagggaagtttcaataaatcaaatgttaagaaactgctaaaacatttttttgtgagttgctttcattttgcctgatttataatttcaacactctgctctaccacagagtatgtaggtttgtctgtcatatcatagctttcaaagggatattcttattttaaatctcaacatcatcattaaattgttctaataataagaggcctaaattttaaatcctcagggacatcaaggcatctcatctgctatgttattcaagcactgacagcatattgcaaaacatctaggcaatagagggcaagaacaaaacctaatgttgttaccttattgacagttcctaagatacatcataaaattataaaatgttttgtttaaagctggtaggctattttaataagcgaagaaaaggggatggaacttctaagtgtatctatttcaagatacatcttataattgaccctttttcctccttaaataaatgtattcctcccagtacatagctcagagcattgttataacatccttgagaaggagtcatttaaaaatggagttaagaaaagttcacatttcagccttgtaagtggtttagttacgtgatgaccttgaagatttagctccaattgtacagtctcgtaaagggtacctagcgtagcttagaaaagacaataccccaaaattcacttttacgctactaaatatttttgcttattatgattttgttgaggaaggattggagctggtaaaaagggcacaggcatttgtgtagtggtctgaagtttgacggccaaaaaataaacataggaaaaaaaatcaygactttcagatgtgtgactttgagatctggcacaggctgaattcaagtttacctttgcactattaaaaaaaaaagtttgctaggcagatgggtaaacagtagagtttatcttactttataatgagtgttaaactatacatgatctttagcctcaaaattgtttattcacaaataataaagagaagcattgcagccatacctaaaaaagacctcattttcatacctgattattttatctgcctttcacttatgttgctgtgtttttaaagttatagcagttgttaaaagttgtaaacttatttataaaaacttacgaaacttttagaaaacttctggtatatacacacacacacacacacacacacaaacacacaaagcaggggcgcatgca

SEQ ID NO: 37365 - DNA, 1168 bp, Homo sapiens
tacatcgttgtgcaattgtacttttatgtttatctatgacatgcctaatttctggataccttgcataggaatagcttccagagctagcattagaacttatgctactgttttggatccttgacttccctccaaagctggacatttggcagcccagagcaaagagcatctggtgttcctagtacccatgctgtgtgccaacagaattagtatggttcttggaggttggtggattagtctgcttaggcaaaaaaaaaaaaaaaaaaaaaacaccacaaactgagtggcttaaacagcagaaatgtattatcccacagttccggaggctggaagtctgagatcacagtgtcagcctgggtgggtactagggagggcctcttccaggttgcagttggccactttccccctgtgtcctcacatgggggagagagagcaaattctatgatgtctcttcttagaagggcattaagcccatcaggaggactgtacttcatgatatcatctaaccctaattacctcccaaaggccccatctccaaatatcatcacatagggggttagggcttcaacctgtagaattttgggatgggggacataattcagtcctcagcagttaagtttcctgaaaccatcagtgtcacatccagtaatatggggctaagtaggcctttgtgcagtaatatmttctctaacaaaaatgaatatagaattttaaatactaaattctttggagtaatataggctatatctcattcatatattgacaaccacctgaatacagaaacatatcaatcgttgatgacatatatgcagaacctgtatacactgaattatttacctcccactctgcatgttgtggtgagtggtttaacatgcaacctagggtaggttggagacacaaatgaatctcccttctcctttccctctaagatgctctaatcttaagaatgtgtgctgttaacaaggacagcaccacaggttctgtatctctcaagtgtccctccagcatgccccagtgtgaagccttcctactccacagcagatgtctcagctgtgtgtcacccgttcaggatggctgggtaggagggtgtggatgaagtcactgccaatcgtccctgctatgagaacaacctaaaacacatgccctccagactgtgggttaatcatatgca

SEQ ID NO: 37366 - DNA, 1168 bp, Homo sapiens
tacatcgttgtgcaattgtacttttatgtttatctatgacatgcctaatttctggataccttgcataggaatagcttccagagctagcattagaacttatgctactgttttggatccttgacttccctccaaagctggacatttggcagcccagagcaaagagcatctggtgttcctagtacccatgctgtgtgccaacagaattagtatggttcttggaggttggtggattagtctgcttaggcaaaaaaaaaaaaaaaaaaaaaacaccacaaactgagtggcttaaacagcagaaatgtattatcccacagttccggaggctggaagtctgagatcacagtgtcagcctgggtgggtactagggagggcctcttccaggttgcagttggccactttccccctgtgtcctcacatgggggagagagagcaaattctatgatgtctcttcttagaagggcattaagcccatcaggaggactgtacttcatgatatcatctaaccctaattacctcccaaaggccccatctccaaatatcatcacatagggggttagggcttcaacctgtagaattttgggatgggggacataattcagtcctcagcagttaagtttcctgaaaccatcagtgtcacatccagtaatatggggctaagtaggcctttgtgcagtaatatcttctctaacaaaaatgaatatagaattttaaatactaaattctttggagtaatataggctatatctcattcatatattgacaaccacctgaatacagaaacatatcaatcgttgatgacatatatgcagaacctgtatacactgaattatttacctcccactctgcatgttgtggtgagtggtttaacatgcaacctagggtaggttggagacacaaatgaatctcccttctcctttccctctaagatgctctaatcttaagaatgtgtgctgttaacaaggacagcaccacaggttctgtatctctcaagtgtccctccagcatgccccagtgtgaagccttcctactccacagcagatgtctcagctgtgtgtcacccgttcaggatggctgggtaggagggtgtggatgaagtcactgccaatcgtccctgctatgagaacaacctaaaacrcatgccctccagactgtgggttaatcatatgca

SEQ ID NO: 37367 - DNA, 557 bp, Homo sapiens
tgaggaaatttaaaatctgggatgttacaaggaaaaggtctgaataactaaaatcttttggaatcagtaaaccagaaagggtaagcttttggraaaatagccttaatataagcatccctcaagcattactttaacttatagtataatgctttttacttacattttctgcattattgtgactttttgaaaaacatgaattcaaagaatcataggtcaaattatgcatttaaaaataatttaatatatgctaaaattatgtatgtttgatatatagtgtgcttaaattattgataagccactgtaagaaatttggtgctcccaaataccagcaagtggctaccttgcccaagagataagcactttctgttgcctaaagttttaaacatttcggaaagtactagccagaccataaatgtattgatgaaaaaacaataaaaatagttaaattgtaaaactaatgaagtgtcctgtgcaactttaggtataaccaattataatagggctgaggcaactgtaaatcaaaaacacgaggtttatccaaagcactcaggcttcca

SEQ ID NO: 37368 - DNA, 586 bp, Homo sapiens
tggatttctcactgtccattctcccatgcttcagagatgactatactacacataagttaaattatcaaaaatgaaaccaaaaaaagcacatttttagtctctatatgattatattcatacactgctttcatttttattcatagttcctgtatctaaaatattatttgtttattttcatgggttacgtaaaatttattttattttgttattgatacataataggtttacgtattttggtagtacatgtgataatttaatacatctatatagtttgtaaagatcaaattagtgtaattggtatccatyatcttaaatatttgttttttctgtatgagaaactttcaaattattcttttccagctattttgaaatatgtgagagactattgtaaattacagtcccagcatagaaagggcattttcagtcacatagtagtcacttaatatattcattgaatgtataaatatgaatatataaatgaaaaagaaatgaaggatcagcgatactatcacaagttcaacaataaactgaaattttctattcttgctctagattgtgtgatattcatcagtagatattctggtga

SEQ ID NO: 37369 - DNA, 596 bp, Homo sapiens
gacctgcaacctaccttaataggtaaacaagaatgaaaacctaacttgagtgtatgcacctcaaacaacagctacatcttggycaatcccaatggccaaacttcaaccactcaggcactgccaaatgttcaaactgtgctcaaacaaggcaaacgctgagttgtttctgtacctcacttccgatttcggtatgccacttcccttttgtctacaaatcttcttccaccacatgactgtgctggagtctctgtgaatctgctgtgattctggggactttccgattcatgaatcgtttattgctcaattaaactcctttaaagtttttcttttaacagaactaacacggaagaatttccagatcatgaacagatgttttataatacccaacgttgtattaacatgaatagactcttccttagatagctaaccttgtttttaatatgaatagactctcccttagctgagaaaaccagacaaactccatttggctcctttcatttacaagacatcaagggctccttacccaccccctttcctcaaggactttaacttgtgcaagctgattttcaacatatcaaagagtgcaattaactgat

SEQ ID NO: 37370 - DNA, 1025 bp, Homo sapiens
ccccacccctctgccatgaaacagctggaagttactgcccatttctagctatttctgagtaacccgccccttaattagcatgtcattaaaagtgaattataaaaatgactacaagccacmcctaggctgctactctgggagcacaacccacagagggctccctgccctgcaggagcggacgcagggctgtaacaccgccaatgtctccatagagctgctttattccaccacaggcttgcttttggattccttcctgagcgacgccaagaacctgcccttcctcagtgtgactcttgcctaaaatctatccctggttttctcttttcctaagcatgccctgacttgttctttcatctcctctgaacttgcaattgctcctcagtgactctattctgcagatccagaaaactcaaccttaatcttcccagagccctgttgtctccaatattggaatatctagccttgctttctcagacgcctagattacaggcctctctcttgaacacctattggtaaggtatccggggatcctttaaatacacgatgattggcagggtttacataggggaaatcagtgtctgacaattcgccttccaggatatggattgtcattccctctctttgtgggccccagtctcctatacataaaagtagagattgtaatagtcatttgacttgcagatacctcaccccgaacccacctactataatgtaaaagccaagaatgcaaaccctttcctcaccccgtgaaggtaaagtcctcagagccaaggagagaaggctcagggatggtacctaggtgtttccaacactaaccatgcattgtagtttttagtgttcaagtttaagcttcttatgttaaagttaccccagctttaattatattgtaacaagatttatttttgtaattccatttttggattcttgatttcttggtaaagaaatacagttatttttgtataccaatcttatatagtgttacattccaaaatttgttcatgagtcctaacactttttagtaaatt

SEQ ID NO: 37371 - DNA, 1072 bp, Homo sapiens
taataccatgctgagtgatgctggaaaagtgagtcttcagtaatgccctcatgaaatacagtctcactacactgaagtattttctttttaaccctttctttcttttctgctgtgaatatgtgccttctaagaggtgaacaacggaaaaaactgaaaaagatacttcatctaattcagtaactagtttttgtatcttctaaraatttttatctccagaaagctctaattttcattcctttacaagctttatttctctctcctttccaacaccagactttgctctgtttgttttctatatcttttttagagatgcctacaatagaaaaaatctatgacatattcaatacatctgaaaagtttacattgccatagataagaatgaattatctgtttataaagaaaaaacaataaaaatatgaaccaagaaagcacagaaggtagtaaccacatttagatgtttatcatggaatcatctttataatccatctgttacaattccacacagcaaattacaagtaattgtgaagtttcccctcattttataggtttggtcttataaggcatacaacacaaattttaattacttttctttttggtatttggatcttaatttggtcaagtggccactgggtagatgatggagcctcttgagacatacagtcttcttctagctttgttgatgtgaatattactgtgtatttttcattcacttattattttacaaggcatgcttcattaaaaatatatcagcatctcattgacaaatcacaaaatttaaaaggcaccagaaaaaaacaatttatttaaaacattcctgtgtaaaagtagtcaccactcttactattcttcaaatatttttattatatttaaaaacaagcctagttttatctcgagtgtctgaccttgatgatattgtacattttaaacttagaaaaattgaactctattggaaatttcctacagatcagcttttctagatgccaagcgccttgtttcagccatggtgatgacagcaaattgggttctcagggattctggcctctggcatcatctcagttatttataattgaag

SEQ ID NO: 37372 - DNA, 1072 bp, Homo sapiens
taataccatgctgagtgatgctggaaaagtgagtcttcagtaatgccctcatgaaatacagtctcactacactgaagtattttctttttaaccctttctttcttttctgctgtgaatatgtgccttctaagaggtgaacaacggaaaaaactgaaaaagatacttcatctaattcagtaactagtttttgtatcttctaaaaatttttatctccagaaagctctaattttcattcctttacaagctttatttctctctcctttccaacaccagactttgctctgtttgttttctatatcttttttagagatgcctacaatagaaaaaatctatgacatattcaatacatctgaaaagtttacattgccatagataagaatgaattatctgtttataaagaaaaaacaataaaaatatgaaccaagaaagcacagaaggtagtaaccacatttagatgtttatcatggaatcatctttataatccatctgttacaattccacacagcaaattacaagtaattgtgaartttcccctcattttataggtttggtcttataaggcatacaacacaaattttaattacttttctttttggtatttggatcttaatttggtcaagtggccactgggtagatgatggagcctcttgagacatacagtcttcttctagctttgttgatgtgaatattactgtgtatttttcattcacttattattttacaaggcatgcttcattaaaaatatatcagcatctcattgacaaatcacaaaatttaaaaggcaccagaaaaaaacaatttatttaaaacattcctgtgtaaaagtagtcaccactcttactattcttcaaatatttttattatatttaaaaacaagcctagttttatctcgagtgtctgaccttgatgatattgtacattttaaacttagaaaaattgaactctattggaaatttcctacagatcagcttttctagatgccaagcgccttgtttcagccatggtgatgacagcaaattgggttctcagggattctggcctctggcatcatctcagttatttataattgaag

SEQ ID NO: 37373 - DNA, 1072 bp, Homo sapiens
taataccatgctgagtgatgctggaaaagtgagtcttcagtaatgccctcatgaaatacagtctcactacactgaagtattttctttttaaccctttctttcttttctgctgtgaatatgtgccttctaagaggtgaacaacggaaaaaactgaaaaagatacttcatctaattcagtaactagtttttgtatcttctaaaaatttttatctccagaaagctctaattttcattcctttacaagctttatttctctctcctttccaacaccagactttgctctgtttgttttctatatcttttttagagatgcctacaatagaaaaaatctatgacatattcaatacatctgaaaagtttacattgccatagataagaatgaattatctgtttataaagaaaaaacaataaaaatatgaaccaagaaagcacagaaggtagtaaccacatttagatgtttatcatggaatcatctttataatccatctgttacaattccacacagcaaattacaagtaattgtgaagtttcccctcattttataggtttggtcttataaggcatacaacacaaattttaattacttttctttttggtatttggatcttaatttggtcaagtggccactgggtagatgatggagcctcttgagacatacagtcttcttctagctttgttgatgtgaatattactgtgtatttttcattcacttattattttacaaggcatgcttcattaaaaatatatcagcatctcattgacaaatcacaaaatttaaaaggcaccagaaaaaaacaatttatttaaaacattcctgtgtaaaagtagtcaccactcttactattcttcaaatatttttattatatttaaaaacaagcctagttttatctcgagtgtctgaccttgatgatattgtacaytttaaacttagaaaaattgaactctattggaaatttcctacagatcagcttttctagatgccaagcgccttgtttcagccatggtgatgacagcaaattgggttctcagggattctggcctctggcatcatctcagttatttataattgaag

SEQ ID NO: 37374 - DNA, 1072 bp, Homo sapiens
taataccatgctgagtgatgctggaaaagtgagtcttcagtaatgccctcatgaaatacagtctcactacactgaagtattttctttttaaccctttctttcttttctgctgtgaatatgtgccttctaagaggtgaacaacggaaaaaactgaaaaagatacttcatctaattcagtaactagtttttgtatcttctaaaaatttttatctccagaaagctctaattttcattcctttacaagctttatttctctctcctttccaacaccagactttgctctgtttgttttctatatcttttttagagatgcctacaatagaaaaaatctatgacatattcaatacatctgaaaagtttacattgccatagataagaatgaattatctgtttataaagaaaaaacaataaaaatatgaaccaagaaagcacagaaggtagtaaccacatttagatgtttatcatggaatcatctttataatccatctgttacaattccacacagcaaattacaagtaattgtgaagtttcccctcattttataggtttggtcttataaggcatacaacacaaattttaattacttttctttttggtatttggatcttaatttggtcaagtggccactgggtagatgatggagcctcttgagacatacagtcttcttctagctttgttgatgtgaatattactgtgtatttttcattcacttattattttacaaggcatgcttcattaaaaatatatcagcatctcattgacaaatcacaaaatttaaaaggcaccagaaaaaaacaatttatttaaaacattcctgtgtaaaagtagtcaccactcttactattcttcaaatatttttattatatttaaaaacaagcctagttttatctcgagtgtctgaccttgatgatattgtacattttaaacttagaaaaattgaactctattggaaatttcctacagatcagcttttctagatgccaagcgccttgtttcasccatggtgatgacagcaaattgggttctcagggattctggcctctggcatcatctcagttatttataattgaag

SEQ ID NO: 37375 - DNA, 532 bp, Homo sapiens
taaagtacattcagggcaatagagtttctttaaatattactttgttattcaaaataatcacaaaagcactcatcgtaggaaaacttgtgaggactcaaatatagggaaatactttttctttctaaggcacaattctctaaagaagttcaccttaatttgaatatacatggggaaaatatccttgttcactaatagtctatattcactctgttttcttccctcatagaccagccggttcactattattttccaaatgatgtgtgcctctctagagtccaggctatctgcatatctaatttttcccacaaattaytgttttgaattgcactgaattcaattcaaggggatgtcatttataaacagtgcaaatatatactgcacgagggatcttagaactcatacacatggtttgatccataagctcatatgagcgtgcaatgtcaacttttttcatgttttttttaagtccacttaaattctattttaagccaccatctgccagtgctgttagggcagttagccttcaatcatt

SEQ ID NO: 37376 - DNA, 1199 bp, Homo sapiens
cagagcatatattttccaaaatctcacactttccctcttggtcatgatcattcaccaaaacacacacacacacacacacacacacacacgcacacacacacgtgtgtgtgtatgtatgtgtgtgtgtgcataacatacatatacatacatatatgtatatatatataattatacaatatataatttaagcaattactgtcttgtgtgctgtattccaagcttttcctacattattaataaaaaattgtcctccatcttctagaaattttcagtctacctgaatgtttatcatatgtataattgaacatttccctaaagcataaagactcaatcaatgggcttctactgctcactgagataatcacctttaaaaagacaaatgttttttctgctagatctctttatcttcactgtgggttcctcttattttatttctacatcaatgttcatatttaacttattattttatcttatttttaaatttcttttatgttgagccttgatgaaagccataggttctctcatataattgtatgtgtatgtatgtatatgtacataatatatacatatatgtatatgtatgtgtatgtacataatatatacgtatatgtatgtgtatgtacataatatatacgtatatgtatgtgtatgtacataatatatacgtatatgtatgtgtatgtacataatatatacgtatatgtatgtgtatgtacataatatatacgtatatgtatgtgtatgtgtattacataatatatacatatatgtatatattatgtatatgtacataatatatacatatatgtatatgcatgtatatgtatgttatacacacactaattcccctacatctcacctgtataagccatttttttagttgctataaaggaatatctgaggatggataatttacttttttaaaaaaagaggtttaattggctcacagttctgcaggctctgcaggaggcatggtgctggcacctgtttggcttctggcggcagyttcaggaagcttaaaatcatggtggtgggaaaaaagtcctggtggaaggtgaaggggggctgatgtatcctgtggtgagaatgggtacaagagagtaggagaagggagagatcccggacttctaaggaaacacatcttgtgtgaactgagcaagaactcacttatcaccaaggggatggtgctataccatgag

SEQ ID NO: 37377 - DNA, 1355 bp, Homo sapiens
aggctgaggtgggaggatggcttgaaccaggaggtcgaggcagcaatgagccatgattgtgccactgcattccagcctgggtgacagagtgacagcctgtctcaaaaaagaaaagaaaagatacaaaagaaatattgaatcaaaaaatataggtaaaagtgaaacaaaaggaaatttaaaaataaatatgtatcaatagataaaaaatggtaaaatgaacaagatgtggaaaatgttgtagtctctacatctggcctaatatttaatctaagaatctaatgcaaatttcttacatcatgaataaatatggatgatgggcctacagatcagatacattttaataatgagcagactaagtgaggcctcatacctctcatctccatgtgtaacctaattaatcgggccatttcagttgcagaacactcacttccataactgtcttctacttcagaagtgtgtgtttcagttagaatttgatttgggtgcagatgcctatgatagacaatgcaaacagtgacttaaagaaataaaagtttatattcctctcacataaaaaaaatttaaatttaaatagtgcagggcagatttagcactccacggtgccaagaatatgagcttcttttattttgttgctcttggccttcactttatggctcaaaatggctgctgaaactccagacatcaaacctgcattccagcctgcacagtagaggaaggaagtaaagaagggtaaaggctcattttctaaggaaattgctcatcagcctcacacaacacttcctcatacactgcattagcccaatttagtcatatgaccacacctatctgcaaggaaagctgagaaatgttgttcttgttctcaggggagatgtatgtgcccagctaaaaataaggtgttctgccaccaaagaagaagagaaaggggatattgaagttcaagtggtaatcttagacatataaagccatcaaaattatttcccccccaaacccttttgagaaactgagtgcgtaaagatagattatgactgggcacgtcaaacttgttttaaatatacaattggccaggcacagtggctcacacctgtaatcccagcactttgggaggccraggcgggtggatcacctgaggtcaggagtttgagaccagtccggccaacatggcgaaaccctctctctactaaaaatacaaaaattagccgggcatggtggcatgcctgtaattcccagctactcaggtgggaggctgaggcaggagaatcttttgaaactgggaggcaaaggttacagtgagttgagatcacaccactgcactccagcctgggtaacagggtgagactctgtctcaaaaaaaataa

SEQ ID NO: 37378 - DNA, 547 bp, Homo sapiens
atataactataagtaaatattttatgcatgttatattttaactatgaatataaatcaatggattataaataaaatatctaagcatatgatgagaccatatacatagttttgcttgtatattttatgtttcttctcagtttaccatcagtcatgactgctgaatacatattaagctaaagtttcctaagtttgctcacagggtgttttattttttaaaagaaaatttaatatttagcagtcagttaaaatattgatattttctaaaattgaaccacattttggttaaaacacttatttttcaataaaatacaaatgaatatttttgttaattctgaaagttgtgtaacccaagtttttgattagaacacttaagcatgttaaaatacacattgtattgtcatggctattggtttcccgcatagggaagaactcagtggcatttgcctagggtgcattgcattggcctacctatcattaaattctagtttasagctgcaaactgaagtgctgcctggtttggtaaaattgaaactgcttgtttgagcca

SEQ ID NO: 37379 - DNA, 674 bp, Homo sapiens
atatatgtaattaatataaactatacattaagacatataatattagtgtaatactaattactttaaaataaaaatgagtattttaagtcacattgtaacaactttatttttgtaagttctgagaactctaaactttgtgcatcaataaaggtttcatcatgaatatactatttaaattattttttaattgaaaaataattgtatatattatatatttttgaagtacactgtgatattttgatatatgtttgcattgcaaaatgattaaattaagctaataacacatctatcaccttgcatatttatcattttttgtggtgaaaatagttaaaacctacaactttgaaacatgcaatgagttattatttattatagttactattctgtgtgacagattactaagtcttatttctcctgtccaactgaaatctttttatcctttgatcaacatctcccttttttctgttcaacccctctgctcctctgataaacaccattctactctctatttctatatattgaagtttttagtttycacatatgagtgagaccatgcagtatttgtctttctgtgtctgtgcctggcttattttatttagcacaatgtttatatatgttgttgtaaatgacagaattttcttcttgtataaggctaaatagtattccattgtatg

SEQ ID NO: 37380 - DNA, 584 bp, Homo sapiens
ttaaaatttcttagctttgttagttcaagccatgtcctyaatgtagtttaatgctgctgttattatcattatttaatatagtcaatgtatggactgaacaaaacatacttgcaagtttagcattttccaatcaatattttaaatttacttgatgaagaaaaaaagtgtgctcttcaattgtaagaattatctcagtgcttcccgagatcactttaatgtaatacatttatctgtatgtaaaaatggtttctctggttaccagaaataaattgcagtatatcactggattaattgacatcagtttctcaaggtaagatatgacatcttgctgacacaatatgagtaaaaattctcaaaacaattagacaacattataggaggtgaaatatagaaaggtttatttatcatacatattatgaatcaacattatattttcagtttatttttacaataaagtatatattatatttctttttttgtaaaattgtgttatattaacatacacaaatagattcacatttgaatgtcttatagagctctcaaatatatcaaaagaaagaaataaaggaacgccataaggttat

SEQ ID NO: 37381 - DNA, 584 bp, Homo sapiens
ttaaaatttcttagctttgttagttcaagccatgtccttaatgtagtttaatgctgctgttattatcattatttaatatagtcaatgtatggactgaacaaaacatacttgcaagtttagcattttccaatcaatattttaaatttacttgatgaagaaaaaaagtgtgctcttcaattgtaagaattatctcagtgcttcccgagatcactttaatgtaatacatttatctgtatgtaaaaatggtttctctggttaccagaaataaattgcagtatatcactggattamttgacatcagtttctcaaggtaagatatgacatcttgctgacacaatatgagtaaaaattctcaaaacaattagacaacattataggaggtgaaatatagaaaggtttatttatcatacatattatgaatcaacattatattttcagtttatttttacaataaagtatatattatatttctttttttgtaaaattgtgttatattaacatacacaaatagattcacatttgaatgtcttatagagctctcaaatatatcaaaagaaagaaataaaggaacgccataaggttat

SEQ ID NO: 37382 - DNA, 544 bp, Homo sapiens
gaacactagtcaaatwaagttagggccctttttaatgccatcattttaacctcaattccgtcttcaaaaacccaatatccaaatatagttacattgtgaaatgctgaggattaaaattttaatgtgtgaattttggggggacacaactcagctcataatgacttcctaattttaatctgctttttctctcaagtactgagaaaagagagagatgtgttagaatattccactgtaccacacaggcactcttatacattgctggcaggaagcaaaatggtacagaccctatgaagggaattggcaatatctaatgaaactatttgtgcatgtactctttgatggagcattcctacctctagaaatttcccttaatgaaatacctccaatagctaaaaaaaaacaacaacaaaacaagcaaacacacaaaaacaaacaaacaaaacacatatgcataagtatttttcattgcaaatttaatcattatttttaattgtaaaatggtggaaatgacctaacggtccaaatataggacctccctaaaata

SEQ ID NO: 37383 - DNA, 1241 bp, Homo sapiens
aataacttaaatatatatttatctatgtaatttgatgatggttgcaagttatgaattgacataataccttacaattgttgatggatttcaacagcattttttaaattaatcatacatttattggtggcttctggtaaaaaaaaaattagacaagtactgactggttgaaaagtactatatcattgaagtacagtggcatgaagatgaaatggataaaattagatgagtttttaatgctagtagataatccgtgatttaatgctaatagacctaacacattttcaaaatagcttgacctttaactcatgattcctatatatttcagatgtcagcaatsaggaagtgatgaagattagggcagccacctcaaggaatttgattgacaaagatgtgcgtccaaaaagaatgatattgatttaattataaatagctgacaaattgttaaatatcattcaagtcttggtagcttaccttttaccaaggctgctgctgcagtgcatttatagcatgctaaaaattacctcaagtttattagaaactcttttgagtttcaggaatgagagtctttcttggccaaatacaagataaaacccttgaatatgttccttgtatgattttgtttgtaaatgtattctattagggtgaagaatgatccaccaaaactacaaaatcattgttgcctgttttaatctgagtttgtggcattgcttattttgcatgctatttgtctttacactttccatttatttccagattaaatactattgtatgataaaagaatcagaaggaaaaatagctatttccttggactttttgttgggctttttaattgatgagaaaaacagtagggcacaagattgttttgaggtaggaactgaactataagctttgtcatactgaccatccttaagtgacataagttcaattactttcttccatgaatcacactccaataatatcagttggaaatactaggttaacaataggtctgtaacccataatctctcttttcagtgacagagatggccaagtcaaatatctctctatgcaaaatctcttggtaaatgcacttaaaatatttatgagcagaaagataatggcaaattcataacttggaaatgtttttgtcaggatacatgtggtctctctgtgatgttaaggaacccagagtttatgcttttaaggggcatggctcactgatagatgtctcatatgttatatagtaatagaatattaaaaag

SEQ ID NO: 37384 - DNA, 1241 bp, Homo sapiens
aataacttaaatatatatttatctatgtaatttgatgatggttgcaagttatgaattgacataataccttacaattgttgatggatttcaacagcattttttaaattaatcatacatttattggtggcttctggtaaaaaaaaaattagacaagtactgactggttgaaaagtactatatcattgaagtacagtggcatgaagatgaaatggataaaattagatgagtttttaatgctagtagataatccgtgatttaatgctaatagacctaacacattttcaaaatagcttgacctttaactcatgattcctatatatttcagatgtcagcaatcaggaagtgatgaagattaggrcagccacctcaaggaatttgattgacaaagatgtgcgtccaaaaagaatgatattgatttaattataaatagctgacaaattgttaaatatcattcaagtcttggtagcttaccttttaccaaggctgctgctgcagtgcatttatagcatgctaaaaattacctcaagtttattagaaactcttttgagtttcaggaatgagagtctttcttggccaaatacaagataaaacccttgaatatgttccttgtatgattttgtttgtaaatgtattctattagggtgaagaatgatccaccaaaactacaaaatcattgttgcctgttttaatctgagtttgtggcattgcttattttgcatgctatttgtctttacactttccatttatttccagattaaatactattgtatgataaaagaatcagaaggaaaaatagctatttccttggactttttgttgggctttttaattgatgagaaaaacagtagggcacaagattgttttgaggtaggaactgaactataagctttgtcatactgaccatccttaagtgacataagttcaattactttcttccatgaatcacactccaataatatcagttggaaatactaggttaacaataggtctgtaacccataatctctcttttcagtgacagagatggccaagtcaaatatctctctatgcaaaatctcttggtaaatgcacttaaaatatttatgagcagaaagataatggcaaattcataacttggaaatgtttttgtcaggatacatgtggtctctctgtgatgttaaggaacccagagtttatgcttttaaggggcatggctcactgatagatgtctcatatgttatatagtaatagaatattaaaaag

SEQ ID NO: 37385 - DNA, 619 bp, Homo sapiens
cacaaaataaaacaactcaggtgatggctacattttgttcaatacattcttattatgatttgaaacaacctcaaagtttgttagaatatgtagatagcaattaacattttttaaaaaagcaaaaaagctgatcacaaaacattggattttgtggctrcaggtagacatggactgtgagtcactggtaacatttgtcacattcagcccttcagaccaaatagcacaccacatgggagctgaacacagtatttaagcttgtttgcaatatactaggaattcaattttattttctccatctgttgttattttttatttctgattcacagtttaaaactaaactgaataccattgtgtatgttttctaaacgagcaacataatatgtgtgttaaaatcccaactcttggcagagaaaagaatacgtcgaattttcttcatttgaactttccctccattcaaataaaaaacattaggtgagttctaaactcacaactcatccctgactgcctatgcttgaagtaaaattgcatttttgaagaattgaatacttctctagttaactcccccgtgcatagttattctacttctattttcctgaaatgaggaactgctattgtgcaa

SEQ ID NO: 37386 - DNA, 619 bp, Homo sapiens
cacaaaataaaacaactcaggtgatggctacattttgttcaatacattcttattatgatttgaaacaacctcaaagtttgttagaatatgtagatagcaattaacattttttaaaaaagcaaaaaagctgatcacaaaacattggattttgtggctacaggtagacatggactgtgagtcactggtaacatttgtcacattcagcccttcagaccaaatagcacaccacatgggagctgaacacagtatttaagcttgtttgcaatatactaggaattcaattttattttctccatctgttgttattttttatttctgattcacagtttaaaactaaactgaataccattgtgtatgttttctaaacgagcaacataatatgtgtrttaaaatcccaactcttggcagagaaaagaatacgtcgaattttcttcatttgaactttccctccattcaaataaaaaacattaggtgagttctaaactcacaactcatccctgactgcctatgcttgaagtaaaattgcatttttgaagaattgaatacttctctagttaactcccccgtgcatagttattctacttctattttcctgaaatgaggaactgctattgtgcaa

SEQ ID NO: 37387 - DNA, 614 bp, Homo sapiens
  misc_feature (1)...(614): n = A,T,C or G
aaacaggaagacaagttctcaatgcagtctgagggtttaactcgtagkgtggctttcaggctttaaactgtcttcggctagaggtgggatttcagtggggacctgccactatctgcctaggcatttggctgcctcttgccactctcgctagttaacttaatattaagctcttggataactagaataatacctctttttcatttccatacactgttactagtggcctgttactagtatgaagttaattnttaaaatgattntgattctctagtgttctttggatttttttaaaaaaatataaatgaccttttaaatatttgaattattagacataataccttattttgttctaaaacatttatttatttgtccctcacatgtgagacaacttgaaaaattctatcaaatgatacagaaggggacaaatatttattcacctattaccacgagtcagctatcatgttaaatgcttccatgtattatttgtcccaaagcattctataaattattgctagtcacatgtttacagatgagataacactagaaaatgttaagaaaattagataaatgtaaacatgcccagaatataggcatcctctgcagatactggaagt

SEQ ID NO: 37388 - DNA, 567 bp, Homo sapiens
taagcaatttgaagaataagactaaataatttctttttttgttttttttttgttttgttttgttttttgagaaggagtctcgctctgtcccccaggctggagtgcagtgacacgatctcagctcactgcaagctycgcctcccaggttcaagccattctcctgcctcagcctcccaagtagctgggatgacaggtgcccaccaccacgcccggctaattttttgtatttttagtagagacggggtttcaccgtgttagccaggatggtctcgatctcctgacctcgtgatccgcccgcctcggcctcccaaagtgctgggattataggcgtgagccaccgcgcccggccaagactaaataatttcaatttttaaaaaatatgtttttcttacgtaatttccagtgccaaaatgtgatactttaaggggctggcaaggtgcagaagaaaatggcactcatttataacagttcttactgataactactcactacaaactttgtggcgggtgcgtttgcaatgctcagctaatactttcagagcattagacatttgcatacttttggatg

SEQ ID NO: 37389 - DNA, 567 bp, Homo sapiens
taagcaatttgaagaataagactaaataatttctttttttgttttttttttgttttgttttgttttttgagaaggagtctcgctctgtcccccaggctggagtgcagtgacacgatctcagctcactgcaagctccgcctcccrggttcaagccattctcctgcctcagcctcccaagtagctgggatgacaggtgcccaccaccacgcccggctaattttttgtatttttagtagagacggggtttcaccgtgttagccaggatggtctcgatctcctgacctcgtgatccgcccgcctcggcctcccaaagtgctgggattataggcgtgagccaccgcgcccggccaagactaaataatttcaatttttaaaaaatatgtttttcttacgtaatttccagtgccaaaatgtgatactttaaggggctggcaaggtgcagaagaaaatggcactcatttataacagttcttactgataactactcactacaaactttgtggcgggtgcgtttgcaatgctcagctaatactttcagagcattagacatttgcatacttttggatg

SEQ ID NO: 37390 - DNA, 567 bp, Homo sapiens
taagcaatttgaagaataagactaaataatttctttttttgttttttttttgttttgttttgttttttgagaaggagtctcgctctgtcccccaggctggagtgcagtgacacgatctcagctcactgcaagctccgcctcccaggttcamgccattctcctgcctcagcctcccaagtagctgggatgacaggtgcccaccaccacgcccggctaattttttgtatttttagtagagacggggtttcaccgtgttagccaggatggtctcgatctcctgacctcgtgatccgcccgcctcggcctcccaaagtgctgggattataggcgtgagccaccgcgcccggccaagactaaataatttcaatttttaaaaaatatgtttttcttacgtaatttccagtgccaaaatgtgatactttaaggggctggcaaggtgcagaagaaaatggcactcatttataacagttcttactgataactactcactacaaactttgtggcgggtgcgtttgcaatgctcagctaatactttcagagcattagacatttgcatacttttggatg

SEQ ID NO: 37391 - DNA, 615 bp, Homo sapiens
agatgcagcataaggtgtggttcaacaattcatatctgtggagcctttatcacaaaagttttacagacagttcacagagtgtacagtggaagagaagtccctaggagagtaggaattaatgtatcctgaaaaacaccagtcactcagtggtataccagaggttacaaagaaaacaatcaagaaaagaaaaagaaatgagaaaaccaaagtcttctttcaaccttcgttgtataggctccactactgtgtaattcctcccaacttcttgatctcttttctgcttctccttcacttcattactcacctgactccattcctaaggttcagtccttaacttgccattctcttgttttaaagattctcctttagataactcacttgcttatgaattattagcaattctctgtgggggtgtcttaacctagagctctaggctgggcctctttcctytttgacttttttttttcttcccctctttgacttttccccatccatagcagccgattcatactggcatataggttgccatgaagtcctttcaatccctccctctcacttacactttagttccatactaactatggggacctgtcattttcatgctcaaaaacctca

SEQ ID NO: 37392 - DNA, 608 bp, Homo sapiens
gattatgtgtagagacatgtctatttaacaacaatttgaatactttgagtctaagcaaagatgatcaagcaatggtaggaatgtcattgtttctgggaactttttgttggtcacagaataattttcagtgtgacaaattaaagaaacttaggttgttccttaaacccattctgtcgtctgcctttttatgattttcttgattttatcacgggagcatttatcgaatctagtttttttggtcatactttgcttaatggtatacaaaaataactacacagatgtgttataacttatcttttcagtcaagcaactttgaaaatgtacaaaaaataagagaccgttagtcaccctcaacttatatttttgaaaaaaaatgaggtatcrgtctacaatttagtactttatcacattcattcagtagaagatgattgtcagacaagggaggtgaagtataaagtttaaccaataagggtgcatccttagggtagcttcagagacactgtagaggtgggcatgagataaatgacagtctgtaagggtggtagtgaaatgagctgaagtacctttaaggtcttgcatttgatgaaaagcccctgcggtactttaat

SEQ ID NO: 37393 - DNA, 579 bp, Homo sapiens
gatgcaccatccagtaagtccatcgttgataaaatcaatattttgctgacctgccacagatgacgacgttgccagtgtcataggaaatgctgaatgaatttgctcttctaaaggtctaagtcagagcaaacactatctatggggacttagcaaggtgccagggagtttcaggattcaaaacwtgattttttttttttttttttttttttttttttgccattcctgaggcttaggtggctcctatctgttggaggcctgcttcagctgggagcaggggaaccctgtacccctcccagacaaatccctgcggccctcaacttgggtgattttgatgtataactagtgagatgccttcctatggctagtttcttaaaattatagatattattagagtctgtgatggcagggcctcctagggaaagcagcagaaggaagaatggggcagggagaaaaataaaggcggagtcagtaaacacaggaccttgacttaaattcactctaatcactgttttctctgcctggactattgcagtaggctcccaagctgttctattctccgtttggtggccagaggctttt

SEQ ID NO: 37394 - DNA, 578 bp, Homo sapiens
gcctccattgcatcaaaaacagaagatttacaataaggtgccaaattctaagattttctggctcctaattgatcttgatacagaatgcatgttagcgataaggcaaaagaggccccttaacattccctgcatggtaaaggagacctgctgttctgcctgtgtatcatgaacagagaccagaggggtgatggccagttacacagcaaggtgcaaggtgaggctgtttagggaaggatggtaacgaacttcaaaaggaagaatttgacaaccaagtgacaagtgactaaaagggaatttggggttggaaggtatagcaaagataagaaggttctggatcaaatcaccacagataatcaaagaccttgcaagcctgggcatctaaccataaaccagcaaggtcccctaactctcaccctgtgcctgagggcaacaggtctagtcatacagactcttatctccaggtctctacgcatttcttaactgcagtaaaaactggcaaygctgttcagatattttccttacatagttcacactggacacatttttcccccagactatgtctactgaagaagtccaaa

SEQ ID NO: 37395 - DNA, 1206 bp, Homo sapiens
ggttattggggccacattgactgaaggaccacaaggttccaggcattgcgctaagagcaggtaagtgcacctgggcacaagacaaaatgagcaacctgtgtccagaaggaggacggaggctacccaggaatgcccagcgacggccattccagcatgggccacagtcctacaggaaaggaggcctgcatcttctagtctggtagtcatcagagtttgaaaatgtccacttgagaataaggcaaaacctttttctcattttttggctggttcctcaggcctacataggcttagaagaaaagctcaagacagttgaaggcaactaagggaccaataaatgcagaagagaaaggcccaaagaggcatctgatggcctcttaatgactgaatgagtaagtgccaactagaaattctgcagaaattctcttggaaagccttgagagaatttttaaaattccgttatttctccacatttattatttttactttcctatctccctgtgctgattaaccataaaacctgtaaaatgagaaggagctacagatgtttattttgagggcagcaagggaaggaggagctggggacactgcatcccactataggcagaactggtcaagagaaycaagatagagtcagaagtggcaactaccaaaaggaaagagaaatcattgcagtccactggcctgagcaatgtacaggagaacagttaagtcagcccgagactgaggaacaggccaagactcaactcagaaaagtctcaccacaagatggcaagcaacagaggaatgatgtgcactatggcattctacacagaggaagctatggccatggggggagacaatgtgattgtcattgcaggaccaagtgatgttgtcccatcataagcatgatctgagctagagctacaaaaggcctactgaggagacacgtcaaagatctctgcaacagctaattccatcagtatactgatcaatggagcaggcggggggcaggggtaccctaaggtgtggggccttcccaaagagtggacccacaagcccaggaggccactgtgaactgtggaccatccaaagacaagaaattaaaaaagaataaagactcttttagacattcaaaaaatctatcaccagcagatctgaactataagaaatgataaagaaaatccgatggaaatgtgaatctgtagaaaggaataaagaacaccagaa

SEQ ID NO: 37396 - DNA, 799 bp, Homo sapiens
agctcacctgctgctgtgtggcctggttcctaacaggccacagaacaatacccctctgtggccaggggttggagaccccggcctacagcattcaatgcagcagcatgctgcacaggttaagtaacctggtgtaggagcaattggctataccccatatcctaggtgtgtgtgggctctgccatctagtttgtgtaagtactccctatgatgtttgcacaacggcaaaatcacccaaggacacatttctcggaatgcaccccttttaagtgacacatgactggtaccttgcttggggagaatgatgttgaggatcttgggcttggaaatacctaggttagcctaattccttcttgcttttcttgttgcagcgcctcctgggtgaatattaattaatatattcactaggattgaaaggaaggtcctagacttttcttccctttaggaggacaagtttaaaaaaatggaatttatctgtaaagctggctagctcttatccctgaccctaaaaacatagtctgtaagccccccgcccccgcccccaccggggaagactctttggactggaggaccgtgtttctctctaaattcttacactatgaatggcatgtgaaaataatatccacgtggttacatatttttcaaaacagtgtctactatccaaagatcaacagagcacaaaagtaccaagagtggaaaatctctggtgtataacggcctaacgggaaaggagaaaattggggaatgcaacaggatctgcaattcgggtgggggcggawggacgcggatggacggcccgcct

SEQ ID NO: 37397 - DNA, 680 bp, Homo sapiens
atatgcaggtctattaaagacttaagagcttctaataaactactttacttggagagggttggggggacttcagatcatacagtctgccatggagaaaagaacttgctggcagacagcctgatggttcagaggctccagtgcccagttagccacctggtctgcaatctttccacagacttactgatcaggcttgatcaggatggcccagccatccagaaaaagcccccatcaggttcagtcccttcggggtacagatggaaaaggcgtcaatcactgagtgcatagtatgaaaggttccaaaatctcccccagctggtataatacaatcagttccccttcaagttatggtaagccatatgtgccaagcatgaaataatcagattgcaactcatcacggacgtagttaattctgtttttctagtacagcagtgtctatgatattccgccgctttggttctagggctgcaaaaaaggaaacatcttggtcccggtctgactgcaatgctaagatggtctcttcaatgacttcaagatgagggttaccagcatttctaaaatacgctaaagagagaaaccatgagtctgaatcaggtaagccatgaacagtgttcaaaacacactcggttttgttttttgttagccacatgtcaggacaataaatcaaaragtatttctaaaat

SEQ ID NO: 37398 - DNA, 786 bp, Homo sapiens
caaggacgcgctctgcctgggccgcgaggttcccaaaactcagcgtccgtgctgggaggggggctctgctcagacactgggtcaaggacgagtgcagggaccgaggctgagagcacagggcagacgcacagagcctgcggctcaggctgctgcaggggcgagcaggccccagatggcactggacacacggggactgtgggcttaggaggggctagaactggattccaactgaggcagccccggcacatgggtgtggccaagactgcacaagggaatgtggctgccgaggaaagcaggaagagaggtgacccttgtgatcagagctcsgcactgcaagaacacgtggcagagaaagaaggaagccccgaaagaatgagcagaaaagcagacagatgggggagcatttgcaatttacattccagaccaggatcaacagcctcccgtgctctaaacgcctggtaaactagaagaggccacagtccacagcggccagagattgggaccagggaggccgggaagtgcggccggtggcagccctgagcatgggggagacgctgccttgctcaggagaggagagatggtatcgcaactgtgtgcaactcccacccagggaaagccccccggctgctgtggaaatgcacagtgatgcagccccacgaggggactgggctgcttctagcaaactctacgggtatttgcccctgacccagcagccccacttctaggaacctatcccacagagcctcggccaaacacacatgcagggctctttgctgccgcacggct

SEQ ID NO: 37399 - DNA, 646 bp, Homo sapiens
tatgaaactttcctcaaatggatgatgttgtcacatcttgtaatgagttcttcattcctggaaaagtccaagcagaatcaggatgacatcctcagaagtatatgtgacagagaaagaaatggatggaatacagactgataaataaaattcatcctgactcctaaggataatatattgagagtggttgcctggagaactgttaagaagcattgggaagcgaagctcaagatattcatggtaaaagtactgccaccaataaccaagttttattgggcaagaaaaatgtactgagtgataacacatttaaaagacctttagacacaattcaaactctatcattgtaataggtagcctgttttatatgccctaaaaacwttcagaatgctaattaaccataaaattcaactttcttgttgaatttttaaattcatttgaatattgtattgtaaagctttggttattacattgagagaaaagaatgagaattatacttaaaacacgtaatgatgtattgtcctttgaaacaaatacagataactttagttttaaattcataccatttttaagtatgtaagtgtattgtgaactgaaagtgttgttttagaagtgcttggttgtgatttacaaatgtgttttactttctctt

SEQ ID NO: 37400 - DNA, 522 bp, Homo sapiens
ataattgcacaatataaatgcttattgaatgatgttgtacaccttgaatatatacaatttttacttgacaattattcctcaataaacctggaaaaaatctataatgaatctgtagtaattaagagagtgtggtaataataacacaagaattttaaaaattcgccaagggagcggattacagagttcagcaatatacacgataggattcctcgaatggacttctgcttgaaactctccactgaytggacggtccaaaatattcagagacctgtattgtaacctagggcactgactaccatttctttcttctttctcttatttcaacagctatcagggctgaatcgtgttctgaaggttctttttgtcttctcttgccctcttcaccttcacaggtgtttcctcaagattcttttgatcatctaatgttagcctggcttcaggggacccaaactgacactataacctaagaaaaggtgtgtgtgttcacatgaaaagtaaccattgcagcacactacctgggac

SEQ ID NO: 37401 - DNA, 513 bp, Homo sapiens
tctatctatctatctatctatctatcatctatctatatctatctatctatcatctatctatcatctgtcatctacctatctccattgtctatcaaaatcaatgatcacatcgatttcttgaattctgtatttgtaattcccttttcaggaaaagagaagccactctcccattattctcaacatgtttattcatttaagcttttctccagtgtgtaacccagtgctggcacagcttggaaatgtgtacagatatctccttgctcaaactgrtgtacactaacaaccctcttctaaacttgtacccccaacctatcatatggactcacccaattcagctctagccccatgccagtttgcattcctatattaattcacttctcacctcaacactttacaactcatcactgccaaccatacaggcatgaaagtactcctatccccattggactctgtcactcctactgattaaataattattaaaccatgaggcctggcacagtggctcacacctat

SEQ ID NO: 37402 - DNA, 799 bp, Homo sapiens
taagtgggcaactatctgttgcaaaatgcagagtctaaactaatgtttgtcaaatatgagttataatttgttttctcataacttttataatgtaataatgtctatctttttatgtttagtaaaaattaatcatttatttaaaatatttctccataggattctgtcaaatagaaacagcatatttactcagctgtttttagtaagtagcttttttctctggcaaaaagttgaaaaaatgcaccgcaatatttttctttccacaacagagactgtttttgttttctacccagtcattcaggaatcaagaggataaaaccaatcattttagacacacttttgtttcttctcacttttcttatgccttgagtccccacaagttcattgtcttttctcaggttaattttaggtggcaaagggtaagcarcgaggggtcaagtgggtattggccagttgaaatggcagactttttaaaggtagtgcacatgagaataaatcaagatctatgactgtaatcatgacggcaagcatctccccagactgaaggcccttgaggagatgtcacatctatctcctccccacaaactctctgtccccactgtacccagtgtctaagcagtaaacatatttgctccattaaagaggttcaacaaatgatgtgtggtaggtaattgatgtgggtaagtaatgatggcatctgaccactgcatcagttgactgtatggacttatgtatgggtatcagtctgagcagaaaaagcattgctgagctttcatgccactgtccttgatggtctggcata

SEQ ID NO: 37403 - DNA, 799 bp, Homo sapiens
taagtgggcaactatctgttgcaaaatgcagagtctaaactaatgtttgtcaaatatgagttataatttgttttctcataacttttataatgtaataatgtctatctttttatgtttagtaaaaattaatcatttatttaaaatatttctccataggattctgtcaaatagaaacagcatatttactcagctgtttttagtaagtagcttttttctctggcaaaaagttgaaaaaatgcaccgcaatatttttctttccacaacagagactgtttttgttttctacccagtcattcaggaatcaagaggataaaaccaatcattttagacacacttttgtttcttctcacttttcttatgccttgagtccccacaagttcattgtcttttctcaggttaattttaggtggcaaagggtaagcagcgaggggtcaagtgggtattggccagttgaaatggcagactttttaaaggtagtgcacatgagaataaatcaagatctatgactgtaatcatgackgcaagcatctccccagactgaaggcccttgaggagatgtcacatctatctcctccccacaaactctctgtccccactgtacccagtgtctaagcagtaaacatatttgctccattaaagaggttcaacaaatgatgtgtggtaggtaattgatgtgggtaagtaatgatggcatctgaccactgcatcagttgactgtatggacttatgtatgggtatcagtctgagcagaaaaagcattgctgagctttcatgccactgtccttgatggtctggcata

SEQ ID NO: 37404 - DNA, 799 bp, Homo sapiens
taagtgggcaactatctgttgcaaaatgcagagtctaaactaatgtttgtcaaatatgagttataatttgttttctcataacttttataatgtaataatgtctatctttttatgtttagtaaaaattaatcatttatttaaaatatttctccataggattctgtcaaatagaaacagcatatttactcagctgtttttagtaagtagcttttttctctggcaaaaagttgaaaaaatgcaccgcaatatttttctttccacaacagagactgtttttgttttctacccagtcattcaggaatcaagaggataaaaccaatcattttagacacacttttgtttcttctcacttttcttatgccttgagtccccacaagttcattgtcttttctcaggttaattttaggtggcaaagggtaagcagcgaggggtcaagtgggtattggccagttgaaatggcagactttttaaaggtagtgcacatgagaataaatcaagatctatgactgtaatcatgacggcaagcatctccccagactgaaggcccttgaggagatgtcacatctatctcctccccacaaactctctgtccccactgtacccagtgtctaagcagtaaacatatttgctccattaaagaggttcaacaaatgatgtgtggtaggtaattgatgtgggtaagtaatgatggcatytgaccactgcatcagttgactgtatggacttatgtatgggtatcagtctgagcagaaaaagcattgctgagctttcatgccactgtccttgatggtctggcata

SEQ ID NO: 37405 - DNA, 1180 bp, Homo sapiens
tatttgcaaatattttatttagaatttttgcatttatattaatctgaaatgtttgatttagaatttgtatttataagtgaaattcatgtatagtattagtctgtctttatctgatttgtgtattatggcatagaattgaaaatgagctgagaaactctttatccttctcagtggcctagaatagcacagcagtgatctgttttcctcagtcattgactgaggcttggtctttgcttctgcagaatgagaaccacagatcttttctgctttcagaactgctaagaagatgaaatgcacatgaaaatatttttcaaattctgacatgctatacaaattgttgttaaaataattattacttgcattctacattcaaagtttgaactgtttttatgtttaaggctgtattgcatccaaatattctatttttcctttattctttcattttctatgtactttgcaaattctggaaattgacttggaaattcagtataattaagagctcagctttgcgaggccaaggcaggcagatcacctgaggtcaggagttcgagaccagcctggccaacatggcgaaactctgtctctactaaaaatacaaaaattagccacgtgtggtggcaggtgcctgtaatcccagctactcgggaggctgaagcatgagaatcgcttgaactcgggaggcagaggttgcagtgagccgagactgcaacactgcacttcagcctgggtgacagagtgagactttgtctcaaaaaacaacaacaacaacaaacaaacaasaagaaaaaaacacacaaacaaacaaaaccaaaaaaacctcaaacttcaatttttgtttctgacatgtattagttttgtgacctttgttccaatcgctaaatatttttaagcctcagtttctttgtctatgaaatggggacaatagaacctacctgatgggcttgttgtgagggtgaagatattttgatccccctcttaagcatacttgtaaactaagttagctattattactgttatgggattcttggggtgttgttttgccagctggaaatctctgtggccagtgacacttttgcctgagttttgctcaggcctgctgggttcatttggcccactcaacctggcaggctgtgctcggctagccctattggactggatcccatgcctgccaagggtgagc

SEQ ID NO: 37406 - DNA, 1180 bp, Homo sapiens
tatttgcaaatattttatttagaatttttgcatttatattaatctgaaatgtttgatttagaatttgtatttataagtgaaattcatgtatagtattagtctgtctttatctgatttgtgtattatggcatagaattgaaaatgagctgagaaactctttatccttctcagtggcctagaatagcacagcagtgatctgttttcctcagtcattgactgaggcttggtctttgcttctgcagaatgagaaccacagatcttttctgctttcagaactgctaagaagatgaaatgcacatgaaaatatttttcaaattctgacatgctatacaaattgttgttaaaataattattacttgcattctacattcaaagtttgaactgtttttatgtttaaggctgtattgcatccaaatattctatttttcctttattctttcattttctatgtactttgcaaattctggaaattgacttggaaattcagtataattaagagctcagctttgcgaggccaaggcaggcagatcacctgaggtcaggagttcgagaccagcctggccaacatggcgaaactctgtctctactaaaaatacaaaaattagccacgtgtggtggcaggtgcctgtaatcccagctactcgggaggctgaagcatgagaatcgcttgaactcgggaggcagaggttgcagtgagccgagactgcaacactgcacttcagcctgggtgacagagtgagactttgtctcaaaaaacaacaacaacaacaaacaaacaacaagaaaaaaacacacaaacaaacaaaaccaaaaaaacytcaaacttcaatttttgtttctgacatgtattagttttgtgacctttgttccaatcgctaaatatttttaagcctcagtttctttgtctatgaaatggggacaatagaacctacctgatgggcttgttgtgagggtgaagatattttgatccccctcttaagcatacttgtaaactaagttagctattattactgttatgggattcttggggtgttgttttgccagctggaaatctctgtggccagtgacacttttgcctgagttttgctcaggcctgctgggttcatttggcccactcaacctggcaggctgtgctcggctagccctattggactggatcccatgcctgccaagggtgagc

SEQ ID NO: 37407 - DNA, 1107 bp, Homo sapiens
cgatttactagcaacatgcactcatggctaacttttaaaaagtgaagtcccgaagtgtggtctaatagcagagctccttctcctcttgttaaaaaataaattacaktaagagttctcctattttgatcacagagtgatttttaaaatacatatttattaggattgtagcatatttgctagaaatggctcagcaaagcatttcctttcccttcccatgctgggccggtattttccacctgccctcacttcaattctgtgtctcttgaagccggctttgccctaaggaaaggggtctcgctgcctttgtttacacatggatatggccgacccgcttcctgcgacagcagctgtgggaggctaattctccaaccttggaatgtcgggaggcgtgtggagggctgttcctctttccccccaagacaaaagctctttacaagcatgcttcctgttaaagagtgggaataggatctcaagattgcaaaggtttctagaacctggtcagagctgactctgctcagtgcgtgttgttacagcgagggcatgtacttccctccacttaggcccgagagctgtgtgtacctctgacttcatggtgtttgcttgcctgtgacccagaagatagcatcatgtcatggacctgaaaccccagaaagtacagcatggtgcaaagatgactgtgcaggtgtctgcaggtgaccctgattctcactggggctccctgggccgatgccaaggctgtgggccacttagaatggctctgtcctctggcctcaaagctcttggatgcacttcctgggacactacatggaatgggttgggagaaccagatcccctctggatgggggggaaggcagttgagggacaacagcagctttctgggtcaagagtctgcccaccagccttggagagagcagccccagcctccagaccgtaagggctgcccctgtgggttagggagatccagggtgtgagtctctcttgggaaaggcttccttcccagagaggttttcctagtttacctattctgtgcttggatgtctgatatggtttggctttgtgtccccacccaaatctcatcttgaattacaatctccaggtattgaggga

SEQ ID NO: 37408 - DNA, 545 bp, Homo sapiens
ccctctccttccctagcttctgcgatagcactctctgcttctcttcttcctctcttgtgatacttgttcggggtcctgtgctcctcccacctaccctttaaatgctggcgtgggctccaatcctcttctgttcatctatgtctcacctatgcctgagtcatgttctcctaactcactcatctctgtctccagcccagatgtctctcctgcaatctagacacttttagcctgttcctattggacaccctctcccatcatctttctcacaactgagtgtgtccaatactggtttcatcatcttgtccctaactytcttccccttctctttctctgaccccacctggtaccattaccaacccagttgttacccaagccagaaacctaggaatcatcctctacttctctcctttcttaaacccctgtattcttaggcaccaagtcttgtttattctacatcaacatattttattttatttatttttttgagacagagtcgagacgggtttcaccatgttggccaggttggtctcaaactcctgacctca

SEQ ID NO: 37409 - DNA, 545 bp, Homo sapiens
ccctctccttccctagcttctgcgatagcactctctgcttctcttcttcctctcttgtgatacttgttcggggtcctgtgctcctcccacctaccctttaaatgctggcgtgggctccaatcctcttctgttcatctatgtctcacctatgcctgagtcatgttctcctaactcactcatctctgtctccagcccagatgtctctcctgcaatctagacacttttagcctgttcctattggacaccctctcccatcatctttctcacaactgagtgtgtccaatactggtttcatcatcttgtccctaactttcttccccttcyctttctctgaccccacctggtaccattaccaacccagttgttacccaagccagaaacctaggaatcatcctctacttctctcctttcttaaacccctgtattcttaggcaccaagtcttgtttattctacatcaacatattttattttatttatttttttgagacagagtcgagacgggtttcaccatgttggccaggttggtctcaaactcctgacctca

SEQ ID NO: 37410 - DNA, 1323 bp, Homo sapiens
ttataaaggattcaactttctgttttatttagagcttttgtttttccatgtatattaattacttcccaaactggccattttcgtctaccttcctcacttccatatgcacttttgaatgtgccatgggattttttttttagcattatgctgcctgtggttcacaggaaaaagatacatttgactttaaatagaatgaaaatgatattttttcacacttctgtttagtttgggagaatgcaaacacatcgatatcatgaatgctacataaaattgattaactcaacaaacatttattgtgtacctacaaggtgccaggaactgtgaagaataataataataatggtaagaaaagcaagtttttaccatgagtgcactataccaagttttgtggtacattctttatgttgactctatgatttaattctcaccataatcctatgagctggatattatttttaagcctcactttacagatggggaaacggaggcagaaaaggttaaatctattgtcctgagtcttgcagctaaaaactggcagagctgggatttgggctcaggcaaccccaactagaccgtccatgtttatacacctgaccatcactgtcttactctggaggtagcacaggaaacaaaacaaatggaactaaaaaaataaacaaataaataaaactacacacaggttatttcttttttgttttctagagagtagcccagtattatggagagaattttaagacatattatcacttgattcrtatttttaaaaataatataacaaaggccaggcatggcggctcagggctaaaaaatttgccagcactttgggaggccaaggtgggaggcttgcttgaacccaggacttcaaggctaacctgggcaacacagggaaaccccatctcaaaaaaaaaaaaaaaaatagccgaccatggtggcacatgcctgcagtcccagctccttgggaggctgaggtgggaggaccacctgagtccaggagattaaggctgcagtgagccatgatcatgccactgcacttcagcctgggcaacagagtgagaccctgacaagaaaataaaagggaaagaaaagagaagacaacagaagagaagagaagagaaagtgagaaagaaggaaagaaaaagactacaaagaaaaaagcaaattatgagctttgaaatttttttctctatgtcatatacttcatattacactcaaatctgtatttattaaatcatatttcagaatatctggaatctcattaaccattcccataaattctggcatactctttcttaattgtgagaagggaggaaatctagcttatgc

SEQ ID NO: 37411 - DNA, 588 bp, Homo sapiens
tgtccagtaacatgctatacagcttcatagcctaggagtaataggctacaccatatggcctagctgtacagtaggctataccagctaggtttgtggaggtagactctatgatgttcacacacaatggaatgacctaatgatgtgtctcttagaacatacccccattgttgagtgacataagatgtacttacytaagaagctggttgaaaatgctagaccccaaccacggagatgctgaccgtgagactggaggtgagaggtcaggaatgtgaaccattaatcagcgtctgggtcactctgagttaggttcttcttggtccacactttatgaactctgcactaaagagttttagaagtttaacccctttccaattagcttttaaactgtatacatagtatttcctgatacttgatatctactgaggttctccgtacttctcactaaaggttctgctacttgtaatgtgaataaggagaaacccagggttttagttagttttagttctgcaggcatagcagaaagcctgtcactgatgctgaggtaagttgtaaatactctctcctggaaggaaagtgagatccaccctt

SEQ ID NO: 37412 - DNA, 588 bp, Homo sapiens
tgtccagtaacatgctatacagcttcatagcctaggagtaataggctacaccatatggcctagctgtacagtaggctataccagctaggtttgtggaggtagactctatgatgttcacacacaatggaatgacctaatgatgtgtctcttagaacatacccccattgttgagtgacataagatgtacttacttaagaagctggttgaaaatgctagaccccaaccacggagatgctgaccgtgagactggaggtgagaggtcaggaatgtgaaccattaatcagcgtctgggtcactctgagttaggttcttcttggtccacactttatgaactctgcactaaagagttttagaagtttaacccctytccaattagcttttaaactgtatacatagtatttcctgatacttgatatctactgaggttctccgtacttctcactaaaggttctgctacttgtaatgtgaataaggagaaacccagggttttagttagttttagttctgcaggcatagcagaaagcctgtcactgatgctgaggtaagttgtaaatactctctcctggaaggaaagtgagatccaccctt

SEQ ID NO: 37413 - DNA, 588 bp, Homo sapiens
tgtccagtaacatgctatacagcttcatagcctaggagtaataggctacaccatatggcctagctgtacagtaggctataccagctaggtttgtggaggtagactctatgatgttcacacacaatggaatgacctaatgatgtgtctcttagaacatacccccattgttgagtgacataagatgtacttacttaagaagctggttgaaaatgctagaccccaaccacggagatgctgaccgtgagactggaggtgagaggtcaggaatgtgaaccattaatcagcgtctgggtcactctgagttaggttcttcttggtccacactttatgaactctgcactaaagagttttagaagtttaacccctttccaattagcttttaaactgtatacatagtatttcctgatacttgatatctactgaggttctccgtacttctcactaaaggttctgctacttgtaatgtgaataaggagaaacccagggttttagttagttttagttctgcaggcatagcagaaagcctgtcactgatgctgaggtamgttgtaaatactctctcctggaaggaaagtgagatccaccctt

SEQ ID NO: 37414 - DNA, 588 bp, Homo sapiens
tgtccagtaacatgctatacagcttcatagcctaggagtaataggctacaccatatggcctagctgtacagtaggctataccagctaggtttgtggaggtagactctatgatgttcacacacaatggaatgacctaatgatgtgtctcttagaacatacccccattgttgagtgacataagatgtacttacttaagaagctggttgaaaatgctagaccccaaccacggagatgctgaccgtgagactggaggtgagaggtcaggaatgtgaaccattaatcagcgtctgggtcactctgagttaggttcttcttggtccacactttatgaactctgcactaaagagttttagaagtttaacccctttccaattagcttttaaactgtatacatagtatttcctgatacttgatatctactgaggttctccgtacttctcactaaaggttctgctacttgtaatgtgaataaggagaaacccagggttttagttagttttagttctgcaggcatagcagaaagcctgtcactgatgctgaggtaagttgtaaatactctstcctggaaggaaagtgagatccaccctt

SEQ ID NO: 37415 - DNA, 538 bp, Homo sapiens
agaatggcgtgaacccgggaggtggagcttgcggtgagctgagatggtgccactgcactctagcctgggcgacagagtgaaactccatctcacacacacaccccaaaaaaaaaaaaaaaaaaaaaaagagaaaaagaaaaagaaaagaaactaaggtctaatacaaatcacatgaggctgttacttagattgcatttactcggcagcccaactattcaaaatctgaaataagatttattgacacaaacccagtttttgtatgagagccaacatatcttggcaattaggttcaaaggaagcaaatacactttgaaatttttttgcaaaagtgatatctcatttattaatgcattgatttaagccaaaatgtaaataattctaagtgtatgtggcttgaggtaaagaaaatttttctattttaaaatttccattaattcagtaatgtgttccttttattgttcttgtttggtgcttaccctttgtccatgagtctgttcttagggtgtgtgtgtgtgtgtgtktgtgtgtgtgtgtgtgt

SEQ ID NO: 37416 - DNA, 538 bp, Homo sapiens
agaatggcgtgaacccgggaggtggagcttgcggtgagctgagatggtgccactgcactctagcctgggcgacagagtgaaactccatctcacacacacaccccaaaaaaaaaaaaaaaaaaaaaaagagaaaaagaaaaagaaaagaaactaaggtctaatacaaatcacatgaggctgttacttagattgcatttactcggcagcccaactattcaaaatctgaaataagatttattgacacaaacccagtttttgtatgagagccaacatatcttggcaattaggttcaaaggaagcaaatacactttgaaatttttttgcaaaagtgatatctcatttattaatgcattgatttaagccaaaatgtaaataattctaagtgtatgtggcttgaggtaaagaaaatttttctattttaaaatttccattaattcagtaatgtgttccttttattgttcttgtttggtgcttaccctttgtccatgagtctgttcttagggtgtgtgtgtgtgtgtgtttgtktgtgtgtgtgtgt

SEQ ID NO: 37417 - DNA, 473 bp, Homo sapiens
aagtagtagcagtaggagaaggaggaggaggaaagccggagggtaaggcacttgactgaagactaaacaggtttgtgtagaaccaaaaaagatgaggtaaggaggaaaactgggcccaggctacaaatgccccctaaggagtctggattttcttctgaggggatactacccaaggagaatgcaratccccagattcatgtgaattcctcaagtggaaagtccccagtatgtgaaggtgtgctacgtggggtgggggttctcacacataggaaatgatgggaaaggcatgggcataggacacctgaaattcaactgtgtaaaaataatgtccttctttttaaagattcttaatgaatctgctactctttgatggatatataggcactgtacattgagaaaggacaataaaatttaactgagcaaacagttcaaatactgctatgggtaagagctaatttgaatattcatttgag

SEQ ID NO: 37418 - DNA, 535 bp, Homo sapiens
aacccacacatttgcgaatgaagagatctgaaacccaaagagaagcgagccatgagatctccctataaagtatttgcaaaakcctagacttgaacattgctctggacagatttgagtcattttctgatgctcacaaacaggaagcagggagtgtcctcttctttttcctattttttaattttgcatttcttttctctacaatctcttctctctagaccacccccatactctttgtgtattatattcaatgttcagggcttccactggcccatggctgccccagatctattttaatgtcaaatagatagaacctttaaggggaaaaattgggtctctgtgtggttagtgtcttgttggatgatacgggattttaatttatcacaataaaaaaaatcaattcgtagcccaaatcaacatatttttagaaattggcactgtcaggaacctgcctccatgagataatttacaggaccaagtctataattcatgacaggggaaaagggatgttacaatgccctggaaagtgagaccatga

SEQ ID NO: 37419 - DNA, 1246 bp, Homo sapiens
gcccaatggaggaataaatgaataaatagaaattgtaagggaactcaaatagaataagggtttctagcaactggagctctgggattacaaaagtaatgaaggtctgtcattgtaggtatgtgagctcaagcccaatattcagcaatgttcatccacacctatcaaaaatactcttgagagattcttgcattggaggagaggygaaaccaaataacctctttttaatgttgctgttaactccaagactctagaaattcaggattctatctcaggacaatgtttgttaagtatggctaaaagaaagctcatctaagaaacatcaaaagggacaaccttatatttcatttgtgggaatatgcagattcaaattcccttccctcacttcagtacaacctcctcttgtgtgacatctatgttaactgcattgtaataattatgatttttctacaatgtggtgcttaatgaggaagtgaaattgacaaacgttcagacaagatttaatccaattatccaacatcttgatccagatttcaaactaaaggaaaaaccaactgttcaattgtgaatgaaaatttatttgccataaaagatgggagttgtgggggggaagtagggaacagttgtccagagaattcttgcaattcttcacattaatggattgaagcttctgacatgtgcagcagggaaaatgaattaaatctaaggcaaggaaagtcaaccaaatactgattgcttggggacagggtgtttgcaggatgggatgcagggtggcaatatgagaatctttctaagcttgagaggtgagtggctttcattagatttgttatctggggttcccaaacatctcttcaacatccagtatgaagaaagcagtgtgccagacagagtgaagcttcatggatgacttagacatgtgcatgcctgcttggaactcagtctaaagaaggagagagatgttcacagctagctggggagtgctgggcctcataaggtgctcattataaaaactctagaaacagcaagtaatggaagaagaacatgaggctgagtattaattccaactaagctaagggtgaggagatggagggctgtgcatttcctttcatcataaaggcagtaggttttagtagaaattgtttgggcccctgactcagaacaagctggggttcaaattctggctctgccaagtactagagctttgtgatttgggtgaggtttatgacatctttaaacaccagtttcttta

SEQ ID NO: 37420 - DNA, 496 bp, Homo sapiens
tacacacacaaaaaaattagccgggcatggtggcgggcacctgtggtcccagctacttgggaggctgaggcaggagaatggtgtgaacccgggaggcggagcttgctgtgagctgagattgcgtcactgcactccagcctgggcaacagtgcgagactccttctcaaaaaaaaaaaaaaargaaaaaaaaaaaagaatttgatgggaagtaaaaaaaaaaaaagacgaataaaaagaaatactgactagtacccaagccccagcagacattaaacactatgtatttggagtaagcccaattgcagagttacattaatttctctaataatattcaacagcttaaaactatactgaacgaaaggttaggttaacccaagattagggagtggaatgaagtgaaattcagttagaatggaagaaagatggaaatatatattctctaccctccactgaactaccaaactaaaattataaattcaaatatttcccaccttat

SEQ ID NO: 37421 - DNA, 496 bp, Homo sapiens
tacacacacaaaaaaattagccgggcatggtggcgggcacctgtggtcccagctacttgggaggctgaggcaggagaatggtgtgaacccgggaggcggagcttgctgtgagctgagattgcgtcactgcactccagcctgggcaacagtgcgagactccttctcaaaaaaaaaaaaaaaaraaaaaaaaaaaagaatttgatgggaagtaaaaaaaaaaaaagacgaataaaaagaaatactgactagtacccaagccccagcagacattaaacactatgtatttggagtaagcccaattgcagagttacattaatttctctaataatattcaacagcttaaaactatactgaacgaaaggttaggttaacccaagattagggagtggaatgaagtgaaattcagttagaatggaagaaagatggaaatatatattctctaccctccactgaactaccaaactaaaattataaattcaaatatttcccaccttat

SEQ ID NO: 37422 - DNA, 1311 bp, Homo sapiens
atagtattttcactgtcctaaaaatcctctttgctctgcctatttatccctcccgttcgctccttactaccactgatattttcactgtctccacagtttttccttttccagaatgtcatatagttggaatcatatgctatctagccttttcaaattgaaagccctttaactttttgtttcttttcttatttaattattttattttattttttaatttaatttaattttaagttctggccattttttaaaggaaggctgtgtgtgctacctcagagtaagcactccagtaaatacatattgatattgctggtgactagtggtggtggaggtgatgacaaagaactcaccacgtgaggctgaaccagttatttgtttatgttgtttgtgaagccctggtttaaggcagtgtcaaattcttgcataagttgaactgcctttagttcagaaaatgcttaaaggacccctgacttataagggaacaccaggaatatcaaattatattcctttattatgaaagcattaatgtactctgggatgtttaacatttgagaattcaaagtagctttagtacaatatactcatttttaaaatagccccaaagtattctttctatccatacaatttttattactattagggaataatatactggtaatgtctggctaattaaatattaaaaaattaaattcatacactctaattactggattctagtaaattctctttaacttgattaaaactttctaatatgtgaaaaattggattagactccctattttttttcaaattgtgggaagtacatataaaaagcaacatggaatctgtaagttcatcagcaccttgcctttttttacagagtctatgttcgcaacatctgctttgtactctaaagaaacataacatagctgtatgtctactgatgtactatatgggattgtttttcttttcaaaatctgctgttccttgttttttgttagtttgtttgtttttgagacagagtctcactctgtcacccaggctggagtgcaatggtgtgatctcggctcactgcaacctccgcctcgtggattcaagcagttttcctgcctcagcctcccaagtagctgggattacaggagcctgccaccacgcctggytaatgtttatttttgtatttttagtagccatgggatttcaccatgttggccaggctagtctcaaactcctgacctcaggtgatccacccacctcggcctcccaaagtgctaggattacaggcgtgagccactgatgctcaaatattctatgcaatcttttacacattactgtata

SEQ ID NO: 37423 - DNA, 1311 bp, Homo sapiens
atagtattttcactgtcctaaaaatcctctttgctctgcctatttatccctcccgttcgctccttactaccactgatattttcactgtctccacagtttttccttttccagaatgtcatatagttggaatcatatgctatctagccttttcaaattgaaagccctttaactttttgtttcttttcttatttaattattttattttattttttaatttaatttaattttaagttctggccattttttaaaggaaggctgtgtgtgctacctcagagtaagcactccagtaaatacatattgatattgctggtgactagtggtggtggaggtgatgacaaagaactcaccacgtgaggctgaaccagttatttgtttatgttgtttgtgaagccctggtttaaggcagtgtcaaattcttgcataagttgaactgcctttagttcagaaaatgcttaaaggacccctgacttataagggaacaccaggaatatcaaattatattcctttattatgaaagcattaatgtactctgggatgtttaacatttgagaattcaaagtagctttagtacaatatactcatttttaaaatagccccaaagtattctttctatccatacaatttttattactattagggaataatatactggtaatgtctggctaattaaatattaaaaaattaaattcatacactctaattactggattctagtaaattctctttaacttgattaaaactttctaatatgtgaaaaattggattagactccctattttttttcaaattgtgggaagtacatataaaaagcaacatggaatctgtaagttcatcagcaccttgcctttttttacagagtctatgttcgcaacatctgctttgtactctaaagaaacataacatagctgtatgtctactgatgtactatatgggattgtttttcttttcaaaatctgctgttccttgttttttgttagtttgtttgtttttgagacagagtctcactctgtcacccaggctggagtgcaatggtgtgatctcggctcactgcaacctccgcctcgtggattcaagcagttttcctgcctcagcctcccaagtagctgggattacaggagcctgccaccacgcctggttaatgtttatttttgtatttttagtagccatgggatttcaccatgttggccaggctagtctcaaactcctgacctcaggtgatccacccacctcrgcctcccaaagtgctaggattacaggcgtgagccactgatgctcaaatattctatgcaatcttttacacattactgtata

SEQ ID NO: 37424 - DNA, 925 bp, Homo sapiens
tgctcagctgagacgggggacgctattgcactgtaaaaataagcttcaagccataattttgatgggcccctcacagcaaggaagcatccctcttctcctcctccctcttcatggtagcaactgccatttgccacttgcacatcctaacctaaaggaatctcttgcagacaagtccctcataccagtgcctccaatgtggaaagggcactaaactcaaactccaaaggcctctgtatttaccccctctctgcctatttctttatgaacttgtgactgtaagcaactcacttaatttccgatagccaaattccacatttgggagggatggagataaaaattctgcctttctatctcacacactggctgtaagcttgggttgagagagtgccgcaaactgtcaggtgctactcactatgatttacattttctcctataatgtggactcctgtcctttaaacatgataggaagagcttaataaatagttgaattgaataataaatgtgtgtgcttatttattcatccaacatgtattaggcaccttctgtgtagcagtcccagtggcaaacactacagcagtaaagaatgaaattgtgctgtagtttgagagagaaacaagtgaacaaataattataatatgacaaagtatgtactctataatggaggcagtgacaggggttttgagaacatgacattctgcccaggcgagcaatggctgcttcacagagggggccacycgtgagagaaagtggggaccatctcaaatactcatgagagccaatgctggccactcttctgaggatgtacgcacattctgtcctttcgtggtcacacagccctgtggagtggtttatatttacttcataagtaagaaagccaaggcctaaataacttccataaggtcacaaagctggtgaggtgaaacct

SEQ ID NO: 37425 - DNA, 1545 bp, Homo sapiens
ggacagcactttgcctctgggtaaaggctaacttgaaggtttctatcatatccactgggacaagtgacatgtggagggtggttaggaagtgtgggatgagaaggcggggttcgggatggaggacaattgatttttcctattgatgccagcatctaaaaattttgctgcctcactttaaatttttatacccttttcttctccccgcactgccccctaacatgtgcaaaaactgctaagatgacagtttttcccatttccccagtaagtgtgcctgcagaagtagaagtaccataacccggggtacagcaagctcagccatttgaaataaaactttgcagtactaatgtttttgtaactgcttccatattgtaatgatatttttccaagcactggttttatttgatcttaaatacctttttgggaaagtccagtgagctgacgctaataaaatcatgctattgaaaaaaggtttaagtagaatgttcagaataaattacaaaactgcatgcaagaataccagctagtgctgcaataaaaagctgaaaatgagtattcttgcaatatattttaaagaagtagtatactttttttgttcattttttttcattgaatgtttcataacagaatgcctccatgtcgtgaaaggaggggaatgcataccaaatgaacaaactgcgggaaaaattgcgtctaaggggaaaaaaaaacccttgactttttgggggagtatagaatatatttcatttcattttcaataactgttggaagataataggaaatgtaatttctttccatttgctgtgccaaaatacttaaattacatcatacttatcctgtcataattttccccaacatattcaggaccctttaatggatttcacattcctatatatgcactaaggaaccgtatctgctttaaaagacagaaactactggaaggcctgagtgagagacacagcaaccgtatatctgactttctcatagtgaagcagaagtcaggagctcctcataagggatggaggtgaaggtatcctcctaattactcctgaaattctaggtccaaaagaaaccatgagccctctccagagcccttccactcaataggacagtcacaaaaattggaccctgagagtcaaggactgcagatggtgaattttgcctgccatgtgagagtctactgtgttttgggcattgagtcaagcattgagcttcaggttctataatgaccaatatttatttacattgaattaacttataaatccaagttcacatctctcatcatcaagtaagacaaaagcaatcattcccatcctatgaggagaaactgggacaaggaaaagatagctgwcggctgggtacagtggcttatgcctgtaatcccagcaccttgggaggccaaggcgggtagatcacttgaggccaggagttgaagaccagcctggctaacatggcaaaaccccatctctactaaaaatacaaaaaattagccaggcgtggtgccacatgccataatcccagctactcaggaggctgaggcatgagaat

SEQ ID NO: 37426 - DNA, 587 bp, Homo sapiens
tgctagactgaattacaactactccacagggatctcctaaaatctgtttccttttttttctgtcagaaaattttcatgaagcaggtcaccaaagtagtgtccttaacaagttaacacaacttccaaaggtgccagttttatggtcaaggattctcctattccatgcaagccatggttgtctttaattcatgctcataacttataatttaccagggatcagttacctatgtaatagttatacctgactttttgtcttttggatggttcattccttgttagcagtgagcagagaaagttgaaaggtatgaagctcaaaccaaatgatttttacttgataatcaatgtaacaaggctatgggaagaagatggagcacttactattctaggcactttatatgcattatctcattttcwtaccaggaacaaatctgtgctttatagagaagaaacttgagacttagattaagaaaattgcccaaagatatctaggttataaatgatacattcaggattcaaccctagatctgattccataagtggttgaaactactaaattttggatttgtttgtggaattaattaattaaa

SEQ ID NO: 37427 - DNA, 657 bp, Homo sapiens
tgcatgaggagtctttagaagacgtgagatcaggttccagccaagccacctgacagcgacagtggtggccaagtccccaaatcggagctggctcctgatgcactcgctgcatacagaaactggcctcggggacggtggggggaactaaggatgccatgcttctgacaatgcctggcacagtggctggcacacagcagatcctggagatgtatcaagtctgtttcattaaccagactacagaaaatctgtataaagacacaaatctcagtagcttctctagtcacaattaactgtttggaaactcccatttaaggtccaaagaaacgctgayactctattttgggattctgtgcaataaacctatccctgctctaaagagccttacagggctgggtatggtggcttatgcctataatcccagcactttgggaggcctccttgcttgaggccaggagtctgagagcagcctagtcaacatagcaagaccccatttctacaataaaaaataaaaaatattagccagcatgggggcgtgtgcctgtagttccagctactcaggaggctgaggcaggaagattgcttgagcctgggaagttgaggctgcagtgagctatgatcacaccactcactccagcctgggacacagagcgagaccct

SEQ ID NO: 37428 - DNA, 847 bp, Homo sapiens
tgtaatataattaaaaggtcctcagatcacaaatgcaamggttaaatgtgtcgctgttaacatgagataatctccattcctgtagcatgtttctctttctttccttccttcttttcttttcttgtccctccctccctccctcccctcctcccttccttccttcctcccttccttccttcctttttttttttttgagacagagtctcactctgtcactcaggctggagtgcagaggcacgatctcggctcactgcaacctccgccttccgggttcaagcaattctcctggctcagccttccaagtatctgggattacaggcaccaccaccatgcccagctagtttttgtatttttagtagatacggggtttcaccatgttggccaggctggtttcgaactcctgccctcaggtgaattgcccgcctcagcctcccaaagtgctgggagtacaggcattagccactgcgctcaggctttcctgtagtatctttcttatggaaagcttttctctgctttttaaaattgtttcttttcattttctatatgcagtaggtattagcagtcatgaatttaaccttatggtttcagtcatgaagattcatggatttgcatttgttgctgatgtacaagagagccggtcacacagcgaagagagtgagccccactggccactgactcctcactttaacacagcttggtgcttctgttcttcatccccgtgaaataatgagcacttctcaatggaagcacttcttactgagttcatgaaggttgcgagatccattccttgaaactgttgagagactcttgttttcagaggctatttcagagaaacagaggctactct

SEQ ID NO: 37429 - DNA, 785 bp, Homo sapiens
tttctgcttaaaatgcctggaaggaatgctgtctctaaaatccaaaacaaacacaaaatttggaagggtttctggttgccataactgtagtttgactcacacatggtgggaggcggggagcactgtaggacctcagcaggtacctaaaccagacttagggggtcagagaaggtttacgaagctcatgacatgtaaactgaatcctgaagggcatatatggagtagtcagacaaagagttgagtgggaagaacacaccaggcagaaggaatagcccgtgcacggctgggcacagtggctcacacctgtaatcccagcactttgggaggccgaggcgggcagatcacctgaggtcacgagtttgagatcagcctggccaacatggtgaaaccccatctctactaaaaataaaaaaattagctgggctgtggtggtgcatgcctgtactcccagctattcgagaggttgaggcaggagaatctcttgaacccgggaggtggaggttgcagttagccaagatcgtgccattgcactccagcctgggcaacagagtgagacccaatctcaaaaaaaaaaaaaaaaaaaaaaggaacagcctatgcaaaggttcagagatcagaaaagacatcgtggagaagtgggtagttcgggctggctggaacatacaaattgtaagggagaggtcagaggctttaaggytggccaaggtgctacacttcctttgaaaataatggggagcttctgatagtaaacagcagaaaatagtaggtgtctttcaggctcctgc

SEQ ID NO: 37430 - DNA, 585 bp, Homo sapiens
tatcacaaaagtttttaattttgctgaatcaacktacctgggttttgttttgttttgttttttttggtggtgttgactgtgctccaagtccattttttagtgaaaatttatcatatttctatattatcaaaactatcttcaaaagaaaattcaaagctttaaaaataaatatgtttttacagggcacagtaactcatgcctgtaatcccagtgctttgagaggccaaggtcaggggattgctggaagccaagagttcaagaccggcctgggcaatagaataagaccctgtctctacaaaacaatttttttaaattagctgagggcatgattgtacactcctgtagctctggctactgggaaggtttaggtggaatgagcccttgaggccagaagtaggagttccatattacaaggagctatgatcaagccactgcactccaatctgagtgacagaatgagaccttgtctcaaaaaaaaatttttttaataaaaataaatgtgttttgtcacttcttatgccttacttcttgtataatatgataaaagtagtaagttttccctatggacaaaatactatgtttaaa

SEQ ID NO: 37431 - DNA, 585 bp, Homo sapiens
tatcacaaaagtttttaattttgctgaatcaacgtacctgggttttgttttgttttgttttttttggtggygttgactgtgctccaagtccattttttagtgaaaatttatcatatttctatattatcaaaactatcttcaaaagaaaattcaaagctttaaaaataaatatgtttttacagggcacagtaactcatgcctgtaatcccagtgctttgagaggccaaggtcaggggattgctggaagccaagagttcaagaccggcctgggcaatagaataagaccctgtctctacaaaacaatttttttaaattagctgagggcatgattgtacactcctgtagctctggctactgggaaggtttaggtggaatgagcccttgaggccagaagtaggagttccatattacaaggagctatgatcaagccactgcactccaatctgagtgacagaatgagaccttgtctcaaaaaaaaatttttttaataaaaataaatgtgttttgtcacttcttatgccttacttcttgtataatatgataaaagtagtaagttttccctatggacaaaatactatgtttaaa

SEQ ID NO: 37432 - DNA, 1248 bp, Homo sapiens
ctttctatagaatataacttcataaatgtcctgcctttcattttaaaaatcatattttgtacattggtactgtaactccttgtcatacagctggtatttgtaaagcatgttgagtttctagcctctttaacacaacatgctaaggaaatctctgtcttattagctaggcaaatggcraagtggggatgagggcagatattatcaataccatcttacagaaaagaaaagtgaaggtcactggttaatgaaggtctccaaggtggaaagtggtagaaccagaaattgaacccatatcatcaggtcaaaaaaaatttttttttaccatgctatttatatttctcttgattgagactggggctttaaaaagaaattattaatgggtacaaacatagagttagatagaaggaataagttgtaatgttccatggcagacgagggtgattatagttaacaacaatgtattgtgtatttcaaaatagctagcagagaggccttgaaatgttcccaacacatagaaatgataaatgcttgaggttatggatatcctaaatatcttgatttgataattacacattttatccataaaacaaaatatcacaggtaccccataaatatgtacaattattatgtatcaataagtatgttaaaaagagattattttctcttattatccttaaatatagttaatgtttttctgagggattataatggctaagtttattgtttctttttttttttttttttttttttagtgaaagctgggtccagggggatcactgccttctggtcctgtgatgccgccaacgtactggatataccagcatttattgttaagtttagtgagggtgggggtagtttagtgagggatttagagtcatttgattatgaagtgagatggtcacatggggatgaagtaattctttaacataatatctgtatgcagaagtacagtatacagagataagaatttacaatattgtgtgcatcagcaatttctaacagagccttaaaacagaaaacagtctttccataacctatgattagcaaggtattaatcagcagtaacagttgcagcaaaagctggttacaaacaatccatagaaacaggacgtgaagctagacaaccggttacaacacaaattctcagaagggagtatgccttaaccctaaagaggcctagaagagccctggcaagataagggcatttatagccctatcttatccatatgaacaggcgccccctcatgc

SEQ ID NO: 37433 - DNA, 1111 bp, Homo sapiens
atcccaggctgtcataattctttcttttgttgttccctaatgtggcattgaggatgacaacaggaaggagggacaggcagatggaaatagaggcacagtcaggattcatttgactgagaagttttagagagaacagaggccttaaaacaatatataggtatacatatatagctcaggtcgtaggtttaattaagtcaactttttactatcaagctctttaaagagaaaccgtttccaattgtaattcctactgaagccattttactttgcttctgctagctgggcttctgttgccaaataggcagcccacagaagtggccatctgctgcagtggcagctcaccaccattccttaccacagggtgatagatggctcacagctaacaatttctctaaacatactggtgtttacaaggcatccctatactcatgcagaagcatctaaaaggtagagccacactactccagatagaaatggctgccacctgggatgtcccccatggacttcttccatggttgattcattccctttgcccatattttcgtctcttagctcctggcctggcttgccacaagtttcacagtgggcagttctatgcaaacctatctgatatgctttggctttatgtccccacccaaatcacatctcaaattgtaatccccataatctccacttgtcgagggagggacctagtgggaggtgattggatcatgggggtggtttcccacatgtttttctaatgatagtgagttctcacgagatctgatggttttataagcatttaacaattcctgctccacacgctctcttttgcttgctgccatgtaagacaggtaggcttccccttccaccatgactgtaagtttcctgaggtctcccaaaccatgtggaactgtgaatcaattaaacctcttttctttataaattacccagtctcggaaagttctttatagcagtgtgaaaacagactaatacactattccwaagtctgaggaagctgagaagctgaagaaaaaggctgacaaatacagtttcttagaaagaaagatttaatagggacttatgaacagaagccatgtctgtgacacaagcagcagtgagatgagatcat

SEQ ID NO: 37434 - DNA, 614 bp, Homo sapiens
aattctctcatctgcaaaatgtgggtatgaagagtgcttacctcctagggaggtggtgaggatgaaatgagatgacacatgtttggcatttaacacagtgcttggtgcaagaaaaatactcaaataggttacctgttagtgacataagcaatttcgtcctgctgtaagtagtgcaggggtgaccatccttgtgcgtctggctcctcccttcttcacatgatttatttggaccagatgcccagaattgggattcctgggtctgcagcctttaagggggctggtttgagtgcggtggtggagccagcttcctgcctggcttgactggaagcagcccatgactgctggctcctccaggctccatccttgactgcggcacagcccatcatcccacagctttccaaacaactcgttgccatgacaaccagtaccagctgcgggagaagaattgagtctgggctgtgacagggacaggcgggtggttgcagacagggctgagtggggcctgggcaatggggggcacagtgcccggctggtctggagccccgtttagggccttagcaccttcccctggagacagcctggcttgtggcaggggcagacagkttcaaggtcaa

SEQ ID NO: 37435 - DNA, 1040 bp, Homo sapiens
cttgagctcaggagctcaagaccagcctgggcaacatagtgagaccctgtctctactaaaaatacaaaaattatctgggcatgrtggcacacgcctgtagtcccagctacttgggaggctgaggtgggaggatcacttgagcacaggagacggaggtttcagtaagccaagatggagccactgcactccagcctgggtgataaagcgagactccgtctcacaaaaaaaaaaaaaaaaaaaaaaaaaagctagtgattaaatagatagagatagaggtgagatagatagatacatatgagatggatggatagatagatgagaggaaattaactgtggaaattgtctcacatgattatggaggctgagaagcctcatggtatgtcatctgcaagctgaagagctagggaagctagtggcatagctcagtccaagtccaaaggcctgagatcagggtagccaatggtgtatctctgagtttgaggccaaaggcctgacaacctggcggatcactggtgcaagtcctggagtccagaggccagaaaacctggagttctgatgtccaagggcaggagaagatgagtgtcccagctccaggggagtgaatttcctctcctctgctttgttgtttcatccagaccctcagtcattcgggtgagggtgaatcttccttactcagtccactggttcaaatgcccgtctcttccaccctcacagacatacccagaaataaggcttcaccagctaatggggtatcccttaacccagtcgggttgatgcctaaaattaaccatcacaaatccttttttacattattcaggacataccagtaaaaatgtgaattgcaaccaggtgaggtggctcaggcctgtaatcccagtactttcagggacaaaggcagaggatcacttgagcccaggaactcaagaccagcctgggaaacaaagtgagaccccatctctacaaaaaaataaaaataaaaaattagatgggcatggtggtgtgcaccaatagtcctagctacttgggaggctgaggtagga

SEQ ID NO: 37436 - DNA, 865 bp, Homo sapiens
cccttatatttctgtcgctctgcctgtctgtgacatggggagtgtctgtttcgtrtgagtatcttcacccctttccagcacttgtcaagcttccttttcaacaaagagagcagccgcaggctcagacccctggcagacacacggtctccccacaatttaatcacttttatctggttcttgtttctgtttttactgtccttctgtgtaaggtaagcatccattttccattgaaagtagtgacattacagtttttgaaagcagaacatttttatataaattgggtcatttcaagataaataaaaagtacatgatccattacaaaattgccaaggtggaactcaggcgaatgaagtgagagactcgctgacccagtatatccctcattctacaaagaggaaccagaggtctctaaaagacctccgtgagcctaagctgatgtccacctgcttgctgtcctgtgtaaaagtcatcagcaatggaccctaggcaggtgaagaaaaagcactagagctgctatggccaagacatgaaatgaaactttccagtgggcagtgatgtgtcactagcaccgcggcagcagcgctgggggatgcagagcaggaggggagaagtaccagtgccctcctggcatgcagcttacctgggcaccagctgtgcaggccaaaatctgaccaacatgggccaggtttgagcccttccccgtactccaggaagatgctttatccttctgtcccaaccagggccacaggacctggccaccctgtgggcccactggttagctctggccagagattgagttttagaaccaatttacctgtttctattcaccagcatatgtcatacttgactcaagaactacagccag

SEQ ID NO: 37437 - DNA, 865 bp, Homo sapiens
cccttatatttctgtcgctctgcctgtctgtgacatggggagtgtctgtttcgtatgagtatcttcacccctttccagcacttgtcaagcttccttttcaacaaagagagcagccgcaggctcagacccctggcagacacacggtctccccacaatttaatcacttttatctggttcttgtttctgtttttactgtccttctgtgtaaggtaagcatccattttccattgaaagtagtgacattacagtttttgaaagcagaayatttttatataaattgggtcatttcaagataaataaaaagtacatgatccattacaaaattgccaaggtggaactcaggcgaatgaagtgagagactcgctgacccagtatatccctcattctacaaagaggaaccagaggtctctaaaagacctccgtgagcctaagctgatgtccacctgcttgctgtcctgtgtaaaagtcatcagcaatggaccctaggcaggtgaagaaaaagcactagagctgctatggccaagacatgaaatgaaactttccagtgggcagtgatgtgtcactagcaccgcggcagcagcgctgggggatgcagagcaggaggggagaagtaccagtgccctcctggcatgcagcttacctgggcaccagctgtgcaggccaaaatctgaccaacatgggccaggtttgagcccttccccgtactccaggaagatgctttatccttctgtcccaaccagggccacaggacctggccaccctgtgggcccactggttagctctggccagagattgagttttagaaccaatttacctgtttctattcaccagcatatgtcatacttgactcaagaactacagccag

SEQ ID NO: 37438 - DNA, 1367 bp, Homo sapiens
tacaaggccctgtcttacccacaaatggggcagagaaatatctgcttaaatgggcacagaacaccaaaacagggttcaggacaaagtgccctagtttgcagtgattttaagcaaactggtttcttcttctgagcctcagttttctcatctgacaaactaaaaaatgaataactctcatgtttattagaagtccctattaagataatgaggtactttgtaaacaaacaagaaaaccctgtatcaatgaaagaagttatcactatctctcctcctgcatgctycaagggtcacacaagcataaagaaaactgaggttcagggaaggcaaagaacccacccaaagtgacatagccagtaagggagagagcaggcttaagtcaacagtcttctgttgatgtcaggaatgaaaactgcctccaggccctgtagcgaccaatgcatgcagaaggcaatgggaaccatatttatttttaccttgaggttcactatgggaaggctgtatctctctgctttcctcacaatggtggacagatcttgcaaatgggaagataagaatgctcggtaggtggacaacagtcctgcagctctggcctgcttgaagcactgaaaatcagctcgaatgtccccagaaaatggcatgttcagagcagccaaatgcagctgaaaaatgtgagacaaaagagagcagtcagaatcaaaggcaaactccagcccccagaaccatctcacattcctgcaaagattccagacttcttaggctggaaggcacgttggaggtcattttattcaatccctccctgacattggaattacagtctctgcctgaccatttccggggaaggagagctatggtctcccaagcagcctgtttcagctctctgaacagctctaagtggtagaaatgtcttccttaggtgaaaaaaaaaaaaaaaaaaaaaaaaacagaacaaaatattgcttggaccaaataaagaacttcagggatctgaatctcggaatccacctgcaggccataagtttgagacctctgggtctgtgcaggggttttaagctggctttggccctggatcccagagcttctcccagctatctgcctgcagccctttcttccatctcctggataggcctggggctgatcacatgagggatctgggagaaagccatcgaaagaagggtatggcacctatgactaagactgctgagatagacccttctggaactaggggtcttatagtaattccagcttcacatccctgctatcttggtcagcagccaaaataaaaaccaatccgtagtctatttcttccacactttctctcccaaaacccagcctcctactactgccctctctcagcctttctgccacac

SEQ ID NO: 37439 - DNA, 1148 bp, Homo sapiens
tccgggaagccctggctgtcctggagggccagggggacctggaagggccacagctaagacaaaacagaaaagagaagttacacaaaaaccacactctgaaaaatgtctgaggtatcagctgactcccggagagaagtgtgttcaaccccattcacagcgccacaaagcatcccaacttccacctgtatcttgggtgctgtgcccccagcgtgtgacttaggccacattgactggttcagggaagagctgggattcttgattgttaccctggatgaagccatggctagtgcttttccgtttcataagtgaatcaattccttttgtggttgttttataaaagccagcttaagttgaatattttgtcacttgcattcaaaaatgtcctgactcatataacttatttcacccaagagacaagcatgtgacactgaacagaggaagcaggctcagaaagaggaagagaaggctctagggagtgggaggagaccagggtggtgcagtgacagtagccctggccttggggccagagacatggactcaagtccttaagtttgtccattcctagctgtgtgatctcgaggaaacagcaagctctccaaagctgtttcctcatctgcaaaatgtaaaataggcatttcttcttccctgggctgcggtgagaactgagtgctttgaaaattgtacatgtacagcattcatccggccaggagctcttagcttttgaagagtcacagtgcccttaaaaatcagatcaaggttagtgccctctttcccagagaaatgcacacataattctataaaaaaatattactgggatgacaaatcctggaggtatatccttgaactckctaggagtctatgattcctcaactgaaaagcccttactttaggcaaacataaagtagtataattacaactattcctttggctgttcttctacctctctcatcctctgctcaccctacccccgacaactcctccaaatctgccaagctcttggcagaattaagggtgtttttacaagccccagtaaaattatacagtccttcaggtcgttgcaagcaaatgttcagttccaacataggacttgaacacccacacacaggtggcaaatgtctagtggatagagggccagtggactcggattt

SEQ ID NO: 37440 - DNA, 1148 bp, Homo sapiens
tccgggaagccctggctgtcctggagggccagggggacctggaagggccacagctaagacaaaacagaaaagagaagttacacaaaaaccacactctgaaaaatgtctgaggtatcagctgactcccggagagaagtgtgttcaaccccattcacagcgccacaaagcatcccaacttccacctgtatcttgggtgctgtgcccccagcgtgtgacttaggccacattgactggttcagggaagagctgggattcttgattgttaccctggatgaagccatggctagtgcttttccgtttcataagtgaatcaattccttttgtggttgttttataaaagccagcttaagttgaatattttgtcacttgcattcaaaaatgtcctgactcatataacttatttcacccaagagacaagcatgtgacactgaacagaggaagcaggctcagaaagaggaagagaaggctctagggagtgggaggagaccagggtggtgcagtgacagtagccctggccttggggccagagacatggactcaagtccttaagtttgtccattcctagctgtgtgatctcgaggaaacagcaagctctccaaagctgtttcctcatctgcaaaatgtaaaataggcatttcttcttccctgggctgcggtgagaactgagtgctttgaaaattgtacatgtacagcattcatccggccaggagctcttagcttttgaagagtcacagtgcccttaaaaatcagatcaaggttagtgccctctttcccagagaaatgcacacataattctataaaaaaatattactgggatgacaaatcctggaggtatatccttgaactctctaggagtctatgattcctcaactgaaaagcccttactttaggcaaacataaagtagtataattacaactattcctttggctgttcttctacctctctcatcctctgctcaccctacccccgacaactcctccaaatctgccaagctcttggcagaattaagggtgtttttacaagccccagtaaaattatacagtccttcaggtcrttgcaagcaaatgttcagttccaacataggacttgaacacccacacacaggtggcaaatgtctagtggatagagggccagtggactcggattt

SEQ ID NO: 37441 - DNA, 501 bp, Homo sapiens
gtctccaaaagtgctaggattagagktgtgagccaccatgcctggcctctctttatttttaactattctctatcagttgaataaagtccaccagtaagaatattacggattttaaaaataggctgagtgtggtggctcacacctgtaatcccagcactttgggaggccagggcaggtggattgcttaagtccaggagttcaagaccagcctaggcaacacggagaaaccctgtctctaataaaaatatgaaaaattagccaggcatggtggcacatgcctgtagtcccagctacttggggggttgaggcgggagcttcgcttgagtaggggaggtcgaggctgcagtgagtcctgaccatgccactgcactccagcctgggtgacagaatgagacactgtcttaaaaaaaaaaaaaaaaaaaaaagcaatgcagttttcatcttcacaaaaagttcatatttgtatttgctaagtttgctaaaagcattaattatacttca

SEQ ID NO: 37442 - DNA, 501 bp, Homo sapiens
gtctccaaaagtgctaggattagagttgtgagccaccatgcctggcctctctttatttttaactattctctatcagttgaataaagtccaccagtaagaatattacggattttaaaaataggctgagtgtggtggctcacacctgtaatcccagcactttgggaggccagggcaggtggattgcttaagtccaggagttcaagaccagcctaggcaacacggagaaaccctgtctctaataaaaatatgaaaaattagccaggcatggtggcacatgcctgtagtcccwgctacttggggggttgaggcgggagcttcgcttgagtaggggaggtcgaggctgcagtgagtcctgaccatgccactgcactccagcctgggtgacagaatgagacactgtcttaaaaaaaaaaaaaaaaaaaaaagcaatgcagttttcatcttcacaaaaagttcatatttgtatttgctaagtttgctaaaagcattaattatacttca

SEQ ID NO: 37443 - DNA, 501 bp, Homo sapiens
gtctccaaaagtgctaggattagagttgtgagccaccatgcctggcctctctttatttttaactattctctatcagttgaataaagtccaccagtaagaatattacggattttaaaaataggctgagtgtggtggctcacacctgtaatcccagcactttgggaggccagggcaggtggattgcttaagtccaggagttcaagaccagcctaggcaacacggagaaaccctgtctctaataaaaatatgaaaaattagccaggcatggtggcacatgcctgtagtcccagctacttggggkgttgaggcgggagcttcgcttgagtaggggaggtcgaggctgcagtgagtcctgaccatgccactgcactccagcctgggtgacagaatgagacactgtcttaaaaaaaaaaaaaaaaaaaaaagcaatgcagttttcatcttcacaaaaagttcatatttgtatttgctaagtttgctaaaagcattaattatacttca

SEQ ID NO: 37444 - DNA, 625 bp, Homo sapiens
ttaaaactctggagcttacattctggttgaggagagacagtaaacaagtaagtgaattattgatatattacttggtgattactgctatgaagaaattttttcatgmagaagatagggaatgctgtttagtgcctggatgtggttttaaatagggtggtcatggaaggcttaaacaaaaacatgatgttttgccacaacgtaagttttatgtaagaactctaggcttggcatttttcttgtcatatcttagtgggatatgaatagcaggtctgagtgttcaccattttacaatgaagaaacttgaggcaaagagaactgtccaagtgtactcagaattaacagaacctggatcttataacctttcgatatgatttcagtctgtggaggtttgagctgtaatgcagccagatttagctaaaaagtcagtgggttcggggaaggccagcaggaggcagtggagcaccagcacaagctgaggccaactcccattggtgaggcttgggcaaatgtagcttaagtcaggtgagaagcactggcttggtggcctgggcttacatgaggcctacactaagctcactgcgtctctgctgtcagtgaggaaggtggtttcagacccttcattttg

SEQ ID NO: 37445 - DNA, 625 bp, Homo sapiens
ttaaaactctggagcttacattctggttgaggagagacagtaaacaagtaagtgaattattgatatattacttggtgattactgctatgaagaaattttttcatgcagaagatagggaatgctgtttagtgcctggatgtggttttaaatagggtggtcatggaaggcttaaacaaaaacatgatgttttgccacaacgtaagttttatgtaagaactctaggcttggcatttttcttgtcatatcttagtgggatatgaatagcaggtctgagtgttcaccattttacaatgaagaaacttgaggcaaagagaactgtccaagtgtactcagaattaacagamcctggatcttataacctttcgatatgatttcagtctgtggaggtttgagctgtaatgcagccagatttagctaaaaagtcagtgggttcggggaaggccagcaggaggcagtggagcaccagcacaagctgaggccaactcccattggtgaggcttgggcaaatgtagcttaagtcaggtgagaagcactggcttggtggcctgggcttacatgaggcctacactaagctcactgcgtctctgctgtcagtgaggaaggtggtttcagacccttcattttg

SEQ ID NO: 37446 - DNA, 625 bp, Homo sapiens
ttaaaactctggagcttacattctggttgaggagagacagtaaacaagtaagtgaattattgatatattacttggtgattactgctatgaagaaattttttcatgcagaagatagggaatgctgtttagtgcctggatgtggttttaaatagggtggtcatggaaggcttaaacaaaaacatgatgttttgccacaacgtaagttttatgtaagaactctaggcttggcatttttcttgtcatatcttagtgggatatgaatagcaggtctgagtgttcaccattttacaatgaagaaacttgaggcaaagagaactgtccaagtgtactcagaattaacagaamctggatcttataacctttcgatatgatttcagtctgtggaggtttgagctgtaatgcagccagatttagctaaaaagtcagtgggttcggggaaggccagcaggaggcagtggagcaccagcacaagctgaggccaactcccattggtgaggcttgggcaaatgtagcttaagtcaggtgagaagcactggcttggtggcctgggcttacatgaggcctacactaagctcactgcgtctctgctgtcagtgaggaaggtggtttcagacccttcattttg

SEQ ID NO: 37447 - DNA, 625 bp, Homo sapiens
ttaaaactctggagcttacattctggttgaggagagacagtaaacaagtaagtgaattattgatatattacttggtgattactgctatgaagaaattttttcatgcagaagatagggaatgctgtttagtgcctggatgtggttttaaatagggtggtcatggaaggcttaaacaaaaacatgatgttttgccacaacgtaagttttatgtaagaactctaggcttggcatttttcttgtcatatcttagtgggatatgaatagcaggtctgagtgttcaccattttacaatgaagaaacttgaggcaaagagaactgtccaagtgtactcagaattaacagaacctggatcttawaacctttcgatatgatttcagtctgtggaggtttgagctgtaatgcagccagatttagctaaaaagtcagtgggttcggggaaggccagcaggaggcagtggagcaccagcacaagctgaggccaactcccattggtgaggcttgggcaaatgtagcttaagtcaggtgagaagcactggcttggtggcctgggcttacatgaggcctacactaagctcactgcgtctctgctgtcagtgaggaaggtggtttcagacccttcattttg

SEQ ID NO: 37448 - DNA, 1289 bp, Homo sapiens
atcaatgaggtaaatacctcttagtgtatgataggtactcaataggtagaaattcctttgatcttgtcctgtgttttcagtttctagaggcagaaactgaggcctagagaaggcaaatgatctaacttccccaaaccctatagcaaggaatgaaagctgggataggaatccaggttatagctccatctagggagatattactctatcaggaccagctgagagctgacctttgcagagatgagtggcagaagggtcctgggaggtggcatggccactccttttagccttcattggttcctatgaccccacccaccgtcatctcaccattatccccatgcgctcttccttatggtcactcttgccgcttagtgttcctaggcagaccacacatttccgtgtctccagcttatgttcctgctatgttttcagcctggaatactattgttggctttgttcatatgggaaatccttgttctttcttctagaatcagcttatctgcaaaaccttttctaacactctgctgctcttgctctcccaccccaggcagaatgaacaccctctttgtataactctgttgtaccaatatcatagaacagcaaagaggttaggctgggtttgggtgtggctccgtccccttgggcaagtcacttaacttctctatgcctcagtgttctcatccatacaaagggggcactttaatttacaattttaattttaccttccttctatagttgttatgaggatgaagggaaatacttggtgtaaactgcctggaacatagtgaatgcacagtaagcaggagaggctgtttttattttccgtgttcatctcttctgccaggcagtgaacactttcaaggtagggaatgtgtcttttcccctttgtcctcaatgtttagtattatgccaacctagtacatggtagctgtctataaggattaaatgtaaatttggtttccacccagaagtgtatacctttcaactgctggtggagaggggagaaaagtcctgggctggtgtagaaastctttcccaggggtaatcaaatagataatagtcattcattcatgtatttattcacacattcaacacatattcgttaagtggctagtatttgcctggcactgggaatatagtggcggtaaacaagacagataaggtcctactcctcaagttcatggtctgttgaatgaaaatggacacaatgggcatgtatcagttggccaaaccatccccagaatttaatgatataaatgacatctatttatttagttcacaattttgtgggt

SEQ ID NO: 37449 - DNA, 1204 bp, Homo sapiens
caaacttcacaacaggtacacagtaaacccttaataattgttacttccttttttccaaccctgttcaatattttcctatgtcaggagtgaaaaagagatcagacrtatgatttgttcaaattctaggagaagggatttttatttccattttatccatgaggagaatgaggctctaagagattaaatggcttgcttcatgattgaaacccaggcctgtttgattccaaaacttttagtctctttaacatattcaaggagactatccatgccctcttcttccttttattcttccatccatccgactctttcctattttctttttttcctcccttgcctttttctgaaaagtacttaaggcacaaactactactttgcctgcatttacagtggtgggacacgtctggctggttatataacataatggcagcaaacatttactgagtacttactataggtaaggctcagtgttaataagtgcacatattatttccttatactctttcaataacttaataaggtaggttccaaagcaatcttattttgtaagtaaaaaccagaggtcaaaaatggtaaataacctacctaaagccacacaggaaaaactaggatttgaactcagtgcctacctcatggatttattataaagacaaaaaacatgcaaaagtgcacagaatgacacacacaatcaattagtgtccatcaggactgttgaggctgttctcctccttctcctcatcctcctccttctcctcctccttctcttcctccttttcctcttgttcagatgactgcctttgagagctgtggaatggtcatgcaatctaatctaatagttccatccccatcatcaacacatctgccaaaagtatcctgtagcatcagagggtgtgagtacggttggaggttgtctccagtttctaagcaattgcttctatctctgctgttgctttggatatcagtaatcagtgttgctaaggcctgcagttgaccccagattctacagaaatcccatccatgggcatgaaatggatccaaggatggaagcagcttctgtgagaggaaggccatatgttcaactggactcaagggaactagacagcattcacatctcctcggtatttccatcttactgctgtaggggctcccaaagtaagaagtaaagacactaacagaaaaagccatgtgtatactcagcaagagagaa

SEQ ID NO: 37450 - DNA, 524 bp, Homo sapiens
gaaaaaaagacactatagggttctaagtttcaaccactgtttcttacaaaagtacttctagaacatctaccaagctagcactagatgtaagttgttcaaatagtagccaaaatccatgctctcatagaccttgtaaactaggctttatttccttagatttgctactgttatgaaagtggtgctaccatttatttgtagtaaaatgccttatttgtcrcactttaatttctatgtccagaaggtagtcatcaaggcaaaactttccttcccctattattccatttcccatccctttaaattccagaatgatatacttcttaatgtatgtttcccatctcctttaccaaataaaaaggcagctcatctccccttgactaaataggggaatggtttctaagtagaaaatggaagaacatctggcagatagaggctggtacaagactccaatactgagctcataattttctctctcctacccttcaattcattttgtttcccaagatctgaaacatttttcagaactg

SEQ ID NO: 37451 - DNA, 553 bp, Homo sapiens
tctgtttttagtttgaacccctcacttgccttttctccagcccctgcaaaaaattctgcatggcatgagtagctagtacaaccgggcttgtcctcaaagagaggccgtagattatttcattatcttcattgagtctattaagtatctggtcctgtgccaagtgatttacctgtatcatctaatttaatcctcacaacaaccctttacagtgcattctgattttattcccattttacagatgaggaaattgaggtgtagtttggtcaagagacttacttgctcaatacctcccaagctggtaagttttggagccacaatttaaacctactctgcagtggtgtagagtgctatccctctccctcttccccaccaaagctgctcataggttctaatgagttagtaggtgatgtcagcttgaagtcagaacccagggtgattctaagaaaagccctcttattctggtacattctccactgtgactcaggagctggacatygtagttttttaggccttatccagacctaaaaaacttctcacttaacacacggtttct

SEQ ID NO: 37452 - DNA, 766 bp, Homo sapiens
tccatctactacgcatactaaccctcttgacttgccattagtttaaatgccagtggctgcacacccagggatttctgaatttgtggcccactactaaaagcactttgaatgtccttgatattcttcatgtaagagatactcctggccaggcacggtggctcacgcctgtaatcctagcactttgggaggccaaggagggtggatcacctgcggtcaggagttcaagaccagcctggccaacatagtgaaaccccgtctctactaaaaaaaatataaaaaattagctgggcatggtggcggttgcctgtaatcccagctactagggaggctgaggcaggagaatcgcttgaacctaagaggcggaggttgcagtgagccgagatcatgccattgcactccagcctgggcaacaagagtgaaactccgtctcaaaaaaaaagagatactcccttaacaggggatgtatctcctgtaaggggatgaactgtgccaactgaatcaggtagggttctttggttgcaagcaacagaaagcggtcatgtttaacttaagaaaaaatgatatgagctaactcacagaagaaagggaatggctgaagaaccaaatcccctatcacttacaggggaacatgcaaatttattaaacatagtgtaaaatgtctttcattcctttccsttagccagacactgttccaagcgctaggaaaccagtggagaacatgataaaaacaacctctgttttgaagacaaatatagctagcactgat

SEQ ID NO: 37453 - DNA, 600 bp, Homo sapiens
ttgatcattatatattgtagacatgtaaaaacatcacactgcaccccataatatgtacaattgttatttttcarttaaaaaaataaaatttcaattaagacgtgctttttgactgggcgcagtggctcacgcctgtaatcccggcactttgggaggccaaagcgggtggatcacaaggtcaagagatcaagaccaccctggccaacatagggaaaccccatctctactaaaaacacaaaaataagctggacatggtggcacatgtctgtagtcccagctactcaggaggctgaggcaggagaatcacttgaacccaggaggaggaggttgcagtgagctgagattgtgccactgcactctagcctggtgacagagtgagactccatctcaaaaaaaaaaaaaaaagtgcttctttttttcttttctaaaccccttggttttatatgattccccactcagtatggagttatattaattcaaacagcccaatatctgaagcacttaaatattcattaaaatcattatttatgttcctcattgaacataaatttgtaaaccacaagctcttaaaattcccttgtacagccccattcttcttgc

SEQ ID NO: 37454 - DNA, 600 bp, Homo sapiens
ttgatcattatatattgtagacatgtaaaaacatcacactgcaccccataatatgtacaattgttatttttcagttaaaaaaataaaatttcaattaagacgtgctttttgactgggcgcagtggctcacgcctgtaatcccggcactttgggaggccaaagcgggtggatcacaaggtcaagagatcaagaccaccctggccaacatagggaaaccccatctctactaaaaacacaaaaataagctggacatggtggcacatgtctgtagtcccagctactcaggaggctgaggcaggagaatcacttgaacccaggaggaggaggttgcagtgagctgagattgtgccactgcactcyagcctggtgacagagtgagactccatctcaaaaaaaaaaaaaaaagtgcttctttttttcttttctaaaccccttggttttatatgattccccactcagtatggagttatattaattcaaacagcccaatatctgaagcacttaaatattcattaaaatcattatttatgttcctcattgaacataaatttgtaaaccacaagctcttaaaattcccttgtacagccccattcttcttgc

SEQ ID NO: 37455 - DNA, 555 bp, Homo sapiens
tgcttcattatccacctgtttctgacttcaggatttggctgtttttctcttcagtctgaatagttcccttaaccagtctgagctgtaacattctggactttcgcacaagcatttgtttaaaactattttactacatcattagctagaataacaacagttttaaacacacattcaagcctctatatttgtaggttccacatctgtggattcaaccaaccacagatcaagaaatattcagaaaaaaggatggttatgtctggactgaacatgtacagacttttttccttgtaattattctctaagtaacccagtataacagctatttgcatagcatttacatyctattaggcatttggaataatctagagatgacttaaagaatatgagaggatgtgcatagattatatgtaaatattacaccattttatatgacggacttgagcatctctgaatttgggtaactgtgggagaaggagggtcctggaaccagtcccccacagatacggagggactactgtgttacagagtattgaaaataaaataacttccagctct

SEQ ID NO: 37456 - DNA, 712 bp, Homo sapiens
tgactccaaagagttttggggcccataagcatttatcttttcttatgtatcaggcccactgaaagaaggcattaaaagcactctgatagagaaattatatatgccttcctgcaggtaccataccactagcattttaccagattcaaccctgagtgcaacagagagatctagaattaacatctgaatgaatagggggaggagggaggaatcactcaagacacaggatacggattaaacatttctgcagcttcagcattagctaatttatacttattctgagtagaagctgcttgtcaggcagctggaagatggagtgcactaacattttcatcgtaagtccttgttctgagcatttgtatttgcctgggatgacagaactcaggattawcgtgccaaggtaatctgcagactctaacaaaatgtggaaatgattggccataataaggactaggaaacacgttttattggttgtggaagttaagagatcctaaaggctaacctttaaacaagcaagcaggaggtagtggcattcggcttttgatttattcccaaaattcagtgtgcatacttctttagcatcacaaaacaggtgggtggatatttctgtcttgaaattgaagctataaacacacaagacagatacgaggaaggattcccaagttggcattggtagtatctcaatattatgtcccaattctcactcccttgcttg

SEQ ID NO: 37457 - DNA, 517 bp, Homo sapiens
tttttattttttgtagaaactaggtctcattatattggccaggcttaatttgtttatttttattttttgtgagctgtaatcttgctatgttgctcaggctggtctcaaacttttggcctcaagtgatcctcctgtctcagccgcccaaagtgttgggattacaggtgtgaaccaccatgcctggcccatttcccctgatcagggaaaatgcgttgttatgtgtgatatttggtgtgagtttttttttttktttttttttttttggcggagtctcgctctgttgccaggctggagtgcagtgacgtggtctcagctcactgcaacctccaactccctggttcaagtgattctcttgtctcagcctcccaagtagttgggattacaggcacacgccaccatgctcagctaatttttgtgtttttagtagagacaaggtttcaccatgttggccacgatggtctcgatctcctgacatcatgatctgcctgcttcagcctcccaaagtgctgggactaca

SEQ ID NO: 37458 - DNA, 636 bp, Homo sapiens
ggakgagctgaccagtgaagaaagtgtctttgaagtctttgttctttacctctcgggagaaccaaaccggaatggtcacaaagtgagtgatgctggagtggggaccctggttcatcccctgcccctggcctgaccccagctgcaggccaggctgcggggctgtgacttccccatcctgtgccctcccctccatgctgtggacatggcaaagggagaagggtaagttgggagacctccacctggaagggcttagggaggcaaagacaggctgggtctttgttgggggccgtgagagggactcagggtgccaaacctgatggtcgccccagccagctcaccgtctctcccaggtgacttgcctgccctggaacgatgagcccctggcggctgagaccagcctgctgaaggaggagctgctgcgggtgaaccgccagggcatcctcaccatcaactcacagcccaacatcaacgggaagccgtcctccgaccccatcgtgggctggggccccagcgggggctatgtcttccagaaggtgtggtagggaggcacggggtgcccccctctcttgaccggcacccgtgggttccccagagcttagggcagagcagcctgcctctcctgggctcttaaatttt

SEQ ID NO: 37459 - DNA, 1227 bp, Homo sapiens
tgcaggaacgagcactggccagagagggcccagctgtagccatggctcaggcaagcccctcagcccttgcccccatccctcggacccaccaaactgcacacacagctcctcttaccgtagcctccgtttatgggccttgctttgggctttgsaggctctgggctcagggctggagtgcgctcttggtccctggtccctcgtccacaggggcaggcctgggacccagctactctgtccaggccactgtggccagagctggaaggcagggcagagggaatgttccctgcaccctggaaaggggagttgagtcacaagaggttaaggtgggtccaggaaggcagctgctcttagtgcccgcctaggagttgagtacagtgaggagggtggaggaaggtgctgagcttagccttgtgccctgcccccatctccccaggcctccagcctctcccggctgcctgccgcccaaagagaaatcacaggggcggggcaggaatgcaaagtgttttctcagaacagctgaaacattccgaagagggaatggatggggagaatggtcaatacacataagaccgtgtcccaaggagctgatttccaggcccctgaggactggagaccgcttcacccctgcacttcagacaccgtttgtcccccggggcaaggtctccttactctgagcccaggccgttccccttggcttcctccgtccacccaggctgcactgcagtgatggcgcgggaggcaccagctctgtggcctgtgtccagcagctgcgggtctgaaggagtagccagagaggagcacctgaaccccatgggcttggacttcctggggccccgctgggatttcttcgctgctctagctggcaggacacatcccggcctcttccacccattcccccatgtggctgaagacattccaacaatggggtgggcccataatagttagccctcagtcagttcccggagcacagccctgggagggggctatttctctccccactgaaaacatttcaaagctgagttacttgtctgaggcctcatccctcggaagccgtctgactccagagtctgagcccccggctagtaccctatagagagggggctctccaaaggggctgctggggcatgtgtgcctgtggcagaaaagaggagaccctggaattcagcaccctgggtgccattcccagcgtttagtttctagaggcctcagtttctccatcagcttatg

SEQ ID NO: 37460 - DNA, 1227 bp, Homo sapiens
tgcaggaacgagcactggccagagagggcccagctgtagccatggctcaggcaagcccctcagcccttgcccccatccctcggacccaccaaactgcacacacagctcctcttaccgtagcctccgtttatgggccttgctttgggctttgcaggctctgggctcagggctggagtgcgctcttggtccctggtccctcgtccacaggggcaggcctgggacccagctactctgtccaggccactgtggccagagctggaaggcagggcagagggaatgttccctgcaccctggaaaggggagttgagtcacaagagkttaaggtgggtccaggaaggcagctgctcttagtgcccgcctaggagttgagtacagtgaggagggtggaggaaggtgctgagcttagccttgtgccctgcccccatctccccaggcctccagcctctcccggctgcctgccgcccaaagagaaatcacaggggcggggcaggaatgcaaagtgttttctcagaacagctgaaacattccgaagagggaatggatggggagaatggtcaatacacataagaccgtgtcccaaggagctgatttccaggcccctgaggactggagaccgcttcacccctgcacttcagacaccgtttgtcccccggggcaaggtctccttactctgagcccaggccgttccccttggcttcctccgtccacccaggctgcactgcagtgatggcgcgggaggcaccagctctgtggcctgtgtccagcagctgcgggtctgaaggagtagccagagaggagcacctgaaccccatgggcttggacttcctggggccccgctgggatttcttcgctgctctagctggcaggacacatcccggcctcttccacccattcccccatgtggctgaagacattccaacaatggggtgggcccataatagttagccctcagtcagttcccggagcacagccctgggagggggctatttctctccccactgaaaacatttcaaagctgagttacttgtctgaggcctcatccctcggaagccgtctgactccagagtctgagcccccggctagtaccctatagagagggggctctccaaaggggctgctggggcatgtgtgcctgtggcagaaaagaggagaccctggaattcagcaccctgggtgccattcccagcgtttagtttctagaggcctcagtttctccatcagcttatg

SEQ ID NO: 37461 - DNA, 1227 bp, Homo sapiens
tgcaggaacgagcactggccagagagggcccagctgtagccatggctcaggcaagcccctcagcccttgcccccatccctcggacccaccaaactgcacacacagctcctcttaccgtagcctccgtttatgggccttgctttgggctttgcaggctctgggctcagggctggagtgcgctcttggtccctggtccctcgtccacaggggcaggcctgggacccagctactctgtccaggccactgtggccagagctggaaggcagggcagagggaatgttccctgcaccctggaaaggggagttgagtcacaagaggttaaggtgggtccaggaaggcagctgctcttagtgcccgcytaggagttgagtacagtgaggagggtggaggaaggtgctgagcttagccttgtgccctgcccccatctccccaggcctccagcctctcccggctgcctgccgcccaaagagaaatcacaggggcggggcaggaatgcaaagtgttttctcagaacagctgaaacattccgaagagggaatggatggggagaatggtcaatacacataagaccgtgtcccaaggagctgatttccaggcccctgaggactggagaccgcttcacccctgcacttcagacaccgtttgtcccccggggcaaggtctccttactctgagcccaggccgttccccttggcttcctccgtccacccaggctgcactgcagtgatggcgcgggaggcaccagctctgtggcctgtgtccagcagctgcgggtctgaaggagtagccagagaggagcacctgaaccccatgggcttggacttcctggggccccgctgggatttcttcgctgctctagctggcaggacacatcccggcctcttccacccattcccccatgtggctgaagacattccaacaatggggtgggcccataatagttagccctcagtcagttcccggagcacagccctgggagggggctatttctctccccactgaaaacatttcaaagctgagttacttgtctgaggcctcatccctcggaagccgtctgactccagagtctgagcccccggctagtaccctatagagagggggctctccaaaggggctgctggggcatgtgtgcctgtggcagaaaagaggagaccctggaattcagcaccctgggtgccattcccagcgtttagtttctagaggcctcagtttctccatcagcttatg

SEQ ID NO: 37462 - DNA, 567 bp, Homo sapiens
aattcattaagagacaacttaaatgcagcctttggtatgaaacattccctcatttgaatgtactctagcgtcacctttttctagtcatatatacaatgaattatcaaagctatgtgtgccttttagcagaggtggtgtcttattcacctttatttgttccagtatctataaaagcagaaagtttgtaggtaggcaaattatgtagaatgattggataaatgaataaatgcattttaagttcaaaagagcagttatttaagttgcaatacccaaaatcaaagccaattaattcattttataagatgcttatatggtttggctgtgtccccacccaaatctcaacttgaattgtatctctcagaattcccatgtgtggtgggaggttaccagggggaggtaattgaatcatgggggccagtctttcctgtgctattcttgtgatagtaagtctcaccagacctgatgagtttatcaggggttttcgattttgcttcttgctcattttctcttaccaccrccatgtacaaaatgcctttcacctcctgccatgtgaaactgtaagtccaa

SEQ ID NO: 37463 - DNA, 544 bp, Homo sapiens
agaagagcctttttctgcctgaccttgaagacttttacagatcttatggtaggaactttctcccattgccatcaagagttcccttcaccttattttaataatcttttcaaactggtttcttcttatctaattccagatttgtatgacaatgtaaacaaaccattatgcttttagaactcagatttaaacatttttgatgtttacagaaatacatgattgaatataattttatttcattttttatgtttatgtatttatttttgagacagagtctttctctgttgcccaggctgaagtacagtggcaccatctcggctcactgcagcttctgcctcctgggttcaagcgattttcctgactctgcctcccaagcagctgggattacaggtgcacaccatcacacttggctactttttgtatttttagtagaaacggggttcactatgttggccaggctggtctcaaactcctaatttcaggtgatccacccacctcagcctcccaaartgttgggtttacaggcgtgagccaccgtgcctggcca

SEQ ID NO: 37464 - DNA, 544 bp, Homo sapiens
agaagagcctttttctgcctgaccttgaagacttttacagatcttatggtaggaactttctcccattgccatcaagagttcccttcaccttattttaataatcttttcaaactggtttcttcttatctaattccagatttgtatgacaatgtaaacaaaccattatgcttttagaactcagatttaaacatttttgatgtttacagaaatacatgattgaatataattttatttcattttttatgtttatgtatttatttttgagacagagtctttctctgttgcccaggctgaagtacagtggcaccatctcggctcactgcagcttctgcctcctgggttcaagcgattttcctgactctgcctcccaagcagctgggattacaggtgcacaccatcacacttggctactttttgtatttttagtagaaacggggttcactatgttggccaggctggtctcaaactcctaatttcaggtgatccacccacctcagcctcccaaagtgttgggtttacaggcrtgagccaccgtgcctggcca

SEQ ID NO: 37465 - DNA, 551 bp, Homo sapiens
gaccacagtagtaacaatagaagggtgrgaagtgatttaattttaaatatgttttagagttacagcagccagagtgcactgatggatcagatgcaggaagtaaaactatgaaaaatatgaataattattaaaagtaatatgaatgtgtaacatcagtgtggacatgctcttgtaaaacacttcaggtacatacaggatttgcatatcttactagttcttgaatgtttcataccttgtaagttactaaagagaaaaagatgacaaaaataatccattaatatagtatttttgctcttaataagtaagatgaaataatctgacggtagattcagataagcctacctgtgtatcttgttttctggtagtatatctatatctctacaggtagaaataaagatacatttaccctcatttcaaaacacaatcttgcataggtaatggattgctgaaattagaatttgattttcatcattctactttccaactaccaatgaaaagtgcttctgctactcagagtttctatctctaaaacaagttcttttcctcctttg

SEQ ID NO: 37466 - DNA, 1675 bp, Homo sapiens
ttatgtccccagtaccacactcaggccacaccaaatataaagggttacaaatattcagattttattataaataaaatactgtttttcttaaaacataaaaatgccaagtgttgcattttattaaccacccyggagagcaaggctgtagagattaaggcaaacagctaaagtgaaggcacatataaaaggtccacagttggaattcaaaggaaaaaaattcagggaaaaatagcagtataataatccctgtgtcaaccagcattctgcagcagccatcctgtcaattacattacataaaatacagataactggagctagacaataaaataatggctgtgttgcgggagtgtaattaaggtatcatcttgtaaagaaccttttattttaaaaaataaaattctgcttaaaaaatataccacacaggtggaggagaaaagcaaataacaaaaagaaagttaaaaggaaaccaaaccaaaccaccccattgtggcctgagacttgctggagtgaacttcacccaaactagcttggcagtcaatcttcagtcctcttctgcaaccttgaccaaatgcatatgttaggatgtagccacttaatgaaatgaactagccaggaaacaatgacgtgaaaactttgcaacagcacgccacatctcctgccatagtagaagaggcctgggagaagcagcagagtgaaagctcaggagtatatcgtcaaaacacttgtggtaaactctggtatatcccaagcagatggaaacaggaagtgggatcatcaagaactaagttacaccacctctcccagtctacccatcagtaagtagcactgttcctgatgccctaagtgctcagtcaaaatgtactcccttataaaacttacctatccagctccaacaattgccagaaagggcatttctccctcattcctggctagtcccactgtggcgtcaaagatcctcttcagcaaactttcctaatcctaccatagcttgtcaacctggcgttcctgctctggaacattgtaaaaccaccgtgctgcaggttaggatcatcaggactgcaatggaagaggacccaagttacctctttacagtggctgggtgtggaggaaagcaattatattaattttagagaatggagatgctgcaaacacaaggcacaattctttggagtacaatccaaagaattctagaagggagggaaggaggtattcagatacattgtgccagtgaagaggaaaaattgagcaaagtgaacagagtgtcattctagaaataggactaagtatatttacataaattccttattctataatcatgataaacaaaacacaaaacattcacacaaaaatataaatttgaaataattaatagcaccagtgtgtcagataatagtttctttccccccaccccgcccctgctacgcaaagtacaaagttgcatagtgttaaaggccatatatgaattctcaaaggtgggttggtaggaggaagggggtgtgtggcagggaactgtcacactgtggtcttaaaaccacagaggtgaggatcaaaagttgagaagcccactaggaaactccacgtaagggtcttccctctacacttagagggaaggtttagagtggatttaaatcacaaagtgcaggaactcgatagcgttggcagctgtgtgaaatac

SEQ ID NO: 37467 - DNA, 515 bp, Homo sapiens
gcctccaccttttttaaccaagttgaactttcagatgagtttctggtgtgtaagaggggggtggtggcctgagtaatggttctgcaaataattagcagcaggatcatagagacaatttgaactttgactgtaaaaggttaactgctttgtgagttcttccttgttgatgattttgtttagtctaatctccttagagtgctgaaatattcttagcatgtttgygtgtgtacagagatgcacagcattcttagtctagcccattcttcaagagtttaacctttatatttgtcatttaggcctatatatacttaaattctagacatgggccttaaggggctgtgatcacccacagagaagtaactgatcttgtgtgcagtgtttcattgggtacaaagtgattttcaacattgatgagtaaattcatcttagcatgtgtctagaaacttaaaatgccatgacttaaagggtcatgattttgagaaagttctgatttaaaatttggtttttattacctt

SEQ ID NO: 37468 - DNA, 564 bp, Homo sapiens
atcccagctactcaggaggctgagacatgagaatcgcttgaacccaggaggtggagattgcactgagctgagatcctgccactgggctccagcctgggtgacagaatgagactctgtctttaaaaaaaaaaaaaaaaraaaatcacaataagtcctagggtaaagatgggggtacagaaaacaattaaatagaacaaaaacaactgtttccttttcctgtgattcaagaagggcttagatcttctactcagcatccttttactaatgccctccattggctctcaccccaacatttccttttttatagcttattttgtaatgcctccttaattatcctttaatagaagccaccgctgataagctacctacactcatacagaagcattaatataatgccccagatgtactgtttcagggcaaaaaggaaaataatttccaacaaagtggtgtgtgtttcactgtcagatgcttgcacttacacacggaatcgctgtgcatccgacagaggctgattggcacatggggcacggggattgtcagctcaaacaccgtcagcagcgttgc

SEQ ID NO: 37469 - DNA, 762 bp, Homo sapiens
gatgcccgccccagcagcctcatgctgacgctcacaccctctggctagcctgtgatcttcctcctcctacatcgatgtttgctttggctgcttggcatggagagagggacccagttcctcaggcctgtactctggtgacagggcacagagggtgctaggtgatgtcagcagctgacaactgctcctgctgtcatcctggtttcccttccctgctcactgcactccagagccccagggggctctccatgctctaggtactccaggccctaagcagtggctcagtgtgcggctgctggtgtctcagggctccaccagctggaggcacttctatctctgggcctccgatggctttcatggccaaggagtagggcaaagggtagatggactgggctgcttttcagcagggactggtcgtaagatgacatgagaccagccctgcctgggtctggcctgaatcacagtgcgctctgcccagctstgtatgaactggccaagctgggaactggtttgtttcaatctaactgcaacctgttcccattccagtattttaattatggcaataaagaaatgtgaacataaaaaggtacgtgctttataaatgtgattctgatgttcccttttgatactaattcacattaattgcctcagatgatactgatacccaaacagaaatctggcagaagaatcccgactggcagtcctgataacgtgcctgtgtggaggcggcagtaatggggtcaggctctctgaacagcctatgaa

SEQ ID NO: 37470 - DNA, 1131 bp, Homo sapiens
gggtgcatgccccaatgcacaccccaatctacacttatatatacatcacgcatgtgcccttacacatactcagacaccctccctggtgtgtgggttcatgtcactcacgtgcatccacacaccagcaatcatggcctttcatgcacatcccacaggtgcgcatgcatcctcacccatgcacacacatctgtgcagccataatcaggcaaagacatgcacattgacgacactcacatgtacatgtcaatatggacacacatacacatgcaataggaaatacacatatgtgggttgtgcatgtgtacccatcacatgagacacaaacccacacgcctctagacatgcagaaagatcaccagctgcatgtacaggaactcattttacacacaggccactcctatgygcatgtgtgctcacacatgaatggctcgtatgtgcacaagtacaatctcatattagccagttgggacactaccgtgcaaggtggtagggaaggagtttcagatttcaggccctgagggggcatgggtgcacttccttcctttgccctctccgcccctcccctgccctcatctgccacctcccaggaggagccctcctctcactctgagagtaattattgtgtgtggcatgtgaagagactttagagggacagattctgcacctactccctggaaggaatgtcccccgtcttgcagctgaggtgggaacttggaacccataggggacaaggacctgcctgggtctacacagcaaggcctaggcagaggtgagactgaattccagccttctgcaacaagccagtttggactacaggctgagaggcaaccaggacacaccatgctccctgccttcaaaacacctgcaggctcagataccctaaagtcccctcattgcacatgctttcagatgaagatgttgtccccaaaggtccctgttaaaaggcatgtttattatgggaggtggggtcagctgacaaggaagacaggccagtccctcctccatgcccaagctgccctggagggaaggactgagagacagaggggctgagagctaacatcagccacagagggacagacctgcagccaagcagatcctagataccagcgctggaaagctagagggatagag

SEQ ID NO: 37471 - DNA, 1847 bp, Homo sapiens
tatcaacatgcttgattgattaactcctgggccaatgggatcatgagggcaggtacacctcctcgctccttacaacctcagtattgtgggtttcatttcttatctagattttgtttactgacaaataataagctacatgactggctggattctactgaaaaaaaaaaaaggaacctttatttatggcttgggttttaggcttagaaagacactttcgcattattttgtatattagcattgtaagtccttttctgtattaatgtaaaccactggaagtggatacagaaatctcctctcaggccctgtaacagaattgactgtacccagataattcttgtggagggatttgttagctagttagccagctagcttttttggtagtcctaataagcttcccccagatctttcttctggtgatacactatgtactccaggagctgccgcctactcattcttcaggagaggtcacatgacccagaactgtacccatactcttggtccaatcagagtttctccctgggatccatatatgcacagtgagaaacagatgccatctccttcctcaaatgttgttgaacctcggctgcttgtggtcatgttctctgccacgtggtgataacctggctggagtaggagaaacaggctagtgctmaaagcaaagtgaaaggctgacagagatgagagctgcagcaggagagaaaaagccacggcagtgttgactgtcttattccagagcccaaggccttgcttcttacagcccctcctttgtttctgtgggttaccctcattgtctccccatttctggattacacaagtctgtgatggatttctgctattcacaaccaaaagaggccttactatcattgcctcgtaaaacagaaatgagagtgatgcaatcaacaattaaatacttacaggtaagggaagaggcctcattttctttattgagactagaattataaaggatagagaaacagaaacagaaaaaaattctctagagtattagattacaacaataactagcatttgtgtagtgctctacagtttttaaagtacttccataatcatttctttcatttgaccctcacaataattctgcaaaatggagaatacagtgtataattatccacatgttgccaacatagcagaatggtgaatggaagtgtttcctgtggttctggaattatagtgaaggctcatggatgaagacaaaggattctgcattttgtgttttatattttgagtccaagggacccccaatttgggggcctagccactttctctacagttttactgggaagggccagttcagagaatccacaaaataaactccaaacccaaagggagtcaagaaaatctcatgtgaatattggggcatctacaagaagtggaagctggcatatcgttccccagctagacatcagtttcaccagcagacctgccttcttgactctaaacagtcagagtacaggaaaggaagatggagagagagaacatggagtgggaaactaatgctcagagaggttactttttcaaggccacaaatagagttagcagctgatctgaggtttgaaaataaccactgatgctcacacagcatgtgtcagatccatggggtaggagtcggccagagacttggtaacagacagattgctggatcccacccctagactctctgattcagttagtttggggtaaggcgcaagactgaatttttcacaagtttccaagtggtgctgatacttctggtccaggaacttagtgggagagaacgactaatctagaccatttcacttcacattctgagcttcttgtacactgtcacactgcatccttttaacaatgca

SEQ ID NO: 37472 - DNA, 1847 bp, Homo sapiens
tatcaacatgcttgattgattaactcctgggccaatgggatcatgagggcaggtacacctcctcgctccttacaacctcagtattgtgggtttcatttcttatctagattttgtttactgacaaataataagctacatgactggctggattctactgaaaaaaaaaaaaggaacctttatttatggcttgggttttaggcttagaaagacactttcgcattattttgtatattagcattgtaagtccttttctgtattaatgtaaaccactggaagtggatacagaaatctcctctcaggccctgtaacagaattgactgtacccagataattcttgtggagggatttgttagctagttagccagctagcttttttggtagtcctaataagcttcccccagatctttcttctggtgatacactatgtactccaggagctgccgcctactcattcttcaggagaggtcacatgacccagaactgtacccatactcttggtccaatcagagtttctccctgggatccatatatgcacagtgagaaacagatgccatctccttcctcaaatgttgttgaacctcggctgcttgtggtcatgttctctgccacgtggtgataacctggctggagtaggagaaacaggctagtgctaaaagcaaagtgaaaggctgacagagatgagagctgcagcaggagagaaaaagccacggcagtgttgactgtcttattccagagcccaaggccytgcttcttacagcccctcctttgtttctgtgggttaccctcattgtctccccatttctggattacacaagtctgtgatggatttctgctattcacaaccaaaagaggccttactatcattgcctcgtaaaacagaaatgagagtgatgcaatcaacaattaaatacttacaggtaagggaagaggcctcattttctttattgagactagaattataaaggatagagaaacagaaacagaaaaaaattctctagagtattagattacaacaataactagcatttgtgtagtgctctacagtttttaaagtacttccataatcatttctttcatttgaccctcacaataattctgcaaaatggagaatacagtgtataattatccacatgttgccaacatagcagaatggtgaatggaagtgtttcctgtggttctggaattatagtgaaggctcatggatgaagacaaaggattctgcattttgtgttttatattttgagtccaagggacccccaatttgggggcctagccactttctctacagttttactgggaagggccagttcagagaatccacaaaataaactccaaacccaaagggagtcaagaaaatctcatgtgaatattggggcatctacaagaagtggaagctggcatatcgttccccagctagacatcagtttcaccagcagacctgccttcttgactctaaacagtcagagtacaggaaaggaagatggagagagagaacatggagtgggaaactaatgctcagagaggttactttttcaaggccacaaatagagttagcagctgatctgaggtttgaaaataaccactgatgctcacacagcatgtgtcagatccatggggtaggagtcggccagagacttggtaacagacagattgctggatcccacccctagactctctgattcagttagtttggggtaaggcgcaagactgaatttttcacaagtttccaagtggtgctgatacttctggtccaggaacttagtgggagagaacgactaatctagaccatttcacttcacattctgagcttcttgtacactgtcacactgcatccttttaacaatgca

SEQ ID NO: 37473 - DNA, 1847 bp, Homo sapiens
tatcaacatgcttgattgattaactcctgggccaatgggatcatgagggcaggtacacctcctcgctccttacaacctcagtattgtgggtttcatttcttatctagattttgtttactgacaaataataagctacatgactggctggattctactgaaaaaaaaaaaaggaacctttatttatggcttgggttttaggcttagaaagacactttcgcattattttgtatattagcattgtaagtccttttctgtattaatgtaaaccactggaagtggatacagaaatctcctctcaggccctgtaacagaattgactgtacccagataattcttgtggagggatttgttagctagttagccagctagcttttttggtagtcctaataagcttcccccagatctttcttctggtgatacactatgtactccaggagctgccgcctactcattcttcaggagaggtcacatgacccagaactgtacccatactcttggtccaatcagagtttctccctgggatccatatatgcacagtgagaaacagatgccatctccttcctcaaatgttgttgaacctcggctgcttgtggtcatgttctctgccacgtggtgataacctggctggagtaggagaaacaggctagtgctaaaagcaaagtgaaaggctgacagagatgagagctgcagcaggagagaaaaagccacggcagtgttgactgtcttattccagagcccaaggccttgcttcttacagcccctcctttgtttctgtgggttaccctcattgtctccccatttctggattacacaagtctgtgatggatttctgctattcacaaccaaaagaggccttactatcattgcctcgtaaaacagaaatgagagtgatgcaatcaacaattaaatacttacaggtaagggaagaggcctcattttctttattgagactagaattataaaggatagagaaacagaaacagaaaaaaattctctagagtattagattacaacaataactagcatttgtgtagtgctctacagtttttaaagtacttccataatcatttctttcatttgaccctcacaataattctgcaaaatggagaatacagtgtataattatccacatgttgccaacatagcagaatggtgaatggaagtgyttcctgtggttctggaattatagtgaaggctcatggatgaagacaaaggattctgcattttgtgttttatattttgagtccaagggacccccaatttgggggcctagccactttctctacagttttactgggaagggccagttcagagaatccacaaaataaactccaaacccaaagggagtcaagaaaatctcatgtgaatattggggcatctacaagaagtggaagctggcatatcgttccccagctagacatcagtttcaccagcagacctgccttcttgactctaaacagtcagagtacaggaaaggaagatggagagagagaacatggagtgggaaactaatgctcagagaggttactttttcaaggccacaaatagagttagcagctgatctgaggtttgaaaataaccactgatgctcacacagcatgtgtcagatccatggggtaggagtcggccagagacttggtaacagacagattgctggatcccacccctagactctctgattcagttagtttggggtaaggcgcaagactgaatttttcacaagtttccaagtggtgctgatacttctggtccaggaacttagtgggagagaacgactaatctagaccatttcacttcacattctgagcttcttgtacactgtcacactgcatccttttaacaatgca

SEQ ID NO: 37474 - DNA, 842 bp, Homo sapiens
ctgcgacaagccttcctcttggtggtgtcagatgcaagtgtgggagtagaaatatgtgatgcttcttgaagcccaggctcataactagcacatcctgagttccctacacataccattcaccaaagcaagtcacacagccaagcccaagtcaaggggcaatgaagtgtactctatctatactgaggcagcaacaatgtggatttgaaattgggggtaaaaaaatgaggcagatacttccatgtaccatggacattatgaggattacataaaatgatggctgtatttaccttaaactaataactgtcatgtagtaaacactccataaacagtaaatgttattagtgttattgtgattgaatactgagatagacttggaaaataggaatggtacatttagatgaatcctggtaacaaatcacctgagaacttcaagttcttagggaagaagtgaaacttggaggaagtaaaatttcaagaaaggaaggaattaaaagtaagagagtggggttctcccctttcttccaactagctgctggaaaaacaattttttctggcaygtaacagtttaatataaatctgtcagcaacagttttatattttcccaagtgtttgacacaatatgcctaaattcaggacctggtgatcttttggaggtcaaagcagaaacttgataagcatgaaagagcaagatatgagagcagacagaagaccatgagcagaagctgtgtctttggaattaatgttgcagccacatccagattccaaattatggcaagatccaaggtgtaaccatgaatgggactggatgaagtagaatggagatgaaaaccctgaatgttaca

SEQ ID NO: 37475 - DNA, 505 bp, Homo sapiens
tggagtggggagggaaggagcggacagagccctggggagagagtcagggcaagatcactcaggattgcaggtgtgtagggagtttccatttcatcctgaaaacaaaaggaaagcattgaaagcttctaagaggagaaacaacatgatccctacttacatttgtaaagatgatcactctggctacatgattgagaatggactggaagacagcaagggagacttagcaagagaggacttttagcagttttaaagcaaaggatgcaggtggcagggactaggatggcagcagtagagaaggggagaacttgttggcagaagttgaagttataaaggagatactcattattttaatcttcacaatgaccctgtgaaggagatgtagtgactgcattttaaagatgggaatttgagaatactggttcatgtcccatggatgaaaagrggcagagccatgtctgagactcaggcaacttcccagcctcaactctttcaggaagccctccca

SEQ ID NO: 37476 - DNA, 1115 bp, Homo sapiens
tatcaagctatgaaaagggaattggtatcacacttttcatatatgataactgagggtttgtttttttgcccaagtttgcagagctggtaagttaaaaagtgaggatatgaactcttaccttgctgattctattctctttatcactgcactgtgtagctttcctgaagtagagggtttaaccaaactcagccctgggacacaattcaatatccatctttcagtctttagtgagaataaatacaagaattatccatttaaacagcatgactgtgcttttttaaagaaaaatctgtagttggtactgatgttctgtgccttcctcaaggacccatgtgacatgtttctgcttgggcttatttccaggggggaaatatggctttgcagatagatttgcatatcttctcctgccagaaatttgaaatatggaatccaacaaactccttccatttttgctttagctgccaaggactttagggccaacttgaaatgtggtcatttccttacctcagtcctgatactgtctattcctcctacttcacaaagacccctctttcttttgcaccaaaattatgttgtccactgtgcctttacttagggatttattgcataggatgacagaaatcatatgatgtgtgtgaattagagaagataatcattgccaatcatacccttactatttccagggaaacttctcctcccacagtcttagatgctcagacagccaggtgtggtctgatgtgatcccacctccctggccattgctcattggaccacagctgtgcaccagagccaagaggagtccaaccataggtcagccagcagagtaagatgtgacctgacagatagacctccatagaacccatatgattcttattaactgagtctgtctttggagaacttgaattgcatacacaaagatgtgtttctttgtttttacttgacagtgaggtagaaacaaggagagaagctgagtcatgttaattataaaatacaatttaaagtctcctgytgctgcagtctctagatctgccatcagtctagactcacgctccctgtccagctttgtgaagcctggttctgtttgggtacatatttttccccctgtgaaattctat

SEQ ID NO: 37477 - DNA, 589 bp, Homo sapiens
tcttttagctcagaaattctgctttgggacaggacccagagtggagtcagatccaggtcaagtcactcagaggttgttgatgtgttagacgtgaggtgctgtgagaagcgtggctggacagcatttaaaacaaaccagcgtgtcrgaactcaccaaagatcaggatgctgcccagagctgttgataagaacctagccggaaggggagtcctaggaagatgccggcatcaaccatagagcaaagatctgcaggctggagattttaagaagtttctaaaacttttattgttgttacaataaaagttacataaaactggccaattaatgttagtgtcaccagagctaggaatttctccttagaagctcagagcttgtttctggtggcataagtgaaaatctgtcacattgtcagctctgaatgttcatccttcaagaatgtggctgttccccactctaaatacaccgtaatcattctgtttggtccttaaatgagcaaatcatcttcatgggtttcttaggccaagaaatgattgatcctatatcatgagatcagaaaggcccaggcatgtttttggaaagttcagaatact

SEQ ID NO: 37478 - DNA, 1289 bp, Homo sapiens
tctatctatttatcatctatcacatatctcccgatctctttatctctatttctatataattttagatatatttaatttaggaagtatatagatattttataccatttattcattaataacatttcattcatttcacatatttacacttttacattcagttacaaaaatctcattggattggcaaccctaattcttttggaaaaatatgattgggaasagtaactgtaccagcatttccaaaaaaaattgcattagttaaacattattactgtcagtttgaatttttaaaaattcattgcaaaatcatgacaaaattatttaggactaagtttttataaaattttaaaatttatgctatttatcaatttacatacattttgtacatgctactgtatgaagcatttctcaaacataggagggtgaaatgctacttgtaatggctcattattctccataaaatgaaagtttatcaatataattctcttatggatcattatttgatatcacatttaaagattatttgcctaacctgtggtcataaagattttctcctatgttataggttggataatgtgaagtgactttcagatattaaactagccttgcattcctggaagaaatctcatcactttactcaatttgttaatattttgctgaagatttttatgtcttagcttatgaggaatattagtccatagttcttgtctctctctttctgttattaatgtaatattgcactaaaatggtttagtaactgtttccttcttttctgtttcttagaagagattttgtagaactggtgttatcccttctttaaatgggtgacagtattttctattgaaatcatttgggcctaaatattttacgtttgtccaggagcttttgaaatatgtgtgtaaattatctaatagttataatattcttcatggaatagctttcctgagctttttcctctctagactctccttagaactagccagtttcctggagtcctctatttggttctcttaccagaaatctggggctttagttaccccattcttctgtataattctgcaattgctctgcattcaaaggcaagcagtaagagaacaaaaacaaaaataatataatgagggtccaccccacttgcttggaaccacagtgcctccagaagcagagagaatgagggttgtcccttagagttatggctcctgcaggggcctgtcacagccagtgctggtaccaacagcatgagattgcctaggggctataagtgagagattaaatagagaaaaagaggtaaaaaa

SEQ ID NO: 37479 - DNA, 392 bp, Homo sapiens
  misc_feature (1)...(392): n = A,T,C or G
annnnnnnnnnnnnnnnnnnnnnnnnnnnnnnnnnnnnnnnnnnnnnnnnnnnnnnnnnnnnnnnnnnnnnnnnnnnnnnnnnnnnnnnnnnnnnnnnnnnttactgggatgaacctgggatggagagaagattccaacctccacgtctttttcataaattataatgatcctactttgtctaatgtcacagagtatcaggatgttctatgcctttgctttaaagttttcatatttgtggaacttgaagggttcrtaaatagggactatttgtgaagacctttgattcaggactatttgttacctgtgataaacctaaatatttgtgaatgtctccataatataaccattatttattgaagatacaataaatagtggttccatcatctgtgca

SEQ ID NO: 37480 - DNA, 763 bp, Homo sapiens
tcatgtattttagcaaccttatatgaccttgaccacatggaagcaacattatccaaaccgttttcctatagtgaatgtggaagaatgcaaaatatctgtctgtcccagtcagaatcaagggtgtgtatatagttcataagctcagtgaaatagccaagataatcctggctctttatctgaactagtctgcatacacagtaaattctcaactctgatttattataatgcaactataacattaaaaaaatagagatttgttttatttctaccttcctagtaacccaacacttcctgttttttatggcattgagatttaaatgagacagtgaaagtgaagagctgcatcattagctctcagattgcagagaataygtgctaaatataattcctttaaatagtttaggagcaaagaatcacaatacaactcttttgtgtagaacttaaagtaaaaagaaaaaatccagaaagctaaagtttcaagagctaaactaaagtctgttatataaaagtaataaagtaaaaatataacagtactttaaccccagactcaaattttctaagaataagaaaaacaaaacatatcacaagaatttattttggcctcagttaagaatacagagcatcaaaactagtaaaaataaacaaaaaagttcattatataatgataaaaggatcaattcagcatgaggatataacaatgctaaacatttatgtacccaacactagagcacctagagagacaaagcaaatattattagggaaa

SEQ ID NO: 37481 - DNA, 763 bp, Homo sapiens
tcatgtattttagcaaccttatatgaccttgaccacatggaagcaacattatccaaaccgttttcctatagtgaatgtggaagaatgcaaaatatctgtctgtcccagtcagaatcaagggtgtgtatatagttcataagctcagtgaaatagccaagataatcctggctctttatctgaactagtctgcatacacagtaaattctcaactctgatttattataatgcaactataacattaaaaaaatagagatttgttttatttctaccttcctagtaacccaacacttcctgttttttatggcattgagatttaaatgagacagtgaaagtgaagagctgcatcattagctctcagattgcagagaatacgtgctaaatataattcctttaaatagtttaggagcaaagaatcacaatacaactcttttgtgtagaacttaaagtaaaaagaaaaaatccagaaagctaaagtttcaagagctaaactaaagtctgttatataaaagtaataaagtaaaaatataacagtactttaaccccagactcaaattttctaagaataagaaaaacaaaacatatcacaagaatttattttggcctcagttaagaatacagagcatcaaaactagtaaaaataaacaaaaaagktcattatataatgataaaaggatcaattcagcatgaggatataacaatgctaaacatttatgtacccaacactagagcacctagagagacaaagcaaatattattagggaaa

SEQ ID NO: 37482 - DNA, 1956 bp, Homo sapiens
aaaatttttattcaaataacacattttaagtgtgtttctgaaatcactttggccgggtgcatcgtttcaaatagggaatatacaaaaaataaatagaactcatagaacaagaaaaataagaagaagtaatctaaaagggtacaaccaaagtaactctgattagaaacaattgcccactgatgataccaacaaaaaattatacaacatgctctttgctattcaataaaacttctaaactattatccacaagtatgcacatctctctcttcctgtcattcatacacatgcacacatatatacacaattttagggacaaggttaaagaaaagaattaagtgaggcaataaaactaaactttagaaatgaattatatatggtagttttcaatgacaaaactgaagacacagaaaacacttaaaatcaaatattcagggttcattatagtgttatcagtaatacatttcaaataataaaatatatgtatttttatttttcattttctttgttatgcatttaagtcactttaaggaacaatcatttttacgattttcaaagcagttattataaacttttagatatattttcacacattcttgtttaaaagagaaacatcacctccatttaagaaaaagtaaatattaacatttactacaaataatagatggcatactgaaatattgaatgataatctacaagtttaaaatttcaaaatgtgggccaggcgtggtggctcacgcctgtaatcccagcactttgggaggccgaggcaggcggatcacaaggtcaggagatcgagaccatcctgaccaacatggtgaaaccctgtctctactaaaaatacaaaaaaaaacagctgggcttggtggtgcatgcctgtagtcccagctactagggaggctgaaacaggagaatcacttgaacccaggaggcggaggttgcagtgagctgagattgcaccactgcactccagcctggcaacaaagtgagactccatctcaaaaaaaaaaaaaaaattaaaaatgtgaacaccaattcacttttaatgagcaatcattttaattatttttaataatagagtaagaaaactttattgaattataaatagcaaaaatatcaaatcatataggtagcacctttaccatatgtaatctaaaaaaaatcaaaatacaaacaactcaaagaattttttaaaaagtgaaaactcttactaaataataaaatattctaaattttttcttactttttcattgtttcaatctgtacttccaattcggttttttctattacaattttctcataatgacttttccaggcattggaagctgaaattgtttcagacaacttggcttcctaaaaaatacataaaagtattcatactataattttaaaacatttttgttttgttcagatctctaaacacaaatacattataaacaggraagcaatcttccaaaaagtatggaacttcaaatatagaaaactatacatgcatgtttatagcagtgcaattcataattgcaaaaatatggaaccagcctaaatgcccaccaaccaatgagtggataaagaaaatatggtatatatccatcatggaatactactcagccattaaaaggaacatctgcagcaacctggatgaagttggagacagctattataagtgaagtaactcaggaatggaaaaccaaatatcgtatgttctcactcataagtgggagctaagctatgaaaatgcaaaagcataagattgatataaaggactttaggaactagggagaagggagggagggaggtgaggggtaaaagactacacattggctacagtgtacagtgctcgggtgacaggtgcaccaaaatgtcagaaataaccactaaagaagttgtccaggtaaccagaaatgacctgtcccctaaaaactattgaaataaataaagtcactgtacaactttgaatag

SEQ ID NO: 37483 - DNA, 585 bp, Homo sapiens
tattagtaagtttcatatttttaaaatttttatttgctattgattttaggcagaactatatcaaagaaaaatatttcragaacaaaaggtagattaaataacataagaagagttgacatttttggctaatttcttagtgatgtcattaagatctctaaattcagatagactgaaactctacttttcaaatgcaacggtttataagtttttatttgacataaattaataatgttgcttttaatatgcataaattatacacagtcttggtttatctgaaggaatttccttaaaaaaagaaaagaaaaggaaacctttctgacatgattatgcaaaagctatcagacattgtcaaactaagacaatcatcttgattatttttggttgtttggaggataagtaaaatccacccagactaaaaagtagctcttgggaggcaagcaatttgattttgtaatgaagtgtgctttctcacaaggtgattataatagagtctgaggggatagggatgaaagccgtggtagattatctttcatttcctaaagtcttttatattagaaagctctgggaatgtggtcaaatggtcct

SEQ ID NO: 37484 - DNA, 585 bp, Homo sapiens
tattagtaagtttcatatttttaaaatttttatttgctattgattttaggcagaactatatcaaagaaaaatatttcgagracaaaaggtagattaaataacataagaagagttgacatttttggctaatttcttagtgatgtcattaagatctctaaattcagatagactgaaactctacttttcaaatgcaacggtttataagtttttatttgacataaattaataatgttgcttttaatatgcataaattatacacagtcttggtttatctgaaggaatttccttaaaaaaagaaaagaaaaggaaacctttctgacatgattatgcaaaagctatcagacattgtcaaactaagacaatcatcttgattatttttggttgtttggaggataagtaaaatccacccagactaaaaagtagctcttgggaggcaagcaatttgattttgtaatgaagtgtgctttctcacaaggtgattataatagagtctgaggggatagggatgaaagccgtggtagattatctttcatttcctaaagtcttttatattagaaagctctgggaatgtggtcaaatggtcct

SEQ ID NO: 37485 - DNA, 585 bp, Homo sapiens
tattagtaagtttcatatttttaaaatttttatttgctattgattttaggcagaactatatcaaagaaaaatatttcgagaacaaaaggtagattaaataacataagaagagttgacatttttggctaatttcttagtgatgtcattaagatctctaaattcagatagactgaaactctacttttcaaatgcaacgktttataagtttttatttgacataaattaataatgttgcttttaatatgcataaattatacacagtcttggtttatctgaaggaatttccttaaaaaaagaaaagaaaaggaaacctttctgacatgattatgcaaaagctatcagacattgtcaaactaagacaatcatcttgattatttttggttgtttggaggataagtaaaatccacccagactaaaaagtagctcttgggaggcaagcaatttgattttgtaatgaagtgtgctttctcacaaggtgattataatagagtctgaggggatagggatgaaagccgtggtagattatctttcatttcctaaagtcttttatattagaaagctctgggaatgtggtcaaatggtcct

SEQ ID NO: 37486 - DNA, 551 bp, Homo sapiens
tgaagatcatgaggtgaaatggggagcctagaactacttcagcagaatcatagaatttttctttggcagttaycatcctaacataagagaaatacgcctttgtaatcagatcaagggtaaggctatcataagtaaggggtatttgatggttgccctgaagttaagttaaaatcccaagagcttgtccagattgctcatgcacaaatagatgaatggcaatttgtgcttatggttgtctagagaaagaggctgttgaagcatcttctttagagtacaaaggtcctattcacgtttgagcttacacaatagagcatattgtacagaggacttagtcaattcataaataggtgtagcaatctcagaaaaaaaatggcagtcattcacagcaacactcaaatacagaaaatttttcacttgtcatactatgaagggtgtagataaatagttattggataactatttttctatcaggagagaattttttttctctcttcagataggtcattccctaaataattaactgtgttctgtcaaaattgtaatttaacttt

SEQ ID NO: 37487 - DNA, 551 bp, Homo sapiens
tgaagatcatgaggtgaaatggggagcctagaactacttcagcagaatcatagaatttttctttggcagttatcatcctaacataagagaaatacgcctttgtaatcagatcaagggtaaggctatcataagtaaggggtatttgatggttgccctgaagttaagttaaaatcccaagagcttgtccagattgctcatgcacaaatagatgaatggcaatttgtgcttatggttgtctagagaaagaggctgttgaagcatcttctttagagtacaaaggtcctattcacgtttgagcttacacaatagagcatattgtacagaggacttagtcaattcataaataggtgtagcaatctcagaaaaaaaatggcagtcattcacagcaacactcaaatacagaaaatttttcacttgtcatactatgargggtgtagataaatagttattggataactatttttctatcaggagagaattttttttctctcttcagataggtcattccctaaataattaactgtgttctgtcaaaattgtaatttaacttt

SEQ ID NO: 37488 - DNA, 534 bp, Homo sapiens
tattaggaggtgaggccttttgggatatgattagttcatgagactaatatcaccacgaatggtgttagtatccttataaaatatgccaaagggagctcatctgccccttttgccataagaagacacattaagaaggtaccatctatgaactagaaagtggcccctcaccagactcccaatctgtaagtgatcttggactccccagccyccagaactgtgatcaataaatatctattgtttataaactacccagtccagtttatggaattgttatagcagaccaaacaagccaaggtaatgcttcatggtccatttgtattcactgtgtggtttatatgatttatatttttaaaaggctgtctaaattataatttactaaaagcagttctctgacaaacatccaaagtcctctttccctagccatcaacaacctagaactatgcatttcccatagaaagaattaatcttaaggcctgtattagcatgaattaacaattgaagaaatgttcaatattccttatttgctaggccaca

SEQ ID NO: 37489 - DNA, 537 bp, Homo sapiens
  misc_feature (1)...(537): n = A,T,C or G
cnnnnnnnnnnnnnnnnnnnnnnnnnnnnnnnnnnnnnnnnnnnnnnnnnnnnnnnnnnnnnnnnnnnnnnnnnnnnnnnnnnnnnnnnnnnnnnnnnnnnttaaatgttttaaatacattttatagataagtactctgttttataaaatagttcaataatctgatttaatagacaaaataattctaagtaccaaataactgttaaattcaacagattaaaatggccattcatagaaatttatgacttagtctaaaaaattcacaagtttaaatgaattattcaatgcattttacactggagttgtaaggctgttattgtaatagcccgtgttcttatatatcttaatacataaaccacctaatagtcacagagtctttrttaatatgatgaattaaaaccatgcttcttattttcttaagctttcccttggattatagagtagaggaaagccaccattgaaaggtaagaaaaatagtttttggttttgttttgttttgtttacggtgcctcccttgccccaagcttgcacagataa

SEQ ID NO: 37490 - DNA, 715 bp, Homo sapiens
tatattgtatatttcaaaattgatacaagatttttaatgtccccaaagcaaataaatgataaatgtttgatgagtatcctaaataccttgatgtgatcaatacacattgtatgcatgtataagaagaccacatgtgccccataaatatgtataatcattatgtgtcaataaaacatttaaaaaaggattctgaggtatagcagaacacctttttaattgaaaaagacaaaaaaaaaaaagaaaaagagagacaataatttctgcttatttaacctataatccagtggtaaaaggctgtcagcaataacttgggaggtcgaggctgaaatgagctgtgatcacaccattgcactccactccagcctgggcaacagagaaaaactctgtctcaaaaaaaaaaaaaawaaatacagtcaataaatgaaatgaatgaataaaaatggaggcagagggctgtgagtgctatgaaaaaaaggcagaaaaaaatgggagatttgatgggaagtttgcaattttagatagcttggctctactacttttctgttgctctcaaagattactaattagtggcttaaaccaaaaattcaatatctaatatttcttcaagtaataagtttgatacaagtctcacttggctaaaattaaggtgttgccagagctttattcctttctgagggctccaggagagaatccattttcttcccttttccatcta

SEQ ID NO: 37491 - DNA, 493 bp, Homo sapiens
  misc_feature (1)...(493): n = A,T,C or G
tgtgactcatttaaattcaacagggtgtattcatcactataagaaaaattgtgtttttttcccacttgaagcaagagctgttaaaaataagttttgttatatggtttattaatttattacacgtcaacagaacacaaccccattgtaagataaggggcatttgtacctaaaaatgattatgcaaaaaaaaatccagacacaatttgaaacacatagcatgctaaaataaaaatagaagtattatgacatgtagtaaatggattttgtactaatttagattagaacaactctttatcaaaatgagatttcagctgaggtctacatttttttgccaaagtcaattggaaaccatctgtaaaggctttgtcaaaaaraaaaaaaacttaatttacattttcanaaacaagcttttcttataaagaatatctatagngnntggcctgtgtgcngnngngtntnnccggttcgttcgnnggntnttnctngtttgtgt

SEQ ID NO: 37492 - DNA, 1342 bp, Homo sapiens
tacttttcactgaagtgcttcttcaaggttcaaggtctgcacgtgagaatctgtcccatgtataagtatcagtagagttcctcagaaatgtttcctttggtaaaaggatttgtagatttcaggatgtagggaaatgcctggatgtccaggcataagtttgctgcaggggtggggtactcatggagaacctctgctagggcagtacaaaaaagaaatagtggatcacatttatattacccacagtttactractactgatccactgcaacaaagttcattcttgaggttcaaggtctgcacatgagaatctggcccatgtatcaatagagttcctcagaaatgttttctttggtagaacattgcacatttagtttatctcaattaaagaataaagaaccaacaagacaaggtatccctctcaacccaaatacaatggtggaacagaaattgaataatcactatagccactcccactcaaaagtgggagaggaatggctgacatctagaagatacaaacattcatggcacaactgtgcagagatggccggtgaaatcgtttcgtgagcctgctgttggcctttagaagtctgagggtccaaagatcccctttaattttgcactgtttctgttccttctagttcaagcttaaatagctctatataacatttttgtgggtcttatgaattaattggttattcactccattagacaaaagacacattaaaaatctccaacataagactttctctgccttgaatttcctgtaagggtgattaggacacttttcttaatatttcagatgcacttcagtgaaaagtatgaggtatgctgactaataattaatgaatattttgtctaactgaatattttcgaggcattaatttggatttttctgtggtctttgccaatgatattatatttacatactgaatttaacttttcctctgaagtccctttttatttgagaaacttgaataggagagaataaaaaataatttaaattttaaacccagaaagctgtatcttattaatatgattttaatttttgcttaaattcttaaaaatatttattaaattttaacctcatgtatctccttcttaattttactataggcagtcagttgaaacaaggtggcatctccaacactctacctagaaatacgtgaaacattgagcatgctaataggttactatggcgcatttttcatagtctgtaaaccaatgttggcgtgtcattattaactcaaggttatactgatttacaactgaatattgatgttagaagtccctctatatatttatgaaatgtttatgtgtgtaatctttctttctcactaatgaa

SEQ ID NO: 37493 - DNA, 523 bp, Homo sapiens
cacagagagcacaaatagtaggcttttggcattacaccttaaggtcttagagtcaaaagctctattcttgttcagtgataggttttaaaatgaaagaagaggatttttgttttcaatgacaattgtcaagggatattaaagggccttgaaaatccagagataggcacccttacctgtcttgtaacataacacaactagcattagatctaataactcaggctttagctcaaggctttgtgagtactgtcacaaggatccctactgaaaatcgtttaagcaagaacacctacatcctggytagtacctagcagaatattaaaatagcaaatattaaaataataagcaaagctgtgtttgcaagggaaagccagataacagtgtaacagaaagctgagtggagtctatggcagggatggatcaggtggacccaggttagataaccatatacctttcaccatttttatttttatatttttatatggaacttttatcatgatataagatggaacattaattttatttt

SEQ ID NO: 37494 - DNA, 539 bp, Homo sapiens
tgaattaccaaattatattgaatatgtcctgtattggtgttactccctgatatcacaagacaagacaaattgcaatccagggatttgactaatgaatgtatcaaaatagttatgatgacattggaaaagaaatargatctcaatattttgagattttaagccagagacacatgtacattgataatggcacaaaattgtctgtattcatgactcagtccttgaaagtttgtattacaaaatgaacaatacaatcaatcaactatttctagtcactttatatttgattcttctgtcacaatggctttcctcctcacttctataactcaaattggagaacgactgtctgcagttgtaatatgtaaaaaatagtccacattttgatggatccttattacttattaaatgtttaatagactgcagggctcacgctaagatctgtttcatttcccttggtgcatatagtattacttgatagcggaaggatactatccatttttggaaagttttataaatagtattagggaaaacttcaagatact

SEQ ID NO: 37495 - DNA, 539 bp, Homo sapiens
tgaattaccaaattatattgaatatgtcctgtattggtgttactccctgatatcacaagacaagacaaattgcaatccagggatttgactaatgaatgtatcaaaatagttatgatgacattggaaaagaaataagatctcaatattttgagatwttaagccagagacacatgtacattgataatggcacaaaattgtctgtattcatgactcagtccttgaaagtttgtattacaaaatgaacaatacaatcaatcaactatttctagtcactttatatttgattcttctgtcacaatggctttcctcctcacttctataactcaaattggagaacgactgtctgcagttgtaatatgtaaaaaatagtccacattttgatggatccttattacttattaaatgtttaatagactgcagggctcacgctaagatctgtttcatttcccttggtgcatatagtattacttgatagcggaaggatactatccatttttggaaagttttataaatagtattagggaaaacttcaagatact

SEQ ID NO: 37496 - DNA, 657 bp, Homo sapiens
aaaacaaaacaactgcaattgcatcatcttttgcaaacaactcaatctctttcattttcatttacctcatctgtaaaaggggataataatacctgtatatccaaattagaagtaaagtaaattatatgtgtatatatatagctttcaataagaattttcacatagaaagtactcagtattttgtttttataatttttttatatctttttatatctttttataaagatagcaatggtactatctgtttttgttttgtgaatatcactgcaccttagcctttgatctctctgagaactagaccttagattatgatcggtctcctacttctgttcccagagagaactactattaagagttacttttcaaaatattgtctctgaacatatatgcatatgtacctaaaatatcttatagaaattaagtaacrgtatgctcagttgtgggccttgctttttcttcactcgatgtgtatcttgaagatctttccatataagcacacataattctattattctgaattactgcataatatgccagtacattaatatagcatactttattattattattgagagagacaaggtctcaccctgttgcccaggctagagcacagtgtgtaatcacagctcactgcagcctcaatctcccaggctcagg

SEQ ID NO: 37497 - DNA, 657 bp, Homo sapiens
aaaacaaaacaactgcaattgcatcatcttttgcaaacaactcaatctctttcattttcatttacctcatctgtaaaaggggataataatacctgtatatccaaattagaagtaaagtaaattatatgtgtatatatatagctttcaataagaattttcacatagaaagtactcagtattttgtttttataatttttttatatctttttatatctttttataaagatagcaatggtactatctgtttttgttttgtgaatatcactgcaccttagcctttgatctctctgagaactagaccttagattatgatcggtctcctacttctgttcccagagagaactactattaagagttacttttcaaaatattgtctctgaacatatatgcatatgtacctaaaatatcttatagaaattaagtaacagtatgctcagttgtgggccttgctttttcttcactcgatgtgtatcttgaagatctttccatataagcacacataattctattattctgaattactgcataatatgccagtacattaatatagcatactttattattattattgagagagacaaggtctcaccctgttgcccaggctagagcacagtgwgtaatcacagctcactgcagcctcaatctcccaggctcagg

SEQ ID NO: 37498 - DNA, 815 bp, Homo sapiens
aaaattcagataaattcaatagaaagcttccacaagccttagtgacaaatacatgtgaagtatttggctttctttggattatggtaacattttttgccaggcctggctgcttgtaatagttttgaagtcctaaagtcataatgcagtgcaatgtcacatattaaggttagaagacaattctccatgacatttcatttctgcattttgtatcagcttttttcctatactaaattccaagtacgtttatatagcaagcagctttggaagayagaaagagtctctctccagaacagaggacaaatttgtttactggccagtttagaagaaataatatcttcctccaaaacagaaaaaaaaatgtagacaggtttgctaatagtcatttttaaaagattagggtttcttaagctcagagttcttcagctgtgacataactcaactgtgtgcaaatccccctgagcccagctcaggttcaactccgtggagcttggtgggtaagaggaactgatgcactgcctgctctgtgatgcataatagagtaataaactcctttttctctaacccaggagcttcatgtctcctgtcatcatctaggaaagtggtatcttgcaatcggtaaaatctcagacccagcacagttcttgaaatgtaaaatgactcttcttttactttcatttcttgggaagcatgtttttattatctgtcactaccacacattcttacagaactttctgagagttcctccagtaatagaagggcttatgaatgctcatggaagtggataaaaatgtatcgtaagtggagatgtttcttaa

SEQ ID NO: 37499 - DNA, 1335 bp, Homo sapiens
ttcccttaataactcgtcttctattttgaccactgtagtcatgacatttacatagtgtatgtgtctctttcattttgggataagaaaattagaaacctcgtgatttcctttttattcagtaattctatccgggttttgaattatgctttgcatattataaaccctggctctaaatagaaagtgctaaaaaattaaatttgtaccacttcactcatactgcctcatcctcactcccaaactttgcctttcatgaactctaaagtgttcatgttcatgctccattatttttatatttcagtgcccgctagtctttgactactgaaacctgacagtgcaaaccaaatttaaatgtaagggttgttgatccagagacagatgctggccatagcaggccgccacctctactgtttcttttaggggaatgctctccacaggctggctatggtcacagcccctgctcaagcctatcccatagaaatgctctcttgtaacattacctcctgctctgaaagagaaagaggtggatagcctcagatttatagctggaatctctaatttaatcaatcatcacaacgtaagtttttttttttttttttttttgagacggagtcttgctctgtcacccaggctggagtgtagtggcgggatctcggctcactgcaagctccgcctcccgggttcacgtcattctcctgcctcagcctccgaaatagctgggactacaggagcccgccactacgccaggctaatttttgttttgtatttttttgcatttttgtatttttttaggggtttcacagtgttagccaggatggtgtcgatctcctgacctcgtgatccgcccgcctcggcttcccaaagtgctgggattacaggcgtgagccaccgcgcccggcctgtttctttattaaaataaaaaaagaagactaatttgtgcttgtacagttgcattaaggattgagattatatatatgtaaatgaacgtgatcctgataaacactaggcttccagtaagtggttaacatcttttgttacatctgttaaaatcctagtcccagatccttggataagagaggtgctatggttttgatttggttattaagtcaacacatctattttaaaggtgttaagcaggaaaagagttttgattacaacattaaaatcacaggcatggagaaggggagctttgaaaaatatcsatgtgtgggtctcacctccacagattctgatataattgagctgggtgctgtgttgggcgttgggaatattaagagccccctgaattatcctaacgtgcagccaaaactgagagccactggtgtagtgtcccatgca

SEQ ID NO: 37500 - DNA, 1335 bp, Homo sapiens
ttcccttaataactcgtcttctattttgaccactgtagtcatgacatttacatagtgtatgtgtctctttcattttgggataagaaaattagaaacctcgtgatttcctttttattcagtaattctatccgggttttgaattatgctttgcatattataaaccctggctctaaatagaaagtgctaaaaaattaaatttgtaccacttcactcatactgcctcatcctcactcccaaactttgcctttcatgaactctaaagtgttcatgttcatgctccattatttttatatttcagtgcccgctagtctttgactactgaaacctgacagtgcaaaccaaatttaaatgtaagggttgttgatccagagacagatgctggccatagcaggccgccacctctactgtttcttttaggggaatgctctccacaggctggctatggtcacagcccctgctcaagcctatcccatagaaatgctctcttgtaacattacctcctgctctgaaagagaaagaggtggatagcctcagatttatagctggaatctctaatttaatcaatcatcacaacgtaagtttttttttttttttttttttgagacggagtcttgctctgtcacccaggctggagtgtagtggcgggatctcggctcactgcaagctccgcctcccgggttcacgtcattctcctgcctcagcctccgaaatagctgggactacaggagcccgccactacgccaggctaatttttgttttgtatttttttgcatttttgtatttttttaggggtttcacagtgttagccaggatggtgtcgatctcctgacctcgtgatccgcccgcctcggcttcccaaagtgctgggattacaggcgtgagccaccgcgcccggcctgtttctttattaaaataaaaaaagaagactaatttgtgcttgtacagttgcattaaggattgagattatatatatgtaaatgaacgtgatcctgataaacactaggcttccagtaagtggttaacatcttttgttacatctgttaaaatcctagtcccagatccttggataagagaggtgctatggttttgatttggttattaagtcaacacatctattttaaaggtgttaagcaggaaaagagttttgattacaacattaaaatcacaggcatggagaaggggagctttgaaaaatatcgatgtgtgggtctcacctccacagattctgatataattgagctgggtgctgtgttgggcrttgggaatattaagagccccctgaattatcctaacgtgcagccaaaactgagagccactggtgtagtgtcccatgca

SEQ ID NO: 37501 - DNA, 536 bp, Homo sapiens
atgctttgatgtcttttaagtaattaatatcataatatattgttgcaagtacaaaaagcttgcatttcctagaacactgctattgaagagatctttttgatcttcattcatttttaattactagagttgtgttgattttcagtttttgcaatggaatatcacacaaagcacactagtgcataaaggaatgggtaaagatcccagtgcactcttcttytgattttacaattgatatttttaagtactatgttagataaaatactaaagcctccagcaggagagtgagtgtactaaaataattctatataaagatattgattaaaatttttaatagagagtataaggcatcagaacatttgagtattttatttaaagatccatagccaaataagtagaacttatttttataactttatggcctttaataacagtataactatttaactatgaaaacctgttcacctgcccagcatgaatgctatcctttctgccataagcatcttccctttccaaagtttacacatttattcttttaa

SEQ ID NO: 37502 - DNA, 621 bp, Homo sapiens
ttttttagagatggggatctcactatgttgaccaagctggcgttgaactcctggcctcaagtgatcctcccatctcagtctcccaaagtgctgggattacaggtatgaaccactgtgcccggcctttgtttttgtcaagtttttgagttgtaagagttctttatatactcgatattaagcaagaccctgtctcttaaaaaaaaaaaaaatgatacggccaagcgcagtggctcatgcctgtaatcccagcattttgggaggccgaggcgggtgaatcaccagaggacagaagttcgagaccagcctggacaacccggtgaaaccccgtctctactaaaaatacaaaattagccgggtgtggtggygcatgcctgtgatcccagcaacttgggaggctgaggcagggagaattgcttgaatttgggaggcagaggttgcagtgagccgagatcatgtcactgtactccagcgttggacaacaagatggaaactccatctcaaaaaaaaagagctattagtcccttaccagatatatgatttgcaaatattttcttacattctgtaggttgtcttgtcttgatactgtacctcattctttttatgctcttttattttttgttc

SEQ ID NO: 37503 - DNA, 621 bp, Homo sapiens
ttttttagagatggggatctcactatgttgaccaagctggcgttgaactcctggcctcaagtgatcctcccatctcagtctcccaaagtgctgggattacaggtatgaaccactgtgcccggcctttgtttttgtcaagtttttgagttgtaagagttctttatatactcgatattaagcaagaccctgtctcttaaaaaaaaaaaaaatgatacggccaagcgcagtggctcatgcctgtaatcccagcattttgggaggccgaggcgggtgaatcaccagaggacagaagttcgagaccagcctggacaacccggtgaaaccccgtctctactaaaaatacaaaattagccgggtgtggtggtgcatgcctgtgatcccagcaacttgggaggctgaggcagggagaattgcttgaatttgggaggcagaggttgcagtgagccgagatcatgtcactgtactccagcgttggacaacaagatggaaactccatctcaaaaaaaaagagctattagtcccttaccagatatatgatttgcaaatattttcttacattctgtaggttgtcttgtcttgatactgtayctcattctttttatgctcttttattttttgttc

SEQ ID NO: 37504 - DNA, 525 bp, Homo sapiens
tttctctaagtcatytttagtgtgcttttttttttttgcatgttgaaatattttgcatcttggtttgcttaagtctctaccccactggcattggtaacatatgctttgaactctgggttttctattttaagtacccaaatatctcttcattcttacttttattttataaaatgtggtagttacatatactgtatatgagaagcatatgtgtacagaccctctgaaggaagaggactgctcctgcaggacccaggagacaccccaaatattgttgagtgccccaactgcggaagtgggaaagggagaatcttctctcccgaacacacaccccccactggagagactgaaggtctgtttgcaggagaagtttccaaccctacctggagctgagtcaagttagagagcagagcaaaatacagggtacagcaagcagtgggaaaggccctgggagctcgctgcgttcccaagcaggccattcctgcctggcaccacggggatccactgggagggcagtcagaggagcag

SEQ ID NO: 37505 - DNA, 469 bp, Homo sapiens
aagaagggcagagaaaattggtatgatgagagaaaaagtcaaaagatgacacagggagaatcagagatgagcatttgttttctttacacagaggcagagaaaagaggaactgcttccttctcagtgatgttcatgtccttgttctgggctctggtgaggcccagatacaccactggcaatggctttccwgtgatacccaggtgtccttctgctaaattttctctttctggatgttctactttgagttggcctctgttgaattcaatcaaatacccatttgctaaggcggtagtactccaagctgttggtctgtgtgatttggcttgatcaatttccttctgtgaaatatcatactactgacttctacacttttcagttatactttttcttcatgttccctctcatgtttctaggaccatttaaaactaagaggaaaggtacattctctattctccaaattatcaaaaca

SEQ ID NO: 37506 - DNA, 1123 bp, Homo sapiens
cagcttttttttttttttttttttttttttaaatcctttgtaagaatcactgcatggtccataaggaaagagaaacatgagtgcctcgtgggcwtggggtagctgagcaggtggcttgtaccctgggagggacaagctcccttgtgctagcctcacagaggagcactgaaatccagtcccgcaaaactgccagattaccacgtgaggagccctcaggtcactcttggaaggtggaaatcacaaactctaaaccaatgaatgtcaggggtcttctggactggaaagtagaaaaagggaaaaaaatctgttccataagaaactgatagctaggtttgggagtaagaacggatgatgagagaatggagctggaggaatcttccactgtatgaccctctatgcttttagaatttagagccacatgaatatatagcgtatgaacagaaaacctctcactgtcgtaacaatccacccatactaacatgtgggtgaatttatgaaatattattcttctggactggttacaaaggcacccaggaaacaaaacgacttctctgaaatagcctttgccaatgagatttagtcagctgctacctctgtccatctctgccaccctaactcgctccctcacaccctgacagccttatttattagcatgtttcttttatcataggtttaacttttttcatctgcaaagttataaatgaaaacactttaatattaaatcactttccttctttgaatttataaaacagtctctcctaaaggcttgactaactagatttctaaaaacacttatttactaataagctgtcataattcccctataatgtaaagaaaactggtaagaaatgactacaaagcagacaaaaggaagtaacaacacacacacacacacacacccttcaaaaatggcagcataaacaacagccatgccgggcacagtggctcacgcctgtaatcccagcactttgggaggccaaggcaggtggatcacttgagcccaggagtttgacaccagcctgggaaacatgacaaaactctgccgttacaaaaaaatacaaaagttagctgggtgtggtggcacacgcctacagtcccagctacttgagaggctgaggcggga

SEQ ID NO: 37507 - DNA, 1123 bp, Homo sapiens
cagcttttttttttttttttttttttttttaaatcctttgtaagaatcactgcatggtccataaggaaagagaaacatgagtgcctcgtgggcatggggtagctgagcaggtggcttgtaccctgggagggacaagctcccttgtgctagcctcacagaggagcactgaaatccagtcccgcaaaactgccagattaccacgtgaggagcmctcaggtcactcttggaaggtggaaatcacaaactctaaaccaatgaatgtcaggggtcttctggactggaaagtagaaaaagggaaaaaaatctgttccataagaaactgatagctaggtttgggagtaagaacggatgatgagagaatggagctggaggaatcttccactgtatgaccctctatgcttttagaatttagagccacatgaatatatagcgtatgaacagaaaacctctcactgtcgtaacaatccacccatactaacatgtgggtgaatttatgaaatattattcttctggactggttacaaaggcacccaggaaacaaaacgacttctctgaaatagcctttgccaatgagatttagtcagctgctacctctgtccatctctgccaccctaactcgctccctcacaccctgacagccttatttattagcatgtttcttttatcataggtttaacttttttcatctgcaaagttataaatgaaaacactttaatattaaatcactttccttctttgaatttataaaacagtctctcctaaaggcttgactaactagatttctaaaaacacttatttactaataagctgtcataattcccctataatgtaaagaaaactggtaagaaatgactacaaagcagacaaaaggaagtaacaacacacacacacacacacacccttcaaaaatggcagcataaacaacagccatgccgggcacagtggctcacgcctgtaatcccagcactttgggaggccaaggcaggtggatcacttgagcccaggagtttgacaccagcctgggaaacatgacaaaactctgccgttacaaaaaaatacaaaagttagctgggtgtggtggcacacgcctacagtcccagctacttgagaggctgaggcggga

SEQ ID NO: 37508 - DNA, 1123 bp, Homo sapiens
cagcttttttttttttttttttttttttttaaatcctttgtaagaatcactgcatggtccataaggaaagagaaacatgagtgcctcgtgggcatggggtagctgagcaggtggcttgtaccctgggagggacaagctcccttgtgctagcctcacagaggagcactgaaatccagtcccgcaaaactgccagattaccacgtgaggagccctcaggtcactcttggaaggtggaaatcacaaactctaaaccaatgaatgtcaggggtcttctggactggaaagtagaaaaagggaaawaaatctgttccataagaaactgatagctaggtttgggagtaagaacggatgatgagagaatggagctggaggaatcttccactgtatgaccctctatgcttttagaatttagagccacatgaatatatagcgtatgaacagaaaacctctcactgtcgtaacaatccacccatactaacatgtgggtgaatttatgaaatattattcttctggactggttacaaaggcacccaggaaacaaaacgacttctctgaaatagcctttgccaatgagatttagtcagctgctacctctgtccatctctgccaccctaactcgctccctcacaccctgacagccttatttattagcatgtttcttttatcataggtttaacttttttcatctgcaaagttataaatgaaaacactttaatattaaatcactttccttctttgaatttataaaacagtctctcctaaaggcttgactaactagatttctaaaaacacttatttactaataagctgtcataattcccctataatgtaaagaaaactggtaagaaatgactacaaagcagacaaaaggaagtaacaacacacacacacacacacacccttcaaaaatggcagcataaacaacagccatgccgggcacagtggctcacgcctgtaatcccagcactttgggaggccaaggcaggtggatcacttgagcccaggagtttgacaccagcctgggaaacatgacaaaactctgccgttacaaaaaaatacaaaagttagctgggtgtggtggcacacgcctacagtcccagctacttgagaggctgaggcggga

SEQ ID NO: 37509 - DNA, 549 bp, Homo sapiens
ataaaatttaattagaaatgaaaaaagaaaattctacaacttgaaactagatagaagrtagatcagaaacaaaaataggagtaaagtgtgactttcttctcactgtttgattattatagaggcatttttatttcattaaaatcttatatttctggggctagttaatgttatgatattttatttttaaatagttttattttatttacttcagttaatttgtaatttttgaggatgcattgtaggtgtatatacttatggggttcatgagatgttttgatgcggtctcgcaatgcataataatcacatcatagagagtgggatacccacccactcaagcatttattctttgggttaaaatgtgattattccttcttagctagtttaaaatgtacaattacattattattgaccagagtcatctcgttgtgctatcaaataatatgtcttatttattctatttttttgtacacgttaacagtccccacctttcccccagcctccactgtctttcttagcctctgaaaaccatccttctgctctctatgtccg

SEQ ID NO: 37510 - DNA, 549 bp, Homo sapiens
ataaaatttaattagaaatgaaaaaagaaaattctacaacttgaaactagatagaaggtagatcagaaacaaaaataggagtaaagtgtgactttcttctcactgtttgattattatagaggcatttttatttcattaaaatcttatatttctggggctagttaatgttatgatattttatttttaaatagttttattttatttacttcagttaatttgtaatttttgaggatgcattgtaggtgtatatacttatggggttcatgagatgttttgatgcggtctcgcaatgcataataatcacatcatagagartgggatacccacccactcaagcatttattctttgggttaaaatgtgattattccttcttagctagtttaaaatgtacaattacattattattgaccagagtcatctcgttgtgctatcaaataatatgtcttatttattctatttttttgtacacgttaacagtccccacctttcccccagcctccactgtctttcttagcctctgaaaaccatccttctgctctctatgtccg

SEQ ID NO: 37511 - DNA, 549 bp, Homo sapiens
ataaaatttaattagaaatgaaaaaagaaaattctacaacttgaaactagatagaaggtagatcagaaacaaaaataggagtaaagtgtgactttcttctcactgtttgattattatagaggcatttttatttcattaaaatcttatatttctggggctagttaatgttatgatattttatttttaaatagttttattttatttacttcagttaatttgtaatttttgaggatgcattgtaggtgtatatacttatggggttcatgagatgttttgatgcggtctcgcaatgcataataatcacatcatagagagtgggatacccacccactcaagcatttattctttgggttaaaatstgattattccttcttagctagtttaaaatgtacaattacattattattgaccagagtcatctcgttgtgctatcaaataatatgtcttatttattctatttttttgtacacgttaacagtccccacctttcccccagcctccactgtctttcttagcctctgaaaaccatccttctgctctctatgtccg

SEQ ID NO: 37512 - DNA, 549 bp, Homo sapiens
ataaaatttaattagaaatgaaaaaagaaaattctacaacttgaaactagatagaaggtagatcagaaacaaaaataggagtaaagtgtgactttcttctcactgtttgattattatagaggcatttttatttcattaaaatcttatatttctggggctagttaatgttatgatattttatttttaaatagttttattttatttacttcagttaatttgtaatttttgaggatgcattgtaggtgtatatacttatggggttcatgagatgttttgatgcggtctcgcaatgcataataatcacatcatagagagtgggatacccacccactcaagcatttattctttgggttaaaatgtgattattccttcttagctagtttaaaatgtacaattacattattattgaccagagtcatctcgttgtgctatcaaataatatgtcttatttattctatttttttgtacacrttaacagtccccacctttcccccagcctccactgtctttcttagcctctgaaaaccatccttctgctctctatgtccg

SEQ ID NO: 37513 - DNA, 1608 bp, Homo sapiens
gggcgcacgcgcgcgccgacggggcgacgccacgcggggaggacgggctctccccgacgccgacgcccgggacggacgcctcggggaagggccgcggcaggcccgggaagcgaggcgcacccgggggacgcgccgacccggttcggaagagcgggccgggagaagacgagagaccacgggcgaggccggggcgacggggaaggcgcgagaaaggcggccggcggggaaggggacgccacggggacccctcgagcgcggccgaccgcrgccgggacacacgcgcggggcctcaccgccgccggcggcaccgcgcggcacccggggcggccgaccggccctcggcgatccccgcggctccccccaccaccgccgccgccgcagtcgcggccggtcccccggaaccgtctcctcccccgcacgcgccgcaggccgacccccggaaccctccgggaagcccaccgggccccacgcggggcgccaccgacccggtccccaaggcgcgcgccgggggacgcggacgccgggccgatcagtggccggcggcggcgccccacgaggcggtgccgggttcggtcccaggcggggccaccaacggacgtgaagccggtgagccgctcggggggaagaagaggatcggcgggcggcgggcggggaagagggcacagacgggcgagggccggggaccgcgagggcaagggcacccgggagcccgcagaggcggcggctcggggagaaacctcaggcacggccgggccaccaggaaaacacggccgcgggatcccaccgccacagacacgagggcggtcccgcggcgccccgcctgggacgccggacggccctcggcccccaccgagaaccgcctcgcgagccccggggccccgccaccgggggccccggagcgaccgcagccacgaacccgacacgccaccaccaccgtcgctcgtgattctcgtccatcctccgacccggtcccgctccgggagaccggcgcgcccccaccgtgggacgctttcccagggccaggcgggcccgaccccgtgccacgcaaacgcggtcgtcggcaccggtcacgactcggcacgggagcgggcggagagccgactcgcggcggagggggtcacgcgccggacagagcgccgggcgcgcacacccaccgcccgccggccgccgcgtcccaacccgctgggacgccgggcccggcccggcgggatcctcccccgactcggaagggggaggcgcgggccacagtaggcgacgagccgcactcggccaccaccgcggtggccggcggaaccctcgcttctcccccccaaccccgtcgagggggaagcggaggagggtcctctgcgagcgggtcgctacggcagcgctaccataacggaggcagagacagaggcggcggcccgggggatccggtacccccaaggcacgcctctcagatcgctagagaaggcttttctcaccgagggtgggtcacactccccccacccgccagccgctcctcctcgggcccgcagaggcgccgagggacgcctggggaagggagggggccctgcggtacgaggaaacacctgcgcgcggccacctcgagcgttcgcgttcagggcg

SEQ ID NO: 37514 - DNA, 1608 bp, Homo sapiens
gggcgcacgcgcgcgccgacggggcgacgccacgcggggaggacgggctctccccgacgccgacgcccgggacggacgcctcggggaagggccgcggcaggcccgggaagcgaggcgcacccgggggacgcgccgacccggttcggaagagcgggccgggagaagacgagagaccacgggcgaggccggggcgacggggaaggcgcgagaaaggcggccggcggggaaggggacgccacggggacccctcgagcgcggccgaccgcggccgggacacacgcgcggggcctcaccgccgccggcggcaccgcgcggcacccggggcggccgaccggccctcggcgatccccgcggctccccccaccaccgccgccgccgcagtcgcggccggtcccccggaaccgtctcctcccccgcacgcgccgcaggccgacccccggaaccctccgggaagcccaccgggccccacgcggggcgccaccgacccggtccccaaggcgcgcgccgggggacgcggacgccgggccgatcagyggccggcggcggcgccccacgaggcggtgccgggttcggtcccaggcggggccaccaacggacgtgaagccggtgagccgctcggggggaagaagaggatcggcgggcggcgggcggggaagagggcacagacgggcgagggccggggaccgcgagggcaagggcacccgggagcccgcagaggcggcggctcggggagaaacctcaggcacggccgggccaccaggaaaacacggccgcgggatcccaccgccacagacacgagggcggtcccgcggcgccccgcctgggacgccggacggccctcggcccccaccgagaaccgcctcgcgagccccggggccccgccaccgggggccccggagcgaccgcagccacgaacccgacacgccaccaccaccgtcgctcgtgattctcgtccatcctccgacccggtcccgctccgggagaccggcgcgcccccaccgtgggacgctttcccagggccaggcgggcccgaccccgtgccacgcaaacgcggtcgtcggcaccggtcacgactcggcacgggagcgggcggagagccgactcgcggcggagggggtcacgcgccggacagagcgccgggcgcgcacacccaccgcccgccggccgccgcgtcccaacccgctgggacgccgggcccggcccggcgggatcctcccccgactcggaagggggaggcgcgggccacagtaggcgacgagccgcactcggccaccaccgcggtggccggcggaaccctcgcttctcccccccaaccccgtcgagggggaagcggaggagggtcctctgcgagcgggtcgctacggcagcgctaccataacggaggcagagacagaggcggcggcccgggggatccggtacccccaaggcacgcctctcagatcgctagagaaggcttttctcaccgagggtgggtcacactccccccacccgccagccgctcctcctcgggcccgcagaggcgccgagggacgcctggggaagggagggggccctgcggtacgaggaaacacctgcgcgcggccacctcgagcgttcgcgttcagggcg

SEQ ID NO: 37515 - DNA, 1608 bp, Homo sapiens
gggcgcacgcgcgcgccgacggggcgacgccacgcggggaggacgggctctccccgacgccgacgcccgggacggacgcctcggggaagggccgcggcaggcccgggaagcgaggcgcacccgggggacgcgccgacccggttcggaagagcgggccgggagaagacgagagaccacgggcgaggccggggcgacggggaaggcgcgagaaaggcggccggcggggaaggggacgccacggggacccctcgagcgcggccgaccgcggccgggacacacgcgcggggcctcaccgccgccggcggcaccgcgcggcacccggggcggccgaccggccctcggcgatccccgcggctccccccaccaccgccgccgccgcagtcgcggccggtcccccggaaccgtctcctcccccgcacgcgccgcaggccgacccccggaaccctccgggaagcccaccgggccccacgcggggcgccaccgacccggtccccaaggcgcgcgccgggggacgcggacgccgggccgatcagtggccggcggcggcgccccacgaggcggtgccgggttcggtcccaggcggggccaccaacggacgtgaagccggtgagccgctcggggggaagaagaggatcggcgggcggcgggcggggaagagggcacagacgggcgagggccggggaccgcgagggcragggcacccgggagcccgcagaggcggcggctcggggagaaacctcaggcacggccgggccaccaggaaaacacggccgcgggatcccaccgccacagacacgagggcggtcccgcggcgccccgcctgggacgccggacggccctcggcccccaccgagaaccgcctcgcgagccccggggccccgccaccgggggccccggagcgaccgcagccacgaacccgacacgccaccaccaccgtcgctcgtgattctcgtccatcctccgacccggtcccgctccgggagaccggcgcgcccccaccgtgggacgctttcccagggccaggcgggcccgaccccgtgccacgcaaacgcggtcgtcggcaccggtcacgactcggcacgggagcgggcggagagccgactcgcggcggagggggtcacgcgccggacagagcgccgggcgcgcacacccaccgcccgccggccgccgcgtcccaacccgctgggacgccgggcccggcccggcgggatcctcccccgactcggaagggggaggcgcgggccacagtaggcgacgagccgcactcggccaccaccgcggtggccggcggaaccctcgcttctcccccccaaccccgtcgagggggaagcggaggagggtcctctgcgagcgggtcgctacggcagcgctaccataacggaggcagagacagaggcggcggcccgggggatccggtacccccaaggcacgcctctcagatcgctagagaaggcttttctcaccgagggtgggtcacactccccccacccgccagccgctcctcctcgggcccgcagaggcgccgagggacgcctggggaagggagggggccctgcggtacgaggaaacacctgcgcgcggccacctcgagcgttcgcgttcagggcg

SEQ ID NO: 37516 - DNA, 3211 bp, Homo sapiens
gggggcgggaacgacacaccaccgttcggcctcgggcacctgagggacaacccggagcgctccaggagcaccgcaagggcccaggcggagccgacgctcgcgcaaaccccccccgagagggcagcacgacgggccggcgggacggcacccccaccgccgcggaggggggccgcccgcaagtcgacaaccactggaggcgacagcgagggctgtctgccgcgtcagaggaccccgccggcccgcacccgcgamgcagaaggcggcgggcgggacggcgaggtcgggccggggtccgcaccccacgccttcccacacgcaccgccggcgggcggggagaggagagacgaggggacccccgcggggcggagcgagaaggacggtcccgttcgccacgaacgtccgcccctcgcccgtcgcggctcggacccggcccgggagagcacgacgtcaccacatcgatcacgaagagccccccgggagcggaggccggccggccggccagcgagccgatcggctccggccaaccccccactccggggaaggggcggcggacaaccccgcggagacgagaacgcctgacacgcacggcacggagccagcggggtggggttgtcgcggccgccccgggcgcccgcagcggagagcgcacgggggcacggtggccctcgccgccttccccgccgcccccgggtgggtcagagacccggacccgggccggcaccgggagtcgggacgctcggacgcgcgagagaacagcaggcccgcgggccccggcaggcggctcaagcaggagcgcggccggctagccgggtcaccggtaggccagagccccgcgcgcatccggaggcccaacctctccagcgacaggtcgccagaggacagcgtgtcagcaataacccggcggcccaaaatgccgactcggagcgaaagatatacctcccccggggccgggaggtcgcgtcaccgaccacgccgccggcccaggcgacgcgcgacacggacacctgtccccaaaaacgccaccatcgcagccacacacggagcgcccggggccctctggtcaaccccaggacacacgcgggagcagcgccgggccggggacgccctcccggccgcccgtgccacacgcagggggccggcccgtgtctccagagcgggagccggaagcattttcggccggcccctcctacgaccgggacacacgagggaccgaaggccggccaggcgcgacctctcgggccgcacgcgcgctcagggagcgctctccgactccgcacggggactcgccagaaaggatcgcggcagagggaccgcggcccggcccggggaccgctccccggcacccgggggacgggggcgggacggtccccggctccccacggggactcggaaacgaattcggccgccgcctcagacggccaggatgagcgcggacccgcgaccgggccgggaagggcgtccccagcctcccgcgccacgcgcggcgggtccccgcgggtcgcggctcgggcctcgggagctacggcgcgctggtcgaccggcccgggcagccccacgcccgccgcgggcccagaagcgcagcgacagcctctcccccacataaacctgcacgccagagctgtgactcacaagcgacgcgccacagctctggcgccaccgggccagccgggctgacgaccgcgggctttccggagctctgcctagctcacagcggggacggtcccctccctcggcagctgccaccgcagctccggaagccgagagcacgatctcaaagcggccgccagatggagcccgacaaccgccgcggacgtcagcgagacagatccggctggcagggcggcccgtggaccgcgaaagcgaaaccgtgagtcgagaagctcttcccgaggccgaaaacgcagcccctctgccccaaccccacacaaacggtgcccaaaacgcgtctctgcctcgaccgcgacagagtcagaagacaacccacggcgcgtgggtgtttggagatgcctctcggaagcagggagggagggagggagggagggagggagggagggagaaagaacacacaaggactcggtcgcgggtcgctgcagacacacggagaggcagaatgcgtaggctcttccggaatccacgcagagacagacggggggaggggagtggggaaaagagacagatggcgaaagggaaggagggagggaagggagcagggagggagggagggagggagggaggaagaaaatggagaaaagagagacaatttagaaaacgtagatacacaaagtaaacttctgaaacactccattttttaaaagacagacggaaaggaaagaaacacgaaaaagagagaaagaatgaggaaagaaacgaaggaaagaagggaaaaagaaacagagaggaaagaaaaaagaaggaaacacagggaacgaaagagaaataaagcacgaaggaaaaaaggacagaaagagagaaagaaggaaaggaagagaggaagaaaaacctaaagaaggagagaaaggaagaaaggaaggaagaaaaacacgaaggagaggaagaaagaaaacagagataactacgtacgctcgttcatttacacacataaatacgacgcttttcatacgtaaaataaacgtctttatcgacgatcccttctttatagagcgatgtgtatttatttgtataacacagacacctacatctatcatacagaagtctatttccatacaaccgatacgtatttaccatacgcaagagtattcaacgcagagatacacgttgtcgttgtttgcatataagcgtacagaaacgtttacattaatacatataagtaaacgcgtggaaacgaaagaaataaaaaagcgaaatgagtcaacaggccgggcacggtggctcacgcccgtcatcccagcacttcgagaggccgaggtgggcgcatcacaggaggtcgggagttggagaccagcctgagcaacatggagagacacggcgtgcctactaaaaacacaaacatcagccaagccaggcgtgggggtgcctccctgtcatccccgctaatcgggaggctgaggcaggagaagcgctcgaacccgggaggcggaaggtgcggtgagccaagatcgcgccattgcactctagccgtggaaacaagagtgaaactctgtctcaaaaggacgaaacagaaagaaagaaagaaagaaagaaagaaagaaag

SEQ ID NO: 37517 - DNA, 2082 bp, Homo sapiens
  misc_feature (1)...(2082): n = A,T,C or G
cgcaatcaatcgttttctctgcaccccaccccaccccaccccaccccaccccaccccaccccaccgcagcccacgtaagctggagtggaagtgtgcgatcacagcccacgttaacctctccctcccgggcttaagagatccctgtagtcccagctatttgggaggctgaggtcaccagagcgcagagacagaagaccaggcgggccggccccaaaagaaaagaaaataaataaacgaaaattattaataaataatgaatgaaggaagggaggaaggatatacatacacgtgtatgtaaatgaaatggggcttcgatacatattcatccattaaaagtaacataatataaacgtattaattatggaaatatcatttacatagttttatcactacggggggtgtgtgtgtgtgtgtgtgtgtgtgtgtgtgtgtgtgtgtgtgtgtatgtgtagatgtatgttcatacacggcagcgttcagaaaataagattgaaaaaaggaaggaatcggccgggcatggtggctcacatctgtactcccagcagtctttgggaggccgaggcgggcggatcactaggtcgggagttcgagaccagcccggccaaaatggtgaaattacgtctttactcgaaatagaaaacttgctgtttgcttgaaccgtggaggcagaggcagcagcagcagcgagccgagaaggcaccaaggagggagggaggggagagagacagagagagagagagagagagagagaaagaaagaaagaaagaaagaaagaaagaaagaaagaaagaaagaaaacgcaaggcaaaaccaaaaagcaaaaaaggaggaagcattactggctgacggcagcagtgactccctcttaaaagtcccgcggacgcaaactcgcagtggggctgaaaaaaatgtaggagagggagttccgcgtggtcccagctccaccgcgggccgaggccggtggaggtcgccggcgcgtgaaccggaatcgacgccctcgcgtcagtgcgccgcagcgtccggcggccgcctgctggtcgacccgggacacgtgcagacgccagctaagtccggagctcgcgggcggcagctggtcgaccccggaggtgccgaccgagacggggacgcggcgggtccggctcgtcccgacgggcactcttacacgccgctcggtggagaaggcccgccggtcgacccgggacacggcgagacagcggctaagtgtcaagagccgagaaggcaccaaggaaggggagagagggagggagggggagggagagagagagagagagagagagagagagagagagagagagacagagagagacagagagaaagagagagagagagagggcgagagcgagagacagagagagagagagagagagagagagagagagagacacgcattttcagagagaaagagacatcagaagagggcgagagcgagaggnnnnnnnnnnnnnnnnnnnnnnnnnnnnnnnnnnnnnnnnnnnnnnnnnnnnnnnnnnnnnnnnnnnnnnnnnnnnnnnnnnnnnnnnnnnnnnnnnnnngggagagagcgagagagcgagagcgagaaagaaagaaagaaagaaagaaagaaagaaagaaagaaaaaaaaaaaaaaaaaaaaggcaagacaaaacctaaaagcaaaaaaggaggaagcattactggctgacggcagcagtgactccctcttaaaagtcccgcggacgcaaactcgcggtggggctgaaaaaaatgtaggagagggagttccgcgtggtcccagctccacggcgggccgaggccggtggaggtcgcgggcgcgtgaacgggaatcagcgccctcgcgtcggtgcgccgcagcgtccggcggccgcctgctggtcgacccgggacacgtgcagacgccggctaagtccggagctcgcgggcggcagctggtcgaccccggaggtgccgaccgagacggggacgcggcgggtccggctcgtcccgacgggcactcttacacgccgctcggtggagaaggcccgccggtcgacccggggcacggcgagacagcggctawgtctcaagagccgagaaggcacc

SEQ ID NO: 37518 - DNA, 516 bp, Homo sapiens
agctctataaccttacactattttcttgcctaatatccctcatgtggcacatggaaatttaaaaagaaaactagttcacatggttattgtgagaattaagtaaaaaaaaaatatggacatgaaggaggatgacagcatttagactttgtcctagaatggttagaaatattctgaattcatatatatttatcacttttgacaagagacctttgggagatacatactataaaagctctgttgtatgtgcaaaaggaagtggcatagatcaggatgtaaggactggtaactcatttcagtcctttgcttattgatcataatatcttggacatgccacttcttttctgcctcactgaattattgtgaggataccattaaatagtacattttaaagtcaytttaacattaagtaatttctttacatgtataaaattttgttgcaactagtcaatgagtatgtccatgatccttctttataattgaacaatttcttgtaacgttaaaaaggtgaagttttca

SEQ ID NO: 37519 - DNA, 516 bp, Homo sapiens
agctctataaccttacactattttcttgcctaatatccctcatgtggcacatggaaatttaaaaagaaaactagttcacatggttattgtgagaattaagtaaaaaaaaaatatggacatgaaggaggatgacagcatttagactttgtcctagaatggttagaaatattctgaattcatatatatttatcacttttgacaagagacctttgggagatacatactataaaagctctgttgtatgtgcaaaaggaagtggcatagatcaggatgtaaggactggtaactcatttcagtcctttgcttattgatcataatatcttggacatgccacttcttttctgcctcactgaattattgtgaggataccattaaatagtacattttaaagtcattttaacattawgtaatttctttacatgtataaaattttgttgcaactagtcaatgagtatgtccatgatccttctttataattgaacaatttcttgtaacgttaaaaaggtgaagttttca

SEQ ID NO: 37520 - DNA, 671 bp, Homo sapiens
tgaggcaggagaatcacttcaacctggaaggcggaggttgcagtgagccgagatcccagcactgcattccagcccgggtgacagtgagactccaaaaaaaaaaaaaaaaaaaaaaaagaaagaaaaaatagtgaagctgtgtgaagttttatttaattgcagaagattctattagaaacaacataaatacaaatcaaaataaattgtagtacatccycccatggaattctaagcagttggtgaaaatagtgagaaactcttttatttattaatatgggataacaacatgtaagtttattttaatgaatcttttttacagcatacatggtatatttttaagtggggtgtggtgggaagtaaaagtacgggactggctgtttggaaccttagcatgtcctcaatttgcttgcactcgcataaaatagtgtttgaaagagacacaagaaactggcaacactggttgcctcccaggagggagaagagctgggaggccagaggacaggggcggaagggagatttttcactggagaattttggtagtttttgactcttgaatcatctgaatgttttatgtattcaaacaatattttaaatatgagtgtatgaaaaagatggggagacgccaccttaaccagctagtgacctcattatatcactgttgactggtatgc

SEQ ID NO: 37521 - DNA, 671 bp, Homo sapiens
tgaggcaggagaatcacttcaacctggaaggcggaggttgcagtgagccgagatcccagcactgcattccagcccgggtgacagtgagactccaaaaaaaaaaaaaaaaaaaaaaaagaaagaaaaaatagtgaagctgtgtgaagttttatttaattgcagaagattctattagaaacaacataaatacaaatcaaaataaattgtagtacatccccccatggaattctaagcagttggtgaaaatagtgagaaactcttttatttattaatatgggataacaacatgtaagtttattttaatgaatcttttttacagcatacatggtatatttttaagtggggtgtggtgggaagtaaaagtacgggactggctgtttggaaccttagcatgtcctcaatttgcttgcactcgcataaaatagtgtttgaaagagacacaagaaactggcaacactggttgcctcccaggagggagargagctgggaggccagaggacaggggcggaagggagatttttcactggagaattttggtagtttttgactcttgaatcatctgaatgttttatgtattcaaacaatattttaaatatgagtgtatgaaaaagatggggagacgccaccttaaccagctagtgacctcattatatcactgttgactggtatgc

SEQ ID NO: 37522 - DNA, 1532 bp, Homo sapiens
agcaataatgcactcaattaatgttcccctcttcctctctttcatccttcacrtgcagttggtcacaatgtcctatctggtctgacgacatcccaggccacctttccacccactactctagctgaacccctcatctcttctcacctggaccactacattggctgtcagccttagctgcataatggaatggagctttgcaaaccacagatccctgggacttgctccctgctattcctgtttaattcctgccacacctggtaggtgtaatggcagtgcgcagccagggctgggaatcactacctgtaaggtcttgcactcaagattctcctcttcacagccctcatgtttgcataatgatttttgtaaagtacaaatcatcaccatactgctgaccacttcatctttaaacactttattctcttggcttccattctcctgttttcttcccacctctctggttaattcctccaaggctccttgctcagctttccttcctccacctacccctcaagtgttagtatgtccaagctcagcttgggaccctgcccttccatgcctcaggtttcaattaccacttactcatgagcattccctggctttcttcagagatgtgttcctgactgccttatagtatacactagcaatacacacacaagccacacaaacacacacatccacatataagtacttgtcaaatgtgtaactataaatataggtgataagctgtgcgatgaatgattatgtctccctaaaattcctatgtttaaatgctaaccctcaacattaggaggtgggacctttgggaggtgactaggttatgagagcagagccttcataaatgggattagccctcttacaaaagagaccccagagagcactcactctttgtgctatgtgaggatacaagaagacggcagtctgtaacccagaagagagtcctcaccagaacatgctggaaccctgatttcagatctccagcctccagaactgaggaatattaatacatttctgttgtttataagccacccactctacatacagtactttgttatagcagtcccagctaagacaatctgattaacacccatctccctgaccaaactgtaagctccatgagggcaaagatggtcacctatgctttgttcaccatattcacctactgtgtgtcaaatgaataaacaactatgtgacagctactcttcttaaaagtctccagtggatcccactatctagtgaaattgcaacccctgaacacagcatgcaaggtgcttcacacgctaagctctacctcgccttcctggactcatctccagccatgctccatgtttaccttactctcaaatgacactgcactgctcatgttccacaatgaaaccctgtattttcaggcaagatgtctttctgcatgctccttcttctgactgcaattcccatctccatccaatagtctatctggaacctgcctaattttcagataaggctcagctccaaagtcacctcttctatgttacttggcttggtcttactccatg

SEQ ID NO: 37523 - DNA, 1682 bp, Homo sapiens
aaatgccattgatatctctttgtattagtctgttttcacactgctgataaggatatacctgggactgggaagacaaagaggctgaattggacttacagctccacatggctggggaggcctctgaatcatggcaggaggcgaaaggcacttcttacatggtggcagcaagagaaaaatgaggaagaagtaaaagtggaaacccccaataaacccatcagatctcgtgagacttattcactatcatgagaatagcataggaaagactggcccccatgattcaattatctccccctgtgtccctcacataacacgtgggaattctgggaaacacaattcaagttgagatttggtggggacacagccaaaccatgttactcttccgtttaaatttaacagtattttagcaatgcatggagtctttggacaggaactcaaagcaagaggggcaggaagaggcagggacctgcatcaggcccacccatgaggggagggtatgtagggaaccacccaggtgccagcgctgatgtggaagtccagcctggctggcaaagctagtaccaaggttggtaaaacccctagtccccatgcagatggggttggtgaggggggacaggtggaggacgggacactaaggtaatgtcatgtcacagcaggtggacagagaacagtgggtgattatctagtgtagcccacactggcagacaggtgggcaagggacggacaatgacccttgggagtggatcctagtcactaagccaaggttctgactacacctcagtcccttgaaggatgacaagcccctgtgtgtctataagccccaaattttgtggtgagcagttagcgtgtctccccacaaccatcctccgccaaatgaaccatggaggacacaaatccagctgtgtctgtcccaggctgagagccctttaggtacaccctcattccctacagaatggaaccctgccatcatcttaccattctccctctactccctacatctctcccccttttaggaaagcttccctcatccttaccctcctgctcccaacccctgagcacatacacatgctgggctaaatgtctacctcgaaccacctctgtaccacctctatactacctatatgtacctaacattataactgcagtgtgtgtgtgtgtgtgtgtgtgtgtgtgtgtattttagctaaatttgagttctctgaagataaggacaagttttattcatctgtgtaagggcaggcatagtggctcacatccataatcagcactttgggaggctgaggtgagaggatcgcttgaggcaaggagttcaagatcagcctgggtagcatagtgagwccccatctctacaaaaaaaaatttaattagctgggcacagtgacacatgcctcaagtatcagctactcaggagggtgaggtgggaggattgcttgagcccaggggtttgaggctacagtgagctatgatcacaccactgcactccaacctgggtgacagtgacagagcaagaccctgacaatcaatcaatcaatcaatagcaaatgtgatgggtaatttcatatgccaacttggctaggccaaagtacccagatatttggtcaaacattattctagatgtttctgtggaggtattttcagattaaattaatatttaaatcagtagaatttcagtaaggcaggttacc

SEQ ID NO: 37524 - DNA, 1109 bp, Homo sapiens
caatactgtattgatggtcttggaaaaactaccctgaagtgtttttaggcccacaagatgacataggcaacattttacaactccatcaatgattgtatttcatgaaattcctttaataattttggaaagaataaatttttagcataccattttaataaacagcaggatgagagaaattgaaactttggatgagttgtatagcctgtgttataagtggctgaaacttgtttcacaatgactctctaggtttatggtctctatgaaaaattttggttggtgtttatacgaatatttggtaacaggaatctcctttgcactgtctttttccattgagtcaatactaaattactcagtaatacaaatctccagtatttaaattgaattaaaagaagaaaatcttcaatggtatttgtactttgaaaattccaaatgatgaaaagagtataagtgtgttaagaatagattcaagaaagtatacctattatgacatttatttatttgaccttgttgtcttttaaaaagctacctcacatatttattatgtaagcttgagcagccttaaatgaaaatggccctgtcttattacattcttatccatttatttctcatctttgttaagtatatgcactttgtcacaaagttgtaaccagtgtgtacatactatgtcatgtactgctttttctgtttaatrtaaaattaagctattatcaggtttccatgtatgaggagtctacatgcttatcatttaaaactgtaagtaggctgctgccttatttctgtatcatcatcaatttttaccctattgttggacatttgagcttctgtattttggctgctatgagttatgtacttagaaggtcgcatagagattgtcttgaaatgttaattagcatcaatttataaagaagataaattaatttgtagggattctacaagggaaaactttgtatctattaataattggagacttagtcagtatcataaatgagaaatccgcagttcatatgtatcttttgtttttttttgagagagggtctttctctgttgcccaggctggagtgtggtggcgtgatcactgctcattgcagcctcaaactcctgggctcaag

SEQ ID NO: 37525 - DNA, 1109 bp, Homo sapiens
caatactgtattgatggtcttggaaaaactaccctgaagtgtttttaggcccacaagatgacataggcaacattttacaactccatcaatgattgtatttcatgaaattcctttaataattttggaaagaataaatttttagcataccattttaataaacagcaggatgagagaaattgaaactttggatgagttgtatagcctgtgttataagtggctgaaacttgtttcacaatgactctctaggtttatggtctctatgaaaaattttggttggtgtttatacgaatatttggtaacaggaatctcctttgcactgtctttttccattgagtcaatactaaattactcagtaatacaaatctccagtatttaaattgaattaaaagaagaaaatcttcaatggtatttgtactttgaaaattccaaatgatgaaaagagtataagtgtgttaagaatagattcaagaaagtatacctattatgacatttatttatttgaccttgttgtcttttaaaaagctacctcacatatttattatgtaagcttgagcagccttaaatgaaaatggccctgtcttattacattcttatccatttatttctcatctttgttaagtatatgcactttgtcacaaagttgtaaccagtgtgtacatactatgtcatgtactgctttttctgtttaatataaaattaagctattatcaggtttccatgtatgaggagtctacatgcttatcatttaaaactgtaagtaggctgctgccttatttctgtatcatcatcartttttaccctattgttggacatttgagcttctgtattttggctgctatgagttatgtacttagaaggtcgcatagagattgtcttgaaatgttaattagcatcaatttataaagaagataaattaatttgtagggattctacaagggaaaactttgtatctattaataattggagacttagtcagtatcataaatgagaaatccgcagttcatatgtatcttttgtttttttttgagagagggtctttctctgttgcccaggctggagtgtggtggcgtgatcactgctcattgcagcctcaaactcctgggctcaag

SEQ ID NO: 37526 - DNA, 1189 bp, Homo sapiens
tctaatcctcccagtaatatatgagatattcacaaacgtttatacagtgcttattaaagagcagacaatattctgttttgtatttatgtatataaatttaattaagtrctattattatagttttttatatataaggaaactgaggcacaaagaaattaataagccatccatagttaaagagctagtgaatgacagagtaaggattcaaaatccatgtctgatttatctcgttggactgcaagttccatgaaagtagcaattacatatggttttgcaaaccatcatgccctcaatgcctggaacacagtaaacactcaaacatattgtttgaatgattaaacacagagcctaaagcattatcctccatgcagtactaagtctctgaataagctttctccaaaatcaagagaaacataactagataagcaatagaagtaggggagacagtctaattcaatcatcattcattcaacaactatttcttgagcacctgctacgtgccaggccctggcctggatggtgcttttttttttttttttctccccgaaaaggaaacactaagtgatttgccccaacaccttccatacccagccaggtttgcctccaaatttcttccacaccctcctctgtctcccagggctaatacaatgagcccagcaacatggagagggcggttctcgttccatgcaggcagctctaagccacgttttacttgctttccattagtcttaagcctttagaacccactggggataatgattcagtgctggggagagcatgaaggctgcatgaagcagatctcagagggagggtctgaaaattggaggcattttattgttttcttctttttaactctgaaaactttccaaaaggagagatctatttaaatggtttacaaaatccatcttaaggtcagttctaattcaggtggggcctggcagctgtatgatttcagagttgttacatagctgccaaacctagctagatgcccaccttgagcagcagtgagactccagctgcctacgcaactcctgcagcctccaagaccaacttggcctctgtgaaatgtagaatgtgatcagggccaaagagaaaaacctgtcctatattttggtagaaatagattgatgcaggacttcagaactttatttttggtaaattttagaaaacaaagacacccactgtgaca

SEQ ID NO: 37527 - DNA, 991 bp, Homo sapiens
ttggaaatgtagtctagctgtgtgttcaaagaaggaggcagcagaatggggcactcagtgaacagtgtctgccacagaaactgaagtcaaggtcctgagctgtaatggaatccattcactgtagctccaaaaacgatcaactccagaaacaaattaacaaacttgcatttattaactctgcaggggttctytcataacattcccataatctttgtaacatctctgtgagataagcattaatgtttccatgaggaaaatgtaggtctgaaagtctttaaaaatatctgtaagtcagacagctagggaatggcggagctgaactcaggttggtctgattccacaaccaagtttcttcatttttttagcctataccacaatggatgaaatgagccctctgtgactctagctgcttcattttgttctgcaataactacatataatccatcactaatttatacttacttagtcactcattttcaagtcaacatttagtgagaacttgctatttgctgcgctctgaaccagctaaattaatgtgcattatttctttcaatccctacaaccaacccttgaaaaagacattttttatttcccactatgtgtgaacttggcaagtccacacaacgagtaggcagtagttccagattgcaaagctcagactcctccccactaaccccatgcagtgcccacgctcacacgcacgcactttcccagactatatactacaatattatttaagagatggcttaatatataaaacctacctctaatctcaacgagctaccagttagttggggagacaaaacactcacatatgctcacatgtacacactcaatgcacacatagaaggaatatgtaagctgaagatgatggtgagggtaccaacagtctgtaattcagacacagccaaaatgaatgtatactggagatatgtggaacagcttcttggaatcaggaggatttgaaatgggcagattaagagagacagtg

SEQ ID NO: 37528 - DNA, 991 bp, Homo sapiens
ttggaaatgtagtctagctgtgtgttcaaagaaggaggcagcagaatggggcactcagtgaacagtgtctgccacagaaactgaagtcaaggtcctgagctgtaatggaatccattcactgtagctccaaaaacgatcaactccagaaacaaattaacaaacttgcatttattaactctgcaggggttctttcataacattcccataatctttgtaacatctctgtgasataagcattaatgtttccatgaggaaaatgtaggtctgaaagtctttaaaaatatctgtaagtcagacagctagggaatggcggagctgaactcaggttggtctgattccacaaccaagtttcttcatttttttagcctataccacaatggatgaaatgagccctctgtgactctagctgcttcattttgttctgcaataactacatataatccatcactaatttatacttacttagtcactcattttcaagtcaacatttagtgagaacttgctatttgctgcgctctgaaccagctaaattaatgtgcattatttctttcaatccctacaaccaacccttgaaaaagacattttttatttcccactatgtgtgaacttggcaagtccacacaacgagtaggcagtagttccagattgcaaagctcagactcctccccactaaccccatgcagtgcccacgctcacacgcacgcactttcccagactatatactacaatattatttaagagatggcttaatatataaaacctacctctaatctcaacgagctaccagttagttggggagacaaaacactcacatatgctcacatgtacacactcaatgcacacatagaaggaatatgtaagctgaagatgatggtgagggtaccaacagtctgtaattcagacacagccaaaatgaatgtatactggagatatgtggaacagcttcttggaatcaggaggatttgaaatgggcagattaagagagacagtg

SEQ ID NO: 37529 - DNA, 566 bp, Homo sapiens
agacattttaaaccataatagagtgtgatatgtgcaatactagtgatgctaataaagtgccagggagaaaaggaggaaatacaaatttttctacagaaaggaatttagaaagatacctaggggagtttgcttagattgctgtgaacagcatactataaactggggggtaatttgagtctgagcaaactgaaagctgagaattcaggcttcttgttccatccttgtcctrtcaggatttagagtgggggactaaagagccaactggaaactctgagcagctgggcagggcttatcaactttgagcatctttatagtgtgttctggggacattgtttcttggagaatccccaaagttggtatcatcaggtctttccccttaggctggtctgaatcaccaaggaagatacatctaatctcttacaagtgggtaaagttctgactggctgccaaccttcttgcagccaaaaggaacaagaagcctgatctcttacaagtgggtaaagttctgactggctgccaaccttcttgcagccaaaaggaacaagaagcctgagttctcagcgttc

SEQ ID NO: 37530 - DNA, 590 bp, Homo sapiens
tgtaagtatttctctattttcacagaaatgtcactctaaatcagtacctagggagggtcatcattttctttatctacaaatcaagacacagtatgagtggctgcacccaatttggtaagtcctctattattgaggatgttttcctgtttccyttgtcattgttgttgctgttttgttttgagacagagtttcactcttttgagtcaagtggtgtgatctcagctcactgtagcctcccgagtagctgggattataggtgcccaccaccacgcctagctaatttttgtatttttagtagagatgaggttttagcatgttggccaggctggtcttagctcctgaccgcaggtgatccatctgcctcagcctcccaaaatgctgagattacaggcgtgagccaccatgcttggctgctttcatcatttcagactgagcttggagaagaacctgaggaaaaacatgactttaaaattttgatgaatggagaaatctctttccattcaccttcctttcctctatttcattcttattttaaaatatgcaaacaaaggtatggatacatcaattattaaataaacgtctgtgtgata

SEQ ID NO: 37531 - DNA, 587 bp, Homo sapiens
tgtgtccacaccttgcccgcctcccccctcctgagtgcctggctgcccctggagccccaggcttgcctgccatctgggcagctcagaggagagcccactgccaagggagtgccagcgttgatttatggcccacaaccttggcaggctcaggctgtgtgcccgaactgcctttgctcagggaagagatgctcctcttaaagggacagtgcagaggaatgcaggaaagtccaggacgaaagcttggcagggggctggcaaaaaagacctccacccatcagcactctgggtgactgtcactccctagggaaacttctccctagggaaccacccatcayacatgttatcataccctatcctttgtagacttggcccaactgtaacatattaatatgtttactgtcagtctctcccactggactgtaatctctaggagggtaggaaccagacccattgtgctcattcctgaatattcagcaccaaacacagtgcctggcgcctaataagatctcagtaagaatttgtcaagtgtaggaaagaatgaataaatgaaggtccttgtccatgaggtggagggaagcccacgtgtc

SEQ ID NO: 37532 - DNA, 554 bp, Homo sapiens
tgtaattccctctacaaaaatatgtcctcgtgatgccacgtacccacctacacccacctgaccccaggcacctccttccacagccagccactgcaaaggaggccagggaatgtgtcttcctggtgcccacraaggagacacagagctggagggcatggggacccaaggttccaggcttcggaagggaaagcgtccacaagcgaccccacagtaatgacagcctctgatggcagcccccactggccaaactacatccccctgggcagagtgcaccgggcctggcttccctccatgctggttccaactcacagccggggtgaggccagggcgaggccaggtccccccttcacggggaaggctccctgggtgcttccctggtcagggctgtgcattcttgtcaccagtccctccctgaccccagtgactctggctgggcctccacccctgcccagacccaccccaccacagaagaacctgacctaccattcactcttttttaaatattttattttttcagagacagggtctcactgtgtttcccaggctagaatata

SEQ ID NO: 37533 - DNA, 554 bp, Homo sapiens
tgtaattccctctacaaaaatatgtcctcgtgatgccacgtacccacctacacccacctgaccccaggcacctccttccacagccagccactgcaaaggaggccagggaatgtgtcttcctggtgcccacgaaggagacacagagctggagggcatggggacccaaggttccaggcttcggaagggaaagcrtccacaagcgaccccacagtaatgacagcctctgatggcagcccccactggccaaactacatccccctgggcagagtgcaccgggcctggcttccctccatgctggttccaactcacagccggggtgaggccagggcgaggccaggtccccccttcacggggaaggctccctgggtgcttccctggtcagggctgtgcattcttgtcaccagtccctccctgaccccagtgactctggctgggcctccacccctgcccagacccaccccaccacagaagaacctgacctaccattcactcttttttaaatattttattttttcagagacagggtctcactgtgtttcccaggctagaatata

SEQ ID NO: 37534 - DNA, 531 bp, Homo sapiens
tccccacccattgcagggaactccaggccttcaaccagcagaactattttggcgtacattaagaaggtgggcctcctccagctcctctttttttttttttttttttttttttagatggagcctcgctctgtcgcccaggctggagtgcagtgacaaaatctccactcactgcaagctctgcctcccaggttcatgccattctcctgcctcagcctgccgagtagctgggactataggcgcccgccaccacacctggctaatttttttgtgtttttagtagagatggggttgctccatgttggtcaggctggtcttgaactcctgacctcaggtaatccacccaccttggcctcccaaagtgctgggatyacaggtgtgggccaccatgcctagcctccagctccttatttttagtggattaccttaatttgtagtattcctttcatacatttttctcactttaataatcacagttttaaaatatgaatactttagtagcattgctaatactactttatataataatacttt

SEQ ID NO: 37535 - DNA, 1159 bp, Homo sapiens
tgcatggtgagtcccagttttatttcatgcatgagcttcattgacagaaaatcattataccttatttccttgcttcatgcttggaagatgtggatttggccttcatattcctgactggatactttaaatgagtcagatgcatctgctttarataggtattgactaaggagaagtaagggaataatctgtaaaactcaacccaaaatgaagtcttttttcttgctagaggcatattatttatttggatagattaagattttcctctacatgtttaagaagttaatctcaatttggatgtgattagtaataatttcaaatctatatttcacttgagtttcttgcagtgtaattatgtttgttgtctgtttgggaatactaaaacaatcattttattgtagtatatttaatacttttaccatatttcttcttacttaaacgaatacatataaataacaaccatgagaatctcaagcatatttgaaatattttaatatcattatgaaagtagaaagataaaattagagtgctccaaaaatatttaaaaattctagtccaatatcctcatttagagaaagaaaccgaggcccagaaatgtaaaagcaagtgaataaaattagtggtatggccagaattaggtactttgttcatgaaaatatttagacatttttgaggtgagttaggactggcagggcacggagggacactgttgtcataaaactatgaaggacctaccaaggaaaaaatacctctaggggtctctgtttattgagttctaaaaaaatacccatactatatttggttggctaataacatataaatggattttaattggtaagtgtttggggcatttctttttctctgttctttcccttccttctccacacatctatcccaaggcacaggcattttattttgcattttggacctgctgtctgtttgacagtgtcctcttttgatttatttattattgttgtttgcaaagaagagggaaattttgaagcatgaacttgctgtgctaccttgatttggaggtctcctggcccagtgtggaaaaagttaaaatcatctgacatatgtttatatatatttaagcatctcagttggcttcatttgtgcaatgaggtcccaagatccactcaaactcctacttacatacagg

SEQ ID NO: 37536 - DNA, 1159 bp, Homo sapiens
tgcatggtgagtcccagttttatttcatgcatgagcttcattgacagaaaatcattataccttatttccttgcttcatgcttggaagatgtggatttggccttcatattcctgactggatactttaaatgagtcagatgcatctgctttagataggtattgactaaggagaagtaagggaataatctgtaaaactcaacccaaaakgaagtcttttttcttgctagaggcatattatttatttggatagattaagattttcctctacatgtttaagaagttaatctcaatttggatgtgattagtaataatttcaaatctatatttcacttgagtttcttgcagtgtaattatgtttgttgtctgtttgggaatactaaaacaatcattttattgtagtatatttaatacttttaccatatttcttcttacttaaacgaatacatataaataacaaccatgagaatctcaagcatatttgaaatattttaatatcattatgaaagtagaaagataaaattagagtgctccaaaaatatttaaaaattctagtccaatatcctcatttagagaaagaaaccgaggcccagaaatgtaaaagcaagtgaataaaattagtggtatggccagaattaggtactttgttcatgaaaatatttagacatttttgaggtgagttaggactggcagggcacggagggacactgttgtcataaaactatgaaggacctaccaaggaaaaaatacctctaggggtctctgtttattgagttctaaaaaaatacccatactatatttggttggctaataacatataaatggattttaattggtaagtgtttggggcatttctttttctctgttctttcccttccttctccacacatctatcccaaggcacaggcattttattttgcattttggacctgctgtctgtttgacagtgtcctcttttgatttatttattattgttgtttgcaaagaagagggaaattttgaagcatgaacttgctgtgctaccttgatttggaggtctcctggcccagtgtggaaaaagttaaaatcatctgacatatgtttatatatatttaagcatctcagttggcttcatttgtgcaatgaggtcccaagatccactcaaactcctacttacatacagg

SEQ ID NO: 37537 - DNA, 1159 bp, Homo sapiens
tgcatggtgagtcccagttttatttcatgcatgagcttcattgacagaaaatcattataccttatttccttgcttcatgcttggaagatgtggatttggccttcatattcctgactggatactttaaatgagtcagatgcatctgctttagataggtattgactaaggagaagtaagggaataatctgtaaaactcaacccaaaatgaagtctttyttcttgctagaggcatattatttatttggatagattaagattttcctctacatgtttaagaagttaatctcaatttggatgtgattagtaataatttcaaatctatatttcacttgagtttcttgcagtgtaattatgtttgttgtctgtttgggaatactaaaacaatcattttattgtagtatatttaatacttttaccatatttcttcttacttaaacgaatacatataaataacaaccatgagaatctcaagcatatttgaaatattttaatatcattatgaaagtagaaagataaaattagagtgctccaaaaatatttaaaaattctagtccaatatcctcatttagagaaagaaaccgaggcccagaaatgtaaaagcaagtgaataaaattagtggtatggccagaattaggtactttgttcatgaaaatatttagacatttttgaggtgagttaggactggcagggcacggagggacactgttgtcataaaactatgaaggacctaccaaggaaaaaatacctctaggggtctctgtttattgagttctaaaaaaatacccatactatatttggttggctaataacatataaatggattttaattggtaagtgtttggggcatttctttttctctgttctttcccttccttctccacacatctatcccaaggcacaggcattttattttgcattttggacctgctgtctgtttgacagtgtcctcttttgatttatttattattgttgtttgcaaagaagagggaaattttgaagcatgaacttgctgtgctaccttgatttggaggtctcctggcccagtgtggaaaaagttaaaatcatctgacatatgtttatatatatttaagcatctcagttggcttcatttgtgcaatgaggtcccaagatccactcaaactcctacttacatacagg

SEQ ID NO: 37538 - DNA, 1159 bp, Homo sapiens
tgcatggtgagtcccagttttatttcatgcatgagcttcattgacagaaaatcattataccttatttccttgcttcatgcttggaagatgtggatttggccttcatattcctgactggatactttaaatgagtcagatgcatctgctttagataggtattgactaaggagaagtaagggaataatctgtaaaactcaacccaaaatgaagtcttttttcttgctagaggcatattatttatttggatagattaagattttcctctacatgtttaagaagttaatctcaatttggatgtgattagtaataatttcaaatctatatttcacttgagtttcttgcagtgtaattatgtttgttgtctgtttgggaatactaaaacaatcattttattgtagtatatttaatacttttaccatatttcttcttacttaaacsaatacatataaataacaaccatgagaatctcaagcatatttgaaatattttaatatcattatgaaagtagaaagataaaattagagtgctccaaaaatatttaaaaattctagtccaatatcctcatttagagaaagaaaccgaggcccagaaatgtaaaagcaagtgaataaaattagtggtatggccagaattaggtactttgttcatgaaaatatttagacatttttgaggtgagttaggactggcagggcacggagggacactgttgtcataaaactatgaaggacctaccaaggaaaaaatacctctaggggtctctgtttattgagttctaaaaaaatacccatactatatttggttggctaataacatataaatggattttaattggtaagtgtttggggcatttctttttctctgttctttcccttccttctccacacatctatcccaaggcacaggcattttattttgcattttggacctgctgtctgtttgacagtgtcctcttttgatttatttattattgttgtttgcaaagaagagggaaattttgaagcatgaacttgctgtgctaccttgatttggaggtctcctggcccagtgtggaaaaagttaaaatcatctgacatatgtttatatatatttaagcatctcagttggcttcatttgtgcaatgaggtcccaagatccactcaaactcctacttacatacagg

SEQ ID NO: 37539 - DNA, 349 bp, Homo sapiens
ccatgcggggtgtatcacaattgcacagtaaatattgatttcattgagaagaaagaaaaatctgataagaaataaaatgaaccaataaatattttctctacgtatgtgtggtagacagaattcgcaatgtgatcccatgatttcatacccgaatccctcagagcccacaagaatagggaatcccatgactatgttgtgtcatatggcacagttgactgtagagtagggacactatctggtgggcytaatgtcatcacacagtttcgaagcagagtgttttttttgactggtagaagaagtcagagagattcagagtatgagaatgacgcagtgtgtactgctgttcaga

SEQ ID NO: 37540 - DNA, 483 bp, Homo sapiens
ttccccttttaatttaaaatcttttttkttctccagactagaatgtaaacctcatgtgggcagcagacatgtctgcttacttattttttgagacggagtctcactctgtcacccaggctggagtgcaacggcgcgatcccggctcactgcaacctccacctcccgggttcaagcgattctgctgccccagccttccaagaagctgagattacaggcgcccaccaggcccggctaatttttgtatttttagcaggggagcagtcgggctctggactacatttcccggaggattctgcgggccaataccatgtctcgcgagattttggcttcctcttagccaggtggcagaatctttcgctgtgcccaattagctgctgccacgccttggagtccggagtaacttggccaggccggccccgagcggaactagagaaagctgaggatgaggaatccggctctggtccttttgtgtgtggagggctg

SEQ ID NO: 37541 - DNA, 483 bp, Homo sapiens
ttccccttttaatttaaaatcttttttgttctccagactagaatgtaaacctcatgtgggcagcagacatgtctgcttacttattttttgagacggagtctcrctctgtcacccaggctggagtgcaacggcgcgatcccggctcactgcaacctccacctcccgggttcaagcgattctgctgccccagccttccaagaagctgagattacaggcgcccaccaggcccggctaatttttgtatttttagcaggggagcagtcgggctctggactacatttcccggaggattctgcgggccaataccatgtctcgcgagattttggcttcctcttagccaggtggcagaatctttcgctgtgcccaattagctgctgccacgccttggagtccggagtaacttggccaggccggccccgagcggaactagagaaagctgaggatgaggaatccggctctggtccttttgtgtgtggagggctg

SEQ ID NO: 37542 - DNA, 483 bp, Homo sapiens
ttccccttttaatttaaaatcttttttgttctccagactagaatgtaaacctcatgtgggcagcagacatgtctgcttacttattttttgagacggagtctcactctgtcacccaggctggagtgcaacggcgcgatcccggctcactgcaacctccacctcccgggttcaagcgattctgctgccccagccttccaagaagctgagattacaggcgcccaccaggcccggctaatttttgtatttttagyaggggagcagtcgggctctggactacatttcccggaggattctgcgggccaataccatgtctcgcgagattttggcttcctcttagccaggtggcagaatctttcgctgtgcccaattagctgctgccacgccttggagtccggagtaacttggccaggccggccccgagcggaactagagaaagctgaggatgaggaatccggctctggtccttttgtgtgtggagggctg

SEQ ID NO: 37543 - DNA, 614 bp, Homo sapiens
cgtccatcccacagggacccggactctcatcttcctcctgagtgtgctctccccggagacctggcattggaattcrccctgccaccttgtggtctccccaagtggaaacctgggcgtcagtctggacgcttgtcaccaaattctgtcccttccaccttcacatggcctctccatcttcaccgcctcggtgtctctatctcgtcccgatcaccgtcgcctctcctctggcggagagcaccagcattcccactggtctctgcttttcctcaaacgcatctctgtgtatatctcccctcaggatcactctgtggcccccactgctctgggtggaaccttctttccagtggtgtttcagtcccctgggtctgcctcactcctcaccaccgtcttgtgcttctgcactgagctccagccagaccacctgcctgcagccacctggcactacctgttcccgtgtgcttcctgcctttgcctggagagaataacaatctatagtccaaactcaaggacaaaaacaaactgctttttggctgtggtggcatgaaaccccaataagtcaatgacaatgctgcatgcttctgaaagctggccagtcagggacagccccacactac

SEQ ID NO: 37544 - DNA, 614 bp, Homo sapiens
cgtccatcccacagggacccggactctcatcttcctcctgagtgtgctctccccggagacctggcattggaattcaccctgccaccttstggtctccccaagtggaaacctgggcgtcagtctggacgcttgtcaccaaattctgtcccttccaccttcacatggcctctccatcttcaccgcctcggtgtctctatctcgtcccgatcaccgtcgcctctcctctggcggagagcaccagcattcccactggtctctgcttttcctcaaacgcatctctgtgtatatctcccctcaggatcactctgtggcccccactgctctgggtggaaccttctttccagtggtgtttcagtcccctgggtctgcctcactcctcaccaccgtcttgtgcttctgcactgagctccagccagaccacctgcctgcagccacctggcactacctgttcccgtgtgcttcctgcctttgcctggagagaataacaatctatagtccaaactcaaggacaaaaacaaactgctttttggctgtggtggcatgaaaccccaataagtcaatgacaatgctgcatgcttctgaaagctggccagtcagggacagccccacactac

SEQ ID NO: 37545 - DNA, 614 bp, Homo sapiens
cgtccatcccacagggacccggactctcatcttcctcctgagtgtgctctccccggagacctggcattggaattcaccctgccaccttgtggtctccccaagtggaaacctgggcgtcagtctggacgcttgtcaccaaattctgtcccttccaccttcacatggcctctccatcttcaccgcctcggtgtctctatctcgtcccgatcaccgtcgcctctcctctggcggagagcaccagcattcccactggtctctgcttttcctcaaacgcatctctgtgtawatctcccctcaggatcactctgtggcccccactgctctgggtggaaccttctttccagtggtgtttcagtcccctgggtctgcctcactcctcaccaccgtcttgtgcttctgcactgagctccagccagaccacctgcctgcagccacctggcactacctgttcccgtgtgcttcctgcctttgcctggagagaataacaatctatagtccaaactcaaggacaaaaacaaactgctttttggctgtggtggcatgaaaccccaataagtcaatgacaatgctgcatgcttctgaaagctggccagtcagggacagccccacactac

SEQ ID NO: 37546 - DNA, 614 bp, Homo sapiens
cgtccatcccacagggacccggactctcatcttcctcctgagtgtgctctccccggagacctggcattggaattcaccctgccaccttgtggtctccccaagtggaaacctgggcgtcagtctggacgcttgtcaccaaattctgtcccttccaccttcacatggcctctccatcttcaccgcctcggtgtctctatctcgtcccgatcaccgtcgcctctcctctggcggagagcaccagcattcccactggtctctgcttttcctcaaacgcatctctgtgtatatctcccctcaggatcactctgtggcccccactgctctgggtggaaccttctttccagtggtgtttcagtcccctgggtctgcctcactcctcaccaccgtcttgtgcttctgcactgagctccagccagaccacckgcctgcagccacctggcactacctgttcccgtgtgcttcctgcctttgcctggagagaataacaatctatagtccaaactcaaggacaaaaacaaactgctttttggctgtggtggcatgaaaccccaataagtcaatgacaatgctgcatgcttctgaaagctggccagtcagggacagccccacactac

SEQ ID NO: 37547 - DNA, 614 bp, Homo sapiens
cgtccatcccacagggacccggactctcatcttcctcctgagtgtgctctccccggagacctggcattggaattcaccctgccaccttgtggtctccccaagtggaaacctgggcgtcagtctggacgcttgtcaccaaattctgtcccttccaccttcacatggcctctccatcttcaccgcctcggtgtctctatctcgtcccgatcaccgtcgcctctcctctggcggagagcaccagcattcccactggtctctgcttttcctcaaacgcatctctgtgtatatctcccctcaggatcactctgtggcccccactgctctgggtggaaccttctttccagtggtgtttcagtcccctgggtctgcctcactcctcaccaccgtcttgtgcttctgcactgagctccagccagaccacctgcctgcagccacctggcrctacctgttcccgtgtgcttcctgcctttgcctggagagaataacaatctatagtccaaactcaaggacaaaaacaaactgctttttggctgtggtggcatgaaaccccaataagtcaatgacaatgctgcatgcttctgaaagctggccagtcagggacagccccacactac

SEQ ID NO: 37548 - DNA, 1260 bp, Homo sapiens
cttactctgtagcaagttctgtatgcataagcctctctttgttcttattttggtggcctctgtttatttacacaaagagaaataactgctattcccataaatcatggctttcaaaatggtcacagttcactgggcatgcttgctcatgcctgtaattctaccactttgagagaccgaggcgggcagatcatgaggtcaggagatcgaggccatcctggccaacccagtgaaaccccatctctaccaaaaatacaaaaagaaaaaaaaagccrtgattggtggcatgcacctataatcccagctacttaggaggctgaggcaggagaatcacctgaatccaggaggcagaggttgcagtgagccgagatcacgccactgcactccagcctggatgacagagtaagaccgtctcaaaaaacccaaactggtcaggctcggtggctcacgcctgtaatcccagcacttttggaggctgaggcaggtggatcacaaggtcaagaattcaacaccagcctggccaagatggctaatccccaactctactaaaaaatacaaaaattatccaggcacggtggcaggcacctgtgatcctagctacttgggaggctgaggcaggagaatcgcttcaacccaggaggcagaggttgcagtgagctgagatctcaccactgcactccagcctgggcaatagagtgagaatctgtctcaaaaaaaaaaaaaaaatggggaaactccatctctactaaaaatacaaaattagccaggcatggtggcacatgcctgtaatcccagctacttgggaggctgaggcaagagaatcgcttgaacctgggaggcagaggttttggggaggtggaggttgaggtgagccaagatcgtggcattgcactgcagcctgggcaacaagagtaaaactctctctaacaaacaaacaaacaaacaaacaaaacaaaacaaagaaaaatacacacaacttatttcctggtttgtgataatctgtgaaatatattttgaaatgaattggaattcaatacagtactattcacaccccaaatactcctaatatttcctttcccagatgatgacctggtactcttcctagggcttgacttctccctacaggtccccagtacaagtatttgtgattctgagtcaattcattgtctacatgtgtgacaatgcaatgctcttgttgtagagtaccaagatgaggcaggtccaaactgcacatttgtagagaacatagtatatgtgcaattg

SEQ ID NO: 37549 - DNA, 1260 bp, Homo sapiens
cttactctgtagcaagttctgtatgcataagcctctctttgttcttattttggtggcctctgtttatttacacaaagagaaataactgctattcccataaatcatggctttcaaaatggtcacagttcactgggcatgcttgctcatgcctgtaattctaccactttgagagaccgaggcgggcagatcatgaggtcaggagatcgaggccatcctggccaacccagtgaaaccccatctctaccaaaaatacaaaaagaaaaaaaaagccatgattggtggcatgcacctataatcccagctactyaggaggctgaggcaggagaatcacctgaatccaggaggcagaggttgcagtgagccgagatcacgccactgcactccagcctggatgacagagtaagaccgtctcaaaaaacccaaactggtcaggctcggtggctcacgcctgtaatcccagcacttttggaggctgaggcaggtggatcacaaggtcaagaattcaacaccagcctggccaagatggctaatccccaactctactaaaaaatacaaaaattatccaggcacggtggcaggcacctgtgatcctagctacttgggaggctgaggcaggagaatcgcttcaacccaggaggcagaggttgcagtgagctgagatctcaccactgcactccagcctgggcaatagagtgagaatctgtctcaaaaaaaaaaaaaaaatggggaaactccatctctactaaaaatacaaaattagccaggcatggtggcacatgcctgtaatcccagctacttgggaggctgaggcaagagaatcgcttgaacctgggaggcagaggttttggggaggtggaggttgaggtgagccaagatcgtggcattgcactgcagcctgggcaacaagagtaaaactctctctaacaaacaaacaaacaaacaaacaaaacaaaacaaagaaaaatacacacaacttatttcctggtttgtgataatctgtgaaatatattttgaaatgaattggaattcaatacagtactattcacaccccaaatactcctaatatttcctttcccagatgatgacctggtactcttcctagggcttgacttctccctacaggtccccagtacaagtatttgtgattctgagtcaattcattgtctacatgtgtgacaatgcaatgctcttgttgtagagtaccaagatgaggcaggtccaaactgcacatttgtagagaacatagtatatgtgcaattg

SEQ ID NO: 37550 - DNA, 573 bp, Homo sapiens
ataaaattttgcactgtcccaactctatcccacctagggtatgaatcatctgctttatgacagttatattattataattgttctagttcttatcagatattgttgytaatatcttgctatcctaaatttgtactttaaactttataatacaaatgtttgtatagggaaaaatgtaaaatatgtaaattggtactatcctagatttcctgcgtccactggggatcttggaatgtatcctcagaggattagagggaactattttattttgttatgaactgggtgctatataaaatcaatatattattttaaattttggttaaaaatgccattatttttattatgaaattagtcatatgttcttaccatttggagatatatgctgaagtatataaagggatgaaatcacctgatatcttcaatatgctttaatatacatccataaatcggaaaccctctttttcactcttgtttttctaccttcttcccttccttccagccttctgtcctctgagcatacctgggggcaataataaggacacttagaactcagaccttgatttttaaataccttag

SEQ ID NO: 37551 - DNA, 573 bp, Homo sapiens
ataaaattttgcactgtcccaactctatcccacctagggtatgaatcatctgctttatgacagttatattattataattgttctagttcttatcagatattgttgttaatatcttgctatcctaaatttgtactttaaactttataatacaaatgtttgtataggraaaaatgtaaaatatgtaaattggtactatcctagatttcctgcgtccactggggatcttggaatgtatcctcagaggattagagggaactattttattttgttatgaactgggtgctatataaaatcaatatattattttaaattttggttaaaaatgccattatttttattatgaaattagtcatatgttcttaccatttggagatatatgctgaagtatataaagggatgaaatcacctgatatcttcaatatgctttaatatacatccataaatcggaaaccctctttttcactcttgtttttctaccttcttcccttccttccagccttctgtcctctgagcatacctgggggcaataataaggacacttagaactcagaccttgatttttaaataccttag

SEQ ID NO: 37552 - DNA, 573 bp, Homo sapiens
ataaaattttgcactgtcccaactctatcccacctagggtatgaatcatctgctttatgacagttatattattataattgttctagttcttatcagatattgttgttaatatcttgctatcctaaatttgtactttaaactttataatacaaatgtttgtatagggaaaaaygtaaaatatgtaaattggtactatcctagatttcctgcgtccactggggatcttggaatgtatcctcagaggattagagggaactattttattttgttatgaactgggtgctatataaaatcaatatattattttaaattttggttaaaaatgccattatttttattatgaaattagtcatatgttcttaccatttggagatatatgctgaagtatataaagggatgaaatcacctgatatcttcaatatgctttaatatacatccataaatcggaaaccctctttttcactcttgtttttctaccttcttcccttccttccagccttctgtcctctgagcatacctgggggcaataataaggacacttagaactcagaccttgatttttaaataccttag

SEQ ID NO: 37553 - DNA, 573 bp, Homo sapiens
ataaaattttgcactgtcccaactctatcccacctagggtatgaatcatctgctttatgacagttatattattataattgttctagttcttatcagatattgttgttaatatcttgctatcctaaatttgtactttaaactttataatacaaatgtttgtatagggaaaaatgtaaaatatgtaaattggtactatcctagatttcctgcgtccactggggatcttggaatgtatcctcagaggattagagggaactattttattttgttatgaactgggtgctatataaaatcaatayattattttaaattttggttaaaaatgccattatttttattatgaaattagtcatatgttcttaccatttggagatatatgctgaagtatataaagggatgaaatcacctgatatcttcaatatgctttaatatacatccataaatcggaaaccctctttttcactcttgtttttctaccttcttcccttccttccagccttctgtcctctgagcatacctgggggcaataataaggacacttagaactcagaccttgatttttaaataccttag

SEQ ID NO: 37554 - DNA, 573 bp, Homo sapiens
ataaaattttgcactgtcccaactctatcccacctagggtatgaatcatctgctttatgacagttatattattataattgttctagttcttatcagatattgttgttaatatcttgctatcctaaatttgtactttaaactttataatacaaatgtttgtatagggaaaaatgtaaaatatgtaaattggtactatcctagatttcctgcgtccactggggatcttggaatgtatcctcagaggattagagggaactattttattttgttatgaactgggtgctatataaaatcaatatattattttaaattttggttaaaaatgccattatttttattatgaaattagtcatatgttcttaccatttggagatatatgctgaagtrtataaagggatgaaatcacctgatatcttcaatatgctttaatatacatccataaatcggaaaccctctttttcactcttgtttttctaccttcttcccttccttccagccttctgtcctctgagcatacctgggggcaataataaggacacttagaactcagaccttgatttttaaataccttag

SEQ ID NO: 37555 - DNA, 520 bp, Homo sapiens
tgcacccttcagcgtggtggagcctcagggacagatctgatgatcccagaaggctctggaggacaatctaggacstccagaggggggtgagatttcaggccacacactgtggaaggtaatcatgtctgatcacaaattttgggtctccaccttacttccaatctatgttgtgaatgcccagttgagacccacggaaaagagctcatgggtgagtgtgaagtgcttctctgtcttaagttcccagagatccttgcctcttggaggccagcaaacactaactcttgaggaattcatgacaatatcatctgattcctccttcccagcttgtatggcagtctcccaccctcatgtgttcaatctgatgatcccaggaggttctggaacaaaatctacagcctatgctttctggactatctgtcgatcattcctgaagagagggatcaatgttgaggtattcatttcacatgatgaaaatgacaatatcaaatgtcagaggtagtagggctcacgtagaaatcca

SEQ ID NO: 37556 - DNA, 366 bp, Homo sapiens
gatagcgttaggagatayacctaatgtaaatgacgagtgaatgggtgcagcacaccaacatggcacatgtatacatatgtaacaaacctgcacgttgtacacatgtaccctagaacttaaagtataataaaaaatatgtatatatatatataaatgtatttttaatcataatatactattcaagacttgggtgctttataaattaaaaacaaaattattagattcttgagcagtagataattcattcagttttaaaccgaggcacattaaaatgctaaccatgcagtagattggttaagcaaaaatgcttttatagaaaatatagaaataataatgtatattcataactaataactcagtgtaagt

SEQ ID NO: 37557 - DNA, 958 bp, Homo sapiens
tgctaaaatcctgtaatgcacaggcagcctccatagcaaagaattgtctggcctccagtgccaatagtgctaaggctgagaaaccctgctgtacatgagccctgtattcctatttctgcactcatttaatactttattgtgcagctcactctgtacacaacacctggtrcaatgaaaagcacatatttgtataaaatatattctgacccattcaaaaagctcaccgtggaatatggcatattatacaaaacagttataatttgaagttgaaaatgttaagtacaattagggtgatttgttaaaagcactatatggatacagataggaggagagatcattcattctcacttggcagagataagggaaatcttcagtcacggagtgagtgacatttgaataagattttaaaggtgctagagctatggccacatcatataagtatgtgactacacaaaaatatatacactttcaaacacataaacatgcttaaaataccgagtttctttcattcgcatcacattgggaagataatacctctgcacggaatttctttccctgttatttttgttgtttaagagaaaatatgcatggagatgtcctatattatctgttacactgtcacggaatttgctactactcattggcccaagagacttttactgacgatcttgaactacattcagaagcatttgaaatccacctgaccaaaatgtgattttgcacttccttgttaaaccagatcagccacagaatgcatccctacttttaaatcagccgcagcagttccattgagacaacaaagtctacacacatgtggcctggtttatgcaccattttcctgcaaattcgatcttcatgagataccaagagtgtattttaacttttatttggggaaactgaataacctgaatgtttacctgcaatggcatgcttaagaaaatatgatcaagaaattttg

SEQ ID NO: 37558 - DNA, 958 bp, Homo sapiens
tgctaaaatcctgtaatgcacaggcagcctccatagcaaagaattgtctggcctccagtgccaatagtgctaaggctgagaaaccctgctgtacatgagccctgtattcctatttctgcactcatttaatactttattgtgcagctcactctgtacacaacacctggtgcaatgaaaagcacatatttgtataaaatatattctgacccattcaaaaagctcaccgtggaatatggcatattatacaaaacagttataatttgaagttgaaaatgttaagtacaattagggtgatttgttaaaagcactatatggatacagataggaggagagatcattcattctcacttggcagagataagggaaatcttcagtcacggagtgagtgacatttgaataagattttaaaggtgctagagctatggccacatyatataagtatgtgactacacaaaaatatatacactttcaaacacataaacatgcttaaaataccgagtttctttcattcgcatcacattgggaagataatacctctgcacggaatttctttccctgttatttttgttgtttaagagaaaatatgcatggagatgtcctatattatctgttacactgtcacggaatttgctactactcattggcccaagagacttttactgacgatcttgaactacattcagaagcatttgaaatccacctgaccaaaatgtgattttgcacttccttgttaaaccagatcagccacagaatgcatccctacttttaaatcagccgcagcagttccattgagacaacaaagtctacacacatgtggcctggtttatgcaccattttcctgcaaattcgatcttcatgagataccaagagtgtattttaacttttatttggggaaactgaataacctgaatgtttacctgcaatggcatgcttaagaaaatatgatcaagaaattttg

SEQ ID NO: 37559 - DNA, 958 bp, Homo sapiens
tgctaaaatcctgtaatgcacaggcagcctccatagcaaagaattgtctggcctccagtgccaatagtgctaaggctgagaaaccctgctgtacatgagccctgtattcctatttctgcactcatttaatactttattgtgcagctcactctgtacacaacacctggtgcaatgaaaagcacatatttgtataaaatatattctgacccattcaaaaagctcaccgtggaatatggcatattatacaaaacagttataatttgaagttgaaaatgttaagtacaattagggtgatttgttaaaagcactatatggatacagataggaggagagatcattcattctcacttggcagagataagggaaatcttcagtcacggagtgagtgacatttgaataagattttaaaggtgctagagctatggccacatcatataagtatgtgactacacaaaaatatatacactttcaaacacataaacatgcttaaaataccgagtttctttcattcgcatcacattgggaagataatacctctgcacggaatttctttccctgttatttttgttgtttaagagaaaatatgcatggagatgtcctatattatctgttacactgtcacggaatttgctactactcattggcccaagagacttttactgacgatcttgaactacattcagaagcatttgaaatccacctgaccaaaatgtgattttgcacttccttgttaaaccagatcagccacagaatgcatccctacttttaaatcagccgcagcagttccattgagacaacaaagtctacacacatgtggcctggtttatgcaccattttcctgcaaattygatcttcatgagataccaagagtgtattttaacttttatttggggaaactgaataacctgaatgtttacctgcaatggcatgcttaagaaaatatgatcaagaaattttg

SEQ ID NO: 37560 - DNA, 1227 bp, Homo sapiens
atccactgggtctttcaaggcaggagaattccatgcagtttcagatgcctggctggtgggcggtgggctggagaagggagaggggggaaccctacaggccgggtgggttctggagagaaatgttaccctcactccactgaggactcaggagtgtcaggagagctatggctgggcagcactctagctcttcctgcagggatgtccctctgggatggagctgatggtcaggggtgccacgcttcccccatcaaagatgccccttgaatgtctaaccatacagaaatccaagcgtgagggcctcaaggcctgtagatacctgcagaggtgaaggcagccaggwtggaaggggtcttggtggtgctcgttggtaaaattgccccaggggtccgggaccccctcaggtcaccaggtggtctccttaaacagctctagctgcagacctcgactttaacacaacagtgaatttgggcaccaaggttcctttgaaaggatcaagttaactggaaggagcaggggagtttctctgcttgaagtccccgccatgaatgcctgccccttgtggccttgcacagctgaagctacacagtggtcagcctcagcctggccctgccagagtccactctgatgacagtcagggtgacacccagctatccctgagcagggctctgtaatcatctctctgggacagctgaagacaccaagatacgccctggggacacagctgtgtagcctggggtgctggcaggagacatctctcccctctggctggatgagaaaggccttgcctgccatgaggaactgcgggctgtgagaacccctctggcaatcactccccagcgctgagctccccacccacttctttggtgaaggactctccccttctggtcccccctgaagctggggagggacagaggtaaccttgaagctgggggcactctgcctgctctgtgagctggttcttctgtataaaagcccccttcacctggaggtaaaagaacctgccctgcctctctcttgggatgggaaattgaccttgaatcctgcactggaggaacctggggccgcactgggccaggggagccaaggctgcctgctattccagcgggcagatcggacagagctcgtgctggtttggaactcccctcgggacccccgatgactcactccttcttaccacctcttccctatggcccagactcgctctctgctctatgccactggttctgg

SEQ ID NO: 37561 - DNA, 1227 bp, Homo sapiens
atccactgggtctttcaaggcaggagaattccatgcagtttcagatgcctggctggtgggcggtgggctggagaagggagaggggggaaccctacaggccgggtgggttctggagagaaatgttaccctcactccactgaggactcaggagtgtcaggagagctatggctgggcagcactctagctcttcctgcagggatgtccctctgggatggagctgatggtcaggggtgccacgcttcccccatcaaagatgccccttgaatgtctaaccatacagaaatccaagcgtgagggcctcaaggcctgtagatacctgcagaggtgaaggcagccaggttggaaggggtcttggtggtgctcgttggtaaaattgccccaggggtccgggaccccctcaggtcaccaggtggtctccttaaacagctctagctgcagacctcgactttaacacaacagtgaatttgggcaccaaggttcctttgaaaggatcaagttaactggaaggagcaggggagtttctctgcttgaagtccccgccatgaatgcctgccccttgtggccttgcacagctgaagctacacagtggtcagcctcagcctggccctgccagagtccactctgatgacagtcagggtgacacccagctatccctgagcagggctctgtaatcatctctctgggacagctgaagacaccaagatacgccctggggacacagctgtgtagcctggggtgctggcaggagacatctctcccctctggctggatgagaaaggccttgcctgccatgaggaactgcgggctgtgagaacccctctggcaatcactccccagcgctgagctccccacccacttctttggtgaaggactctccccttctggtcccccctgaagctggggagggacagaggtaaccttgaagctgggggcactctgcctgctctgtgagctggttcttctgtataaaagcccccttcacctggaggtaaaagaacctgccctgcctctctcttgggatgggaaattgaccttgaatcctgcactggaggaacctggggccgcactgggccaggggagccaaggctgcctgctattccagcgggcagatcggacagagctcgtgctggtttggaactcccctcgggacccccgatgactcactccttcttaccasctcttccctatggcccagactcgctctctgctctatgccactggttctgg

SEQ ID NO: 37562 - DNA, 1864 bp, Homo sapiens
gtgaaaccagatgatttttaaatgttggaactaattaaaaaaaaatttaaaaccttgcctaccaaacaaaacatacccatgggcagatgcrgcttgcgcgttgccagtttttgaggcctcgtctccaaaagctggaatctatgggccagaagccgtgaagcgtttgcagacaactgcttggaaaatgtatatcatgggtttattcaaaggcctttccgggcgcagacacccatcctcctggatggcgcagcgcggccttttctccaccaccttcctctctggaggtggcaagggagtattctaagatggattctctttggcttgaacttcccaggcccacctcgaaagctgttactgggcgggacccttggattttgctttctggctttttctctcctctggatgacgttggccggagcctcctgggcagagaggggccccaggggaaagtgagaagcaggtggtgggggatgctttgggatgctaggattcaggctgagggccttcagaacaagagcctcattgttgtcctttgtctccagcaccgaggacagggcctggggaccaccatcgataaatgctagactgtgccaccgctgcgaccagcctcaccataaaatcctagctcagagtcaagcaagccaacagatgtccattcccctgccttattcttttgagtgttagaggtaggaggggcctgtgggtgggccggtccgcccctgcagtgtagacaaggaagtgaggtccccgcaccgtggcagagctaggacttgaactagctccctgaagtcacccgttgttgtctgcaccaccatgctgctctgtgcctccgttcagttgaattccccaaatctttgtgaagtgcctgcttggtgcccagcactgaacaggaaggcagcccagggacaggacaggtgagcggctccagggaacgggcacctcaaggggagcaagcctgtgcaagtgcaatgagtgtagagatgggaagcacatgtgtcgtgggagcaaggcgtgggcaacggggagggatccaggggaagtggctttttagctgagacttggcattgagattgggagggggttcccgggagcagggacagtgtgtgggcaggcagggctggcgacaagagctgagggaagaccagaagggctgaatggcatgtttgagggggaggccactgtgctgtgcttcaggctggcagggcagccacacctgggaatctgggtgccaaggtgagcagggctgggaaagcccctgtaggactttaatggagtggttggaaggagggggtcaaactttcaatgtgcctcttccagcctttcaggtcaggcaggtctggtgttgggttgccctgccctgtccacatcctacagagagagcttccgaatgggcagcccctttccatgcctgtacccctgacatccagcataggacttcttttccttttttgagacaaggtctgactctgttgcccaggctggagtgcagtggtgaggtcttggctcactgcagcctccgcctcctgggttcaggtgatcctcctgcctcagcctcccgagtagctgggattacaagtgtgtgctaccatgcttggctaatttttgtattttgaatagagacagggtttcaccatgtttgccaggctggtctagaacttctgacctcaagtgatccgcctgtcttggccttccaaagtgctgggattacaggtgtgagccactgtactcggcccagcataggacttcttgaaagtctgtgtccttaagcctggaatgcacccggcaattgctttagagcaatgaatgccaccctcctgtcactgcctgagaatgcagattgggtggaggcattggtgacacctgg

SEQ ID NO: 37563 - DNA, 1864 bp, Homo sapiens
gtgaaaccagatgatttttaaatgttggaactaattaaaaaaaaatttaaaaccttgcctaccaaacaaaacatacccatgggcagatgcggcttgcgcgttgccagtttttgaggcctcgtctccaaaagctggaatctatgggccagaagccgtgaagcgtttgcagacaactgcttggaaaatgtatatcatgggtttattcaaaggcctttccgggcgcagacacccatcctyctggatggcgcagcgcggccttttctccaccaccttcctctctggaggtggcaagggagtattctaagatggattctctttggcttgaacttcccaggcccacctcgaaagctgttactgggcgggacccttggattttgctttctggctttttctctcctctggatgacgttggccggagcctcctgggcagagaggggccccaggggaaagtgagaagcaggtggtgggggatgctttgggatgctaggattcaggctgagggccttcagaacaagagcctcattgttgtcctttgtctccagcaccgaggacagggcctggggaccaccatcgataaatgctagactgtgccaccgctgcgaccagcctcaccataaaatcctagctcagagtcaagcaagccaacagatgtccattcccctgccttattcttttgagtgttagaggtaggaggggcctgtgggtgggccggtccgcccctgcagtgtagacaaggaagtgaggtccccgcaccgtggcagagctaggacttgaactagctccctgaagtcacccgttgttgtctgcaccaccatgctgctctgtgcctccgttcagttgaattccccaaatctttgtgaagtgcctgcttggtgcccagcactgaacaggaaggcagcccagggacaggacaggtgagcggctccagggaacgggcacctcaaggggagcaagcctgtgcaagtgcaatgagtgtagagatgggaagcacatgtgtcgtgggagcaaggcgtgggcaacggggagggatccaggggaagtggctttttagctgagacttggcattgagattgggagggggttcccgggagcagggacagtgtgtgggcaggcagggctggcgacaagagctgagggaagaccagaagggctgaatggcatgtttgagggggaggccactgtgctgtgcttcaggctggcagggcagccacacctgggaatctgggtgccaaggtgagcagggctgggaaagcccctgtaggactttaatggagtggttggaaggagggggtcaaactttcaatgtgcctcttccagcctttcaggtcaggcaggtctggtgttgggttgccctgccctgtccacatcctacagagagagcttccgaatgggcagcccctttccatgcctgtacccctgacatccagcataggacttcttttccttttttgagacaaggtctgactctgttgcccaggctggagtgcagtggtgaggtcttggctcactgcagcctccgcctcctgggttcaggtgatcctcctgcctcagcctcccgagtagctgggattacaagtgtgtgctaccatgcttggctaatttttgtattttgaatagagacagggtttcaccatgtttgccaggctggtctagaacttctgacctcaagtgatccgcctgtcttggccttccaaagtgctgggattacaggtgtgagccactgtactcggcccagcataggacttcttgaaagtctgtgtccttaagcctggaatgcacccggcaattgctttagagcaatgaatgccaccctcctgtcactgcctgagaatgcagattgggtggaggcattggtgacacctgg

SEQ ID NO: 37564 - DNA, 546 bp, Homo sapiens
agtgaaagtagaggcccacataatcatttattattgatagaggcaaggttggaggccacagcttgttgtgaaaaccaaatggtcctgccagcagagtctcaggattaggccatttaacttactgggcccaggtggcatgttgcctgcacggtggcctggtccttgagcaggaggaggccgggaatgaaccattttctaatcagataagtccctgcacttctcaggagtggaagagtcccagagttaactcatcgatcccctcacaggcgaakcggggaagaagcacttctcactaacaggcttctcaaaaactcttcttccctgtagtgattgtttcaatattaataagaagaagctgttctttctacaaataggttaactactggaaatttaatagagtatttatttaattcaaggagctaaacatcttacccttccttcatatgaacattgatatttagaatatatttattgacaaaatgataaaacaagaaatatttaacagtttatttttctgtaagcaattctaaatgtcttataatagca

SEQ ID NO: 37565 - DNA, 961 bp, Homo sapiens
aattatcagatcatgatttggcttctatgatgcttactgtagttaaagctgtgtaatatggatttggaaggtgtttttttttttctccccctcaccccgcaagactgggatggtgttttgaagggttccttgatacctgagcttagtaaacacttgtccaccttggggatctttttacctgaggcaaaggagaagcgggttattattttgaaattagcagtctatttctgaaagtaaggaaatactagctaccctgaaaaaccagttgtttggtaattgaaactggtttaaaagcactgtgtttgggcatcgaaactagtttaaagggattgtgtttcctgcatactttgcaaagaactatgtgtttatgtggatacagccccttgcccccaaccataattggtaaatgcagcgttattttttgagattgaggaaggcattgagtttttgaacttctgatcaatttatggtggtagttkaggattacaaatccttttaaagacacactgaatttgaagaaaatttagactagggtattgttaattgaaaagctgcttttttttttctttctgttttgaacttcaatgaaatacaaagtacagtcctagagaatagtgaaccatgttctaggttttctacttctgttaatgtgcctaattcatttgcagagtgagagtagaaaaagctttaggcacagacaggaaccttgagcttcctgcctctaccacctgtcacaaatgaatttggatgaaactattttcatgatccctttcagcaccaaaatttggggtttctttaaggtttaagacgaacgcattagagtaatgaaaatgcctgtctgactgggatgtttatatttttcatgattatgtcatttctttgccttggcctatagtaagtttgtatgtgaatgctttgcatgagggtcatagctacttggtttaccttgaaatcaatgatt

SEQ ID NO: 37566 - DNA, 535 bp, Homo sapiens
ttttttttcaagttagagaaaatatgctcccatgtgagtcgattctctttctaatttgaaactccaagctagacaccttccaaaggtgaagatgtgacagagggtgatcactgggattccatccatttcctgctgcctcacttttagaaaagcgggaaggaggctgatcctcatttagtgcctacagcactcaggcactatgcatattatttagagtagcttccaatgcaatctcctgaaagattggttcttaacttttccttaggtcgcaaacttctttgagaamgtgttgaaaaccactgagcctctcttcagaaatcaacacacaaaagtttgcattcaacgtaaggatgtttgcaggggtcatgaaccccagctgggctcccttcggatgcatttctgcctgttctagagagatgtcatgtggcagagaaacaaaatgtaaggaaatcacacaatttaaaaacccgagtcccacttatcaaacacttgctagctgcagaatctgagcaagtcacctgacacttctgagccc

SEQ ID NO: 37567 - DNA, 1888 bp, Homo sapiens
ttgctacataagtgtgtttaaaattgacaacagcagttactacctattgtcaatgcatttcgtcaaaatccttttgatgtaccaaaaaagagaaaaggtggggaaagggggaagaatatgtatgctgtcagacttaaaggagagttcttcctatccagagaggagctgtgttaaaattaccccactcgtggatttatatctatccccacacagacacttttttcttttgcatgggtcaatgaaaaattcactaaggaccggggtttagaaatcactgagtagctcaactaacccttctttgatatttggatccttttatataatctctgtaagtggtcttccggtaatacctgaacattgcaagtaacgggtggtgatttccaccttttaatggttttgagtactagaaagttttttggcctatagaattgaaatctgattctgcttgtttattcaaattctactgccttggtggcctacagaacaaatccttcagtctctgtcagagttgggctcttggtgtaacgtgacccgtgaacatgacctgtgtagagtacagcaggagtgtcttgtcataggttgcatgttgcttgcactgatgtagtacaagtttgcatttacttttctggtggccagactcaacgagtttccttttcgctaaaacctgccgagccgttaatcacatgctgccattgaacctcgtctttccatcttgcgctgatgtcattgcaaaacctaacatttattgcgctgtggttttgctttattttagctgattctttccatcatgctttttagaatttgattatattatttggcacytttacctgtcctcccaaagaaatgctgtctgtacattattagatcagactcttttatatctttacttaagccggtgatgaaattgttaaactggctgaacaacacgaagtgtgtctctggaagcttccctcgaggcttacaaggagtcacactctcggttatagttaactactaatgctcttcatatcttataactagcccatatagctccacctttccacatggatatcctgaaagagtgtgtcaaacctcctttgctggttctactgaccaagttatgctgagtaataatgagttcattttcagtgtgtccctagtaacgagcactctcttctgcatatgattaagaaaatgtgttaaatgactgactggattgagacactagggtcacactgtgatctgtgacctccggaggccttaggaactgcagtgcttctaggaaaaatcagaatattgttggactttcttcagcttattttttggtttggtattctcttgtgttgaattgctttcagatagtggggaagaacaccacagtctcttccggttttgttttaattggttgatatacttctcttcctattttactaataaacatttagccaaaaggggtgtcttgaactctgcccattagattactccatatttttcacttctacatatttgcttaatcttctgagaaatatccccatttagttgagttcctcaagaaatcagaacagtccgaagtaagctatctggtagtttattcaaactcttaagtaaaaatatctaggtaaagagccagtgttaaaaattgttattgtggaaagtaagaactcctgggtgaataaaagattatgtctgctgagatgaactattgtgtggagttttaaaagaaagttctggttaatgcttaagacatagtgtcctgtgaagtcagcataactactttcactgtcttctggaggtggttttgataacacatttggttccttgttgaacagtgggtattcacattgttcaggaatagctttgggatactgtcctctccgtattgaagtttctaataagtaattttaggaat

SEQ ID NO: 37568 - DNA, 545 bp, Homo sapiens
gccgcctttcatgagagagtatgattcacacctttcccaggtttcaaagtctcatctgtgctgatgcctgcatagccctatttgaatcccatgaggctgcagttgacttaaaagccctggctggggcttaatcaagcttactgaacagaaaggatttctgaattgtgtagtactgtctgtagtcctttagctctcagtccattagcagggttcatttctacaggaaatcatgatgtttaaaaaccccatcagtattgtatagtgcatcttttgttgactcagtacatgaggatattatttatgccttaaatgtggtaggtgctcagtagccatagtcttaattttatatggtaaaagtcttttatctttaatatcttaacgtagtgctagttcttataatatgacattagagggatgtcattctaactcctatttgtttacatttgtgtataaggtatgctgtgataagtgctgtaagcaaggcrtacatgatagtagaagcatccaatttatcaaccaattttatttgaggatcgttgtaactc

SEQ ID NO: 37569 - DNA, 662 bp, Homo sapiens
tttaaatagaacttcaaaggggaaatgagacgggatggcaactctttttacactgaaggaatagaacagatagaattccctgtagctgggtgaccgaattctcagccagagtgcaatcggcaaaaggattacttggtggtggagagccgtctctttccttttcatcacctctccttcaacctaggccaagtgcaaagggaaagccgtgggcaaagaggacactagtgccaaygggggtgattagaggagaatgtaacctttctctgagccccctgaccaggtataacatatgtaaaaatgtcatgtttgcctttcctcatgccatcccacatttccttgatgtccttttttcaactgctagaatcttttcaaatctgcatggtttgactactattagcaagacaggtatgagagttcatattttgtgtgacttgaagtaagcctgcagaatgtcagttggggctaccatttctccaaagttctctttgatgctcttattacacagaaccaaatcattatggatctaggtcatcttgcatttctaccttaggaaggtgtggaatggagggaaacgctgtggttcgcgtgtcatacgtgccaggtcgctggagcctggactggctcagcagtctggacggtctgttcaggaccgccccaaaggc

SEQ ID NO: 37570 - DNA, 608 bp, Homo sapiens
gggraaaagggatgttcacacactgtttgttcccagaaaaactcctgcacttgtgtaagatgtgtgtatgagaatatatactccaacattattgggaacaaatttctgtttttctctttttatttttaatttttgcggatacataataggtatgtatatttatgggttatatgagatgttttcatacaggcatgtaatacttaataatcacatcatggaaaatggtatattcatccactcaagcatttattctttgtgttacaaataatccaattatactcttagttattttggaagtgaatttctatcattaggaaatgtgtgagagaactctgatatattaataaagtagaatattcaactgcacataattttaactaaatctctacatattaacatgatatatgtattgaaaatacaatattaaggaaaagaagatcaagtttcagaattaaagcagtttcaaagcagtggaattttaaggacacataaagccacaatatattgttcagagaaatgtgtatagtatagtaaaaaaaacataaatcagatttatgaatgtctagctctgggaaggaagagagaggtagcaaggaattatattcttt

SEQ ID NO: 37571 - DNA, 964 bp, Homo sapiens
attacaggagctaatattccctggcagaagcaaagctgccaaaaaccaaactggagattagtgtattaatttggttcacagtagattcttctctagtatttctcttgaaagccccaatagaacttaaacaattccaacttagcttgaatcagagaatgacatgtttaaagaaatgcagcattaagcatccaatttgaaaatgtatgttggcgtacacataaataatcttacagtagataaaagtcacacgaacctctcttattttaactgtacatacatarcaggccaaaatcatagacctttctattcagcctaagatttaatgctttggatttatgagaaggtctgtttctggatttgtctcttccacaatttctgcttgagtttcatgaaaaaagtattggccaaaggtggaaaatacaaactcaactaaaccaaagtttcagccttgctgtctcagcttcatttgtgtgcttgcttattaatctctgctttacaaggaaagcgtgaatatgttgtgtgcctcatcactctttggttctctgcatgacctcctatacctttgctcctgaaaggagctttttggcagctgaaaaggtatctttttggcagcacagctgtgcaaggatgctaacatactctccaatcggacacaatgtgttctcttgaccatctaaacaaatgtagaaagatccagctgatttcagccaatagctaattttgatattttcaagttgtaaaaattttatattaatgtatacattgcaatacatggagtgtgggatgcacattccatgtgcacattaaaaaaaaacctttgtactgcagtttttttaaaaatggaatttgaaacttatagacaaattgtgtattgcactatcctaaaatgccacaaaagttacagcttgaaagtaacaatgatagagataagaaatggatattaattaaatggtattttgcaaac

SEQ ID NO: 37572 - DNA, 588 bp, Homo sapiens
ggaaaattccatgagaaagtccaataaatgctctgagggtttagaggagggagagttcacattcatttggagaacaaattagaattgctttagaaactacgacatctgaattttgagagcagcattactgtagagtctgaagggcatggatattattattcatggaatcctaactgtctagcttattttgtctggatgtctatcacagcatcgctacctacaggcttaggaataaggcacagtccagagagtctccgggggtcagtgtggactcagtccccaccagaacaaacaggctgtgtaagctttctctaaataaatgaattatgatcctcacaaattattaatatcaaggtggtcaagaatgtgggctttggagtcagacacagtttcacgttctacctctaccacttaccagctgtgagactgagcagaatattgaagtagttgagatcttttctccttgagttcaaatctcttttccaccacttaggaactatgkgaccaaggcaatttgtttaccctctccatgacctgatttcctcatgtgtaaaatgtagataataaaaataccttcttcacagggtt

SEQ ID NO: 37573 - DNA, 761 bp, Homo sapiens
ttctaaatacgttttgatgaaaattgcgttacatttatttgtgtcttcatttaaaagcttccaaaataccatcaatacatattacaaattgttttaggttatgttgaattgacaaatctgggtaatttgtatagcattgaaaatatcctattcttaaaggtcaaataaacataattatacaaatctacaggctttatggcattatatgcagttattttgatgataccatatttatttataattatttcatgtaagtcaatattctggcttactgtttccaaaatgacttattttggttgttttaagagtatactggataatgaaacctaacgctttctgttgtctttttaaaaaaatatttttatttatttagttttttaattgctttgttgtttttaattttggggggttcctagtaggtgtatatatttatggagtacatgagatgttttgataaagccatgcaatgtaggataagcacatcagggagaatagrgtatctgtctcctcaagcatttatcctttgagttacaaacaatccaattacactctttttaagttatttaaaaatatacagtcaagttattattgactatagtcacactcttatgctatcaaatagtaagttttattcattttttctaactacttttgtacctattaatcatccccacctctcctccaagcccccacaacccttcccagcctctggcaacaatccttctactttctatgtcaatgagttccattattttgatttt

SEQ ID NO: 37574 - DNA, 1166 bp, Homo sapiens
agtcacagctcctctscaagggctcttctaaaccattttcacatgctcacaacccaaaaacgaacaattcaagaaggaaaaacttagtctctgaagcataaacaacttcaacctgtcaagcatctgagcaggggacacacaggacactggggaacaatttttgacctccacgcagagagaacaaatgagcctctacaggaacctgagccgcaccttccgcgtttccatgttgctgggacctcaggaagtctgagcacagcagtgttctcccagaaatgaggaccagcaccgcgctcgcctattttcatcccaaacatctacaaaacaattcctagacaaactcccctggggaaaggaagggcaacgaagcaagcaagaggaaaaacaacccagaaacttctcatagtaacctgaagtttttgtttctgtttctgaggcagtgtctccctctgttgcccaggctggagtgcagtggcgcaatctgtactcactgcgacctccaccaccacagttcaagcgattctcctgcctcagccgcccgaggagctgggatcatagacaggcgccaccatgccaggataatttttgtgtttatttctttttagcaaagacgggttttgtcatgttggccaggctggtctctaactcttggcctcaagtgattcacccgccttggcctcccaaagtcctggggttagttatgagccaccgtgcctggcgtctccaagtaatctaaactttaaaatttttgttctatggcatattctttccttgtttattttccttttcaaaggtttcctctgggtttataggaaagctcactttggcaatgtcagtttcttccaggtaagtagtgagaacacagagaaaagactttgtttctttgctgctgggatattttggtctgtgtttgggcagagaggatgtgtgtgcaacagccgtggtgggcctcagagatgctgatggggggtccaagtgaaagtgctgcctgcctccacttcagaaggaaagctatggagtccttcccagtgtttgcctcaaggccaagcagtcgcagggtgaccctttgatatctgctcccctgacaaggattctgagcctcatctaaggtagaggtggggagggaggcaggatgtgatggacacagatttccagactctttcaat

SEQ ID NO: 37575 - DNA, 1166 bp, Homo sapiens
agtcacagctcctctccaagggctcttctaaaccattttcacatgctcacaacccaaaaacgaacaattcaagaaggaaaaacttagtctstgaagcataaacaacttcaacctgtcaagcatctgagcaggggacacacaggacactggggaacaatttttgacctccacgcagagagaacaaatgagcctctacaggaacctgagccgcaccttccgcgtttccatgttgctgggacctcaggaagtctgagcacagcagtgttctcccagaaatgaggaccagcaccgcgctcgcctattttcatcccaaacatctacaaaacaattcctagacaaactcccctggggaaaggaagggcaacgaagcaagcaagaggaaaaacaacccagaaacttctcatagtaacctgaagtttttgtttctgtttctgaggcagtgtctccctctgttgcccaggctggagtgcagtggcgcaatctgtactcactgcgacctccaccaccacagttcaagcgattctcctgcctcagccgcccgaggagctgggatcatagacaggcgccaccatgccaggataatttttgtgtttatttctttttagcaaagacgggttttgtcatgttggccaggctggtctctaactcttggcctcaagtgattcacccgccttggcctcccaaagtcctggggttagttatgagccaccgtgcctggcgtctccaagtaatctaaactttaaaatttttgttctatggcatattctttccttgtttattttccttttcaaaggtttcctctgggtttataggaaagctcactttggcaatgtcagtttcttccaggtaagtagtgagaacacagagaaaagactttgtttctttgctgctgggatattttggtctgtgtttgggcagagaggatgtgtgtgcaacagccgtggtgggcctcagagatgctgatggggggtccaagtgaaagtgctgcctgcctccacttcagaaggaaagctatggagtccttcccagtgtttgcctcaaggccaagcagtcgcagggtgaccctttgatatctgctcccctgacaaggattctgagcctcatctaaggtagaggtggggagggaggcaggatgtgatggacacagatttccagactctttcaat

SEQ ID NO: 37576 - DNA, 1166 bp, Homo sapiens
agtcacagctcctctccaagggctcttctaaaccattttcacatgctcacaacccaaaaacgaacaattcaagaaggaaaaacttagtctctgaagcataaacaacttcaacctgtcaagcatctgagcaggggacacacaggacactggggaacaatttttgacctccacgcagagagaacaaatgagcctstacaggaacctgagccgcaccttccgcgtttccatgttgctgggacctcaggaagtctgagcacagcagtgttctcccagaaatgaggaccagcaccgcgctcgcctattttcatcccaaacatctacaaaacaattcctagacaaactcccctggggaaaggaagggcaacgaagcaagcaagaggaaaaacaacccagaaacttctcatagtaacctgaagtttttgtttctgtttctgaggcagtgtctccctctgttgcccaggctggagtgcagtggcgcaatctgtactcactgcgacctccaccaccacagttcaagcgattctcctgcctcagccgcccgaggagctgggatcatagacaggcgccaccatgccaggataatttttgtgtttatttctttttagcaaagacgggttttgtcatgttggccaggctggtctctaactcttggcctcaagtgattcacccgccttggcctcccaaagtcctggggttagttatgagccaccgtgcctggcgtctccaagtaatctaaactttaaaatttttgttctatggcatattctttccttgtttattttccttttcaaaggtttcctctgggtttataggaaagctcactttggcaatgtcagtttcttccaggtaagtagtgagaacacagagaaaagactttgtttctttgctgctgggatattttggtctgtgtttgggcagagaggatgtgtgtgcaacagccgtggtgggcctcagagatgctgatggggggtccaagtgaaagtgctgcctgcctccacttcagaaggaaagctatggagtccttcccagtgtttgcctcaaggccaagcagtcgcagggtgaccctttgatatctgctcccctgacaaggattctgagcctcatctaaggtagaggtggggagggaggcaggatgtgatggacacagatttccagactctttcaat

SEQ ID NO: 37577 - DNA, 1166 bp, Homo sapiens
agtcacagctcctctccaagggctcttctaaaccattttcacatgctcacaacccaaaaacgaacaattcaagaaggaaaaacttagtctctgaagcataaacaacttcaacctgtcaagcatctgagcaggggacacacaggacactggggaacaatttttgacctccacgcagagagaacaaatgagcctctacaggaacctgagccgcaccttccgcgtttccatgttgctgggacctcaggaagtctgagcacagcagtgttctcccagaaatgaggaccagcaccgcgctcgcctattttcatcccaaacatctacaaaacaattyctagacaaactcccctggggaaaggaagggcaacgaagcaagcaagaggaaaaacaacccagaaacttctcatagtaacctgaagtttttgtttctgtttctgaggcagtgtctccctctgttgcccaggctggagtgcagtggcgcaatctgtactcactgcgacctccaccaccacagttcaagcgattctcctgcctcagccgcccgaggagctgggatcatagacaggcgccaccatgccaggataatttttgtgtttatttctttttagcaaagacgggttttgtcatgttggccaggctggtctctaactcttggcctcaagtgattcacccgccttggcctcccaaagtcctggggttagttatgagccaccgtgcctggcgtctccaagtaatctaaactttaaaatttttgttctatggcatattctttccttgtttattttccttttcaaaggtttcctctgggtttataggaaagctcactttggcaatgtcagtttcttccaggtaagtagtgagaacacagagaaaagactttgtttctttgctgctgggatattttggtctgtgtttgggcagagaggatgtgtgtgcaacagccgtggtgggcctcagagatgctgatggggggtccaagtgaaagtgctgcctgcctccacttcagaaggaaagctatggagtccttcccagtgtttgcctcaaggccaagcagtcgcagggtgaccctttgatatctgctcccctgacaaggattctgagcctcatctaaggtagaggtggggagggaggcaggatgtgatggacacagatttccagactctttcaat

SEQ ID NO: 37578 - DNA, 1166 bp, Homo sapiens
agtcacagctcctctccaagggctcttctaaaccattttcacatgctcacaacccaaaaacgaacaattcaagaaggaaaaacttagtctctgaagcataaacaacttcaacctgtcaagcatctgagcaggggacacacaggacactggggaacaatttttgacctccacgcagagagaacaaatgagcctctacaggaacctgagccgcaccttccgcgtttccatgttgctgggacctcaggaagtctgagcacagcagtgttctcccagaaatgaggaccagcaccgcgctcgcctattttcatcccaaacatctacaaaacaattcctagacaaactcccctggggaaaggaagggcaacgaagcaagcaagaggaaaaacaacccagamacttctcatagtaacctgaagtttttgtttctgtttctgaggcagtgtctccctctgttgcccaggctggagtgcagtggcgcaatctgtactcactgcgacctccaccaccacagttcaagcgattctcctgcctcagccgcccgaggagctgggatcatagacaggcgccaccatgccaggataatttttgtgtttatttctttttagcaaagacgggttttgtcatgttggccaggctggtctctaactcttggcctcaagtgattcacccgccttggcctcccaaagtcctggggttagttatgagccaccgtgcctggcgtctccaagtaatctaaactttaaaatttttgttctatggcatattctttccttgtttattttccttttcaaaggtttcctctgggtttataggaaagctcactttggcaatgtcagtttcttccaggtaagtagtgagaacacagagaaaagactttgtttctttgctgctgggatattttggtctgtgtttgggcagagaggatgtgtgtgcaacagccgtggtgggcctcagagatgctgatggggggtccaagtgaaagtgctgcctgcctccacttcagaaggaaagctatggagtccttcccagtgtttgcctcaaggccaagcagtcgcagggtgaccctttgatatctgctcccctgacaaggattctgagcctcatctaaggtagaggtggggagggaggcaggatgtgatggacacagatttccagactctttcaat

SEQ ID NO: 37579 - DNA, 617 bp, Homo sapiens
tggtcatttctactttatcctaattaagtggtctgagatttgaaaaaaaagtaatagacttacaatatttttatgacttattttttaaataaatatgtcagtaaaaacttccctggggaaaaaaaattcttgaggagaaaagagtgtttgggkttttttttttcagttgtatggcactgcttgcaaatgaaaggattcgttgtgtgcctcacatgcccaaaaaggacagcacgagcattctaacttaaggactggtttaaatatgacctaatgaactaaatatatttctgtctggtattcttaggttactttacttctaaggttgtttgaatgcatttatccagctctcctatcaaatacatgccaggttaaccctgtgaaggttttcctgtatgattctgagaatttctttataagaacagggtcttgatagtgaaggttctttccccaaagtgcaaggccttctattttgattcaatatcaacataatgctttttttttttttgaaagtgacttaagtactaaagattatcctcaatagtaattctacttagacatattttggttgaagaaatttaaagagtttattttttgtaggagcactgtgctgtgatcat

SEQ ID NO: 37580 - DNA, 617 bp, Homo sapiens
tggtcatttctactttatcctaattaagtggtctgagatttgaaaaaaaagtaatagacttacaatatttttatgacttattttttaaataaatatgtcagtaaaaacttccctggggaaaaaaaattcttgaggagaaaagagtgtttggggttttttttttcagttgtatggcactgcttgcaaatgaaaggattcgttgtgtgcctcacatgcccaaaaaggacagcacgagcattctaacttaaggactggtttaaatatgacctaatgaactaaatatatttctgyctggtattcttaggttactttacttctaaggttgtttgaatgcatttatccagctctcctatcaaatacatgccaggttaaccctgtgaaggttttcctgtatgattctgagaatttctttataagaacagggtcttgatagtgaaggttctttccccaaagtgcaaggccttctattttgattcaatatcaacataatgctttttttttttttgaaagtgacttaagtactaaagattatcctcaatagtaattctacttagacatattttggttgaagaaatttaaagagtttattttttgtaggagcactgtgctgtgatcat

SEQ ID NO: 37581 - DNA, 1543 bp, Homo sapiens
tagcatttcatatctataaacaccttcttcagtcccttatcttcacacaatgcccactgcggcaaaccatggcctcctgtactctcttttaatacatcaggctcagtttccaactgttttagatcatcacaacaaagttaaggcatagtttgtttctatagaacaatgtatcacaatacaagtccaaataaaatgtaaccaatagaaataatcatgtgtgaccagcaaaacaattatacctgtaatctgtaaaattttagctagttccagtaccccccatttttctatatttcccagtatcattccgtgtagctaattcttaccatggaaaacatgttagaaatggtttgcaaattgaaaactgtctttaatggctaattttttaaaacactacttcatatatcctattggctgttgtaacaaagattcactagcccaagccaatacaatgactaaattatctaacctgaaagtaaaataaatgttcaaagtcacctctcaaacaagtcacagtagtcactgtgaccatgccaggaatgccagcagcagagactgcgtgtgacctctacttgtcactattgaacatcaaaagcaggggaggatagattctgcttgctccaacattgagaagtcaaccactctgtcttacaatattaatataagagaatctaaatttttataatcatattcattataatacatctttggctaaaaaatgactatctataacttaacagtcttcctagggtatactaggaagtatatcctactattgtattactgtatttttggtagagacaggagacagggttttgctgtgttttccaggctggtcttgaactcctggcctcaaagtgctgggatgaccatgtctggcaggatatatatattcctaagaataaaagatggctrcacacgaatttgccctattaagatattcctccactgttgcatgcatataagcatgtgtatattggagcacttagattatttcaaatatttttgaatgccttcttaccacttattaacataacaattactgagaactcatagtaaaaatcatttgacttatccctctactttcttttagatacaacttcttatttaaaagtttgaaacaggctgcctaaatgcctacaatactccataaattctacgccctgagagaagagagagaaatgcaaatatatattaaactggacaagaacaaagcaaaagtcagatcaaagtaggaaattttaagtattgcaagcaaagtgtgaaatcttacatatttagattaggtaactttactgtgattacacaggcataattaccattagaagtccgatgaaagagcacaaggccacaaatgttaatgcactttcagaatgctagttgggaagaccagggaattaacaccgaagactctggttgtgtttgccccaagtgctgggtcaaatcactgctgtacatcagtcagtcccacctcctagtgtcgaagaatggctgtggaattttgattgacactcctgtgagacagtggtattcctaaaccaaagta

SEQ ID NO: 37582 - DNA, 2466 bp, Homo sapiens
aaaaccataatcattttctctaccaataaaatgttgactgtaacaactgtatattttttcaaattatgaagtgctaattaactacttgttctaaaagtattcttagcttttgatttgggaacacaaagataggaattgaggttacaattatagtgaaatatttatatttataataacagctttattattacctcacatagcacagctagtactaataatgtggctttagtattaacccacaagaaaataatagattttatcattgcaaaaatactggcagtacctttaagatttatttaaagattatactttcatttgagtttctattttaagaaattttgaaaatctgttcacaataataaagaatatgaaaacattatcctcaatcacatggaatgtagaagtgaaatctcccaaatctactctattaaatgattagaaaaaattgatatattgttatattaaaggaagtttgaaattaatatgagtaattccagaaggcaatattttatttgatattttaaagcatttaagccttccttgaataagtctgactacgcagtatgaataatagagatgtaagaaagcaataaataaatttgctgtgcaattcagtgtttttgcatatggatactttttgttttttcacttgtctttttagcgagagtttagatgtgttatttaaatacggaaaaccttcagatattggaagaataaagaaaaaataatgctaaattttacacttagacaagtaaagggaaagtggacattttgttactgccaagaattttcaaattaaaaggacaaatttagctcaaattcaacatttatgaatagcttttaaagtcacattattcctctttgatttcgcaatatgtacatactcattacatgcaattttaaaatactaaaaattataaataataattaaaatcaaccacagtaatagctctcagaagttactacagttatattgaaaatgtgtattcttagagtccttcctctattcatatatccttttattatatccacaaattgaggttaatttgttttgtaatctmctttactcacatttcaatattgccaacttttttgggaaacacatcattaaatatttttgacaagctgatttcaaatgttacatgttttttcctcaaattgacaaattactacttatagaataaatacatttcttattaccagactgaaagattatttatactttcctgctattgaagaatattgtaatggattctatataacctgtcttaaaagccttcacatagaatgcatgtaattgtaaactagattaggtaaccataaaattgctattgtcaacagtaactgaaagaataaggaattagcagctgaattaaatttagcagtgtgattcagttttatgaattaaaaatcttgaggttaaaactactacctactacagatagcttctattttcataatagccttacaagacaaagagagaaattttgatattttaccctgcagtgacactattcttagtataataagtaattctcttatgtattaacaatcacctgtgggtggtgtactgtggtgtctcaaatattaagtatgtgcctattattttgtatttctttgcttcagaaataagatttgtgccaggatttttcttccctcaaagtatgcctagacattataatttaacgtactcctctagggaaaacagaatagaattcattacaaaatattttgactcaaatattggaaggaagttcatctgtcttttttattatcatatttacaaaaccggacatcaaggtatatattttgggaggggcaattgttcttgaaatgtttgaagtagaagaaggtaagattacaaggatggcaaatatttccaaggagttatgggtaacatttttcttttaagcctctttgttcttgttttattcttgaaatatacagtggatgtatatttcttcttcattgagaacagatttagtgaaatcattaattaaagattccttttgcttctaatttaaataatagagcaaaatattttgtcttttaaaaatgtgaaataatagtaagtctatttaaaatgaacatatacatttagacacttggcaatacaattaatacttgcttccagtgttccaagctgtttttcacagaccttcgtgctcaagggcatgcttgccttactgaggctgtattctataagaacacggagtccatactatgactcatactcctaggcagtgtagtcattttcagtgaaaccacaaatctcttattgtccctaggacaagtcataatgatgattgattttatgaagagaaaagaatcctagctttttattaatatatcagtaacatctccttaaatgagagataacagagtaagtttcaccacccatcatttttacaacactaaagtagatgaataaaggatagaaatataaaactttgattagaagaatac

SEQ ID NO: 37583 - DNA, 915 bp, Homo sapiens
tatttagatagcttaaaataattaattttccagagataggccacaaagacatttgtgtgatgttcaggcccccaaaagacaaaaataaaccaaagaaaataaatgatgtttatatttatcatggggaacagtttcccacttctctaaactttattctattaattcagggacttatgttgttactttttatttgttaaacattataacaatgtaaaaaagaatattcayccaaagatgtctaataatttaaagaacatagctgagcaaagcaaaatcatagtcatcctacagaatcagaatagatcctcactcaagatttggctcaggtcatgtacacaagagggaaagatttggtttagatgtcatagtaatggtgccacattcacatatacaagagtatatgaatttttttaaaattcatatgtgaagctttttggggagagagtgtcaggacttccaactgagctaaaaattaacttgagatggataagaataataatgatggttagagaattgtatagggatgagggttcttgctcatactctgaattcccagcacatgccaaatacaggggttctgctcaaaagccgacgacagttaaacatttaaaaaattgaattagactccttattataagaaagaatgaacttaaaaatatgtcattattatacacaaatagtgaaataagacattagattgaaagagatgaaaagtaatgagacaatgctcattttaataaaggtgacttcacttgttatactcctattgcactcaggtaattgtttttttatgctttaaaatactctggataacatttctttgtcagttttagagttgattcactcattcctactaatttgtaagtaaatactttgaggagcattaacgtagcatatccatgattgaaagctcaa

SEQ ID NO: 37584 - DNA, 915 bp, Homo sapiens
tatttagatagcttaaaataattaattttccagagataggccacaaagacatttgtgtgatgttcaggcccccaaaagacaaaaataaaccaaagaaaataaatgatgtttatatttatcatggggaacagtttcccacttctctaaactttattctattaattcagggacttatgttgttactttttatttgttaaacattataacaatgtaaaaaagaatattcatccaaagatgtctaataatttaaagaacatagctgagcaaagcaaaatcatagtcatcctacagaatcagaatagatcctcactcaagatttggctcaggtcatgtacacaagagggaaagatttggtttagatgtcatagtaatggtgccacattcacatatacaagagkatatgaatttttttaaaattcatatgtgaagctttttggggagagagtgtcaggacttccaactgagctaaaaattaacttgagatggataagaataataatgatggttagagaattgtatagggatgagggttcttgctcatactctgaattcccagcacatgccaaatacaggggttctgctcaaaagccgacgacagttaaacatttaaaaaattgaattagactccttattataagaaagaatgaacttaaaaatatgtcattattatacacaaatagtgaaataagacattagattgaaagagatgaaaagtaatgagacaatgctcattttaataaaggtgacttcacttgttatactcctattgcactcaggtaattgtttttttatgctttaaaatactctggataacatttctttgtcagttttagagttgattcactcattcctactaatttgtaagtaaatactttgaggagcattaacgtagcatatccatgattgaaagctcaa

SEQ ID NO: 37585 - DNA, 941 bp, Homo sapiens
atgcttttttacccctgttattttactgacctcatcccctgctattctcctgcaggaactctagcctcttttccattacatgaacatatttgggtactctgctgctttatgcctttttttttttagatgggaacatgctgccaactagatagccacatgactaaaaatctatcatcacttccttcaaatctttgctcaaatacaattttctcatcgacactgactctgattacttgatttaaaatcaaatatttccacttctactactagaacaccytattaaacttacctggatccttttttttttgcataacatttgtaagcttctaacattaaaaataactttcttgcttattatgtctgtttgtattgtctgtgtaccactactagaattaggagctccataatggcatggaattctcagtatgttctgtctgcagaggttttcgagtagtgtggaaaatacttttatggtagatgtacaataaatatctgttatataaataaagtttcttatatatttagttatactttataaattctgaagttacatcttttctttgaagtgcatatcattctaattatagaaatacaaattatgttaaaacaccttttgtaattagttgcatgttaattccaaagatactcactatatgttaatgagcttagaacactacaaaaaattatacagaggcaacttccatttaaatttgaagtaaatagataaatgatttaagttagaaaaggcaaaggctgaaaagatgacacatatgagtgatgttaaaagacaggtatttaaagccaaagaagtctttcatagataaagattactcctttatattatgacagaatactacacattatctttaattacatgacattaaattgtatatatatatatatatatatctgttacctcacactacatatacacatatgca

SEQ ID NO: 37586 - DNA, 941 bp, Homo sapiens
atgcttttttacccctgttattttactgacctcatcccctgctattctcctgcaggaactctagcctcttttccattacatgaacatatttgggtactctgctgctttatgcctttttttttttagatgggaacatgctgccaactagatagccacatgactaaaaatctatcatcacttccttcaaatctttgctcaaatacaattttctcatcgacactgactctgattacttgatttaaaatcaaatatttccacttctactactagaacaccctattaaacttacctggatccttttttttttgcataacatttgtaagcttctaacattaaaaataactttcttgcttattatgtctgtttgtattgtctgtgtaccactactagaattaggagctccataatggcatggaattctcagtatgttctgtctgcagaggttttcgagtagtgtggaaaatacttttatggtagatgtacaataaatatctgttatataaataaagtttcttatatatttagttatactttataaattctgaagttacatcttttctttgaagtgcatatcattctaattatagaaatacaaattatgttaaaacaccttttgtaattagttgcatgttaattccaaagatactcactatatgttaatgagcttagaacactacaaaaaattatacagaggcaacttccatttaaatttgaagtaaatagataaatgatttaagttagaaaaggcaaaggctgaaaagatgacacatatgagtgatgttaaaagacaggtatttaaagccaaagragtctttcatagataaagattactcctttatattatgacagaatactacacattatctttaattacatgacattaaattgtatatatatatatatatatatctgttacctcacactacatatacacatatgca

SEQ ID NO: 37587 - DNA, 941 bp, Homo sapiens
atgcttttttacccctgttattttactgacctcatcccctgctattctcctgcaggaactctagcctcttttccattacatgaacatatttgggtactctgctgctttatgcctttttttttttagatgggaacatgctgccaactagatagccacatgactaaaaatctatcatcacttccttcaaatctttgctcaaatacaattttctcatcgacactgactctgattacttgatttaaaatcaaatatttccacttctactactagaacaccctattaaacttacctggatccttttttttttgcataacatttgtaagcttctaacattaaaaataactttcttgcttattatgtctgtttgtattgtctgtgtaccactactagaattaggagctccataatggcatggaattctcagtatgttctgtctgcagaggttttcgagtagtgtggaaaatacttttatggtagatgtacaataaatatctgttatataaataaagtttcttatatatttagttatactttataaattctgaagttacatcttttctttgaagtgcatatcattctaattatagaaatacaaattatgttaaaacaccttttgtaattagttgcatgttaattccaaagatactcactatatgttaatgagcttagaacactacaaaaaattatacagaggcaacttccatttaaatttgaagtaaatagataaatgatttaagttagaaaaggcaaaggctgaaaagatgacacatatgagtgatgttaaaagacaggtatttaaagccaaagaagtctttcatagataaagattactcctttatattatgacagaatactacacattatctttaattacatgacattaaattgtatatatawatatatatatatctgttacctcacactacatatacacatatgca

SEQ ID NO: 37588 - DNA, 536 bp, Homo sapiens
tttttcatacactgtattctcaatttttattatatgtccttataataaccatgtcccaaacatggttcctataaatacataaatgtcttaacatagtttttagtggcaagccaatataaatacattacataaaatgttttttgaaaactgtaattaaagatgataaaataatataaggagatgcttcttctattatgtaactattagaacttgggaaataagctttgtgaagtggaatttccatattaatgtaaatataactaatgtgccaagaggaccagtgaagttttcataccaaactgatggaaaccaaaatctaatcttccccccaaataatgayatccaaaacaattacttttctctgtgagaattttttgacatgttaatgggatccttacactgcataagagaacttcaaaaaagagttcaaagtgacagcaaacactaaagaaatagccagtcagaaaaacatatgctatgccaaattttaataatcagtttagagaatgactactagaatttaagctccactagaa

SEQ ID NO: 37589 - DNA, 639 bp, Homo sapiens
tccattatgtacatatactccattttctttatatattcctttgttttttttttccttccaacattttttattgcattaaaatacatataacatgaaatttaccgtctttttaaaaaatgttactttaagttctgggatacatgtgctgaatgtgcaggtttgttacacaggtatacatgtgccatggtggtttgctgcacctgtcaacccttcatctaggttttagccccaaatgcattaggtatttgtcctaatgctctccctcccatcgcgccccacccctcaacaggccccagtgtgtggtttccctccctgtgtccatgtgttctcattgtttaactcccacttatgagtgaraatgtgtggtgcttgcttttctgttcttgtgttagtttgctaaggatgatggtttccagcttcatccatgtccctgtgaaggacattaactcattcttttttatggctgcatagtattccatggtgtacatgtgccatattttctttatccagcctattattgatgggcatttgggttggttccaagtctttgctattgtaaatagtgctacaataaacatacatgtgcatgtgtctttatagtagaatgatttataatcctttcggtatatacccagtagg

SEQ ID NO: 37590 - DNA, 1048 bp, Homo sapiens
atatttttagttcctgtttgtggaagtaaagcccgtactatgaaaaataaggcagaatccttttaaatgacaagattcagttaattccatgtcttgttcagttggtcttatatccgggaactggaagcacaggttttgtctctaagataacctgcratgaatcagaccattcagtttttttctttctttttgagacagagtctcactttgtcgcccaggctggagtgcagtggtgcgatctcagctcactgcaacctccgcctcccgggttcaagtgattctcctgcctcagcctcccgagaagctgggattacaggcaaacaccacaacacctggctaatttttgtatttttagtagagacggggtttcactatgttggccaggctagtatcgaactcctcacctcgtgatccacccacctcggcctcccaaagtgctgggattacaggcatgagtcaccgcactcggcctgaccatccagcttttatggctccacgtccatcatgtctgggcagttccagcttgagacaaacagcccttcagtgaatttacaaggtagattgcaagagccttgcagagttcagaaaaccacaagtcacataaaaaataggtctgagaaagtagtctaggctttcaaaaccctctccttaaaaacaaagtgactaatacctaagatatttctgtaaacacactcaacacatagtaggcatttaatacacattagtttccattcctttcttatttatttaaatcctatctgaaaacaacatgtattcataaacttttatagctgagtcaaactgtcacaaaaatggaaggaatgtttgcattaccatcgtgataatgttgttggggaaagtttgtttcatgaaaggttgggggtttgttttcttctgatgacctaatagtcaacacagtagaagtgtattacatgaaactagactagaaatatattacatgagacttggaaaagataactcatgagttaggatttatcattggccagtggaattttttttacaataaaataagaaaacctgagccgag

SEQ ID NO: 37591 - DNA, 1048 bp, Homo sapiens
atatttttagttcctgtttgtggaagtaaagcccgtactatgaaaaataaggcagaatccttttaaatgacaagattcagttaattccatgtcttgttcagttggtcttatatccgggaactggaagcacaggttttgtctctaagataacctgcaatgaatcagaccattcagtttttttctttctttttgagacagagtctcactttgtcgcccaggctggagtgyagtggtgcgatctcagctcactgcaacctccgcctcccgggttcaagtgattctcctgcctcagcctcccgagaagctgggattacaggcaaacaccacaacacctggctaatttttgtatttttagtagagacggggtttcactatgttggccaggctagtatcgaactcctcacctcgtgatccacccacctcggcctcccaaagtgctgggattacaggcatgagtcaccgcactcggcctgaccatccagcttttatggctccacgtccatcatgtctgggcagttccagcttgagacaaacagcccttcagtgaatttacaaggtagattgcaagagccttgcagagttcagaaaaccacaagtcacataaaaaataggtctgagaaagtagtctaggctttcaaaaccctctccttaaaaacaaagtgactaatacctaagatatttctgtaaacacactcaacacatagtaggcatttaatacacattagtttccattcctttcttatttatttaaatcctatctgaaaacaacatgtattcataaacttttatagctgagtcaaactgtcacaaaaatggaaggaatgtttgcattaccatcgtgataatgttgttggggaaagtttgtttcatgaaaggttgggggtttgttttcttctgatgacctaatagtcaacacagtagaagtgtattacatgaaactagactagaaatatattacatgagacttggaaaagataactcatgagttaggatttatcattggccagtggaattttttttacaataaaataagaaaacctgagccgag

SEQ ID NO: 37592 - DNA, 1048 bp, Homo sapiens
atatttttagttcctgtttgtggaagtaaagcccgtactatgaaaaataaggcagaatccttttaaatgacaagattcagttaattccatgtcttgttcagttggtcttatatccgggaactggaagcacaggttttgtctctaagataacctgcaatgaatcagaccattcagtttttttctttctttttgagacagagtctcactttgtcgcccaggctggagtgcagtggtgcgatctcagctcactgcaacctccgcctcccgggttcaagtgattctcctgcctcagcctcccgagaagctgggattacaggcamacaccacaacacctggctaatttttgtatttttagtagagacggggtttcactatgttggccaggctagtatcgaactcctcacctcgtgatccacccacctcggcctcccaaagtgctgggattacaggcatgagtcaccgcactcggcctgaccatccagcttttatggctccacgtccatcatgtctgggcagttccagcttgagacaaacagcccttcagtgaatttacaaggtagattgcaagagccttgcagagttcagaaaaccacaagtcacataaaaaataggtctgagaaagtagtctaggctttcaaaaccctctccttaaaaacaaagtgactaatacctaagatatttctgtaaacacactcaacacatagtaggcatttaatacacattagtttccattcctttcttatttatttaaatcctatctgaaaacaacatgtattcataaacttttatagctgagtcaaactgtcacaaaaatggaaggaatgtttgcattaccatcgtgataatgttgttggggaaagtttgtttcatgaaaggttgggggtttgttttcttctgatgacctaatagtcaacacagtagaagtgtattacatgaaactagactagaaatatattacatgagacttggaaaagataactcatgagttaggatttatcattggccagtggaattttttttacaataaaataagaaaacctgagccgag

SEQ ID NO: 37593 - DNA, 1048 bp, Homo sapiens
atatttttagttcctgtttgtggaagtaaagcccgtactatgaaaaataaggcagaatccttttaaatgacaagattcagttaattccatgtcttgttcagttggtcttatatccgggaactggaagcacaggttttgtctctaagataacctgcaatgaatcagaccattcagtttttttctttctttttgagacagagtctcactttgtcgcccaggctggagtgcagtggtgcgatctcagctcactgcaacctccgcctcccgggttcaagtgattctcctgcctcagcctcccgagaagctgggattacaggcaarcaccacaacacctggctaatttttgtatttttagtagagacggggtttcactatgttggccaggctagtatcgaactcctcacctcgtgatccacccacctcggcctcccaaagtgctgggattacaggcatgagtcaccgcactcggcctgaccatccagcttttatggctccacgtccatcatgtctgggcagttccagcttgagacaaacagcccttcagtgaatttacaaggtagattgcaagagccttgcagagttcagaaaaccacaagtcacataaaaaataggtctgagaaagtagtctaggctttcaaaaccctctccttaaaaacaaagtgactaatacctaagatatttctgtaaacacactcaacacatagtaggcatttaatacacattagtttccattcctttcttatttatttaaatcctatctgaaaacaacatgtattcataaacttttatagctgagtcaaactgtcacaaaaatggaaggaatgtttgcattaccatcgtgataatgttgttggggaaagtttgtttcatgaaaggttgggggtttgttttcttctgatgacctaatagtcaacacagtagaagtgtattacatgaaactagactagaaatatattacatgagacttggaaaagataactcatgagttaggatttatcattggccagtggaattttttttacaataaaataagaaaacctgagccgag

SEQ ID NO: 37594 - DNA, 1048 bp, Homo sapiens
atatttttagttcctgtttgtggaagtaaagcccgtactatgaaaaataaggcagaatccttttaaatgacaagattcagttaattccatgtcttgttcagttggtcttatatccgggaactggaagcacaggttttgtctctaagataacctgcaatgaatcagaccattcagtttttttctttctttttgagacagagtctcactttgtcgcccaggctggagtgcagtggtgcgatctcagctcactgcaacctccgcctcccgggttcaagtgattctcctgcctcagcctcccgagaagctgggattacaggcaaacaccacaacacctggctaatttttgtatttttagtagagacggggtttcactatgttggccaggctagtatcgaactcctcacctcgtgatccacccacctcggcctcccaaagtgctgggattacaggcatgagtcaccgcactcggcctgaccatccagcttttatggctccacgtccatcatgtctgggcagttccagcttgagacaaacagcccttcagtgaatttacaaggtagattgcaagagccttgcaragttcagaaaaccacaagtcacataaaaaataggtctgagaaagtagtctaggctttcaaaaccctctccttaaaaacaaagtgactaatacctaagatatttctgtaaacacactcaacacatagtaggcatttaatacacattagtttccattcctttcttatttatttaaatcctatctgaaaacaacatgtattcataaacttttatagctgagtcaaactgtcacaaaaatggaaggaatgtttgcattaccatcgtgataatgttgttggggaaagtttgtttcatgaaaggttgggggtttgttttcttctgatgacctaatagtcaacacagtagaagtgtattacatgaaactagactagaaatatattacatgagacttggaaaagataactcatgagttaggatttatcattggccagtggaattttttttacaataaaataagaaaacctgagccgag

SEQ ID NO: 37595 - DNA, 1048 bp, Homo sapiens
atatttttagttcctgtttgtggaagtaaagcccgtactatgaaaaataaggcagaatccttttaaatgacaagattcagttaattccatgtcttgttcagttggtcttatatccgggaactggaagcacaggttttgtctctaagataacctgcaatgaatcagaccattcagtttttttctttctttttgagacagagtctcactttgtcgcccaggctggagtgcagtggtgcgatctcagctcactgcaacctccgcctcccgggttcaagtgattctcctgcctcagcctcccgagaagctgggattacaggcaaacaccacaacacctggctaatttttgtatttttagtagagacggggtttcactatgttggccaggctagtatcgaactcctcacctcgtgatccacccacctcggcctcccaaagtgctgggattacaggcatgagtcaccgcactcggcctgaccatccagcttttatggctccacgtccatcatgtctgggcagttccagcttgagacaaacagcccttcagtgaatttacaaggtagattgcaagagccttgcagagttcagaaaaccacaagtcacataaaaaataggtctgagaaagtagtctaggctttcaaaaccctctccttaaaaacaaagtgactaatacctaagatatttctrtaaacacactcaacacatagtaggcatttaatacacattagtttccattcctttcttatttatttaaatcctatctgaaaacaacatgtattcataaacttttatagctgagtcaaactgtcacaaaaatggaaggaatgtttgcattaccatcgtgataatgttgttggggaaagtttgtttcatgaaaggttgggggtttgttttcttctgatgacctaatagtcaacacagtagaagtgtattacatgaaactagactagaaatatattacatgagacttggaaaagataactcatgagttaggatttatcattggccagtggaattttttttacaataaaataagaaaacctgagccgag

SEQ ID NO: 37596 - DNA, 1619 bp, Homo sapiens
atgtggatgcggtctgacagaggatgtcgacttgtctacaaactgcaggcataaattccaaattgacagaggaagcagagaagcttcaagaatgaatattaggttggtgtaattgcagttttcaccaaattaatagcaaaaacagcaattacttttgcaccaacagtataattaagttgaattagaaatcagagtagcagttcaatcagagaaagaggtgccacctaacaaattcttggggcacgttatgtagcggataaaaacaaacaaacaarcaattcaagacccatgagggaatttatgatagaaactggaagtttctcagccagtatcaatgcattgatattagagatgcaaaaaagagatgaataaggaagtatcttcttcttaaaataatatgcaacattgttttactagtcaacaaactttcatgtccataccctaaaaatatacccatcaaaatagatattaccagacagacaatgactaactatagttacagaattggaaacctattacaaaaatcttaaatgtatatgcatcatttgtattttgagaatagagggctgtatttctgttagcatatgaagtcctatgtatacgcatgctattggataatcatcaggatggcatatatgttgaattagattgattgacagtctagtgctaatttggtttagcaccttttcccaatggatattacaatgtgtctccttgtataagagtcatctattagtcataatagcaaactataaggtacatagaatgcagggctccctactcgggttcccttctttactgtctcactttccagcagctgtgattgccccaaactcagctctggttcttcaagccagaaagtgcacgagttttccattgagttctaacgagtcagcagtacagcatgtcttagacaggcccgccagcagcctcaaagccataaaaacaagaaactcacacctcactgttccctttgcctagtgtcagcttgccttctggatccacctgctctgggcctctttccaaatgccctcatataggcttttttttccctttatgttttatccagaatatatgattatctgtgagagggttaatccaattggagctcactcagctataaacaaaagaggaactcccagcttgacagtaataaagtgaaaattgcactattagtatcatttaaagactatcaaagtaaagactctctccatatttttttaattttttttactgtcaaggaaatacattcttccaccacagagtttctatagaaagttcaaagatcttcaaaaataagacaatcattttgtaatttcagactgatttgttttaaaaacccagtaactacaaactttgggtgataactactatggctaatttaggcattatgaaagagtcttaggccacatctcttacaaatatcttgcgaggataaaccagaatgcagggagttctaatcatctcatttgcctaatcagcttactagtaaagaagttggccatcaagaaatatctaccagtataaggaggttttgagatcatgaaacatgtatatatatacatacattatagactttataatctaagattgacatttgatattgaaattaagaagtg

SEQ ID NO: 37597 - DNA, 860 bp, Homo sapiens
ctttagctgtaaaattctgtgatttcaatggaaaaagacggtatcatccacccagagctcacctgagctccttctctgtaccctgaggaggatcccgggggctggagtcacagcatagggtgctttggaggccatcctcacccagcgccagccccaagagtgttgccaccagggatagcccagcatctccacagacctctgctgtgggcattcctgtgacttcttccctgcccctcctccccatgcctacgcacttcttccctcctttctgatcaagaatatgccttgggagcaagtaggcaggaaccagcaatcttctgaggcccagcgcttccagaaagaggtcggcagctgtctgtcctggggacgtttcctggtggaggtggaagggggctcactgctccttaacacgctctttcaagagtgcctccctggtttwctctttctggtcagggcattcatttggagcagacaagcctgttccctgtcccaactcaacatctggaagttgctgggtcatgggctccaggtgttgtttggagcctctcatcagcatgtgacttttggttgtgatgataaagtctgaccgcacctcaggttgtcacccaaagctcagctacaatctctacaaattacccctgaaagcaaatttctcaggcaactgtggggctcagcccgtggcctggtaggtgagccaggatgtggccctcactgggcatttcatacctgtggccagcacagggctggcaccatagtggtacccaacagccccttgttggaagaatgaatttgagcaccccactcctcatgaacagcttggcctgattaagttctcaagaatccaaaggcctgcaaacact

SEQ ID NO: 37598 - DNA, 860 bp, Homo sapiens
ctttagctgtaaaattctgtgatttcaatggaaaaagacggtatcatccacccagagctcacctgagctccttctctgtaccctgaggaggatcccgggggctggagtcacagcatagggtgctttggaggccatcctcacccagcgccagccccaagagtgttgccaccagggatagcccagcatctccacagacctctgctgtgggcattcctgtgacttcttccctgcccctcctccccatgcctacgcacttcttccctcctttctgatcaagaatatgccttgggagcaagtaggcaggaaccagcaatcttctgaggcccagcgcttccagaaagaggtcggcagctgtctgtcctggggacgtttcctggtggaggtggaagggggctcactgctccttaacacgctctttcaagagtgcctccctggtttactctttctggycagggcattcatttggagcagacaagcctgttccctgtcccaactcaacatctggaagttgctgggtcatgggctccaggtgttgtttggagcctctcatcagcatgtgacttttggttgtgatgataaagtctgaccgcacctcaggttgtcacccaaagctcagctacaatctctacaaattacccctgaaagcaaatttctcaggcaactgtggggctcagcccgtggcctggtaggtgagccaggatgtggccctcactgggcatttcatacctgtggccagcacagggctggcaccatagtggtacccaacagccccttgttggaagaatgaatttgagcaccccactcctcatgaacagcttggcctgattaagttctcaagaatccaaaggcctgcaaacact

SEQ ID NO: 37599 - DNA, 401 bp, Homo sapiens
tcatgcctgtaatcccagcactttgggaggctgaggcgggyggagttcgagactagcctgaccaacatggagaaaccccgtctctactaaaaatacaaaattagctggacgtggtggcacatacccgtaatcccagctactcgggaggctgaggcaggagaatcacttgaacccgggaggcagaggttgtgatgagccgagatcatgccattgcactccagcctaggcaacaagagtgcaactccgtctcaaaaaaaaaagaaaaaagaaaagaaaagaaaagaaaggataagtctgaagaaataaggagaaataagataacttgcttgagaaagaaacatacacacacaaacttgatagctatggagtatactagataatccataatacgaacactcagg

SEQ ID NO: 37600 - DNA, 401 bp, Homo sapiens
tcatgcctgtaatcccagcactttgggaggctgaggcgggtggagttcgagactagcctgaccaacatggagaaaccccgtctctactaaaaatacaaaattagctggacgtggtggcacatacccgtaatcccagctactcgggaggctgaggcaggagaatcacttgaacccgggaggcagaggttgtgatgagccgagatcatgccattgcactccagcctaggcaacaagagtgcaactcygtctcaaaaaaaaaagaaaaaagaaaagaaaagaaaagaaaggataagtctgaagaaataaggagaaataagataacttgcttgagaaagaaacatacacacacaaacttgatagctatggagtatactagataatccataatacgaacactcagg

SEQ ID NO: 37601 - DNA, 554 bp, Homo sapiens
acttactgcttttctccacacattgacagtcaggcaccagtgtggtagaataataagcttttaatagaatgtttatctttgtgtttttcctgatctcttctaycaaaacattagccttttttttttttgtacatgacttaaaatcctttttttaaatttggaattagagtttataagtgagtattttgacatccatattttctgacaaaatgactttcactttcccaagttcccaggctatttttgctttctccatcccacccctaccccttgttagaatgttagtatgtatacagattggttttttttaatattaacattaaatcagggacattcttcagtgccactgaatttttttttcaacataattttgatagcatggttttacttcatggaaaaaatggaagattgcaaattgttaaattttcagttaaatataaccggcccttgaaattcagctccttgcattttattaggaacttgatttttattttcctttttgcaccatcactatagtaatgggattaaagttaaaaccagcaaatttaagcaga

SEQ ID NO: 37602 - DNA, 1005 bp, Homo sapiens
cggtggaaggtgctggaagaggagttggggaggaaagaggaggagaggaaaacacatatgggtgtaggaggctcccttctgaagggaagctggaaggagaaagatgcggggctaggaggtatggggcagggctgagaggtcagaggtgctgaagctgcagctgaatgagggcagcctcctttctcattaggtggaacccccaaaatgggggcaagttcagcaggaagacccaggggagagttaggaattatggatatcaatttttactcaattcttggtgtgggcgaaggtggagggacaggcagggtgaggggcccagcagccatgtgggccaagtcagaggtaggaggaggagctgggatctgtgaagtgtaggtggcccgggcagggagtctcagcaggtgtggagacagcaggggcaggctgggtggcactgcagtttgccatgtcttcttttttgaggcggaatctcgttctgtcgccaggctggagtgcagtggtgcaatctccactcgctgcaacctccacctcccgagttcaagccattgtcctgcctcagcctcttgagtagctgggactacaggcacgagccaccatgcccggctaatttttgtattttcagtaaagacggggtttcaccgtgttggccaggatggtctcgatctctcgacctcgtgatctgcccgcctcagcttcccaaagtgctcggattacrggtgtgagccaccatgcctgccctgccatgtcttctttatcttcccaagcagctgttttagtctcctggattctgatgttctactggtgtccttcttatccacgttgcccaggaatccctcaggagataggcagggaagcttagcaggtgggggcaggtcatctctattccacctctattgccggggaggggttggtggcagcagcagtggtggtcctgacagttttctttcactggacctgtggccggcagctctgggtggagtatagctacttgatgcaagagcttca

SEQ ID NO: 37603 - DNA, 588 bp, Homo sapiens
ccagatcgggcttaacaagatctattgttatcaaggctagggaattaggctctcatccacaactagcagaaatagaaattagcataagtccctcataaaaaaactttcctacaggcataaaagaccaytcattttaagcttgtaattctactctagaatatcaatcttaaaaatagcacagaacaccaaaatccttgactcaaaaggctcttttcagatttaatcacagaagtaaaaatctttggaaaaattataagaatacaacaattagacaatatttaagtaaattaaactatactataaataacatagctatttataaaaagttatgaagtacaggtattcatggagatacgctcaatgtaatatcaaatagaagcattgggtatgattattgcgtgtatagagtccatcatgctggtgtgtcatggtggtttactttttttctgcaataatttctatgaagaaagatgcttaccttttttatagaactggaagaagacatggcttgcaccaacagcaacagagatgggccccacagttgccactgccttcgccaggtccttctcccgtgaagggatgtccaca

SEQ ID NO: 37604 - DNA, 588 bp, Homo sapiens
ccagatcgggcttaacaagatctattgttatcaaggctagggaattaggctctcatccacaactagcagaaatagaaattagcataagtccctcataaaaaaactttcctacaggcataaaagaccactcattttaagcttgtaattctactctagaatatcaatcttaaaaatagcacagaacaccaaaatccttgactcaaaaggctcttttcagatttaatcacagaagtaaaaatctttggaaaaattmtaagaatacaacaattagacaatatttaagtaaattaaactatactataaataacatagctatttataaaaagttatgaagtacaggtattcatggagatacgctcaatgtaatatcaaatagaagcattgggtatgattattgcgtgtatagagtccatcatgctggtgtgtcatggtggtttactttttttctgcaataatttctatgaagaaagatgcttaccttttttatagaactggaagaagacatggcttgcaccaacagcaacagagatgggccccacagttgccactgccttcgccaggtccttctcccgtgaagggatgtccaca

SEQ ID NO: 37605 - DNA, 588 bp, Homo sapiens
ccagatcgggcttaacaagatctattgttatcaaggctagggaattaggctctcatccacaactagcagaaatagaaattagcataagtccctcataaaaaaactttcctacaggcataaaagaccactcattttaagcttgtaattctactctagaatatcaatcttaaaaatagcacagaacaccaaaatccttgactcaaaaggctcttttcagatttaatcacagaagtaaaaatctttggaaaaattataagaatacaacaattagacaatatttaagtaaattaaactatactataaataacatagctatttataaaaagttatgaagtacaggtattcatggagatacgctcaatgtaatatcaaatagaagcattgggtatgattattgcgtgtayagagtccatcatgctggtgtgtcatggtggtttactttttttctgcaataatttctatgaagaaagatgcttaccttttttatagaactggaagaagacatggcttgcaccaacagcaacagagatgggccccacagttgccactgccttcgccaggtccttctcccgtgaagggatgtccaca

SEQ ID NO: 37606 - DNA, 588 bp, Homo sapiens
ccagatcgggcttaacaagatctattgttatcaaggctagggaattaggctctcatccacaactagcagaaatagaaattagcataagtccctcataaaaaaactttcctacaggcataaaagaccactcattttaagcttgtaattctactctagaatatcaatcttaaaaatagcacagaacaccaaaatccttgactcaaaaggctcttttcagatttaatcacagaagtaaaaatctttggaaaaattataagaatacaacaattagacaatatttaagtaaattaaactatactataaataacatagctatttataaaaagttatgaagtacaggtattcatggagatacgctcaatgtaatatcaaatagaagcattgggtatgattattgcgtgtatagagtccatcatgctggtgtgtcatggtggtttactttttttctgcaataatttctatgaagaaagatgcttaccttttttatagaactggaagragacatggcttgcaccaacagcaacagagatgggccccacagttgccactgccttcgccaggtccttctcccgtgaagggatgtccaca

SEQ ID NO: 37607 - DNA, 588 bp, Homo sapiens
ccagatcgggcttaacaagatctattgttatcaaggctagggaattaggctctcatccacaactagcagaaatagaaattagcataagtccctcataaaaaaactttcctacaggcataaaagaccactcattttaagcttgtaattctactctagaatatcaatcttaaaaatagcacagaacaccaaaatccttgactcaaaaggctcttttcagatttaatcacagaagtaaaaatctttggaaaaattataagaatacaacaattagacaatatttaagtaaattaaactatactataaataacatagctatttataaaaagttatgaagtacaggtattcatggagatacgctcaatgtaatatcaaatagaagcattgggtatgattattgcgtgtatagagtccatcatgctggtgtgtcatggtggtttactttttttctgcaataatttctatgaagaaagatgcttaccttttttatagaactggaagaagacatggcttgcaccaacagcaacagagatgggccccacagttgccactgccttcgccargtccttctcccgtgaagggatgtccaca

SEQ ID NO: 37608 - DNA, 626 bp, Homo sapiens
tgggcatggtggcatgtgcctgtaatcccagctactcgagaggctgaggcaggagaatcacttgaacctgggaggcggaggttgcagtgagccgagatcgcgccattgcactccagcctgggtgacagagagagactcagtctcaaaaaacaaaacaaaacaaaacaaaacaaaaaaccaaaaaaaaaacaaaaaaacaagtgtctacatcagagtaaagtaygggacgtggcaaagtgagctgcccttatacagtgtaaatgctatctaaatagttattatactgtatccctgtattgttgagcatccctgtattgttaaatcttttgatttctcatgagaagtagaaaagttaaaattttatgtaaagctgccatattttggatatatatgtagttaattaattcaaatttgcacacacatgtccacacacacaaactgaacatagccttatgccacatgtggcccgccttttgcctcagtgtgatctctggcctcttagataaaaactccaaactctttagaacagtattcactttctttaggacctggccctcgcctattcctaaagacttgtctctagtattttctccagttgcgtggtaccatttgtaacttggcaatgc

SEQ ID NO: 37609 - DNA, 588 bp, Homo sapiens
agtcagagggacatatttataactgagataatgttaatactagctagatgagaagtgtttcttcaccttttaggagttttttgtttttttgttttgtttttcttttgagacagagtctcgctctgtcgccgaggctggagtgcagtggcgtgatctctactcactgcaacctccgcctcccgggttcaagcgattctcctgcctcagcatcccaagtagctgggactacaggcatgtgccgccgcacctggctaatttttcgtattttttgtagagayggggtttcaccgtgttagccaggatggtctcgatctcctgacctcatgatctgcccacctcagcctcccaaagtgctgggattacaggcgtgagccaccgagcccagccaggagtttttgaaaagcaacaaattgacaattaaaaaaaaaactctaagtatttctaaagtttcctgtccaagtgactcacaacagctggtttatttgctctgttatgcataagcatcagtgtataaataaatatgactggagatgcagtgtaaacagtggcaaatcatatttctatttgtaatatctgcttggggcgcag

SEQ ID NO: 37610 - DNA, 730 bp, Homo sapiens
  misc_feature (1)...(730): n = A,T,C or G
tccccatgccggacttctgtgccccccgagaggaggtgagggtgctgctcaggctgaggcctctggggagggacaggaggcctccctgtctcccctctggtctgggctctgggagaatgaaacgaccccagcttctctacggggcccgggaatggtctcacgaggttttccgatttggcccaagtggtttattcacattccttccaagctttgtgtgtgtgtacgtgtgtttattatgtgttatagggtatatgtgtgtgtattgttataggtgtgtgtgtattggagtgtgtattctgttacgtatgtgcatatgtgttataagatgtgtgtacatgtgtttattatgttgtagggtgtatgtgtgtgtattgtgttatgggtgtgtgttataggtgtgtgtgtnnnnnnnnnnnnnnnnnnnnnnnnnnnnnnnnnnnnnnnnnnnnnnnnnnnnnnnnnnnnnnnnnnnnnnnnnnnnnnnnnnnnnnnnnnnnnnnnnnnngwagtgtgtgggtggtgtgtgaatgttgtgtgtgtgagcatgtcttttatggagtttgtaatgtctcccttgtctgtatggggggctgtgtgtgaaaaaccatctttagggaagtggtgtggtgtgtggtagggtttgtggaggggtcgttaggaatgtgtgtgtgtggcatctgtaggtctgtgactgtgggtgtctgtatagtgtgtgtgtttaccggacgtg

SEQ ID NO: 37611 - DNA, 514 bp, Homo sapiens
aagtctaatataactttaatattctaacttaaaatcaaaattttattatttgaatatactaaaacttatatttgatgtgattagttctttcaactgtagggtcttctgctcaaagaaaaatgtgaggaatattcaaagcttaaataaaactaccaattagcattccaattaccgwaatttttttaaaaaataattattagtcaaaagcagtgctattttatataaacaactaatttcttcttatacttaaatattaataagtcctattttcaatattctaacattacaattttaaatggaaaacttcatgaaaaactattagcacaataagattcctctctccttcctctatccaaagatagaattacatctttaaattatacgtaatgggaaataaactttatattattacaaaaatgaaaaatgggcttaaagaatagaatgtagagctttaaattagtatttttcctctaatgatcaaaccactattgaatacactaattcactcatgctc

SEQ ID NO: 37612 - DNA, 280 bp, Homo sapiens
cttcatatgtgtgtgtgtgtatatatatatatacatctatgtacttcctcatggaaaaatataattaaatttaaattattgactaataaaacaatwtaaaaaatgcattgctaaacatctcaaaattgtgttttcaattatgaaaaacattaatgaaactatttggaaattgcgtagctctaaggaacaatgcaggtggaaggtgaaatacattgtttgtgttttaataccaatgttttaaatgtttaaatgttaataaacattttaaatgtataggtat

SEQ ID NO: 37613 - DNA, 280 bp, Homo sapiens
cttcatatgtgtgtgtgtgtatatatatatatacatctatgtacttcctcatggaaaaatataattaaatttaaattattgactaataaaacaatttaaaaaatgcattgctaaacatctcaaaattgtgttttcaattatgaaaaacattaatgaaactatttggaaattgcgtagctctaaggaacaatgcargtggaaggtgaaatacattgtttgtgttttaataccaatgttttaaatgtttaaatgttaataaacattttaaatgtataggtat

SEQ ID NO: 37614 - DNA, 849 bp, Homo sapiens
aaacagatcagttcaggagctgggttaataaggaatctctagatcagcaaaccaatatcctttccaccactctacactcccttaccagaaggaaaaagccagtagccaaacttcaggcctagaatctgatgatggggcctaatgctcagtcagaggttgtataaggattagcttgagttgcttagtccacaaagactccaaggctgcacagtgcaagagagaagaggccaggcagccccctgtgctctgagaatgtcacatgcctgcaaggaagcaaagaggcctccaccatctcttgttcccgtctgccaaagagggcacaccccgggaagaggctctggctcacaccactgggggccacaggtggaaaatgctgcctggggaccccatactattcactttgaacccttcacaagagaacgagggctaatcccatggtgcctcacaaccccgtttacctcagtcaccaccaaaaatcatgtcttctctgtattacgctgactcaatctcccagcctctttgttctcaaacccctgggatgtgaaatctactatcagcacgtttctcggatccccagtggctcttacaacagaaatctggctacccctggaagcctcttgaatggaaagcrtttaattgttcacacctcacatggcaatgtctagaatagtgttcggcacgtattaggcatgcaacaaatacttgttgatcaacttcaggttcctgatgtcttctttatcactgtcactttggaatgattcagtctttttccagatcacagctctctgaagttcaagacaccagacgctggcatcaagaacccctcatggcactgtcatgtgctgatca

SEQ ID NO: 37615 - DNA, 708 bp, Homo sapiens
cattttccacaatccaccacgtccaattctacccaccccgacacccataacgatgctccagccgggccagcccgcttccaccttctggaacacactaagctgctttgaggtctcaggctctgtcgaagaaagctccccccaggtccttctcgcccttcggtctccacttactcatctttctgagactttctggaccaccctgagtcgtccactgtcgtgcatttgtttactacctgctcgtgcctttaaactgtaagcgctgtgaaggcagcggaaatgtgatccgagccatgcacaccgtgcgcattcaataatcattggcaaatcatgaatgcgagaaaccaatgaatgaatgaatgaatgaatgaataaaagaaagcccaggcggcaggcacttggcaagcacttaaaaggctgcgtttaaaaggaagaacccgattccttagtagacggccagcaactcccagcccccggcccggccatgccagcyccgagcggtcccaagctgccgccaaatccagatcgcgcccacccgagctcccgggaccccgcgcctctagcctcggaccccttgcaacccgcgcagagacgtgcgaggcggccccggccccgccgcccgagggtcacacgcacgcccggggcccgcgctcctcacccgatgccgggacgccttcttcgttcacagctgaacccgccaaaattccaacc

SEQ ID NO: 37616 - DNA, 527 bp, Homo sapiens
ttaacatttcatcggtgctgtgctttgatttggtacaaaaggcggcagggattagacaggttctaatgggacaggcataggaagtaattaataagcagcattcttatctattatttacagagggccaaccataacctaaggggtaaatacctggctctttcccagtgagtttacttttcaagatgatgatgatgatgatgatgatgatgatgatgatgatgatgatgatgatactcacccaggctggagtgcaatggcacgatctcggctcactgcaacctccacctcccaggttcaagagattctcctacctcagcctctagtagctgggactataggcgtgtgccaccatgcccagctaatttttgtttttttagtagagatggggtttcaccatgttgaccaggatggtcttgatctcttgacctcatgacccgcccacctcagccacccaaagtgctgggattacaggtgtaagccactgygcccggcctatttcaagatttttaaacatgaggcaggcccgg

SEQ ID NO: 37617 - DNA, 580 bp, Homo sapiens
ggactccagcctgggagacagagccagactccatctaaaaaaaaaaaaaaaaagaaaaacaaagaaagtatagtatatacataccatggaatactactcagccataaaaaggaataaaataatggtattcacagcaacctggatgcagttggagaccattattctaagtgaaggaactcagaaatggaaaatcaaatattgtatgttcccatttacaagtggaaaggtaagctgcgaggacacaaaagtataagaatgatataatggactttcgggacttggagggaagggtggaagaggtgaggataaaagactacacattgtgtacagtgtacactgcttgggtgatgaatgcaccaaaatcttggaaatcaccactgaagaacttatccatgtaatcagaaatcacctgttcccccaaaacaattaaaatatatatatatataatatatatatatatatatattatatatatatatatatatatttaagacagatacatatattgaagaccatatatttgayaaaaattgtacatagagtcaccagggaagaagtgaccagaaagagtcatgagaaa

SEQ ID NO: 37618 - DNA, 588 bp, Homo sapiens
ggaaggctaagtcaagaaggttgcttgagtccaggagttcaagaccagcttgagtaacatagtaagaccccgactctactaaaataataattttaaaaatcctacttcacagtccataatcagtgacatgggaggtggaaaagtcttaaaatccctcaagaggaaaaactgtggccaacacaattcatagttaaaagatcaacctgatattgctcacaaagttctaagtattcttttagatgtttatgtgaatgcattaataatattctattatttgcctttgtccagttcagatagttttcttgctcttatcagcattgataagatgaagtaaatcagatgtgagagaaagcacgggaacccatcatctgtgcctcagcsaccgattgttctcctctggctgtgctcatcttgccagtctgctggctcacaaaggccccagctttgatgtcagtctgactgtttgacaaagccagttgcagatgctcttcatggagacagcagattacagacaataccatgctaaagaaatgctatcgtctagccatgtatacactgaaagttatctcagtgtatacatgggatatg

SEQ ID NO: 37619 - DNA, 578 bp, Homo sapiens
caatggaacaggcatttccaaaaaactcaaattatatcaaagtcacaaagatggtacacctatcttcttcaaccccttccaagatacaactgaagaaaatatctctgtcccaagttcaaataatgaagctattatccatttttgcccttcagggaaatagtcatttattacattaagaatgtataaagaagtgagaaaataaatagtttgggggaaaaatggccatatcttgtcctgtgcagacacatggacaactgcaaggcaggttcgtggtrtctgcagtactcattccccacagtacagtatgtcagcctgaaattggaccattcaattattatatttgggttctcctttaaggtgctgttttggaatttgatgtatgtggttatgcaactttgagaaaagatgaaatactgctaattttttaacttataatttttaaaattatgaattatgatgggattagtggccacataagaagagggagagacaccagagctagccttctctacatatacattgaaaaaaggccatgtgaggaacagaaggagaaggtggccatctgcacaccaggaaaa

SEQ ID NO: 37620 - DNA, 548 bp, Homo sapiens
gttgtgagaacattaaagtgaattccagaaatgcactgaaccagcattggagtcaggggttagtgtgatgagaaaaacgggcaagacctcacactgtcggcccctggcaatcactgtcagagagagaggtgaagcagacgccttcagctttagcccggtcttccagggagcatcttgcaatgttttcagagccaccttttaaaactaattttctaagataaatcagaattaaccaatcatagttggctccatgtttctgatgtgtgcgtatctgaaccaaacaaatcaagagcagaggttaaggtgtggatctgatgatagctccttttcaagaaggctgcacttcagatagcaaagtttctacggatattttaaatgagaccattgagagcatcttgacttacaatttatcagcctctccaaatgtaaaatgaagatttcttataataaatcatcttaaaaagtgacaatagatctcaaaactggcaataataacaaaaatcctcaccaaygtgtgtctgaagtttagccacctgttaagatgcttt

SEQ ID NO: 37621 - DNA, 1081 bp, Homo sapiens
tggcatatatctaagtgggtacttaataaaatagtacaagttcctcaaagatcttggcaggattatgattgtaatttagtcggaattcacagcctcctgtgattttcagtgatatttccaaagtattctcacacagtaatatgcagtagatggcattacattgcagttctatttgcaatttaagacttcgggcttctataagaattccgcctggaagatctatgcaaatgctttagaaagtggtctgtcaactttcagtaagaaaacacatcttagaagcttctgacttataaaaaycaaccaatatatttccaaggtttttaattcaatttttccggacacgtctctgcttttttaagcctaagacgtgaaacatgtgtgattaaatacttttctgtgacaacaaagccctgttattttgtgagtgtgtattcacatttataagtaagggaggaagaaaaaaagagatatttgtgagcttattttaaggaaagaaacaacttgagttaacagttagcatttgacagtttatgctctattggagagagagatcaccagctgaaaaaagtcatgaaaataatttatagtcttattttgaaattcacacgtttcccagtatgctcacaagactaacattcgggaatgtttgtgacgtttaatcattactcaagtacccagtcattatggagaaatgtttatgaaaaatggatgcaaagaggctcaatgcgttgcctccagcaacaatatttaccagggacaggtagaagaaaaagcataacacaatgtatccgggacccattagcacacaacaggatgattggactttttgttgttgttcttatcgatctgaatacatcctattttttgaaattactcttgtaaatatcattctttagttctacaaatggcattcttttaaactggctaagaagtagactagcagctaataaatatgaaaaaggaataattgttagaaaatatataaattaagttcatatatagatgaccatcatgggctgatacattcttttaaaaatgtattttcatttaatttgtatatatttatggggcacaagtgcaa

SEQ ID NO: 37622 - DNA, 1081 bp, Homo sapiens
tggcatatatctaagtgggtacttaataaaatagtacaagttcctcaaagatcttggcaggattatgattgtaatttagtcggaattcacagcctcctgtgattttcagtgatatttccaaagtattctcacacagtaatatgcagtagatggcattacattgcagttctatttgcaatttaagacttcgggcttctataagaattccgcctggaagatctatgcaaatgctttagaaagtggtctgtcaactttcagtaagaaaacacatcttagaagcttctgacttataaaaatcaaccaatatatttccaaggtttttaattcaatttttccggacacktctctgcttttttaagcctaagacgtgaaacatgtgtgattaaatacttttctgtgacaacaaagccctgttattttgtgagtgtgtattcacatttataagtaagggaggaagaaaaaaagagatatttgtgagcttattttaaggaaagaaacaacttgagttaacagttagcatttgacagtttatgctctattggagagagagatcaccagctgaaaaaagtcatgaaaataatttatagtcttattttgaaattcacacgtttcccagtatgctcacaagactaacattcgggaatgtttgtgacgtttaatcattactcaagtacccagtcattatggagaaatgtttatgaaaaatggatgcaaagaggctcaatgcgttgcctccagcaacaatatttaccagggacaggtagaagaaaaagcataacacaatgtatccgggacccattagcacacaacaggatgattggactttttgttgttgttcttatcgatctgaatacatcctattttttgaaattactcttgtaaatatcattctttagttctacaaatggcattcttttaaactggctaagaagtagactagcagctaataaatatgaaaaaggaataattgttagaaaatatataaattaagttcatatatagatgaccatcatgggctgatacattcttttaaaaatgtattttcatttaatttgtatatatttatggggcacaagtgcaa

SEQ ID NO: 37623 - DNA, 1081 bp, Homo sapiens
tggcatatatctaagtgggtacttaataaaatagtacaagttcctcaaagatcttggcaggattatgattgtaatttagtcggaattcacagcctcctgtgattttcagtgatatttccaaagtattctcacacagtaatatgcagtagatggcattacattgcagttctatttgcaatttaagacttcgggcttctataagaattccgcctggaagatctatgcaaatgctttagaaagtggtctgtcaactttcagtaagaaaacacatcttagaagcttctgacttataaaaatcaaccaatatatttccaaggtttttaattcaatttttccggacacgtctctgcttttttaarcctaagacgtgaaacatgtgtgattaaatacttttctgtgacaacaaagccctgttattttgtgagtgtgtattcacatttataagtaagggaggaagaaaaaaagagatatttgtgagcttattttaaggaaagaaacaacttgagttaacagttagcatttgacagtttatgctctattggagagagagatcaccagctgaaaaaagtcatgaaaataatttatagtcttattttgaaattcacacgtttcccagtatgctcacaagactaacattcgggaatgtttgtgacgtttaatcattactcaagtacccagtcattatggagaaatgtttatgaaaaatggatgcaaagaggctcaatgcgttgcctccagcaacaatatttaccagggacaggtagaagaaaaagcataacacaatgtatccgggacccattagcacacaacaggatgattggactttttgttgttgttcttatcgatctgaatacatcctattttttgaaattactcttgtaaatatcattctttagttctacaaatggcattcttttaaactggctaagaagtagactagcagctaataaatatgaaaaaggaataattgttagaaaatatataaattaagttcatatatagatgaccatcatgggctgatacattcttttaaaaatgtattttcatttaatttgtatatatttatggggcacaagtgcaa

SEQ ID NO: 37624 - DNA, 1568 bp, Homo sapiens
catatgtaatatgtatgcttgcatgtctgtatgtgtatatgcagatgtatatgtatgacaaatcccataagaattcatagaaaaaattctttttttaataaaaggagtaaaaacaagctaacttaaattttctctgcactactgaatgcaagaascaatgaaatagcatatcaacagaaagaaaagtttgagatccaagaattgtataatccaatcaagatatatttcaatgagaacaagacagaatactgttgccagatatgtataatcgagggaatagttcatctgcatatcctttgtgaaaatatgtgttagccaactggattagtttgttcttatgctgctaataaagaggtacccgagacttggtaatttatagaagaaagaggtttaatggactcacagttccacatggctggggaggcctcacaatcatggtggaagacaaaggaagaggaaagggatgtcttctatgtcgggaggcaaaagagcgtgtgcaggggaactcctattttttaaaaccatcagatctcatgagacttattcactaccacaagaagagtatagggaaaccgccaccgtgattcaattatctccacctggccccacccttgatatatggggatgattacaattcaaggtgagaattgggtggggacacagtgagaccataacaccaaccaaatactggccaacactttagagttggacattacaaggcagtgttagcacaggtcatgccatcaggaacccagcgtactgcgtgttttcaggaggcttcgtcatctgaggttctgaagggcctcctgagatgcgtgcttctctgttgctgcctcctgttgaattccaagaacgtgttgagaaagcagcattcatttcctgggggtacacacagaagctcttgccaaatttgaaactcacctaaaacaatggctggtgctgtttcactccagcgtttcataaccatggctcagttatcaatcataacgtggcatttcactgggaaaatgagtgactaaaaggcactagagcttgttcacagtatcttcctccagcaatgtggtcacccacagcaaggtaatggctgttctcatccacaaataaatcgagtaatggttctgtgtcttcaaaatttacactcaactagtgaaatcatattttcgatgaaggggaattgaatacatcttgtagtagaagagattttctagcatcaagcctactttctcacctctgccattccaggtcatctctttctctattaatttttacattggtctttatattgcacaatattaagtacatgtgaaagagatacactgaagcactaagacaattctttttctgagaaatacagttctagatcatctgaaatgtcttccacaggttttcatgtgtttttcaaatttcatgaagccagcataatgataaagaatccctaaaagacattatgtcttgtacttatcaggttggtgcaaaagtaatagcagtttttgccattaaaagtaatagcaaaaatctcagtaacttttgcaccaacctaatagttattgaaaacgtattaaaatgca

SEQ ID NO: 37625 - DNA, 634 bp, Homo sapiens
tcttaaactgccctactctcctcatcccttcatttgtacgtccggggatcacctcctgtataaatcacctactcccaagtccctgttcaggaatccaaattaaagcaatgtactgttaaaaaacaggaagggttctgcttgatgattataattcatttcagcatattaatggttctgcaatttgtacagtaataagaaacaaaaagcaaaaataaaaacccttaaaccctgtctacctctgtatttcccaaatgtatttgcgtagtggttaagaggatggactttgtatttaaaccaacctggcttcgaattataacttcattatttactttgaaagtcagtaaccactccaaggctcagtatccctaactctaaaatggggatcataatatatctacaaaaaaatacaggaaaaaaaaagttgggtgtggtggtgtgcacctgtagtctcagctactggggaggctgagatgggaagaccacctgagcctgggaagtcaaggctacagtgaacctgatcatgccactgtactccagcctgggtgacagagtaagatcttttctcaaaaaawaataataataataataataaatatatatatatatatatatatatatatatatatatatatat

SEQ ID NO: 37626 - DNA, 1102 bp, Homo sapiens
cagattcatgatttgattccagatcttgagcaagagccgtgtgtaatgcattactggcacttaattaactttgcaaaggtagcaggaataactaaactgagttgttaaagctattaccatttacgaaaatcagtcatgctgcatcataaacagatttttcgagatccacttagaaaatcgagcttttccaaggaccaatttctatgtcaaactgaattataaactatacactggttagtgttttctttacaatgaaaaaaattaacatttagacttctaattaaaaattcaaccaaactaagaaaaaaaacctgcttattgccttccatatacaaagcactgtatcagtctaaggtggaacaccacaccctaaaaaggtgagctcatcctgcaagtcaagaaaaataaaaatggcattgtgcatgtttcacaagagggctgtggtcacagccagagccctgcaggtcaaatcatgtcccgtcagtagcactgatcatagttctgccaatatccccgccaccagtcaaaggcacgctagtcttactttatatgtggaggattactgcatatactttgggtctgcattagtctttggagtagggtataattatcaaagtatgtttaaaaacacacacgcagatctgttaggtcccctagaagagactgagttcagatgcattttaactagaagatagaggtacattatttcaaaaaacaattaattcgctttaaaaacctaaaacactggagatgatacaaacctgagctggcacagtgtatgggttttcagagaagaaaacacacaaactgcaargaaagctggaattttctgcagtgtttacattttattacctggctaatggggaccatgcttccttttgtggggaagtgacgtccaaaggattacacaaaagaaagggcaccaagttgctgatatagtcccccggaaacacaaataaacaggattgggttggaagccctgggccacttcaaagaaaaaaatcaagtcactggtactagtaagaaatgaaaacaggcagggtagctcgctgtctgtgttaaaactatgaacccggtaggtaaagcccatttggctttaagg

SEQ ID NO: 37627 - DNA, 562 bp, Homo sapiens
tgaggtttgtacaagtattgcttctacgttacagatgaggaaactgaggcatggggaagctaaatgagttttcctggatagcacagctagtaagtggcagaactgggccgcacgcccagatctttacaaagctgcgcaattaactyctaaaactttccatttcaatgtgcatattcttaaatttattggaacacatttgaaatttgtagagcatacccagttgtctgcatgtattttaagactctacttatctctccaaaccaattccagactactcattctttctcacacatatgcagtctctctcgttacagtataaaaattattattatgcttctgggtctatcacaaaaatgccggttgtacatcccagggttatttcagcctggaaaatttccaataaatattcagctcaggcctaaattattcatgcccttaaaatatactttttacaaatattctcaccagacagggggaagggaatgagaaaacacaggcccacactgagctgagctgtgtttaaaattacctggacttgtttcttgaacaagttgaaggagcc

SEQ ID NO: 37628 - DNA, 562 bp, Homo sapiens
tgaggtttgtacaagtattgcttctacgttacagatgaggaaactgaggcatggggaagctaaatgagttttcctggatagcacagctagtaagtggcagaactgggccgcacgcccagatctttacaaagctgcgcaattaacttctaaaactttccatttcaatgtgcatattcttaaatttattggaacacatttgaaatttgtagagcatacccagttgtctgcatgtattttaagactctacttatctctccaaaccaattccagactactcattctttctcacacatatgcagtctctctcgttacagtataaaaattattattatgctyctgggtctatcacaaaaatgccggttgtacatcccagggttatttcagcctggaaaatttccaataaatattcagctcaggcctaaattattcatgcccttaaaatatactttttacaaatattctcaccagacagggggaagggaatgagaaaacacaggcccacactgagctgagctgtgtttaaaattacctggacttgtttcttgaacaagttgaaggagcc

SEQ ID NO: 37629 - DNA, 488 bp, Homo sapiens
gggatgaataatttataccatgtgtagaaagaaggagctgtctaggtagggggaggttgtgctgcataaagaagacatacgaacaaatgcacaacacaaagaaaataataaagacagcagcagtggatggaggagcccagcacaaaatgcaatacctctgtagagactcctgcccacttataggcagtacctccaccaccccaaatactcagagatccttcagtgtgccctaaggaacttcattatgaacacatacagactggtttaagcaaaacrcttcccatggatcatctagccagtcctcactgtaaactttcaagcaaggtcacatgttggttagtatagaaattgggactctaacccagccagtcttatgataaagccacacttgtaaatttcatcttatactgcatagtttaggggagaaaaaaaaatacagtaactgtaaagttacaattaaaataatttttaaaatagcaaaacttatg

SEQ ID NO: 37630 - DNA, 797 bp, Homo sapiens
cctttccattcttcgtcaaagatcacttttcaaagcacagctcaatttcttgctttccagaagcctycctgggtctctcaaacctagcagaatcccttctttctcagaaatcctagcgctcatttaactcacagactgtaatacaacagtggcagcaagagatggtttctattcatggagtactgggtgttgttgttttgttttccagagcccagtgaacaagactgcataggcttagctgcatttgtaaacctctccatcccatcatttagaaagctaagccaggcatcctgagcagttggctctgaagcctttcacctagcatggctgcatgtggtccattgattgcatctatacatgaataaacattcaggaaatgcagccttgttgataaaggggaccagggacctggggctctgtgtgcacatcactggggttccatttcatttgtctgcctctactcacgagcaagagggatttatccataaaacaaaacaggcattttagcaactcctggatgctcagttcatctcttggcacatcttatttaggatattgagccagctaccaaacctaggagggaatctgagtggtcactcagatagagtgaccaactgtccagtttaccggggactgaaaaggttcacgaaatgagggttttcagttttaaaaccaaggccgtccagggtagagtaagacccctatggatgaagactgattcttgttcaatggacagaaagcatacaagaggccaaggattcagtaccgtgtctgggtcagcaggagagggcggagaa

SEQ ID NO: 37631 - DNA, 1213 bp, Homo sapiens
tgtgtattctgctaatattggataaaggaccctgaaggtgtctgttaggtctaattggtttctagtactattcttcttttttcttgttagttttctgtatrgttgttctatccattatgaaaagtggaagtattgatgtctccgactattattgttgatatgtattatttcttacaactgcgtgagaatctacaattatctgtaaattaaaaagttaaatatttaaaaactataaagtttttcaattcttagagctcccataccagctctttgcttggctttaattggggacatttcttcccttcattcctctcaacttgagagccttagctaaactgctaaatcaaaagaaaagttcccatttaacatcctgttactgaagtgtcatgatgaatcagatgacagcaggcagagaaggaagcagcggctgagctcttggcatgactgagtcaatctaggagggattgtccaaatgcagaactgattaggtatcaatgtctgctgagtggagtctcaattataggtcaataataaaggtagaaattgaacttgttgaggtcagggtggtcagtgtagtccaggtggggttgaaaattaaaaactaagtggggacaatgggtatcactgtgtcaaagataaattgggtagttgccaaagtggagatcaggagatctcccaagtcaaagcaaatgattctttctgggagtgcaccttgattctggcagtccttcccgatatcttatttcaggctgcttttatttatgctctgtgctaaagggaatgttcctacccctttaaaggtacctaggacttctaacaaacagggagttccctgtgtgcctgcaggaagctgacgcctgtgtttggtcacatagaccacgtagggcccaagttgtctgagcgtctggcacggcctccagctcgtagaagagactcaactaaggtatcttcctgttttttcttctcaggttgtggtgtgtcttgtatgccagccaaattgcattgaaatttatgtatgcacgtacgtatgtattgcctttgggaaaaccttgagattgtgcttggggtacaacgtgatataataaaaataagtcattggatccctaaaccctgagcatgcctagctctaaaagttactgaaatttaggcaagttattaaacttctatgtgtgtacatatgcttgtacattagccatgtaggcatgaacaccta

SEQ ID NO: 37632 - DNA, 1213 bp, Homo sapiens
tgtgtattctgctaatattggataaaggaccctgaaggtgtctgttaggtctaattggtttctagtactattcttcttttttcttgttagttttctgtatggttgttctatccattatgaaaagtggaagtattgatgtctccgactattattgttgatatgtattatttcttacaactgcgtgagaatctacaattatctgtaaattaaaaagttaaatatttaaaaactataaagtttttcaattcttagagctcccataccagctctttgcttggctttaattggggacatttcttcccttcattcctctcaacttgagagccttagctaaactgctaaatcaaaagaaaagttcccatttaacatcctgttactgaagtgtcatgatgaatcagatgacagcaggcagagaaggaagcagcggctgagctcttggcatgactgagtcaatctaggagggattgtccaaatgcagaactgattaggtatcaatgtctgctgagtggagtctcaattataggtcaataataaaggtagaaattgaacttgttgaggtcagggtggtcagtgtagtccaggtggggttgaaaattaaaaactaagtggggacaatgggtatcactgtgtcaaagataaattgggtagttgccaaagtggagatcaggagatctcccaagtcaaagcaaaygattctttctgggagtgcaccttgattctggcagtccttcccgatatcttatttcaggctgcttttatttatgctctgtgctaaagggaatgttcctacccctttaaaggtacctaggacttctaacaaacagggagttccctgtgtgcctgcaggaagctgacgcctgtgtttggtcacatagaccacgtagggcccaagttgtctgagcgtctggcacggcctccagctcgtagaagagactcaactaaggtatcttcctgttttttcttctcaggttgtggtgtgtcttgtatgccagccaaattgcattgaaatttatgtatgcacgtacgtatgtattgcctttgggaaaaccttgagattgtgcttggggtacaacgtgatataataaaaataagtcattggatccctaaaccctgagcatgcctagctctaaaagttactgaaatttaggcaagttattaaacttctatgtgtgtacatatgcttgtacattagccatgtaggcatgaacaccta

SEQ ID NO: 37633 - DNA, 1213 bp, Homo sapiens
tgtgtattctgctaatattggataaaggaccctgaaggtgtctgttaggtctaattggtttctagtactattcttcttttttcttgttagttttctgtatggttgttctatccattatgaaaagtggaagtattgatgtctccgactattattgttgatatgtattatttcttacaactgcgtgagaatctacaattatctgtaaattaaaaagttaaatatttaaaaactataaagtttttcaattcttagagctcccataccagctctttgcttggctttaattggggacatttcttcccttcattcctctcaacttgagagccttagctaaactgctaaatcaaaagaaaagttcccatttaacatcctgttactgaagtgtcatgatgaatcagatgacagcaggcagagaaggaagcagcggctgagctcttggcatgactgagtcaatctaggagggattgtccaaatgcagaactgattaggtatcaatgtctgctgagtggagtctcaattataggtcaataataaaggtagaaattgaacttgttgaggtcagggtggtcagtgtagtccaggtggggttgaaaattaaaaactaagtggggacaatgggtatcactgtgtcaaagataaattgggtagttgccaaagtggagatcaggagatctcccaagtcaaagcaaatgattctttctgggagtgcaccttgattctggcagtccttcccgatatcttatttcaggctgcttttatttatgctctgtgctaaagggaatgttcctacccctttaaaggtacctaggacttctaacaaacagggagttccctgtgtgcctgcaggaagctgacgcctgtgtttggtcacatagaccacgtagggcccaagttgtctgagcrtctggcacggcctccagctcgtagaagagactcaactaaggtatcttcctgttttttcttctcaggttgtggtgtgtcttgtatgccagccaaattgcattgaaatttatgtatgcacgtacgtatgtattgcctttgggaaaaccttgagattgtgcttggggtacaacgtgatataataaaaataagtcattggatccctaaaccctgagcatgcctagctctaaaagttactgaaatttaggcaagttattaaacttctatgtgtgtacatatgcttgtacattagccatgtaggcatgaacaccta

SEQ ID NO: 37634 - DNA, 1213 bp, Homo sapiens
tgtgtattctgctaatattggataaaggaccctgaaggtgtctgttaggtctaattggtttctagtactattcttcttttttcttgttagttttctgtatggttgttctatccattatgaaaagtggaagtattgatgtctccgactattattgttgatatgtattatttcttacaactgcgtgagaatctacaattatctgtaaattaaaaagttaaatatttaaaaactataaagtttttcaattcttagagctcccataccagctctttgcttggctttaattggggacatttcttcccttcattcctctcaacttgagagccttagctaaactgctaaatcaaaagaaaagttcccatttaacatcctgttactgaagtgtcatgatgaatcagatgacagcaggcagagaaggaagcagcggctgagctcttggcatgactgagtcaatctaggagggattgtccaaatgcagaactgattaggtatcaatgtctgctgagtggagtctcaattataggtcaataataaaggtagaaattgaacttgttgaggtcagggtggtcagtgtagtccaggtggggttgaaaattaaaaactaagtggggacaatgggtatcactgtgtcaaagataaattgggtagttgccaaagtggagatcaggagatctcccaagtcaaagcaaatgattctttctgggagtgcaccttgattctggcagtccttcccgatatcttatttcaggctgcttttatttatgctctgtgctaaagggaatgttcctacccctttaaaggtacctaggacttctaacaaacagggagttccctgtgtgcctgcaggaagctgacgcctgtgtttggtcacatagaccacgtagggcccaagttgtctgagcgtctggcacggcctccagctcgtagaagagactcaactaaggtatcttcctgttttttcttctcaggttgtggtgtgtcttgtatgccagccaaattgcattgaaatttatgtatgcacgtacrtatgtattgcctttgggaaaaccttgagattgtgcttggggtacaacgtgatataataaaaataagtcattggatccctaaaccctgagcatgcctagctctaaaagttactgaaatttaggcaagttattaaacttctatgtgtgtacatatgcttgtacattagccatgtaggcatgaacaccta

SEQ ID NO: 37635 - DNA, 1213 bp, Homo sapiens
tgtgtattctgctaatattggataaaggaccctgaaggtgtctgttaggtctaattggtttctagtactattcttcttttttcttgttagttttctgtatggttgttctatccattatgaaaagtggaagtattgatgtctccgactattattgttgatatgtattatttcttacaactgcgtgagaatctacaattatctgtaaattaaaaagttaaatatttaaaaactataaagtttttcaattcttagagctcccataccagctctttgcttggctttaattggggacatttcttcccttcattcctctcaacttgagagccttagctaaactgctaaatcaaaagaaaagttcccatttaacatcctgttactgaagtgtcatgatgaatcagatgacagcaggcagagaaggaagcagcggctgagctcttggcatgactgagtcaatctaggagggattgtccaaatgcagaactgattaggtatcaatgtctgctgagtggagtctcaattataggtcaataataaaggtagaaattgaacttgttgaggtcagggtggtcagtgtagtccaggtggggttgaaaattaaaaactaagtggggacaatgggtatcactgtgtcaaagataaattgggtagttgccaaagtggagatcaggagatctcccaagtcaaagcaaatgattctttctgggagtgcaccttgattctggcagtccttcccgatatcttatttcaggctgcttttatttatgctctgtgctaaagggaatgttcctacccctttaaaggtacctaggacttctaacaaacagggagttccctgtgtgcctgcaggaagctgacgcctgtgtttggtcacatagaccacgtagggcccaagttgtctgagcgtctggcacggcctccagctcgtagaagagactcaactaaggtatcttcctgttttttcttctcaggttgtggtgtgtcttgtatgccagccaaattgcattgaaatttatgtatgcacgtacgtatgtattgcctttgggaaaaccttgagattstgcttggggtacaacgtgatataataaaaataagtcattggatccctaaaccctgagcatgcctagctctaaaagttactgaaatttaggcaagttattaaacttctatgtgtgtacatatgcttgtacattagccatgtaggcatgaacaccta

SEQ ID NO: 37636 - DNA, 518 bp, Homo sapiens
tacataaaataattgtaagtgaatgaaacatgctaacttgaagtcatctcttcatggtttttcttaaatttttctatattttccaaattctcatctatgagcttctgactattacaaaatagaaacaacaagtatactattttaaagaaaaataattcctatcattattacaaataagcagaggtcaaagtggctcaagtccaaagggctgcttagagcaaacacctggtcctttgctactttactctccagcgcaaggagcgagagaggcagtggcagagcatacagatctagctaattcactgtgtgaccttggacaagtcacattacctctgtgggcctcagagggcttttctgcaaaatgaacagcctggatcagtgagccrtgccctagcagagcacagcctcctgccgtggcttctgggtagaattgcctttcattgtgcaattaaatctggccttccctcatgacgggagagaaaaatatttatgaattactctctagtttagaaatggat

SEQ ID NO: 37637 - DNA, 1851 bp, Homo sapiens
tgcataaaatcatgccctacttaaatcagtctctgttaccaataacgtcagtaaaaaagcaaatctaagcacatcctttccttcatttcctgtctcttttatgaccctactctttgcaaaatagtcccaactgtgaggacctttactcagtaaaggttccattagccttctgaccttgaattagatttggcctgtgtgagacactgacaagagattggaaagtgagaggaaagagttcacagtatttatttccacaactccaatccctttcctccctgactcactgtgggagctggtctcttttaaagccttttcttttggatggggcaatctggtctccttcccttgtccctttggatttaggtgttgctggtctttcagtgcatcactcaatcctttgtagtctttgcagtaaagtctctgattaaattctttgtgccagctgtttcccgcctgggccctaattaatatagcccccatcctagcctttacctatctcatttttccccatggagcctaccattctgtcacaggttacttaacaccactgtacagttaacctaggactcttcattgatccctgtttttacaaaatctgtcaactctttttagaatacttttaaccagctagttcatgccatacatttctcagtattaaacaccaacaccaccttttcacctgttcacacagtctctacttactttcaatctgtctttgactatctcacctaagcaaatacttttttgtcatttcccccagcacctggaacggtgcctgttcagtatagtaccttttaacaatagtggcccataacactactacagatatactgtagagaaccctatatataataaatttcagttacagaggtataaatatggtctggtaagtagatatattttggtaaaaattccctcccatcttttataaaaatgaagtaagcagagaaaataaaagagatactataaattcttaaatattggtgagtgttgttatttaaagactctgaataaaaggtaaaggcaccacattgaaggagcccaagtttctactctggttgccatctcttcactaaaaaaaattatgctcyatgaatcacctctgtgagaatcaatctccactgaattcaacaggcaagcataaaaacaaaagaaactctggttcatttaacaatgacagaacaatgttaaatttagatttatggtaatagaacaaaccttaaatcctgtaatttccaatgcatttgtttttcttaattctgatttgcaatacaagcccaaaacccagattacaaaatatatcttcatttttaaaaaatctaaaacaaacagaaacatactcaatataatattagtctctcatactaccttgtcagttcagctgtctttgatttattacattcttagtacaaaataattgtttttaagattaaactgcatttctttctctgaatttggaaatttacattaggcaagctcttttgttccaaacactggactaaagctcgaagggcctgagataggaaaggcacactttttctctaatgggctcacaacgtaataggagaaatgtgttcttaagccagtaattacagtaggacaagtacggccaggtatactgtctgactctgtaaagtcatgctaaactctacctggggacaagatatggtagcatctcaaataagtataaaatagagaattatgatatcttcttagaagaagaacaaaacagcctgcagaaactattatctggactagactaagcttaagactccccctaggccaagtttatcctcctcactctgtccacttctgctaatctttccctagtctattacttctttttctatt

SEQ ID NO: 37638 - DNA, 623 bp, Homo sapiens
gggctcaagtgatccaaccacctttcccctctcaatgggattacaggtttgagtgactgcacytggcctcattcccagagattttaatccaaggttttagaacctgcatttaaaaatgtataagcaaatttatatataaattttcagtggtctttaatctccattttgagaatttcccccaagggttctatgagcagagttagaaaccaatgacctagaatacacataggtattctaccagacatcatttcacatgaatgaagtgtgaggaactttattttgcttaagggaataattttatactaaaaaaagtgttaatattaaacattatttaaccaatagattggcatttagtgaaataaaatgtatttgaggaccaagaacttaaaactttgctctctagattccagcaataaaaatgaattggatcaaataaaggcttttcttatgagataaaaatgatcataaaacttacggtgcttggctatgagccagtttacatactatagaaacactgcctgggctaagagacttgaccaattaaactaattgtgtaggtcagagtacaggactctgagatcatataaaatcacaaactgagaggaatcattacacaagacctg

SEQ ID NO: 37639 - DNA, 623 bp, Homo sapiens
gggctcaagtgatccaaccacctttcccctctcaatgggattacaggtttgagtgactgcacctggcctcattcccagagattttaatccaaggttttagaacctgcatttaaaaatgtataagcaaatttatatataaattttcagtggtctttaatctccattttgagaatttcccccaagggttctatgagcagagttagaaaccaatgacctagaatacacataggtattctaccagacatcatttcacatgaatgaagtgtgaggaactttattttgcttaagggaataattttatactaaaaaaagtgttaatattaaacattatttaaccaatagattggcatttagtgaaataaaatgtatttgaggaccaagaacttaaaactttgctctctagattccagcaataaaaatgaattggatcaaataaaggcttttcttatgagataaaaatgatcataaaacttacggtgcttggctatgagccagtttacatactatagaaacactgcctgggctaagagacttgaccaattaaactaattgtgtaggtcagagtacaggactctgagatcatataaaatmacaaactgagaggaatcattacacaagacctg

SEQ ID NO: 37640 - DNA, 655 bp, Homo sapiens
ttttgaaataattaaaaatatatatttaatatggcttacaaatctctacataacttatctctgtctcccagtaggaatgggagttgggaagagatgattcccatcatccttcctgagccaatacaatctgactccagtacaacactgcatgtgtgaattatcaaacaaattgatttaaagattaaatgaaatcccaacacattcccaacagactttatttttcagaaattggaaaactaatgttaatgaaatacaagaagacaggaatagccaattttatcatgagaagaacagaggtgcaggacttaatcagacatcaagactccttcaggacacaagcatgggcaaagacttcatgacaagaacaccaaaagcaaytgcaactaaagccaaaatagacaaatgggatctaattaaactaaagagcttctggtcagcaaaagaaactatcagagtgaacaggcaacctacagaatgggagaaaatttttgcaatataaccatctgacaaagttctaatatccagaagctacaaggaacttacagaaatttataagaaaaaaaacaaccccatcaaaaagtaggcacaggatatgaatagacacttctcaaaagaagacatttatgcagccaacaaacttgaaaaaaagctcatc

SEQ ID NO: 37641 - DNA, 1004 bp, Homo sapiens
cacacagattagaatgtacctgttggaagaggcactgccagttcttcttgcacggaatcatggagtgatagacaattttctgtaagcacaatgtcatcaagtgcaatgtctccacgctgacctttcccaactctaccttcaaatttgagttggaagtcttcatcaccaaacagtgacagttcttctctccgccagaaattgccttgttctacagtgaggttaagtagaaccttcgtttggtttgtgactgacacctgcattaaggtgagtgccccaatgccatttccatacatgtgataatgaaaaataatctgtaatcaagaataggaatattacatacgatatgattagtataattaatatgatattattttcaattctatcacattgccctcttctttattaacagatttctggaggaaaattacacctgtttattctcttgctctgtctgcactttaacactgagtgaagttagaccagccttgagtcatatgttgcaatgtatgggagacagcagaggaagaatcaaatagaaatttagtaggaattaaagggctgagtttactttctttctgtgacttctgaaagcaagattccttcataaactcttagagcccattgtcaaaggaatacaagatcattaaattgctatgcattatacaaaaagacttttcatgattaagaaataacaggaacaaaagaagattatttttaatctcatgaaacttaaattattttattttcttcttttgcttattycactgccattcttgtacttgaaacactttttcagttctgtaagattctctgggctccatttaaatacaacaaaaccccagaacagtaattatccaaattttacttgaaatgctacaaatgggccttcacagagcaacccacggagcttttctttgagtaaaaattaataaaaagtattttcagggattaatatttcaatgttgcatagatgaaatttactagattttgagtgattgtcacac

SEQ ID NO: 37642 - DNA, 1344 bp, Homo sapiens
gttaaatgtgttttgctctcaggcaaagcagcaatttgcaataagaaaagattgctatataattaactcttgttttctctgctttgagaacaatcttcccagtaatcttcccaataaaacttcttagacattcaaggaaaaaagggccttctctggggcaaggggtcaggggagaggagaaatcccagcatgagaagagcctatgctcttccagcctcaaagttctaagcattttcaggctgagttcccaccacggacatctcgctgaagacagaaaccatgggaactgctcccagaataggaggtatttccaaggacatatacagttaggcccctatcttgctcctgagccctttgaaataagaaacagtagagatttggctmtgaggctataaagtcccacaagaaaacatgtgttgaaggaaccccaggatcaaactctacataattgcatcacacatatcacctgctgggggaccctgtgcaacccaacattccaagacacgttctcagcagtgaggaagtgccggggtgcccactccaaagcttgtcctcacagagctggacatggtttgttacctgcatcgaacttgaaaagctttctctgtgctaatctctttcacccaagccctctacagaccaacaggggccacagagcccctttgtccatacatgttcacggcacacagacagaactgtggattaacatgtgacatcccatgtaagtcatcaagaaactgacatgagtttagaaccttggcctccccggcatcacagcttttgaatggatagacactatgacaataatacacaataatatattgtggttttcttttctttttttctttttctttttttttttttttttttttttgagatagagtcttgctcttttcacccaggctggagtgcagtggcatgatctcagctcactgcaacctctgcctcccaggttcaagcgattctcctgcctcagcctcccgagtagctgggatttcaggtgcccaccactatgccgggctaatttttttgtaactttagtagagatggggtttcaccatgttggccaagctggtcttgaactcctgacctccggtgatccacctgcctcggcctcccaaagtgctgggattacaggcatgagccaccgcgcccagcctacatagcggatttctaaagcacttcagcatttaaaaaacaacttcataaccagtttcatttgatccattttatattagctctgtgaggccaagagagtgttcctatctccattttacaagggaaacaactcccaaggcatgtgcccaaggtcacacggcacttgtcataaagcagggagtcgga

SEQ ID NO: 37643 - DNA, 1344 bp, Homo sapiens
gttaaatgtgttttgctctcaggcaaagcagcaatttgcaataagaaaagattgctatataattaactcttgttttctctgctttgagaacaatcttcccagtaatcttcccaataaaacttcttagacattcaaggaaaaaagggccttctctggggcaaggggtcaggggagaggagaaatcccagcatgagaagagcctatgctcttccagcctcaaagttctaagcattttcaggctgagttcccaccacggacatctcgctgaagacagaaaccatgggaactgctcccagaataggaggtatttccaaggacatatacagttaggcccctatcttgctcctgagccctttgaaataagaaacagtagagatttggctctgaggctataaagtcccacaagaaaacatgtgttgaaggaaccccaggatcaaactctacataattgcatcacacatatcacctgctgggggaccctgtgcaacccaacattccaagacacgttctcagcagtgaggaagtgccggggtgcccactccaaagcttgtcctcacagagctggacatggtttgttacctgcatcgaacttgaaaagctttctctgtgctaatctctttcacccaagccctctacagaccaacaggggccacagagcccctttgtccatacatgttcacggcacacagacagaactgtggattaacatgtgacatcccatgtaagtcatcaagaaactgacatgagtttagaaccttggcctccccggcatcacagcttttgaatggatagacactatgacaataatacacaataatatattgtggttttcttttctttttttctttttctttttttttttttttttttttttgagatagagtcttgctcttttcacccaggctggagtgcagtggcatgatctcagctcactgcaacctctgcctcccaggttcaagcgattctcctgcctcagcctcccgagtagctgggatttcaggtgcccaccactatgcygggctaatttttttgtaactttagtagagatggggtttcaccatgttggccaagctggtcttgaactcctgacctccggtgatccacctgcctcggcctcccaaagtgctgggattacaggcatgagccaccgcgcccagcctacatagcggatttctaaagcacttcagcatttaaaaaacaacttcataaccagtttcatttgatccattttatattagctctgtgaggccaagagagtgttcctatctccattttacaagggaaacaactcccaaggcatgtgcccaaggtcacacggcacttgtcataaagcagggagtcgga

SEQ ID NO: 37644 - DNA, 1344 bp, Homo sapiens
gttaaatgtgttttgctctcaggcaaagcagcaatttgcaataagaaaagattgctatataattaactcttgttttctctgctttgagaacaatcttcccagtaatcttcccaataaaacttcttagacattcaaggaaaaaagggccttctctggggcaaggggtcaggggagaggagaaatcccagcatgagaagagcctatgctcttccagcctcaaagttctaagcattttcaggctgagttcccaccacggacatctcgctgaagacagaaaccatgggaactgctcccagaataggaggtatttccaaggacatatacagttaggcccctatcttgctcctgagccctttgaaataagaaacagtagagatttggctctgaggctataaagtcccacaagaaaacatgtgttgaaggaaccccaggatcaaactctacataattgcatcacacatatcacctgctgggggaccctgtgcaacccaacattccaagacacgttctcagcagtgaggaagtgccggggtgcccactccaaagcttgtcctcacagagctggacatggtttgttacctgcatcgaacttgaaaagctttctctgtgctaatctctttcacccaagccctctacagaccaacaggggccacagagcccctttgtccatacatgttcacggcacacagacagaactgtggattaacatgtgacatcccatgtaagtcatcaagaaactgacatgagtttagaaccttggcctccccggcatcacagcttttgaatggatagacactatgacaataatacacaataatatattgtggttttcttttctttttttctttttctttttttttttttttttttttttgagatagagtcttgctcttttcacccaggctggagtgcagtggcatgatctcagctcactgcaacctctgcctcccaggttcaagcgattctcctgcctcagcctcccgagtagctgggatttcaggtgcccaccactatgccgggctaatttttttgtaactttagtagagatggggtttcacyatgttggccaagctggtcttgaactcctgacctccggtgatccacctgcctcggcctcccaaagtgctgggattacaggcatgagccaccgcgcccagcctacatagcggatttctaaagcacttcagcatttaaaaaacaacttcataaccagtttcatttgatccattttatattagctctgtgaggccaagagagtgttcctatctccattttacaagggaaacaactcccaaggcatgtgcccaaggtcacacggcacttgtcataaagcagggagtcgga

SEQ ID NO: 37645 - DNA, 1344 bp, Homo sapiens
gttaaatgtgttttgctctcaggcaaagcagcaatttgcaataagaaaagattgctatataattaactcttgttttctctgctttgagaacaatcttcccagtaatcttcccaataaaacttcttagacattcaaggaaaaaagggccttctctggggcaaggggtcaggggagaggagaaatcccagcatgagaagagcctatgctcttccagcctcaaagttctaagcattttcaggctgagttcccaccacggacatctcgctgaagacagaaaccatgggaactgctcccagaataggaggtatttccaaggacatatacagttaggcccctatcttgctcctgagccctttgaaataagaaacagtagagatttggctctgaggctataaagtcccacaagaaaacatgtgttgaaggaaccccaggatcaaactctacataattgcatcacacatatcacctgctgggggaccctgtgcaacccaacattccaagacacgttctcagcagtgaggaagtgccggggtgcccactccaaagcttgtcctcacagagctggacatggtttgttacctgcatcgaacttgaaaagctttctctgtgctaatctctttcacccaagccctctacagaccaacaggggccacagagcccctttgtccatacatgttcacggcacacagacagaactgtggattaacatgtgacatcccatgtaagtcatcaagaaactgacatgagtttagaaccttggcctccccggcatcacagcttttgaatggatagacactatgacaataatacacaataatatattgtggttttcttttctttttttctttttctttttttttttttttttttttttgagatagagtcttgctcttttcacccaggctggagtgcagtggcatgatctcagctcactgcaacctctgcctcccaggttcaagcgattctcctgcctcagcctcccgagtagctgggatttcaggtgcccaccactatgccgggctaatttttttgtaactttagtagagatggggtttcaccatgttggccaagctggtcttgaactcctgacctccggtgatccacctgcctcggcctcccaaagtgctgggattacaggcatgagccaccgcgcccagcctacatagcggatttctaaagcacttsagcatttaaaaaacaacttcataaccagtttcatttgatccattttatattagctctgtgaggccaagagagtgttcctatctccattttacaagggaaacaactcccaaggcatgtgcccaaggtcacacggcacttgtcataaagcagggagtcgga

SEQ ID NO: 37646 - DNA, 966 bp, Homo sapiens
  misc_feature (1)...(966): n = A,T,C or G
ggtttaacctcaaacctagtccaatccagtgccccagggttgtcttccacttcctgtgggagaatgatcaagaatcttcttgccaaataaccctcagaaaaataaaccctgccccaaattatccagagaaaaactaatgaactaaattagggtctcctaaatgtacctttaatcataaaataaattcgggcactttcttaaaaatatggcatggggccatttncaaaatagctaagagtattatgtgaatgatttaatgcagaaatctttaatctttaaaataatttagttgtcatccccattttactgatggagaaactgaggctttgcaaaggtagataagttggctaataaatggtggtggcagcctttactyccaggtctgaagtctgagaactaagccatgtaccgtgcaagtaagagtgtggttgcggcaagaaggcacacatgtatgcagctggcagaagtgcaaatggatacaaggtcaaggcagtcttacatttgaagacccaactgagaaggctgcattgcagaaggcagggatttcctcgcatgatgcaagagcaatgtaataacagatgtcagatcatttgttattctcccctcttccttcattcctggatattaaaattccattccttgctagccactgaaagtctggcatgcactctgctggcttcgaagcttcagcatggcctctttccaggagagccaccctagaccagccaaacacatgtctgagcaattttgaaagcccctcgctgccttgagtggttttgaaatctgcggactatttttgcagttctcagcatctccaaggccacagtactaagtgaaaagcttagctggctctttgaagagtcttgtatatgatgttatgtctattggtgaagaggacaattatcccaagcaaagggcttttcatattgtgtcaacaggcttggcaatgtgggacatttgtcatgc

SEQ ID NO: 37647 - DNA, 966 bp, Homo sapiens
  misc_feature (1)...(966): n = A,T,C or G
ggtttaacctcaaacctagtccaatccagtgccccagggttgtcttccacttcctgtgggagaatgatcaagaatcttcttgccaaataaccctcagaaaaataaaccctgccccaaattatccagagaaaaactaatgaactaaattagggtctcctaaatgtacctttaatcataaaataaattcgggcactttcttaaaaatatggcatggggccatttncaaaatagctaagagtattatgtgaatgatttaatgcagaaatctttaatctttaaaataatttagttgtcatccccattttactgatggagaaactgaggctttgcaaaggtagataagttggctaataaatggtggtggcagcctttactcccaggtctgaagtctgagaactaagccatgtaccgtgcaagtaasagtgtggttgcggcaagaaggcacacatgtatgcagctggcagaagtgcaaatggatacaaggtcaaggcagtcttacatttgaagacccaactgagaaggctgcattgcagaaggcagggatttcctcgcatgatgcaagagcaatgtaataacagatgtcagatcatttgttattctcccctcttccttcattcctggatattaaaattccattccttgctagccactgaaagtctggcatgcactctgctggcttcgaagcttcagcatggcctctttccaggagagccaccctagaccagccaaacacatgtctgagcaattttgaaagcccctcgctgccttgagtggttttgaaatctgcggactatttttgcagttctcagcatctccaaggccacagtactaagtgaaaagcttagctggctctttgaagagtcttgtatatgatgttatgtctattggtgaagaggacaattatcccaagcaaagggcttttcatattgtgtcaacaggcttggcaatgtgggacatttgtcatgc

SEQ ID NO: 37648 - DNA, 966 bp, Homo sapiens
  misc_feature (1)...(966): n = A,T,C or G
ggtttaacctcaaacctagtccaatccagtgccccagggttgtcttccacttcctgtgggagaatgatcaagaatcttcttgccaaataaccctcagaaaaataaaccctgccccaaattatccagagaaaaactaatgaactaaattagggtctcctaaatgtacctttaatcataaaataaattcgggcactttcttaaaaatatggcatggggccatttncaaaatagctaagagtattatgtgaatgatttaatgcagaaatctttaatctttaaaataatttagttgtcatccccattttactgatggagaaactgaggctttgcaaaggtagataagttggctaataaatggtggtggcagcctttactcccaggtctgaagtctgagaactaagccatgtaccgtgcaagtaagagtgtggttgcggyaagaaggcacacatgtatgcagctggcagaagtgcaaatggatacaaggtcaaggcagtcttacatttgaagacccaactgagaaggctgcattgcagaaggcagggatttcctcgcatgatgcaagagcaatgtaataacagatgtcagatcatttgttattctcccctcttccttcattcctggatattaaaattccattccttgctagccactgaaagtctggcatgcactctgctggcttcgaagcttcagcatggcctctttccaggagagccaccctagaccagccaaacacatgtctgagcaattttgaaagcccctcgctgccttgagtggttttgaaatctgcggactatttttgcagttctcagcatctccaaggccacagtactaagtgaaaagcttagctggctctttgaagagtcttgtatatgatgttatgtctattggtgaagaggacaattatcccaagcaaagggcttttcatattgtgtcaacaggcttggcaatgtgggacatttgtcatgc

SEQ ID NO: 37649 - DNA, 966 bp, Homo sapiens
  misc_feature (1)...(966): n = A,T,C or G
ggtttaacctcaaacctagtccaatccagtgccccagggttgtcttccacttcctgtgggagaatgatcaagaatcttcttgccaaataaccctcagaaaaataaaccctgccccaaattatccagagaaaaactaatgaactaaattagggtctcctaaatgtacctttaatcataaaataaattcgggcactttcttaaaaatatggcatggggccatttncaaaatagctaagagtattatgtgaatgatttaatgcagaaatctttaatctttaaaataatttagttgtcatccccattttactgatggagaaactgaggctttgcaaaggtagataagttggctaataaatggtggtggcagcctttactcccaggtctgaagtctgagaactaagccatgtaccgtgcaagtaagagtgtggttgcggcaagaaggcacacatgtatgcagctggcagaagtgcaaatggatacaaggtcaaggcagtcttacatttgaagacccaactgagaaggctgcattgcagaaggcagggatttcctcgcatgatgcaagagcaatgtaataacagatgtcagatcatttgttattctcccctcttccttcattcctggatattaaaattccatkccttgctagccactgaaagtctggcatgcactctgctggcttcgaagcttcagcatggcctctttccaggagagccaccctagaccagccaaacacatgtctgagcaattttgaaagcccctcgctgccttgagtggttttgaaatctgcggactatttttgcagttctcagcatctccaaggccacagtactaagtgaaaagcttagctggctctttgaagagtcttgtatatgatgttatgtctattggtgaagaggacaattatcccaagcaaagggcttttcatattgtgtcaacaggcttggcaatgtgggacatttgtcatgc

SEQ ID NO: 37650 - DNA, 966 bp, Homo sapiens
  misc_feature (1)...(966): n = A,T,C or G
ggtttaacctcaaacctagtccaatccagtgccccagggttgtcttccacttcctgtgggagaatgatcaagaatcttcttgccaaataaccctcagaaaaataaaccctgccccaaattatccagagaaaaactaatgaactaaattagggtctcctaaatgtacctttaatcataaaataaattcgggcactttcttaaaaatatggcatggggccatttncaaaatagctaagagtattatgtgaatgatttaatgcagaaatctttaatctttaaaataatttagttgtcatccccattttactgatggagaaactgaggctttgcaaaggtagataagttggctaataaatggtggtggcagcctttactcccaggtctgaagtctgagaactaagccatgtaccgtgcaagtaagagtgtggttgcggcaagaaggcacacatgtatgcagctggcagaagtgcaaatggatacaaggtcaaggcagtcttacatttgaagacccaactgagaaggctgcattgcagaaggcagggatttcctcgcatgatgcaagagcaatgtaataacagatgtcagatcatttgttattctcccctcttccttcattcctggatattaaaattccattccttrctagccactgaaagtctggcatgcactctgctggcttcgaagcttcagcatggcctctttccaggagagccaccctagaccagccaaacacatgtctgagcaattttgaaagcccctcgctgccttgagtggttttgaaatctgcggactatttttgcagttctcagcatctccaaggccacagtactaagtgaaaagcttagctggctctttgaagagtcttgtatatgatgttatgtctattggtgaagaggacaattatcccaagcaaagggcttttcatattgtgtcaacaggcttggcaatgtgggacatttgtcatgc

SEQ ID NO: 37651 - DNA, 675 bp, Homo sapiens
cacgcagatctgccaggaatacaatgccctgctttggtttcactgtgtttcctttctcttgttctcgtctctactcatccccgcagcagaatggcaccgggactgactgtgcctgcttctgttcagattctcagagactgacatggaaagaccggattcttgcaagaatccgtaccttggtccttcccacatgctctcggggaaataaaatcaagcacacaattaaattatactacataactctgaagtgcttgaaaatatagaaaggcactgaraaatgggcactggtatgttcatttcagtgcttccgcccatgcctgaaacctggcaagcactcagtttattgatgctttattgatggactgacttcactaggtgacatttctgaaccaaatgccacctttttctcatttctctagacagccacagtgtatagtaatgcacatacaacagtctacaatactccctgaagattatgagctgtatatagtgttattgctttttggttggttgtttttttagagacggggtcttgctctgtcacccaggttggagagcaatggtacgatcatggctcactgcagcctcaaactcctgggctccagtgatcctccttcctcagcctcctgagtagctgagactacaggcattccaccatacatagataattaattt

SEQ ID NO: 37652 - DNA, 675 bp, Homo sapiens
cacgcagatctgccaggaatacaatgccctgctttggtttcactgtgtttcctttctcttgttctcgtctctactcatccccgcagcagaatggcaccgggactgactgtgcctgcttctgttcagattctcagagactgacatggaaagaccggattcttgcaagaatccgtaccttggtccttcccacatgctctcggggaaataaaatcaagcacacaattaaattatactacataactctgaagtgcttgaaaatatagaaaggcactgaaaaatgggcactggtatgttcatttcagtgcttccgcccatgcctgaaaccyggcaagcactcagtttattgatgctttattgatggactgacttcactaggtgacatttctgaaccaaatgccacctttttctcatttctctagacagccacagtgtatagtaatgcacatacaacagtctacaatactccctgaagattatgagctgtatatagtgttattgctttttggttggttgtttttttagagacggggtcttgctctgtcacccaggttggagagcaatggtacgatcatggctcactgcagcctcaaactcctgggctccagtgatcctccttcctcagcctcctgagtagctgagactacaggcattccaccatacatagataattaattt

SEQ ID NO: 37653 - DNA, 523 bp, Homo sapiens
agtaggaggagaggtgagtaatgactggtggacccgcatgggctaactcttacggttcaagggttcaggaagagatttgcaaacgtctctactctactttgtctacaaaagaacaccaaggaattcagaaacttaatttgaagtggagtttttggggattttttacttcttggcagtggtaggctacccaccatctgggacctgtatgtgtcattgaaaagaaggtcccctctggcatgagtggagtgcggtaggcgtggcctggaatccctgggtggcctgacagcccattttaatcarcaattctactggagttccagtgacccagggaacaaagttcaccactgctccttactcagaactggtgataacgttgacagggctgatgggaatcctcctgctggctgcaaactccacctgcagcagagacggggcttctagggagacagggtcagtgtgagtgagtgctgctgggtttgccaggctgctggagtgggtgtactactcctcagtgtgcaggggg

SEQ ID NO: 37654 - DNA, 1221 bp, Homo sapiens
tacgtggaagatacacttcagttttaaaacacaccccatgtaattcaagaggaagtcagaagatgacagaattggagacactgacatcgttgaagacagaattctaaaaatacatctggatgaggtccaagggggcagagaaagccctggaagccgggacaacagcatagcaaaggctctcctgggatcgcacaatgctgcaccggaagggaaggcatgaaagcacctgggagagagggagaaagcacaggggggtgtgagtagatagacctgggctgagcctcagccttgatggcactacagctgtgagagaaagagggtgacacaggtggacctccagaacgagtgaggagccccctgaactgcagttgcctccagagtcaagcagtgcccatggcacgaatgattggcagaagacgtggacaggtaccgtggaagagggaagtagaaaagaggaaaggatcaggagatgagaaagggamaaagaagagaaagagagagggagggaggaagggagggaaaagcagtggcctgcgtggtagctcatgcctgtaatcccaacactgtggaagcctgaggagggaggatcacctgagcccaagaagtttgaggctgcagtgagtcataattgcattaatgcactccagcctgggcaacagagcaagaccccatctctaaaaaaaaagaattaattaaatcataaaattatatgcaacaaactgaataaccttctttgcctactacttacctgtgacaagggcttcacagaaacaacccaacttggtggcatttcttttccttttctcttctttctttttcttttttttttttttttttgagacagaatctcactcagttgcccaggctggcatgcagtggtgcaatcttggctcactgcaacttctgactcccaggttcaagtgattctcatgcctcagcctcctgagtagctgggattacaggcgcgcgccaccatacctggctaatttttatatttttagtagagacggggtttcagcatgttgcccaggctggtcatgaactcctgacttcaagtgatccacccgccttggcctcccaaagtgctgggattacaggtgtgagtcacctcgcctggctggagactttaactttttaacatttttcttttcataaaaaatgattcagtaagtagtttcccaggtaataaatacagtcatacattgcttaatgatggggaaa

SEQ ID NO: 37655 - DNA, 1221 bp, Homo sapiens
tacgtggaagatacacttcagttttaaaacacaccccatgtaattcaagaggaagtcagaagatgacagaattggagacactgacatcgttgaagacagaattctaaaaatacatctggatgaggtccaagggggcagagaaagccctggaagccgggacaacagcatagcaaaggctctcctgggatcgcacaatgctgcaccggaagggaaggcatgaaagcacctgggagagagggagaaagcacaggggggtgtgagtagatagacctgggctgagcctcagccttgatggcactacagctgtgagagaaagagggtgacacaggtggacctccagaacgagtgaggagccccctgaactgcagttgcctccagagtcaagcagtgcccatggcacgaatgattggcagaagacgtggacaggtaccgtggaagagggaagtagaaaagaggaaaggatcaggagatgagaaagggaaaaagaagagaaagagagagggagggaggaagggagggaaaagcagtggcctgcgtggtagctcatgcctgtaatcccaacactgtggaagcctgaggagggaggatcacctgagcccaagaagtttgaggctgcagtgagtcataattgcattaatgcactccagcctgggcaacagagcaagaccccatctctaaaaaaaaagaattaattaaatcataaaattatatgcaacaaactgaataaccttctttgcctactacttacctgtgacaagggcttcacagaaacaacccaacttggtggcatttcttttccttttctcttctttctttttcttttttttttttttttttgagacagaatctcactcagttgcccaggctggcatgcagtggtgcaatcttggctcactgcaacttctgactcccaggttcaagtgattctcatgcctcagcctcctgagtagctgggattacaggcgcgcsccaccatacctggctaatttttatatttttagtagagacggggtttcagcatgttgcccaggctggtcatgaactcctgacttcaagtgatccacccgccttggcctcccaaagtgctgggattacaggtgtgagtcacctcgcctggctggagactttaactttttaacatttttcttttcataaaaaatgattcagtaagtagtttcccaggtaataaatacagtcatacattgcttaatgatggggaaa

SEQ ID NO: 37656 - DNA, 1221 bp, Homo sapiens
tacgtggaagatacacttcagttttaaaacacaccccatgtaattcaagaggaagtcagaagatgacagaattggagacactgacatcgttgaagacagaattctaaaaatacatctggatgaggtccaagggggcagagaaagccctggaagccgggacaacagcatagcaaaggctctcctgggatcgcacaatgctgcaccggaagggaaggcatgaaagcacctgggagagagggagaaagcacaggggggtgtgagtagatagacctgggctgagcctcagccttgatggcactacagctgtgagagaaagagggtgacacaggtggacctccagaacgagtgaggagccccctgaactgcagttgcctccagagtcaagcagtgcccatggcacgaatgattggcagaagacgtggacaggtaccgtggaagagggaagtagaaaagaggaaaggatcaggagatgagaaagggaaaaagaagagaaagagagagggagggaggaagggagggaaaagcagtggcctgcgtggtagctcatgcctgtaatcccaacactgtggaagcctgaggagggaggatcacctgagcccaagaagtttgaggctgcagtgagtcataattgcattaatgcactccagcctgggcaacagagcaagaccccatctctaaaaaaaaagaattaattaaatcataaaattatatgcaacaaactgaataaccttctttgcctactacttacctgtgacaagggcttcacagaaacaacccaacttggtggcatttcttttccttttctcttctttctttttcttttttttttttttttttgagacagaatctcactcagttgcccaggctggcatgcagtggtgcaatcttggctcactgcaacttctgactcccaggttcaagtgattctcatgcctcagcctcctgagtagctgggattacaggcgcgcgccaccatacctggctaatttttatatttttagtagagacggggtttcagcatgttgcccaggctggtcatgaactcctgacytcaagtgatccacccgccttggcctcccaaagtgctgggattacaggtgtgagtcacctcgcctggctggagactttaactttttaacatttttcttttcataaaaaatgattcagtaagtagtttcccaggtaataaatacagtcatacattgcttaatgatggggaaa

SEQ ID NO: 37657 - DNA, 1471 bp, Homo sapiens
tgaaaagtgcctcccggaaactctctccctggtcctaattctgccggctggaattgctctggacacacctaatcctcatttaataaatgcccatgcacattcatcctaaggagaaggacagagaggggtctgtttggcaaataacattgttatgttccatgccggggaatgcctgtttaatctactttgctaacaataaatttaaatgttaataactggggtgtacatacaccataaacggtacaaatgtcatgtgtacagcttgataaaattttacataggtataccctcattcaactgccttccacctcaagacatggaatattttcacccttcctcaaaattaccacgtgctctttcctggtcctgagcaggccttcaaaggtcagcagtgttctactccagttgccatgggtatttcatgctcctcttgaactttatgcagatggaagcagagagaacatgcgcttttgtatctgatattttcactcaagaagactgtgaggttcaaccatgttctaaatagcaatattagttcttttgtttttattgccttgtggtatcccaagtttgacttgtgtttatagttgtatatgtaattgctccttctatttttttttttgcgggggtagggggtggtgggatggaattttgctcttgttgcccaggctggagtccaatggcactatctcagctcactgcaacctccgcctccctggttcaagcgatattctcctgcctcagcctcctgagtagctgggattacagccaccacacccacctaattttttgtatttttagtagagacgaggtttctccatgttggccaggctgatctcaaactcctgacctcaggtgatccacccgcctcagcctcccaaagtgctgggattacaggcgtgagccaccgggcctggcccctccttctattttatatagttaaggttggaaattgatatggwttggctctgtgtccccacggaaatagcatttcgaattgtaatccccatgtgtcggaggagtggcctggtgggaggtgattggaccatggaggtgaatttcccccttgctgttctcgtgatagtgagtgagttctcacgagatctcatggtttaaaagtccggcgcttcccagttctgtctctcgctcctgccgccttgtagacgtgttcgctttgcgtttgccttctgcgtgattgtaagtttcccgaggcttccccagccatgcggaactgtgagtcaattaaacctcttttctgtataaactacccagtctcaggtacttcttgataacagtgtgaaaatggactgatacagtaatgatataagctagcatgactgctgactgtgaactggaaaatggtgctaagtacgtgacatcacttgatcttttcaatactgtgagattggtactatcattaatccattttacagatgagataaccaaggccgagtaacttgctcaaagtctc

SEQ ID NO: 37658 - DNA, 1471 bp, Homo sapiens
tgaaaagtgcctcccggaaactctctccctggtcctaattctgccggctggaattgctctggacacacctaatcctcatttaataaatgcccatgcacattcatcctaaggagaaggacagagaggggtctgtttggcaaataacattgttatgttccatgccggggaatgcctgtttaatctactttgctaacaataaatttaaatgttaataactggggtgtacatacaccataaacggtacaaatgtcatgtgtacagcttgataaaattttacataggtataccctcattcaactgccttccacctcaagacatggaatattttcacccttcctcaaaattaccacgtgctctttcctggtcctgagcaggccttcaaaggtcagcagtgttctactccagttgccatgggtatttcatgctcctcttgaactttatgcagatggaagcagagagaacatgcgcttttgtatctgatattttcactcaagaagactgtgaggttcaaccatgttctaaatagcaatattagttcttttgtttttattgccttgtggtatcccaagtttgacttgtgtttatagttgtatatgtaattgctccttctatttttttttttgcgggggtagggggtggtgggatggaattttgctcttgttgcccaggctggagtccaatggcactatctcagctcactgcaacctccgcctccctggttcaagcgatattctcctgcctcagcctcctgagtagctgggattacagccaccacacccacctaattttttgtatttttagtagagacgaggtttctccatgttggccaggctgatctcaaactcctgacctcaggtgatccacccgcctcagcctcccaaagtgctgggattacaggcgtgagccaccgggcctggcccctccttctattttatatagttaaggttggaaattgatatggtttggctctgtgtccccacggaaatagcatttcgaattgtaatccccatgtgtcggaggagtggcctggtgggaggtgattggaccatggaggtgaatttcccccttgctgttctcgtgatagtgagtgagttctcacgagatctcatggtttaaaagtccggcgcttcccagttctgtctctcgctcctgccgccttgtagacgtgttcgctttgcgtttgccttctgcgtgattgtaagtttcccgaggcttccccagccatgcggaactgtgagtcaattaaacctcttttctgtataaactacccagtctcaggtacttcttgataacagtgtgaaaatggactgatacagtaatgatrtaagctagcatgactgctgactgtgaactggaaaatggtgctaagtacgtgacatcacttgatcttttcaatactgtgagattggtactatcattaatccattttacagatgagataaccaaggccgagtaacttgctcaaagtctc

SEQ ID NO: 37659 - DNA, 1471 bp, Homo sapiens
tgaaaagtgcctcccggaaactctctccctggtcctaattctgccggctggaattgctctggacacacctaatcctcatttaataaatgcccatgcacattcatcctaaggagaaggacagagaggggtctgtttggcaaataacattgttatgttccatgccggggaatgcctgtttaatctactttgctaacaataaatttaaatgttaataactggggtgtacatacaccataaacggtacaaatgtcatgtgtacagcttgataaaattttacataggtataccctcattcaactgccttccacctcaagacatggaatattttcacccttcctcaaaattaccacgtgctctttcctggtcctgagcaggccttcaaaggtcagcagtgttctactccagttgccatgggtatttcatgctcctcttgaactttatgcagatggaagcagagagaacatgcgcttttgtatctgatattttcactcaagaagactgtgaggttcaaccatgttctaaatagcaatattagttcttttgtttttattgccttgtggtatcccaagtttgacttgtgtttatagttgtatatgtaattgctccttctatttttttttttgcgggggtagggggtggtgggatggaattttgctcttgttgcccaggctggagtccaatggcactatctcagctcactgcaacctccgcctccctggttcaagcgatattctcctgcctcagcctcctgagtagctgggattacagccaccacacccacctaattttttgtatttttagtagagacgaggtttctccatgttggccaggctgatctcaaactcctgacctcaggtgatccacccgcctcagcctcccaaagtgctgggattacaggcgtgagccaccgggcctggcccctccttctattttatatagttaaggttggaaattgatatggtttggctctgtgtccccacggaaatagcatttcgaattgtaatccccatgtgtcggaggagtggcctggtgggaggtgattggaccatggaggtgaatttcccccttgctgttctcgtgatagtgagtgagttctcacgagatctcatggtttaaaagtccggcgcttcccagttctgtctctcgctcctgccgccttgtagacgtgttcgctttgcgtttgccttctgcgtgattgtaagtttcccgaggcttccccagccatgcggaactgtgagtcaattaaacctcttttctgtataaactacccagtctcaggtacttcttgataacagtgtgaaaatggactgatacagtaatgatataagctagcatgactgctgactgtgaactggaaaatggtgctaagtacgtgacawcacttgatcttttcaatactgtgagattggtactatcattaatccattttacagatgagataaccaaggccgagtaacttgctcaaagtctc

SEQ ID NO: 37660 - DNA, 546 bp, Homo sapiens
acagacttcaatcatcaagaaaccaaaacattaatttgtagtaatcagattcattgaaattatccccttgtgctatttccatggcctggaaaagacccagtcagaaccttcacctggtagcgagtttgcagtaactacagcaagttcaactcaatgcttcttcaaataagaaaaacgtgtagtaaaatagacagctcgaagctatactctatttttctccctttcttttttttttttgagatggagtctggctctggcaccgaggctggagtgcagtggcatgatctcggctcactgcaacctctgcctcctgggttcaagtgattcccttgcctcagcttcccaggtagctgggattacaggcgcccaccamcatgtccggctaatttttgtaattttggtagagacgaggtttcaccatattgcccaggctggtcatgaactcctgacctcaggtgatccacccgcctcggcctctcaaagtgctgggattacagacatgagaaattgattatttgagtatcctgctctgccattttccatgaa

SEQ ID NO: 37661 - DNA, 546 bp, Homo sapiens
acagacttcaatcatcaagaaaccaaaacattaatttgtagtaatcagattcattgaaattatccccttgtgctatttccatggcctggaaaagacccagtcagaaccttcacctggtagcgagtttgcagtaactacagcaagttcaactcaatgcttcttcaaataagaaaaacgtgtagtaaaatagacagctcgaagctatactctatttttctccctttcttttttttttttgagatggagtctggctctggcaccgaggctggagtgcagtggcatgatctcggctcactgcaacctctgcctcctgggttcaagtgattcccttgcctcagcttcccaggtagctgggattacaggcgcccaccaccatgtccggctaatttttgtaattttggtagagacgrggtttcaccatattgcccaggctggtcatgaactcctgacctcaggtgatccacccgcctcggcctctcaaagtgctgggattacagacatgagaaattgattatttgagtatcctgctctgccattttccatgaa

SEQ ID NO: 37662 - DNA, 1193 bp, Homo sapiens
tcactgcaatctctgcctcctggattcaagcgatcctcttgcctcagattcccaagtagctgggattacaggtgtgcactaccacacctggctaatttttgtatttctagtagagatagggttttgttatgttggccaggctggtctcgaactctggacctcaagtcatctgcccacctcagcctcccaaaatgctgggattacaggctcccactaccacgcccarctaatttttttgtattttttttagtagagatggtgtttcaccatgttggccaggctggtctcaaactcctgaccttgtgatctgcctgccttggcctcccaaagtgctgggattacaggcgtgagccactgcgcccagcctataaacagtcttaatagcagtacctattaaaattaaagctggatatttctttcaactcaggattactttcaacaaagtaatacacacacgaatatttatggcattgttgcccatgatagccccaaattggaaataacctccgtgtcctgaggttagaagaattcataataatttatggagcatctatacacataatattagaggaaaaaataaagtggcaaaacctgtgtaaaggttttgttgttgttgttgttgtttttagacagagtttcactcttgttgtctaggctggagtgtgatggcacagtcttggctcactgcaacctccgcttcctgagttcaagcgattctcttgcctcagcctcccaactagctggggttacaggtgcctgccactatgcccagctaatttttgtatttttggtggagacaggtttcactatgttgttcaggctggtctcgaactcctgacatcaggtgatccacctgcctcagcctcccaaagtgctgggattacagaagtgagccaccgtgcctggtctaaagtttgacctgatctatgttatatgttaaccaaaactaaactacatattacatgccacactgtaaatcgattatcctgtggagtagggaaaaaaggattgttgcggagggaagatgtactttcatcgctgatgttaatataaacttgtgaataatttgaaatgcattctttgttgtattttgaaaagcctctatctcctttcatatttctaattataaaggggaaaagtcatgaatccaccagtttatattggatatattttgtagatgatgttccattaca

SEQ ID NO: 37663 - DNA, 642 bp, Homo sapiens
ttccctttccctggaaaacagttcttaaaatcaggccagtaactctgtgctggttacattttgcttcatctttggatttatctacctcagggcaacatattatacagcctgctctgaaacactttggataccctcaaggtatatataagcctagaagaaaacaaaaggtaattttctatttttatgaagcagctgaatgaaatgtcaccctgttatactaaatcatataaagcaagccttctggatatttaaagttagaaatctgaatttgttacataggttttgttttttatcacagccaaggtttcaggggaaatgtgtctgtgtcttccatactttctcaactcccttttaagctgcctaaccggagratctcagccccatatatcccttgtaggcaatgccctgaatttttctcccctcccatcagcagttttctgatgcttcaccactgcttcttgttccatctcatcctgcttcctccatcctgaggatgatcatattctgagaaaatcatttgttcttcattgataaatcctggctccttcttaatgctcatctcaagacacaccttcttatattgacgtagtcagtttattccccagcttagccaaacattccttgtatctccattgtactcca

SEQ ID NO: 37664 - DNA, 521 bp, Homo sapiens
ttctatgccaaaagcatatttgcagattgattagtttattttcctctaaagcatttctgaaactctttcttctttctaataatagttgtttaacctgaatgcattttcattagtgcagtccacctctaagaattgtcacacagtgagacagggaagcttggatattttaaaatatattttgactttccttgattgatgattgtctatgaaagtattaaattcycagtacttgaggctgttatattcactgtctgagcaagacccccatagcaccagagagagctctcagagaagcaggaagtcataagcccttgagttttttttccaaaaaattattttttagattttataatcaagatttttatatatgttctatcccaagtaataagctaaatgcattttaaggtcacaaaatttgtattttcatcaaagatgaaattcagagtaagtataaagttaaaaatagtaatatttccagatttttaaaggtctttgaaaaaatatttaaatgacaaggcaaa

SEQ ID NO: 37665 - DNA, 993 bp, Homo sapiens
cttcttccttcgtgctcaagtcactactgcctgcccaccccattcatttggcatttatgtgactgtaactgtgttctgtgtgcccctctagtcttcagacctcttgaggagaggctactgtgtctttgyatcctacagagcactcagcacagttgaaaagctcttcagggggctgggcgtggtggctcacgcctgtaatcctagcactttgggaggccgaggtgggcagatcacctgaggtcaggggttcgagaccagcctggccaacatggcgaaaccctgtctctactaaaaatacaaaaattagctgggtgtggtggctcatgcctataatcccagctactcgagaggctgaggcagaagaatcacttgaacccaggaggtggaggttgcagtgagctgagatcacaccaccacattccaacctgggtgacaagagcaaaaaaagaaaaagaaatctcaaaaagaaaaagaaaagtttttcaggggactcttgcaattgtggcatcatgatccttcacacctgcacttactggacgcctcctgtgtacacagcccctttcctcctgtgcacaaggtggcctgtgttaggacagaggctgcagctccccctgaccctgcctctcccctgtttgcatctacaggtacccagacagccattgtcttcatcaagcagccgtcctcccaggatgcactgcaggggcgccgggcgctgcttcgctgtgaggttgaggctccgggcccggtacatgtgtactggctgctcgatggggcccctgtccaggacacggagcggcgtttcgcccagggcagcagcctgagctttgcagctgtggaccggctgcaggactctggcaccttccagtgtgtggctcgggatgatgtcactggagaagaagcccgcagtgccaacgcctccttcaacatcaaatgtgagagccaggggggctgtgcccagtccccctgtcagaccctcaatgactgaggcctggg

SEQ ID NO: 37666 - DNA, 993 bp, Homo sapiens
cttcttccttcgtgctcaagtcactactgcctgcccaccccattcatttggcatttatgtgactgtaactgtgttctgtgtgcccctctagtcttcagacctcttgaggagaggctactgtgtctttgtatcctacagagcactcagcacagttgaaaagctcttcagggggctgggcgtggtggctcacgcctgtaatcctagcactttgggaggccgaggygggcagatcacctgaggtcaggggttcgagaccagcctggccaacatggcgaaaccctgtctctactaaaaatacaaaaattagctgggtgtggtggctcatgcctataatcccagctactcgagaggctgaggcagaagaatcacttgaacccaggaggtggaggttgcagtgagctgagatcacaccaccacattccaacctgggtgacaagagcaaaaaaagaaaaagaaatctcaaaaagaaaaagaaaagtttttcaggggactcttgcaattgtggcatcatgatccttcacacctgcacttactggacgcctcctgtgtacacagcccctttcctcctgtgcacaaggtggcctgtgttaggacagaggctgcagctccccctgaccctgcctctcccctgtttgcatctacaggtacccagacagccattgtcttcatcaagcagccgtcctcccaggatgcactgcaggggcgccgggcgctgcttcgctgtgaggttgaggctccgggcccggtacatgtgtactggctgctcgatggggcccctgtccaggacacggagcggcgtttcgcccagggcagcagcctgagctttgcagctgtggaccggctgcaggactctggcaccttccagtgtgtggctcgggatgatgtcactggagaagaagcccgcagtgccaacgcctccttcaacatcaaatgtgagagccaggggggctgtgcccagtccccctgtcagaccctcaatgactgaggcctggg

SEQ ID NO: 37667 - DNA, 592 bp, Homo sapiens
tgtagctggtttttttctgtgatttgtctatgcatgtgtgtgtccttgtgcgtgcacaggtgtgtacacatgtgcttctctgcgtgtgtgtggacctgtgtatgcatatgtatgtgcatgcacactctttccccagcctccttacagtaatcaggggaacctcagggacctgtcctttggaacacagacatgtgctacctgtgctcctgctgctggcctcagcccccgtccccaccccaagagtcctggagacccacacatgccacrcaatgctgccttgcccagaaccctggagtggctccccacatgctttctgttggccttcagggtcgggggcctcctccaggccactctcacttctcccgcagatgacctttctggctgctctgattggcatgtggcttcctctactgaaaggcattccgtgactcttcactgagcaagtcctctgatgctgaggctgtgtgctgggctccaggagaggcagcaggggtaatcatgggccagcattccaagacgtcttaggctagtgcagtggcaagatcctggagctcagatgtaaggtgtgctagagagaggtgagcttggtgag

SEQ ID NO: 37668 - DNA, 631 bp, Homo sapiens
taaataataagtgctaataaggcctaacatttattgagtgctaactatatgtcagatacacagctaactgctctgtatcagatattagctcattaaatctataaatagcatattttatatggtagtatttttatatgaatatgcctaatttgttccagcataactaaaactccctttcatctcatgtcatttcatacctttaaaaactacttttctcggccgggcgcggtggctcatgcctgcaatccccacactttgggaggctgaggcgggtggatcacgaggtcaggagttygagatcagcctggccaacatggtgaaaccccttctctactaaaaatacaaatattacccaggcacctgtaatcccagctactcaggaccgcacctgtaatcccagctggtggcaagcgcctgtaatcccagctactcaggaggctgaagcaggataatcacttgaacccaagaggcggaggttacagtgagccaagatcacgccactgcactccggcctggatgacagagcgagactccatctcaagaagaacaaaaaaacaaaaaaaaactattttgctcacatttaaaacagaacatcatttactaaagaaaatcccagtgaataatgggctct

SEQ ID NO: 37669 - DNA, 631 bp, Homo sapiens
taaataataagtgctaataaggcctaacatttattgagtgctaactatatgtcagatacacagctaactgctctgtatcagatattagctcattaaatctataaatagcatattttatatggtagtatttttatatgaatatgcctaatttgttccagcataactaaaactccctttcatctcatgtcatttcatacctttaaaaactacttttctcggccgggcgcggtggctcatgcctgcaatccccacactttgggaggctgaggcgggtggatcacgaggtcaggagtttgagatcagcctggccaacatggtgaaaccccttctctactaaaaatacaaawattacccaggcacctgtaatcccagctactcaggaccgcacctgtaatcccagctggtggcaagcgcctgtaatcccagctactcaggaggctgaagcaggataatcacttgaacccaagaggcggaggttacagtgagccaagatcacgccactgcactccggcctggatgacagagcgagactccatctcaagaagaacaaaaaaacaaaaaaaaactattttgctcacatttaaaacagaacatcatttactaaagaaaatcccagtgaataatgggctct

SEQ ID NO: 37670 - DNA, 608 bp, Homo sapiens
tttgtcttctgctaaaatagccaccagaggggagggcagcaggacagtgcatagcatgatgccagatggcacggagtggggatgacaagactgcctctaccattgctaaaaatgagtgccttctggacagttatgaggtccattacaggaagttggttccattagttaagtctcatcctccccaaatttggttgtcagggattaattttatgatttacatggtgatcaatacaggatcattgttaatttttcacaaactattacaacatataatctgtgccttaaatcagttctcctttttggaaagggtgttttctatctaattagatatcacataagggcaaactgtcactggattccactttgatcaggagtttatscttagcaccaaccaactcaacatctcctaacttcaggattcattatctcaatgaactctggcaatagcatccctaaaacctatctttccaggagacaggtcattaaatggtccttatttaaggcattcttttgcaaagcctattgtctaaggaaaaaagagataaacaagcagaaaggaaaactgattccaattcaaataagcgttctccttctaaataccttaactt

SEQ ID NO: 37671 - DNA, 550 bp, Homo sapiens
tttggtgggtgagtaagaagcctgcagtgaggaggcattttgtttgtttctctagggcaggtttgtattttgctggaggtcctgttgaatataasttgtggcagtagcatgattatctcactccttgcctcagagaaaaagtttcaacattttcccattaaatatgatgtctcctgtaggttttatatagatgcccttcatcagttttagtagtgtccctctacttctaggttgccaagcatttatgtcatgaatgaatgttgaatttcatcaaattatcctctgcatttcgaaatgatcatatgatttttctcttcttttttgtctacaaggtgaattacactttttttggataatttttaattttggttatcatttaaaacatgtaaaaattgaagatttgtacaagaaactcttacaaccctttacccagatttaccagttgtttactttttgcctcatttgctttatcgttctttctttacacacatatatatgagcatgttgtttatttttggtaccattttagactaaattggagatagtatgt

SEQ ID NO: 37672 - DNA, 550 bp, Homo sapiens
tttggtgggtgagtaagaagcctgcagtgaggaggcattttgtttgtttctctagggcaggtttgtattttgctggaggtcctgttgaatataacttgtggcagtagcatsattatctcactccttgcctcagagaaaaagtttcaacattttcccattaaatatgatgtctcctgtaggttttatatagatgcccttcatcagttttagtagtgtccctctacttctaggttgccaagcatttatgtcatgaatgaatgttgaatttcatcaaattatcctctgcatttcgaaatgatcatatgatttttctcttcttttttgtctacaaggtgaattacactttttttggataatttttaattttggttatcatttaaaacatgtaaaaattgaagatttgtacaagaaactcttacaaccctttacccagatttaccagttgtttactttttgcctcatttgctttatcgttctttctttacacacatatatatgagcatgttgtttatttttggtaccattttagactaaattggagatagtatgt

SEQ ID NO: 37673 - DNA, 550 bp, Homo sapiens
tttggtgggtgagtaagaagcctgcagtgaggaggcattttgtttgtttctctagggcaggtttgtattttgctggaggtcctgttgaatataacttgtggcagtagcatgattatctcactccttgcctcagagaaaaagtttcaacattttcccattaaatatgatgtctcctgtaggttttatatagatgcccttcatcagttttagtagtgtccctctacttctaggttgccaagcatttatgtcatgaatgaatgttgaatttcatcaaattatcctctgcatttygaaatgatcatatgatttttctcttcttttttgtctacaaggtgaattacactttttttggataatttttaattttggttatcatttaaaacatgtaaaaattgaagatttgtacaagaaactcttacaaccctttacccagatttaccagttgtttactttttgcctcatttgctttatcgttctttctttacacacatatatatgagcatgttgtttatttttggtaccattttagactaaattggagatagtatgt

SEQ ID NO: 37674 - DNA, 1192 bp, Homo sapiens
catttatttctcattttccatatctaatcacctgctaaatttattaattctcttaccactacatcttgaaaattatctgccattcccttctaaagtttcctcttcttaatatcctggttcaggttttcatagtctactttatttgttgcaatatctatccaactatccaactccaggtgtttggattctaatctttttaatccattcttcacactgccatccaagttttcttcataaaaacagaaaattccataatttttctttacaaaaaccatctgaggagcctcactatctacaaaatactgttcaaattctttagaatatcatgcaaatatctcaattacttgaatctaaattacctctcccttttcaacattttaacaaaatactttgcatttttatcacattatcacttgcatcaattatttctgaaattcatgagttaatcacaccagtcaactcactaccctgcaaatattccctaaactttacatcccctgtgcctcttttttatatgattctcttggacagcaatgycatcaaactcatttattatgaataaaataccagttataatttgtctttgattgacttcaattttggaaaagaaattatggattctagaactttttaaacaagagtttatattggcaatcctggggacttacgtttgtggcattgtccaataaaatttttgttttaataaaaatttgtatttaaaatatcagtaatgaaaagtgaacaaaataaaactacagagtttgatgaatttgggcttgtgactacatcatgaatacaggacctagataaagaaatgtaacattgtcagtaaccaaaatgccctgcccctcccaagactatatactcaaccaaagataaccaccagcttaacttccacaaccatatgtattaatacgtgtgatcttcttttactttagataatagaactattacaataacactcttttgtgactaccttggttcactcagcattttattttagaaactctctactgtggcatgtaattgtagcatgttaattgtctctgctgtatagtttattcattcattgaatggataaggtacagcataattacccattccgatgttgagaaatacttgtgtttttcacaatatttggctaatgtttatagttttgtaaatatcttataactgtatttggtgaacatag

SEQ ID NO: 37675 - DNA, 547 bp, Homo sapiens
tgaggcctgattctgcttgggagaackgcttgaactcaggagatggaggttgcagtgagctgagatcacaccatgcactccaacctgggtgacagagttaagactctgtctcaaattaaataaatagaaaccatttatctattgagaaaaatgtaaataattttgagttctttgagtagattttagcaaattatatgaataaaagttattttcttttcctttaggatgtttaaaagttaaaataaagctatgtcaaaactgtttaggaagtatgtagggccaaaggaccttcaccaaaaagccaaaaacaaataccgagcccagtggcctgagaatggacatagaggtagcaaggcagtcagatgatgcccaggacacagagaaggcatcttcagatgactccagcccgagctcaggaaagataaatcaggaattaaggctgcatatggatattcaggaggagtactggctaccctccttgctggctgtatcttagcagttttctcaggttggcaggagcttctggtagaactttagtgtgaagatg

SEQ ID NO: 37676 - DNA, 547 bp, Homo sapiens
tgaggcctgattctgcttgggagaacggcttgaactcaggagatggaggttgcagtgagctgagatcacaccatgcactccaacctgggtgacagagttaagactctgtctcaaattaaataaatagaaaccatttatctattgagaaaaatgtaaataattttgagttctttgagtagattttagcaaattatatgaataaaagttattttcttttcctttaggatgtttaaaagttaaaataaagctatgtcaaaactgtttaggaagtatgtagggccaaaggaccttcaccaaaaagccaaaaacaaataccsagcccagtggcctgagaatggacatagaggtagcaaggcagtcagatgatgcccaggacacagagaaggcatcttcagatgactccagcccgagctcaggaaagataaatcaggaattaaggctgcatatggatattcaggaggagtactggctaccctccttgctggctgtatcttagcagttttctcaggttggcaggagcttctggtagaactttagtgtgaagatg

SEQ ID NO: 37677 - DNA, 510 bp, Homo sapiens
gtaaagtctcttcttgtggctcccaggctagtgttcttttttctttcttttttttttttttgagatggagttttgctcttgtcacccagtggagtgcaatggtgcaatctcagctcactgcaacctctgcctcttgggttcaagcaatcctccagcctcagtctccctaatagctggaattacaygcacccaccaccacgcctggcaaatttttttatttttagtagagacggggtttcaccatgttggtcaggctggtctcgaactcctgacctcaggtgatcctgcctcggcctcccagagtgctgggattacagacatgagccactgcgcccagcccagggctagtattctacagaacaagcttgcaggggatgctagggcagacagagaatgatacacaccccttcacctcccttcattttaccacaatactggtagtgtggccaaaaggaatgatggggaacacataagcccagaacatggcagccaggtgacacaactatgggg

SEQ ID NO: 37678 - DNA, 1393 bp, Homo sapiens
taacaaatgtaccatactcctgtgagatgttatcaacaggaaaaattgaaggagaggtgcatggagctctgtactatccttgcaatttttctgtaaatctaaaactgttgtaaaaaataaagtcaggggaggagcaaaaagaaaaaacgtttattttttattgaaaagaaaaaccctcattctccacagccacatccatatttcagaattgttcttagaaacttccagaaacaattcatttactgtatataacattatggcctagattaaactgatcagtaattattaatgcttaacgttagtgcggaagctcaaaaattatatactagagtgtttgtgtaactctaaatcttaagatacatgtcagtgatacccgaagcttctttttttttttattttatagagaaaacataattgacaaaatggtcacatactttttaaactttgttttcgacatctttgggaattgtaaccattgaaccccatgttcctgattcaagctcctctgtgcatctcttaagagttgttgaattgaagtcataatgcctgggatggaagaaaaggcttccaaggggctgatctcacaaatcagcggataggctgaccagttactctgtttgttctcaggcatgtgaaagcgttctctggtcctaaacatcctgttctagttgtgccccatttgttgaggggttgagggtggcattgatgcagtctccatgctttaactaggctgctattacctattacctgcctgcctcagcttccaactaccacccaggttaagagggcatgtctgatgaagaaaccacctcccttagtcaagatgattcaacttcattctactctcatcccctttctccaggtggaaatctgagggtctgaggaggagacagagagagaaaggggacgcaaaaaggctcaattctcaggcttctgtcccaacaacatcagtattatcttcataaatttaaaaaatatatagctttatattatatataaagtcatatatataactatatataactataactatatatataactatatatataactatatatataactatatatataactatatatataactatatatatataaaacaatgtagaaagactggtcaacgtgagtttcattattatccagaaagccagcaggagttggatgagctcattcacagagaccactgggttttaggagcagggatttttatccctctggactgrgagagttgggaaaaatgaaaggatccaagctttaccaaattcagactcacattttagttcccagccaaaggtcatgttgaagcacagtgagaagcagtttccctgaggaagggggttggacttggaggttggttcccctatttagattcagacaatgggagggaa

SEQ ID NO: 37679 - DNA, 734 bp, Homo sapiens
tgcattatcaattctcttactaagtcagaattttgctttgacttacagaaagctcacatctgcttttagttgctttaattctgcttttgtctctgcccgaactaagtcttagagaacttcctactgcaattggaagagctaaactttaggacaagtttgtgtgtgtctgccttcttgctgttatagctgaaaaggtcttggttgccttactgaggtgtcagaaactgaagatccaattkctacttaatttccccagaatggtctgaccagaaatggttatggcctcaaagaaccacagaggggcggcaattatccattttggtgacacagaagctccaattctcttaatataaaggaggtggagtggaatgtgaggtgggttacaatggtatttagcacagtggaggctggctaattgctcaccaaacccattttctcttcttcatgggaacatatcaatccacatttcccagccatctttgtaggtaagtgtggccatataactgagttctagccaacaaaatctaaactgacttgatatggactattaccatgttgggcagataaaatcttcctaccttgaattctccatactctttccctattccccaggcttcagacaaataccaatggtgaccttaaaagccacaaattgaaaatggcaaactcaaaagattgaacaaacctgaattcgtgttcaccattttgggaggaatatggagccaatcgggaaa

SEQ ID NO: 37680 - DNA, 750 bp, Homo sapiens
tttccatggctagccccaggggagaatgaggggccagagataggagggctggagaaggtcaaagaaaaacgtatgcttcttaaaccttccttttgtggtattatttctgaacctcaacagctttaatttagatttttctaaggagtaataatgttgtgcagctttttatgtgtatattggacatcttctctcagttcttttcaacttatttgccttgaattgggttatcttttcattattacactgttgaaattctttctttatatatcctgaatgcatatactttaagtttgtggtttgcagattcattttcttaatggtgtgtttcaagagcagaaattatttgacaaaggcaattctttttttaggattaatatgtttgtcttatgcataagaaatactttaccatgattatgaagacagtctcttgttttcccctagcttttatgcttaggagtgagccatttcaaattaatttttattatagaataaagcaagggttgagattctttttggtttttatttttgaacataaatatccagttgttccaacaatattttttcaygcacatacagtgactacatatgtgtgggttgagggtttctgttctgttacattgatccatgtgtttatccttagaccaatagagcactatttgttttagtagcttcacaataagtctgtgaatcagaaggcagaaatcctctaattctgcctttgtgtttttaaatgtcaagattgattctttt

SEQ ID NO: 37681 - DNA, 778 bp, Homo sapiens
ctgcaccaacagcactgaattcaggtttcagtttacataccacttacagccatttggagattgtatttatttatttattatttatttatttatttgagacagagtctcattgtgtcgccaggctagagtgctgtggcatgatcttggctcactgcaacctccaactccctggttcaagggattctcctgcctccgccttccaagtagctgggattatagtcatgcgcyaccatgcctggctaatttttgtatttttagtagagataggatttcactatgttggccaggatggtctcgatctcctgacctcgtgatccgcctgcctcggcctccccaaagtgctgggattacaggtgtgagcaccatgcccggcccacttatttatttatttattttttttgggacagagtctcactctgttgccaggctggagtgcagtggcacgatctcggctcactgcaacctccgcctccaggttcaagcgattctcctgcctcagcctcccaagtagctgggatcacaggcgcccaccaacacacctgcctaatttctgtatttttagtagagacgggtttcaccatgttggccaggatggtctcgatctcttgacctcgtgatctgcctgcctcgggctccaaaactgctgggattacaggcgtgagccaccgcacccggcttttttttaatatttaatttttttgagacagtgtctcactctgttgcctaagcagctggagtgcagtggcaggatcacagctcactgcagcctcaacctccc

SEQ ID NO: 37682 - DNA, 920 bp, Homo sapiens
aactcaggtctgtgtgactcccccaactatgccaccctccctgccgaggtaaayagacatatggggagagtccacgtcaacagggcaatggctgatgaggcaccagagactcagatagggctgacagggaacagcctcctggaggaggaagagccgccctgccttctgcatctaaatgcatggtgcctcagaagcagaaagcagaagccagtactcagggcaagctccccagtgccactcagctagccaagtctgggctgcactgggctgagtggtggctgtccccttgccccattttctagggagctagtagtctcaccttgggcttgggatgcaccgtgaagctcagcagcccatggtacacctgaagggtcacggggtagccccaggcctccaggtcttgcttccgcagaagggtggccaggcaggaaaggacctggaagaaagtcagagtccctcagtgccaccagcctcggccaggagggaaaagagcccaggttctcactgactccagaaaatcgcatctgtctgaggtccccagggtgcctaaacccctctcagggaacatctaagcatcaccaaatcagacaggctctgggagtcgccagatgagaaactaaaccccagacactaacccatcggaggacagaggtggagccgctgctggcctgagctgacatgatatccatgaaggctttggaggtatcagagaacttcttaataagcacagggctgggaacactgtgggaaagaacagagatggtcaccccagagggtccctgaagagcagctggtgcagcccctcgtggtactaaggaggacagggcaaggggcgctggtggcacagtcactcagaaagtgagcaacaaagtcagaataggcacccaccttatcagccagctcagtgtgctttccacccg

SEQ ID NO: 37683 - DNA, 920 bp, Homo sapiens
aactcaggtctgtgtgactcccccaactatgccaccctccctgccgaggtaaatagacatayggggagagtccacgtcaacagggcaatggctgatgaggcaccagagactcagatagggctgacagggaacagcctcctggaggaggaagagccgccctgccttctgcatctaaatgcatggtgcctcagaagcagaaagcagaagccagtactcagggcaagctccccagtgccactcagctagccaagtctgggctgcactgggctgagtggtggctgtccccttgccccattttctagggagctagtagtctcaccttgggcttgggatgcaccgtgaagctcagcagcccatggtacacctgaagggtcacggggtagccccaggcctccaggtcttgcttccgcagaagggtggccaggcaggaaaggacctggaagaaagtcagagtccctcagtgccaccagcctcggccaggagggaaaagagcccaggttctcactgactccagaaaatcgcatctgtctgaggtccccagggtgcctaaacccctctcagggaacatctaagcatcaccaaatcagacaggctctgggagtcgccagatgagaaactaaaccccagacactaacccatcggaggacagaggtggagccgctgctggcctgagctgacatgatatccatgaaggctttggaggtatcagagaacttcttaataagcacagggctgggaacactgtgggaaagaacagagatggtcaccccagagggtccctgaagagcagctggtgcagcccctcgtggtactaaggaggacagggcaaggggcgctggtggcacagtcactcagaaagtgagcaacaaagtcagaataggcacccaccttatcagccagctcagtgtgctttccacccg

SEQ ID NO: 37684 - DNA, 1383 bp, Homo sapiens
gggaacatatattttggctgcatagcagtcaactgcttgagtccaccaacttctttaacttgtccctttgtaattcaaccccatgtttaaactgtaatccccagtattggaggtgcaggctggtgggagatgatgggatcgtcgggctggatttctcatgaatggcttagcatcatccccttggtgctgtccttgccacagtgagtgacttcccgcaagatctgactgtttaaaaggatggcatctctctctctctgtctcacacctgttcccaccatgtgagatgcctgcttccccttcaccttctaccacaattgtaagcttcatgaggactccccagaagcacacgctgtgttatgcttcctgtacagcctgtggaaccataggccaattaaacctcttttmtttataaattatccagtctcaggtatttctttatagcaatgcacaaaccagcctaatacagtaatgaatgtctatattacattgttttcaggtttcaggtttgcactattacaaagaatgatgaaagaactctatgagaggggaacaattagatcccattttacagatgaaggaatggaggcacagaaactttgaagtaatttggctaatctcacacatggttatgatagaaactgctatgaccccacttcctggatacaactgactgacctccaagagtggtcccctgagccaagatgttgttacggtagtaattcatttccttgcatcagttgactggtctttaagcaggcacatggtccatgctaagccaatcagtgtccttttcctagaattttacaactggacttgtgaaacgcttaacgattcaaactccggtctcctagcagacttttggagaaaaattcacctgttttcaaaaagaaggaagccaagacaggcagaaaaacaaacaaacaaacaaacagataaaccataagaatcttgtgggcaaacaaggcttggttccaggtgtccttgaggcccagctatcccccacatcttccagaagctacattgttttataagagtccatagtatatatttaataaattactgatatggtttggctctgtgtccccacccaaatctcatcttgaattgttatctccataatccccacgtatcaagggcaggaccaggtggaggtaattggatcatggggatggttctcctgataatgagtgagtctcacgagatctgacggttttataatcttctagcatttcccctgcttgcactcactcagtcctgccaccctgcaaaggtggtgcctgcttctcctttgccttctcccatgattgtaagtttcctgaggcctccccagcaatgcggaactgtgagtcaactaaaatgctttcctttataaatcacccagtc

SEQ ID NO: 37685 - DNA, 644 bp, Homo sapiens
ggttgccattgcctgctgttgctctacaaagggacgggacttgacacagagacagagaactcacggccagcaaggaccaaagtgccttcagcctttcctttctagaaagggtttgctgactcctgtctgcttagtgactattctatatgacgctggcgtcacccatgtcttgaccccagctcgggttccgggggctctggtttctccttcccgaggacgagtggggctgcggggttgcaccagggatcccctccccacctcgccctctgcagctttttggcccctccaccctcctgcggttcttttttcgccttctttgacccccctcctgcyctgcagggcaagcagcagccgcaggaagcggacctggcgaaaaagagcagcgaatcggaactgagcgtgggggcagtccggggagatcgcgccggtccttctagaaggcttccctcctctgaaacccgctgcagtccacagccccccaggtttggcccccgccccgcttaggctccatccccgaactcaccggcccgccccgtcccggaccagtcgaatagcaggtacggaagaatcgcgaggcgcggaaggatcgcggggctggcggccgctgccattgtagaccaggagcgcccgggacacaaggcgca

SEQ ID NO: 37686 - DNA, 1142 bp, Homo sapiens
caccattctcctgcctcagcctcccgagtagctgggactacaggtgtccgccaccgcaccggctaatttttttgtatttttagtagaggtggggtttcaccgtgttagccaggatggtctcgatctcccgacctcgtgatccgcctgcctcggccttccaaattacaggcatgagccaccgcgccgggccatgaattcttaaataatgaaaagtgcctgcagacttctcctactcggtgaatgagaaaatgtccatgttggcaccccgtcaagaggataggttttcacagtacttaggggagacaacctccagaaataaaataaccttgtggcagtttactcacagtgacttcagtcctcagggaaaatatgggctcaacaaactgtacactaggactataataaatattggagatggataataattaaaatataatttcagttagttgaaatattattccatcaaaccatttttaactccaatacagatatactttttgaaaaaaaaaatggaaatacaggcaacttcatagaaaaaaggccctcataaatgttaaatttaaatttttttttttttttttttttagacagggtctctctctgtcacccaggcaatctcagctcactgcaaactctgcctcctgggctcatgcaatcctcttgcctcagcccccaacccccaacccccaccccctcgcggcagtagctgaaattacaggcatgtaccaccacacccagctaatttttgtatttttagtagagatagcatttcaccatgttggccaggctggtcttgaacttctggcctcaagcgatttgttcacctcggcctccctagaaaacatttaaattatctcttgatagctgtttgtgtgagaggtgtttatactgtcgtgtgctgttttttctgttaacataatttcaagaaaacaaatgaagatttttatgcaaataaccttttataatacaatraactgcccttatggaggttcagaaatgatgaaagtgtaggcaaatgaagcctcatagataacaaaagggttcccactaactcctgccctccatcttaacctcggcactgcgtgttcagaaaatcagaaggctggaaactcttaccagttctaactcagtggatggatgag

SEQ ID NO: 37687 - DNA, 593 bp, Homo sapiens
ccttcaaatggagctccaccaggctggatcctcagggtgccctctgtcttgttctccctcttctgtccccatcttcctgtataaagatcctgtggttacaatggacccctgggaaatccagagaattaccccatctccaggacagatgataagcaacctcagctccacctgcagccttcattcccctttccatgtaacccagtgcagaggttccagggactcggacctgcatcttgtcagggaggtgggggtgggggtgggatgattctgcccaggacccataccatatactttttatatttatcatttttmcagcacaaaatgcaggagggagcagagcaatactggagaagagatttttcatcctattaaaattaagcatgaggcacacatctttgctctcagtactttgggaggccaagtaagaaatattgcttgagcccaggaggtcaaggctacagtgagctatgatcataccactgcatgccagcctgggtcagcccaggaggtcaaggctacagtgaattatgatcattccactgcatgccagcctgggtcacagagtgagaccctgtttcaaaaataaaataaca

SEQ ID NO: 37688 - DNA, 593 bp, Homo sapiens
ccttcaaatggagctccaccaggctggatcctcagggtgccctctgtcttgttctccctcttctgtccccatcttcctgtataaagatcctgtggttacaatggacccctgggaaatccagagaattaccccatctccaggacagatgataagcaacctcagctccacctgcagccttcattcccctttccatgtaacccagtgcagaggttccagggactcggacctgcatcttgtcagggaggtgggggtgggggtgggatgattctgcccaggacccataccatatactttttatatttatcatttttacascacaaaatgcaggagggagcagagcaatactggagaagagatttttcatcctattaaaattaagcatgaggcacacatctttgctctcagtactttgggaggccaagtaagaaatattgcttgagcccaggaggtcaaggctacagtgagctatgatcataccactgcatgccagcctgggtcagcccaggaggtcaaggctacagtgaattatgatcattccactgcatgccagcctgggtcacagagtgagaccctgtttcaaaaataaaataaca

SEQ ID NO: 37689 - DNA, 593 bp, Homo sapiens
ccttcaaatggagctccaccaggctggatcctcagggtgccctctgtcttgttctccctcttctgtccccatcttcctgtataaagatcctgtggttacaatggacccctgggaaatccagagaattaccccatctccaggacagatgataagcaacctcagctccacctgcagccttcattcccctttccatgtaacccagtgcagaggttccagggactcggacctgcatcttgtcagggaggtgggggtgggggtgggatgattctgcccaggacccataccatatactttttatatttatcatttttacagcwcaaaatgcaggagggagcagagcaatactggagaagagatttttcatcctattaaaattaagcatgaggcacacatctttgctctcagtactttgggaggccaagtaagaaatattgcttgagcccaggaggtcaaggctacagtgagctatgatcataccactgcatgccagcctgggtcagcccaggaggtcaaggctacagtgaattatgatcattccactgcatgccagcctgggtcacagagtgagaccctgtttcaaaaataaaataaca

SEQ ID NO: 37690 - DNA, 593 bp, Homo sapiens
ccttcaaatggagctccaccaggctggatcctcagggtgccctctgtcttgttctccctcttctgtccccatcttcctgtataaagatcctgtggttacaatggacccctgggaaatccagagaattaccccatctccaggacagatgataagcaacctcagctccacctgcagccttcattcccctttccatgtaacccagtgcagaggttccagggactcggacctgcatcttgtcagggaggtgggggtgggggtgggatgattctgcccaggacccataccatatactttttatatttatcatttttacagcayaaaatgcaggagggagcagagcaatactggagaagagatttttcatcctattaaaattaagcatgaggcacacatctttgctctcagtactttgggaggccaagtaagaaatattgcttgagcccaggaggtcaaggctacagtgagctatgatcataccactgcatgccagcctgggtcagcccaggaggtcaaggctacagtgaattatgatcattccactgcatgccagcctgggtcacagagtgagaccctgtttcaaaaataaaataaca

SEQ ID NO: 37691 - DNA, 593 bp, Homo sapiens
ccttcaaatggagctccaccaggctggatcctcagggtgccctctgtcttgttctccctcttctgtccccatcttcctgtataaagatcctgtggttacaatggacccctgggaaatccagagaattaccccatctccaggacagatgataagcaacctcagctccacctgcagccttcattcccctttccatgtaacccagtgcagaggttccagggactcggacctgcatcttgtcagggaggtgggggtgggggtgggatgattctgcccaggacccataccatatactttttatatttatcatttttacagcacaaaatgcaggagggagcagagcaatactggagaagagatttttcatcctattaaaattaagcatgaggcacacatctttgctctcagtactttgggaggccaagtaagaaatattgcttgagcccaggaggtcaaggctacagtgagctatgatcataccactgcaygccagcctgggtcagcccaggaggtcaaggctacagtgaattatgatcattccactgcatgccagcctgggtcacagagtgagaccctgtttcaaaaataaaataaca

SEQ ID NO: 37692 - DNA, 686 bp, Homo sapiens
aaaccttgggatggttggaaatgaaggatgggagggagaaccagagaaagggagaggaaggaagcagggagggccagagaacaaagagaaacctccgccaggaaaacgggaagaggatgacacaggaacagccctacactccaccaactctcagtctcctgctctctgccttgtaaggaacgcaggccccaccccctccagcctcacagtgtttggggtcacccattctagcggggtgaggcgtcgccttgtgggtgcggttggcatttccctgaggtctgtggacactgagcmccttttcctgggctcactgccatttgcattcttcttctgatgccagtgggcaaggggaggtccctaaacgccggttggaccgcgaccccagccggtgcggggctcttggcagcgcttggggaagtgaattcgaagaccagtaggaaaatagaggaaggacggagatttattgtaaaaggaaaagtacacactcaagtaaagggagtgcaggggaactcaagagagaggcaggtgcaagggggtttggtgctgccacctttcctggtttcttcaaccaaggggtggaatattcatgaaaattcctggaagaaggacagggattctcagaactctggtgcctcgaatttttacaccaaatatgggtattctcagaactgctagggagctggcta

SEQ ID NO: 37693 - DNA, 543 bp, Homo sapiens
cttgggaatgctccygccacaagacagaccccactgtgctgaggctaccttcttggtatctgcctgccctggccggcatgctgactgagcacacagactgcatcctgtttattactgagtcatcgcaccaggcaccagccttggaacagagtgatcactggatacattcatttgccgaatgaataaagaatcatgcaaacatatggaatgatgtggaaagctaggtcaatgggtcaaaacaagtaacatgagaactgtgaggatattacacagtctcatctttaagcaaacattaaacaccaaaaattaaaaatcccttatctgacggttgaccagtgcaaatgaaaatgactcaaaactacaagtcaggaatggacaaccaatgtactgaaagaaaaatcattttctttcgctagtctcccaaacattcattgatcccccaaaccaccttctctgggctcaggaagtggccatttattacattatcaccatcatcatcgccatcgtcctcattctcctccctctcggcatccggctgtcaaa

SEQ ID NO: 37694 - DNA, 1159 bp, Homo sapiens
tggcttgcttctggggtctctgaaatagaatgaattaatattttcatttagttttattcttgaaagggtgagtttctccacacacagcatggctttgtcttctggagagaggcaataaataaacaaacagtaaataatttaaatgattccgtagtgataagtgctgttgagaaaataaaagagatttatatcaggaggtgggttcaggaaaggtctctctaaaaaggtggcacttgaaatgaggcctaaatgacatgaaagaacctctgagaaggtttctgtggtgcagcaagtacaagattctgaagcacaacagattttgattgaaaaggggttgaagagaacttggtgaatagagagggggagagataggggatgaggtcagagtgatgtgtaaggaccaggacatcaggggccatgatggggtctttgggttttatttcaaatactctggggagccttcagaagctttaagcagggacatgatgtaatttgctgtacactttcaaagatcatactggtagtcatgtgaagaaaggatggtggggcagaatgaatggctgcagggaaatgaatttgccagccattcacggggttcagrtgtgggattacggcagcctggtctatcacttaggattaggattgtgatactaatggcggattacgtaataaactcaactatattggcttcatcaaaggggtttttcacacaagaagaagtctattgatggcagtccatggcagtccttggctgctcttttgtgcctttagagcccaggctctttctgttttcagcctctgtcattccaacatgttgctcttgttctcatggttgacagatggctgctgtacctccattgcatgtgcctttttaggccaagagggcaaaagggaaaaggcacttcccttttatcaggaaaatattgtactggttatggttatctgcagaaaactgaatttactccagcaatactactgcaatcctacttggcccctgtgatgttcaaggccagatgctaaagcttcatcaccgctgctcttggaagatccagatcaggctgagttctcagcacagctaattccctgttctcttcttcttgcctagtaatggaaccctgattgatacatggacccatgagctgtccacaagaaagactac

SEQ ID NO: 37695 - DNA, 1159 bp, Homo sapiens
tggcttgcttctggggtctctgaaatagaatgaattaatattttcatttagttttattcttgaaagggtgagtttctccacacacagcatggctttgtcttctggagagaggcaataaataaacaaacagtaaataatttaaatgattccgtagtgataagtgctgttgagaaaataaaagagatttatatcaggaggtgggttcaggaaaggtctctctaaaaaggtggcacttgaaatgaggcctaaatgacatgaaagaacctctgagaaggtttctgtggtgcagcaagtacaagattctgaagcacaacagattttgattgaaaaggggttgaagagaacttggtgaatagagagggggagagataggggatgaggtcagagtgatgtgtaaggaccaggacatcaggggccatgatggggtctttgggttttatttcaaatactctggggagccttcagaagctttaagcagggacatgatgtaatttgctgtacactttcaaagatcatactggtagtcatgtgaagaaaggatggtggggcagaatgaatggctgcagggaaatgaatttgccagccattcacggggttcaggtgtgggattacggcagcctggtctatcacttaggattaggattgtgatactaatggcggattaygtaataaactcaactatattggcttcatcaaaggggtttttcacacaagaagaagtctattgatggcagtccatggcagtccttggctgctcttttgtgcctttagagcccaggctctttctgttttcagcctctgtcattccaacatgttgctcttgttctcatggttgacagatggctgctgtacctccattgcatgtgcctttttaggccaagagggcaaaagggaaaaggcacttcccttttatcaggaaaatattgtactggttatggttatctgcagaaaactgaatttactccagcaatactactgcaatcctacttggcccctgtgatgttcaaggccagatgctaaagcttcatcaccgctgctcttggaagatccagatcaggctgagttctcagcacagctaattccctgttctcttcttcttgcctagtaatggaaccctgattgatacatggacccatgagctgtccacaagaaagactac

SEQ ID NO: 37696 - DNA, 198 bp, Homo sapiens
gaaagcgaggggaagtgttagagaaaattgcattgctcaggtcaagagaagtggagttggatgtttcaagtacaggtctctaagaacccaagaaargacccaagaaggaagcgcacattttagtcattgtccaggcttggagagcaacccctgctagcaatgcaccagttaagcatgaacttgctagtcctggactct

SEQ ID NO: 37697 - DNA, 1220 bp, Homo sapiens
aacagctcaagaggaccatttctcaagtattttgctattattactattattattaatgataaatttatagctcacttttgtagagctttttgtattttttcaaaacacgttgacatatataaggtgcttttaattctcacaatatgcctgggagttaggcaatgtggtagagcctgctggttatcctaaatgatctgttcccatctgatttcaacttaatagaatcattcactgagcacccggctcctcaggggacaattatttgcagactccttttgaccatgtgactgagttctgcccaagggacagtgataggtgcagcttccaggtcaggcacttgagaggccaccttttccctcttcctctcttttcctgtccactggatgaaattgggatattatgtgctctggaaatcaacaaaggtcacataacgtatytgcctaggaaaatctttactgttcttcctcactctttaaaactccttcccagatattgtgtgagagcagactgcaagcgcaatattccatttacaagaaagaatatggacacgttgaaaccagaaatatgtattttacctctccacttatgcctttattaaaaattgtatttctttcctctgtgccaagcactgagataagcactacaaattttgaaataaatatgataggtagtctgtgctcttaagagagccacaactgagtaaatgatccattctacctgtggttattgcagaatgaaaatatttgagtcaagtctctgaagggtaagtaagagtttaccccaagataaagaggggaaaaaggcatccttcaggttatcttcatactcagaatacatcaaaatagagcatataaaagtcacattctgcttatctgtttaaatatagatttcaagtataactttgcatttctggagaaaatgtggatctgagacaattcaataagctgtgtgtttttactcacctattattacttgtcctcccagtaagcatgtattctattctcctcctccacctaaaatttcctttatgcctcaaaaagacaacattcattgaaagaaagacaacttttgcacaaattaattataataaaattctagtttagagcaatgatatttttgagaatataagataattcagaaggcttctatgtgcaaaagccgtgattgctacatattcagctggcacagttaattgttcattcattttgcacctgagaagg

SEQ ID NO: 37698 - DNA, 1220 bp, Homo sapiens
aacagctcaagaggaccatttctcaagtattttgctattattactattattattaatgataaatttatagctcacttttgtagagctttttgtattttttcaaaacacgttgacatatataaggtgcttttaattctcacaatatgcctgggagttaggcaatgtggtagagcctgctggttatcctaaatgatctgttcccatctgatttcaacttaatagaatcattcactgagcacccggctcctcaggggacaattatttgcagactccttttgaccatgtgactgagttctgcccaagggacagtgataggtgcagcttccaggtcaggcacttgagaggccaccttttccctcttcctctcttttcctgtccactggatgaaattgggatattatgtgctctggaaatcaacaaaggtcacataacgtatctgcctaggaaaatctttactgttcttcctcactctttaaaactccttcccagatattgtgtgagagcagactgcaagcrcaatattccatttacaagaaagaatatggacacgttgaaaccagaaatatgtattttacctctccacttatgcctttattaaaaattgtatttctttcctctgtgccaagcactgagataagcactacaaattttgaaataaatatgataggtagtctgtgctcttaagagagccacaactgagtaaatgatccattctacctgtggttattgcagaatgaaaatatttgagtcaagtctctgaagggtaagtaagagtttaccccaagataaagaggggaaaaaggcatccttcaggttatcttcatactcagaatacatcaaaatagagcatataaaagtcacattctgcttatctgtttaaatatagatttcaagtataactttgcatttctggagaaaatgtggatctgagacaattcaataagctgtgtgtttttactcacctattattacttgtcctcccagtaagcatgtattctattctcctcctccacctaaaatttcctttatgcctcaaaaagacaacattcattgaaagaaagacaacttttgcacaaattaattataataaaattctagtttagagcaatgatatttttgagaatataagataattcagaaggcttctatgtgcaaaagccgtgattgctacatattcagctggcacagttaattgttcattcattttgcacctgagaagg

SEQ ID NO: 37699 - DNA, 590 bp, Homo sapiens
atttactcacttactataggttgaccatacctcaaaggctgtatggcaactgcatggaatcttgagcaagtttatggaaaattattgagcccactcttttcatgatcactgttcgctgtgtgtcccgagggcactaactcagagtgtcctttgaccccttcatcagtgtgtcacccggccaattcgctgagctcactttctcctctctctctctctccctctccctgtctttctctttcattcttttctacctggccctggtctatcccaacataaaggcaataattcattacctcattaayggatctgtcctttttctttttaaacagttccttatgttagccatgaaatctagctggggctgtgtggtttctgattccccctggcttattctttactttttcctacttttccaggctcagcagggagctgctggatgagaaagagcctgaagtcttgcaggactcactggatagatgttattcgactccttcaggttatcttgaactgcctgacttaggccagccctacagcagtgctgtttactcattggaggaacagtaccttggcttggctcttgacgtggacag

SEQ ID NO: 37700 - DNA, 590 bp, Homo sapiens
atttactcacttactataggttgaccatacctcaaaggctgtatggcaactgcatggaatcttgagcaagtttatggaaaattattgagcccactcttttcatgatcactgttcgctgtgtgtcccgagggcactaactcagagtgtcctttgaccccttcatcagtgtgtcacccggccaattcgctgagctcactttctcctctctctctctctccctctccctgtctttctctttcattcttttctacctggccctggtctatcccaacataaaggcaataattcattacctcattaacggatctgtcctttttctttttmaacagttccttatgttagccatgaaatctagctggggctgtgtggtttctgattccccctggcttattctttactttttcctacttttccaggctcagcagggagctgctggatgagaaagagcctgaagtcttgcaggactcactggatagatgttattcgactccttcaggttatcttgaactgcctgacttaggccagccctacagcagtgctgtttactcattggaggaacagtaccttggcttggctcttgacgtggacag

SEQ ID NO: 37701 - DNA, 784 bp, Homo sapiens
cctaaaactacacagatcaagaagaaactatgtgagatgttatttagagacatgaaagtgaacattccaaagaatccgtttcaagagtcgaaagtggccaccctggagatgggtcagggctgcagttgttcatgactaactttgtacatttctgagaaatctatgcttatgtgtaacttctcttaaaataaaaaatttaataaaatccaaagcaaaaacaaacagagcaattctggccccatttggggagggagtgggctgtgattacgagaatgagggcccagcgggtggggattcctctgtcaggcatgcaacgggaagctggtggggtcttggcaaggctttggtggagagacgtcattggaatggtgacctcatttggaaccggtgagggcaggagaaggtagaagggttaaaaagaagaagaamcaccaaaggagaagaaaaggaagcctggtcattctacagccaaggtcatactcccaggagacctacggccttttgtcggggttacacaaatgtaaaacaaaggtgtggtctctccactaaatggggaagtttccaccaggaggccagtgtgtcattgagtaatgtgaatagtggaacccatccccagctagtcaggcccacacattccataccaggacccacgggcctcgggggtagaggcaggaaggtagcatttgtctattgtgagaacaagcagcttatgtagacatcaaaggtctcaggatagcgtatattctttccgatctgtgaggcccaaacacacacacatggagga

SEQ ID NO: 37702 - DNA, 583 bp, Homo sapiens
cagagggaagagcaaatgcaaagggcctgagtggggaaggagcatgcctgatttgagggaaagaaaggcacattttaaagcagcaaggctcagtgaccttgcccaatgctgccatattgtggatgaagaggcaaaggcccgggagagaacctgattggtccattgtcaatagccagaccttccctctcgtcctggacagtactgttttcactctgcaagtctgcagatgcccctccggcttcaactcatccacctggtaagggcagcattgcagcatagggcacagtcacaagagcaaccccaccctcctctccctcatgatggaaagttgtggtggctgggcatggtggctcatgcctgtaatcccagctcttagggaggcagaggcgggaggatagcttgagcccaggagttcgagacctgcttgggcaatatagtgagaccttgttctccacaaaaaggaaaaaaaaaaagaaagaaagagtgtgatgtgaatgggtgagggcagscctcctgctgctgggggacctggaagccagcctccttatccatcaatatggcaccttgacaatcagcagcggaa

SEQ ID NO: 37703 - DNA, 1176 bp, Homo sapiens
tgctctagaaattgtcggtggtttacatgaagtggccatgggtgtccagagcaccctgaaactgtatcaaagttgtacatatttccaaacatttttaaaatgaaaaggcactctcatgttctcctcactctgtgcactttgcggttggtgtgacaaggcatttaaagatgtttctggcatttttttttttttaatttgtaaggtggtcttaactatatggtaattggctggaaacctaagttatcaactgtatatatctatagtttgtaaaaagaacaaaacgaccaagacaaactcttgaagctctttgcttggggttgaggctgtggggaagttgccttttggaagggccatagctcagggcatgcactgtgaggctggacctgttgcctctgcagagggcatacatttagcttcaggttgtcatgtttctgtacaacgcaacacagcattcagtggcgcgataatcagctcactgcaacctccacctcccaggttcaagtgattctcctgcctcagcttctggagtagctgggactactttttaaacaaactgtagaactattcattattagcaaagtgaagagccactgcatcaatgaaagttcaagaactttctgtacttaaacacggtttgaaaygttgagtgttttgttttttttttgtatgtttggaatgctaaaatgtttttgaagttaaagtcttacattttaaaaaaaagttaaacaaaattgacaaatctttaaccagactaagaaacaaagacagaagatacaaataaataaaatcagaaatgaaaaaggagacattacaactgatacttcagaaatttaaaggatcattagtggctactatgagcaagtatatgccaataaattggaaaatctagaataaatggacaaattcctagatacatgcaatctaccaagattaaattgggaagaaatccaaaacctgaacagaccaataacaagtaacgagtttgaagccataataaaaagtctcctgttaacccatttatgccagaggttgcaaattttttgtgtgtgaaaaatcagaccttgacaatgaccttgagcaatagggtataaataactcctacaaacatagcattccaataatggaacactaggcataaattggttgttgaagaaaagccggggacttgatgtcttc

SEQ ID NO: 37704 - DNA, 1176 bp, Homo sapiens
tgctctagaaattgtcggtggtttacatgaagtggccatgggtgtccagagcaccctgaaactgtatcaaagttgtacatatttccaaacatttttaaaatgaaaaggcactctcatgttctcctcactctgtgcactttgcggttggtgtgacaaggcatttaaagatgtttctggcatttttttttttttaatttgtaaggtggtcttaactatatggtaattggctggaaacctaagttatcaactgtatatatctatagtttgtaaaaagaacaaaacgaccaagacaaactcttgaagctctttgcttggggttgaggctgtggggaagttgccttttggaagggccatagctcagggcatgcactgtgaggctggacctgttgcctctgcagagggcatacatttagcttcaggttgtcatgtttctgtacaacgcaacacagcattcagtggcgcgataatcagctcactgcaacctccacctcccaggttcaagtgattctcctgcctcagcttctggagtagctgggactactttttaaacaaactgtagaactattcattattagcaaagtgaagagccactgcatcaatgaaagttcaagaactttctgtacttaaacacggtttgaaacgttgagtgttttkttttttttttgtatgtttggaatgctaaaatgtttttgaagttaaagtcttacattttaaaaaaaagttaaacaaaattgacaaatctttaaccagactaagaaacaaagacagaagatacaaataaataaaatcagaaatgaaaaaggagacattacaactgatacttcagaaatttaaaggatcattagtggctactatgagcaagtatatgccaataaattggaaaatctagaataaatggacaaattcctagatacatgcaatctaccaagattaaattgggaagaaatccaaaacctgaacagaccaataacaagtaacgagtttgaagccataataaaaagtctcctgttaacccatttatgccagaggttgcaaattttttgtgtgtgaaaaatcagaccttgacaatgaccttgagcaatagggtataaataactcctacaaacatagcattccaataatggaacactaggcataaattggttgttgaagaaaagccggggacttgatgtcttc

SEQ ID NO: 37705 - DNA, 1285 bp, Homo sapiens
aggggttatctggacagtaggattatgggccattttaattttcttcttgactcttttctgaactaaaaaagaaaaatatgattttaaaaaaaccttacgaagctaatgaaagctatggacctaatcccaataaaattttacagatatattaattcatataattaacaaccctttataggaaagattggagggaatgattatacttaaaagccaggctaaaacaagattttcatgactagaaggatacattcctctgatatctatattgaagctactgtcattaataattaaaaatggaaaacaaaaacctaggctaatgcggtttctggaaccaagcatttaattttactttgagccccgtgccttatacagagcttgaacagaggagatgctcaaaaaatccattggttagtggacattttgtgctcactggatcccgaagcaggtacccagtcaacacttgttaacagaaaccagtagtcaaatactattggtcccaaccactgtccctggaccccagctgggacccttatccaggtgagagtcggaggagtgtggtcagccttgggctgagttgtgagatmctctcccctgcaatggggtgagggtaaggagagcactgaccactgtcactaccgagtgtctgggagtggtggacacaagcagggtcttcctttcctgactgcccttttaatacagtatgcagaggatgtgtggactcagcctcattaaatatttactgcctgtccccagcctacctaccctcctccaaacacgtgcaggtgtacaggtgagcagaggccagggctgaaactctcgttctcacatctctctaggagccagaatccaaccccctaggattcctttcctcagacccaggatatgaaatcacacccagaacactgtgggcacaccatggcctcaaaggcaacacacgtccatgtgttggcaccatcttcctccaaaccagatgacttttccagcttccctctctgacatagccccacattcgccccatcactcaagctcaaggcctccatttcctccatctgtaccccactacccccagtcccgtctccagacaccagatgttaggagcacttccttcggcagcaacctccagccttccatcccctctattctccccagcagccctgctaccagccaatcagtgttcatgtctgggctattgcagtagactcctaacttgttttcctgatcccaggccgtccacctccaatccagcctgcaccagatgaattagagcagagcactcttttcctcc

SEQ ID NO: 37706 - DNA, 430 bp, Homo sapiens
aaaaaaaaaatagaaaaaatgaataagacctacaacttgatagcacaagagggtgacaatagtcaataacttcattgtacattttaaaatcacttaaagaatgtagctggattgtttgtaactcaaaggataaatgtttgaggggatagacacctccatgccccatggtgtgcttatttcacattacatgcctrtatcaaaacatctcatgtactccataaatgtataaagctattgtgtacccacaataaaattttaaacttttataaaaagaaaaatttttaaaaagaactattgtaatcctcagttaacagatggggggtcgggtgtggtggctcatcccgtaatcccagcactttgggaggctgaggtgggtggatcacctgaagtcaagagttcgagaccagcctggccaacatggtcaaacccc

SEQ ID NO: 37707 - DNA, 430 bp, Homo sapiens
aaaaaaaaaatagaaaaaatgaataagacctacaacttgatagcacaagagggtgacaatagtcaataacttcattgtacattttaaaatcacttaaagaatgtagctggattgtttgtaactcaaaggataaatgtttgaggggatagacacctccatgccccatggtgtgcttatttcacattacatgcctatatcaaaacatctcatgtactccataaatgtatamagctattgtgtacccacaataaaattttaaacttttataaaaagaaaaatttttaaaaagaactattgtaatcctcagttaacagatggggggtcgggtgtggtggctcatcccgtaatcccagcactttgggaggctgaggtgggtggatcacctgaagtcaagagttcgagaccagcctggccaacatggtcaaacccc

SEQ ID NO: 37708 - DNA, 614 bp, Homo sapiens
taaaatagcatgattcaacctttacattgagttttaagaaacttgtttatgtagttcccagcttacaagaacagaaaagagctggtaagcttttccaggataggttcttgcttgttgacaggtgatccactgcaggacctactgtggggacctgaaagaggctgctcaagtgggctgacatgtctcaagkccagtcacccctgagggtatcgctgttgccaccctgcagagattgcagtggtgacccagattcaccagagaaaaccgctaaattatctgcgtgcctcattccaaaagagaagtctgtttacatttaggtttgtggtctgaaatactgtagttaaaataatttggggagcttagagaagtaagtttttgtatcttgaaaaatggcaccttattccttaactcccctggataaatgaagtggcaaaatgaaagggtggttttcaaaaagacaatttggtaaggattgttgaaattgaatctcttctccgcctttaccgataacttcagtaagttttatgctactctttatttcagctgtaaatggggatgattcctgccttggagatgcttgtgaaacataatgagaaagcagatggcaggttccc

SEQ ID NO: 37709 - DNA, 614 bp, Homo sapiens
taaaatagcatgattcaacctttacattgagttttaagaaacttgtttatgtagttcccagcttacaagaacagaaaagagctggtaagcttttccaggataggttcttgcttgttgacaggtgatccactgcaggacctactgtggggacctgaaagaggctgctcaagtgggctgacatgtctcaaggccagtcacccctgagggtatcgctgttgccaccctgcagagattgcagtggtgacccagattcaccagagaaaacygctaaattatctgcgtgcctcattccaaaagagaagtctgtttacatttaggtttgtggtctgaaatactgtagttaaaataatttggggagcttagagaagtaagtttttgtatcttgaaaaatggcaccttattccttaactcccctggataaatgaagtggcaaaatgaaagggtggttttcaaaaagacaatttggtaaggattgttgaaattgaatctcttctccgcctttaccgataacttcagtaagttttatgctactctttatttcagctgtaaatggggatgattcctgccttggagatgcttgtgaaacataatgagaaagcagatggcaggttccc

SEQ ID NO: 37710 - DNA, 635 bp, Homo sapiens
gcatatggacagtaatcttacgtcttacaaaattccctccttccctcccatcatcctcccttaaccctcccctacccttcctccttttcctyccttccttccttccttcttccttccttccttccttctttcctatcattcatccaacaaacttttattgcatagctccttcctgtatgcccattattatactaggtgctgtggatattggaatgatttagagacattctctgtcctggggtgctgtctatccttgctgggtattgagaacatcccccaaatttaaaagcaggcttgttctgtatgtcagtcaacaataatcagctgcatgtaactttggtgccattgctgatgcactctttttatggcctgcatttggagttctttcccagctgtataaatggatttgagttgattcattcacgctctatcatccagcctcctgatgactaaggacaatcttttccccaatgactggccacagctggaggcacaatctatggttctggaaggttagaaacatcaactggaatgcacctttgggaacttggaattaattaggacaaagtctgaatagtgcagtaggattacaccccttactgagaatcatttcctctctctcctggaacttttcc

SEQ ID NO: 37711 - DNA, 1903 bp, Homo sapiens
  misc_feature (1)...(1903): n = A,T,C or G
caggaagaatcaggagaaattaaaggtgtatatttctttctgtacagtggaaaaagtaaggctgtgaaaggagaaatagaaatggacaacctggttgaagtagtgagaaatgaatttcagcagagtactctctgaatatatgtgggagccaaggatttgggaagcggttcccctaaaactgtctgtgtccttgtacctgttagaaggtctctgtttactccagttttcagacatctagcctaaccagctgaaaaatgtttgcttggggttggagtgagagcagagaagagctgaggaaaaaagtgactgtttttgtggcactctgggctgacttctttcaagttaatkattttacactattatggcatggagctgagtgaagaaggtgtttgtcatcctcaggggctatgatatttgacagtcatggattctatagatttaaatatacttgcatataaaatggtgaaataagcttacaccattggaaaatgcctaagggtacaaaagcaggcaaactggagagacagccaagtgactgccttttacatttttcaaccacaatgaaaaatcaactttcttcagagtaccaggttgaattccaccatttggaattatgctttttccttttgtaatggagcaatagtttcacctatcactaattccatctaggagattatcatacaagaataaagaggccacattgctctcttgctctttatgtatttttttcttttttttttttttgagacagagtcttgctatattgcttaggctggattgcaactcctgggctcaagggatcccaagtcactgggactatgggtgcatgccaccttgcctggcttacgtgtgagtcttattatattaatatttggtgtatgtaaaatgtatataaattaaatttgtagaatgattgagtcagagggggtgtttaattatattgcacataaagtagtgtggcatccatttttcaatctttggttcccaaggaactgccagtagcatctagcagaggccattggtagctgatgcacttacttgtgagcatataaaacttctcagaggagagccagaaattttaacatgttggggggaaggaagctaaggttctgctgaacgtgtagaaaagagcaagttcctgtgacatttgggttgatgatgacaccctatctgccactacattccaatgtatgtaggggacaggggccagtggaaactcaggttacataaaaaacccttagttcttggtgagcagcaactggtgaaaccccttcttttttccctactagttgcctcttgagttaccatccccagtgccttcccactttcagaaaaggctagggctggaaattactcatttgcaataattctggttgaagtgagcctttctctccttttttttcccccaaaacaagagtgaattttctgtctaaaccctctgatggacacatcgatacagatcaccagtcttcctgaaaatcatttgaaggagaattgggagggaggtccccacatgacgtcaggagaatggtgaatgcaggctgcctggtgcctggcctccctcctgggacagaagtggcactccctcccacatgtttccccagcttcaccctgccctccaaacccaaggctggcaggtcacctagttaatgtttacaacaaaaacctgttgaacagtaggaaattcccacctccccccaaatacaaaagcctttcatgctgaaacccccctcctgaatttctcttgggcagagaacactagatgtattacctcaaataatcgctgctgagatggaagttcannnnnnnnnnnnnnnnnnnnnnnnnnnnnnnnnnnnnnnnnnnnnnnnnnnnnnnnnnnnnnnnnnnnnnnnnnnnnnnnnnnnnnnnnnnnnnnnnnnna

SEQ ID NO: 37712 - DNA, 1903 bp, Homo sapiens
  misc_feature (1)...(1903): n = A,T,C or G
caggaagaatcaggagaaattaaaggtgtatatttctttctgtacagtggaaaaagtaaggctgtgaaaggagaaatagaaatggacaacctggttgaagtagtgagaaatgaatttcagcagagtactctctgaatatatgtgggagccaaggatttgggaagcggttcccctaaaactgtctgtgtccttgtacctgttagaaggtctctgtttactccagttttcagacatctagcctaaccagctgaaaaatgtttgcttggggttggagtgagagcagagaagagctgaggaaaaaagtgactgtttttgtggcactctgggctgacttctttcaagttaattattttacactattatggcatggagctgagtgaagaaggtgtttgtcatcctcaggggctatgatatttgacagtcatggattctatagatttaaatatacttgcatataaaatggtgaaataagcttacaccattggaaaatgcctaagggtacaaaagcaggcaaactggagagacagccaagtgactgccttttacatttttcaaccacaatgaaaaatcaactttcttcagagtaccaggttgaattccaccatttggaattatgctttttccttttgtaatggagcaatagtttcacctatcactaattccatctaggagattatcatacaagaataaagaggccacattgctctcttgctctttatgtatttttttcttttttttttttttgagacagagtcttgctatattgcttaggctggattgcaactcctgggctcaagggatcccaagtcrctgggactatgggtgcatgccaccttgcctggcttacgtgtgagtcttattatattaatatttggtgtatgtaaaatgtatataaattaaatttgtagaatgattgagtcagagggggtgtttaattatattgcacataaagtagtgtggcatccatttttcaatctttggttcccaaggaactgccagtagcatctagcagaggccattggtagctgatgcacttacttgtgagcatataaaacttctcagaggagagccagaaattttaacatgttggggggaaggaagctaaggttctgctgaacgtgtagaaaagagcaagttcctgtgacatttgggttgatgatgacaccctatctgccactacattccaatgtatgtaggggacaggggccagtggaaactcaggttacataaaaaacccttagttcttggtgagcagcaactggtgaaaccccttcttttttccctactagttgcctcttgagttaccatccccagtgccttcccactttcagaaaaggctagggctggaaattactcatttgcaataattctggttgaagtgagcctttctctccttttttttcccccaaaacaagagtgaattttctgtctaaaccctctgatggacacatcgatacagatcaccagtcttcctgaaaatcatttgaaggagaattgggagggaggtccccacatgacgtcaggagaatggtgaatgcaggctgcctggtgcctggcctccctcctgggacagaagtggcactccctcccacatgtttccccagcttcaccctgccctccaaacccaaggctggcaggtcacctagttaatgtttacaacaaaaacctgttgaacagtaggaaattcccacctccccccaaatacaaaagcctttcatgctgaaacccccctcctgaatttctcttgggcagagaacactagatgtattacctcaaataatcgctgctgagatggaagttcannnnnnnnnnnnnnnnnnnnnnnnnnnnnnnnnnnnnnnnnnnnnnnnnnnnnnnnnnnnnnnnnnnnnnnnnnnnnnnnnnnnnnnnnnnnnnnnnnnna

SEQ ID NO: 37713 - DNA, 1903 bp, Homo sapiens
  misc_feature (1)...(1903): n = A,T,C or G
caggaagaatcaggagaaattaaaggtgtatatttctttctgtacagtggaaaaagtaaggctgtgaaaggagaaatagaaatggacaacctggttgaagtagtgagaaatgaatttcagcagagtactctctgaatatatgtgggagccaaggatttgggaagcggttcccctaaaactgtctgtgtccttgtacctgttagaaggtctctgtttactccagttttcagacatctagcctaaccagctgaaaaatgtttgcttggggttggagtgagagcagagaagagctgaggaaaaaagtgactgtttttgtggcactctgggctgacttctttcaagttaattattttacactattatggcatggagctgagtgaagaaggtgtttgtcatcctcaggggctatgatatttgacagtcatggattctatagatttaaatatacttgcatataaaatggtgaaataagcttacaccattggaaaatgcctaagggtacaaaagcaggcaaactggagagacagccaagtgactgccttttacatttttcaaccacaatgaaaaatcaactttcttcagagtaccaggttgaattccaccatttggaattatgctttttccttttgtaatggagcaatagtttcacctatcactaattccatctaggagattatcatacaagaataaagaggccacattgctctcttgctctttatgtatttttttcttttttttttttttgagacagagtcttgctatattgcttaggctggattgcaactcctgggctcaagggatcccaagtcactgggactatgggtgcatgccaccttgcctggcttacgtgtgagtcttattatattaatatttggtgtatgtaaaatgtatataaattaaatttgtagaatgattgagtcagagggggtgtttaattatattgcacataaagtagtgtggcatccatttttcaatctttggttcccaaggaactgccagtagcatctagcagaggccattggtagctgatgcacttacttgtgagcatataaaacttctcagaggagagccagaaattttaacatgttggggggaaggaagctaaggttctgctgaacgtgtagaaaagagcaagttcctgtgacatttgggttgatgatgacaccctatctgccactacattccaatgtatgtaggggacaggggccagtggaaactcaggttacataaaaaacccttagttcttggtgagcagcaactggtgaaaccccttcytttttccctactagttgcctcttgagttaccatccccagtgccttcccactttcagaaaaggctagggctggaaattactcatttgcaataattctggttgaagtgagcctttctctccttttttttcccccaaaacaagagtgaattttctgtctaaaccctctgatggacacatcgatacagatcaccagtcttcctgaaaatcatttgaaggagaattgggagggaggtccccacatgacgtcaggagaatggtgaatgcaggctgcctggtgcctggcctccctcctgggacagaagtggcactccctcccacatgtttccccagcttcaccctgccctccaaacccaaggctggcaggtcacctagttaatgtttacaacaaaaacctgttgaacagtaggaaattcccacctccccccaaatacaaaagcctttcatgctgaaacccccctcctgaatttctcttgggcagagaacactagatgtattacctcaaataatcgctgctgagatggaagttcannnnnnnnnnnnnnnnnnnnnnnnnnnnnnnnnnnnnnnnnnnnnnnnnnnnnnnnnnnnnnnnnnnnnnnnnnnnnnnnnnnnnnnnnnnnnnnnnnnna

SEQ ID NO: 37714 - DNA, 1903 bp, Homo sapiens
  misc_feature (1)...(1903): n = A,T,C or G
caggaagaatcaggagaaattaaaggtgtatatttctttctgtacagtggaaaaagtaaggctgtgaaaggagaaatagaaatggacaacctggttgaagtagtgagaaatgaatttcagcagagtactctctgaatatatgtgggagccaaggatttgggaagcggttcccctaaaactgtctgtgtccttgtacctgttagaaggtctctgtttactccagttttcagacatctagcctaaccagctgaaaaatgtttgcttggggttggagtgagagcagagaagagctgaggaaaaaagtgactgtttttgtggcactctgggctgacttctttcaagttaattattttacactattatggcatggagctgagtgaagaaggtgtttgtcatcctcaggggctatgatatttgacagtcatggattctatagatttaaatatacttgcatataaaatggtgaaataagcttacaccattggaaaatgcctaagggtacaaaagcaggcaaactggagagacagccaagtgactgccttttacatttttcaaccacaatgaaaaatcaactttcttcagagtaccaggttgaattccaccatttggaattatgctttttccttttgtaatggagcaatagtttcacctatcactaattccatctaggagattatcatacaagaataaagaggccacattgctctcttgctctttatgtatttttttcttttttttttttttgagacagagtcttgctatattgcttaggctggattgcaactcctgggctcaagggatcccaagtcactgggactatgggtgcatgccaccttgcctggcttacgtgtgagtcttattatattaatatttggtgtatgtaaaatgtatataaattaaatttgtagaatgattgagtcagagggggtgtttaattatattgcacataaagtagtgtggcatccatttttcaatctttggttcccaaggaactgccagtagcatctagcagaggccattggtagctgatgcacttacttgtgagcatataaaacttctcagaggagagccagaaattttaacatgttggggggaaggaagctaaggttctgctgaacgtgtagaaaagagcaagttcctgtgacatttgggttgatgatgacaccctatctgccactacattccaatgtatgtaggggacaggggccagtggaaactcaggttacataaaaaacccttagttcttggtgagcagcaactggtgaaaccccttcttttttccctactagttgcctcttgagttaccatccccagtgccttcccactttcagaaaaggctagggctggaaattactcatttgcaataattctggttgaagtgagcctttctctccttttttttcccccaaaacaagagtgaattttctgtctaaaccctctgatggacacatcgatacagatcaccagtcttcctgaaaatcatttgaaggagaattgggagggwggtccccacatgacgtcaggagaatggtgaatgcaggctgcctggtgcctggcctccctcctgggacagaagtggcactccctcccacatgtttccccagcttcaccctgccctccaaacccaaggctggcaggtcacctagttaatgtttacaacaaaaacctgttgaacagtaggaaattcccacctccccccaaatacaaaagcctttcatgctgaaacccccctcctgaatttctcttgggcagagaacactagatgtattacctcaaataatcgctgctgagatggaagttcannnnnnnnnnnnnnnnnnnnnnnnnnnnnnnnnnnnnnnnnnnnnnnnnnnnnnnnnnnnnnnnnnnnnnnnnnnnnnnnnnnnnnnnnnnnnnnnnnnna

SEQ ID NO: 37715 - DNA, 1903 bp, Homo sapiens
  misc_feature (1)...(1903): n = A,T,C or G
caggaagaatcaggagaaattaaaggtgtatatttctttctgtacagtggaaaaagtaaggctgtgaaaggagaaatagaaatggacaacctggttgaagtagtgagaaatgaatttcagcagagtactctctgaatatatgtgggagccaaggatttgggaagcggttcccctaaaactgtctgtgtccttgtacctgttagaaggtctctgtttactccagttttcagacatctagcctaaccagctgaaaaatgtttgcttggggttggagtgagagcagagaagagctgaggaaaaaagtgactgtttttgtggcactctgggctgacttctttcaagttaattattttacactattatggcatggagctgagtgaagaaggtgtttgtcatcctcaggggctatgatatttgacagtcatggattctatagatttaaatatacttgcatataaaatggtgaaataagcttacaccattggaaaatgcctaagggtacaaaagcaggcaaactggagagacagccaagtgactgccttttacatttttcaaccacaatgaaaaatcaactttcttcagagtaccaggttgaattccaccatttggaattatgctttttccttttgtaatggagcaatagtttcacctatcactaattccatctaggagattatcatacaagaataaagaggccacattgctctcttgctctttatgtatttttttcttttttttttttttgagacagagtcttgctatattgcttaggctggattgcaactcctgggctcaagggatcccaagtcactgggactatgggtgcatgccaccttgcctggcttacgtgtgagtcttattatattaatatttggtgtatgtaaaatgtatataaattaaatttgtagaatgattgagtcagagggggtgtttaattatattgcacataaagtagtgtggcatccatttttcaatctttggttcccaaggaactgccagtagcatctagcagaggccattggtagctgatgcacttacttgtgagcatataaaacttctcagaggagagccagaaattttaacatgttggggggaaggaagctaaggttctgctgaacgtgtagaaaagagcaagttcctgtgacatttgggttgatgatgacaccctatctgccactacattccaatgtatgtaggggacaggggccagtggaaactcaggttacataaaaaacccttagttcttggtgagcagcaactggtgaaaccccttcttttttccctactagttgcctcttgagttaccatccccagtgccttcccactttcagaaaaggctagggctggaaattactcatttgcaataattctggttgaagtgagcctttctctccttttttttcccccaaaacaagagtgaattttctgtctaaaccctctgatggacacatcgatacagatcaccagtcttcctgaaaatcatttgaaggagaattgggagggaggtccccacatgacgtcaggagaatggtgaatgcaggctgcctggtgcctggcctccctcctgggacagaagtggcactccctcccacatgtttccccagcttcaccctgccctccaaacccaaggctggcaggtcacctagttaatgtttacaacaaaaacctgwtgaacagtaggaaattcccacctccccccaaatacaaaagcctttcatgctgaaacccccctcctgaatttctcttgggcagagaacactagatgtattacctcaaataatcgctgctgagatggaagttcannnnnnnnnnnnnnnnnnnnnnnnnnnnnnnnnnnnnnnnnnnnnnnnnnnnnnnnnnnnnnnnnnnnnnnnnnnnnnnnnnnnnnnnnnnnnnnnnnnna

SEQ ID NO: 37716 - DNA, 1903 bp, Homo sapiens
  misc_feature (1)...(1903): n = A,T,C or G
caggaagaatcaggagaaattaaaggtgtatatttctttctgtacagtggaaaaagtaaggctgtgaaaggagaaatagaaatggacaacctggttgaagtagtgagaaatgaatttcagcagagtactctctgaatatatgtgggagccaaggatttgggaagcggttcccctaaaactgtctgtgtccttgtacctgttagaaggtctctgtttactccagttttcagacatctagcctaaccagctgaaaaatgtttgcttggggttggagtgagagcagagaagagctgaggaaaaaagtgactgtttttgtggcactctgggctgacttctttcaagttaattattttacactattatggcatggagctgagtgaagaaggtgtttgtcatcctcaggggctatgatatttgacagtcatggattctatagatttaaatatacttgcatataaaatggtgaaataagcttacaccattggaaaatgcctaagggtacaaaagcaggcaaactggagagacagccaagtgactgccttttacatttttcaaccacaatgaaaaatcaactttcttcagagtaccaggttgaattccaccatttggaattatgctttttccttttgtaatggagcaatagtttcacctatcactaattccatctaggagattatcatacaagaataaagaggccacattgctctcttgctctttatgtatttttttcttttttttttttttgagacagagtcttgctatattgcttaggctggattgcaactcctgggctcaagggatcccaagtcactgggactatgggtgcatgccaccttgcctggcttacgtgtgagtcttattatattaatatttggtgtatgtaaaatgtatataaattaaatttgtagaatgattgagtcagagggggtgtttaattatattgcacataaagtagtgtggcatccatttttcaatctttggttcccaaggaactgccagtagcatctagcagaggccattggtagctgatgcacttacttgtgagcatataaaacttctcagaggagagccagaaattttaacatgttggggggaaggaagctaaggttctgctgaacgtgtagaaaagagcaagttcctgtgacatttgggttgatgatgacaccctatctgccactacattccaatgtatgtaggggacaggggccagtggaaactcaggttacataaaaaacccttagttcttggtgagcagcaactggtgaaaccccttcttttttccctactagttgcctcttgagttaccatccccagtgccttcccactttcagaaaaggctagggctggaaattactcatttgcaataattctggttgaagtgagcctttctctccttttttttcccccaaaacaagagtgaattttctgtctaaaccctctgatggacacatcgatacagatcaccagtcttcctgaaaatcatttgaaggagaattgggagggaggtccccacatgacgtcaggagaatggtgaatgcaggctgcctggtgcctggcctccctcctgggacagaagtggcactccctcccacatgtttccccagcttcaccctgccctccaaacccaaggctggcaggtcacctagttaatgtttacaacaaaaacctgttgaacagtaggaaattcccacctccccccaaatacaaaagcctttcatgctgaaacccccctcctgaatttctcttgggcagagaacactagatgtattacctcaaataatcgctgctgagatggmagttcannnnnnnnnnnnnnnnnnnnnnnnnnnnnnnnnnnnnnnnnnnnnnnnnnnnnnnnnnnnnnnnnnnnnnnnnnnnnnnnnnnnnnnnnnnnnnnnnnnna

SEQ ID NO: 37717 - DNA, 583 bp, Homo sapiens
  misc_feature (1)...(583): n = A,T,C or G
annnnnnnnnnnnnnnnnnnnnnnnnnnnnnnnnnnnnnnnnnnnnnnnnnnnnnnnnnnnnnnnnnnnnnnnnnnnnnnnnnnnnnnnnnnnnnnnnnnngtgtaagagtgtgttcacagtgggcagggctcttcctccgcatttgtctgcagagscagctgactcaggtttcaatccgagaccgttgaggtggagtgcatgctggactgggcattagagcgcctagaacactgaatgagaggacacctttgtgttcactgtcctcccgccactaactacccatgcccttgggtacctcacctctttgaggcttagtttcctgtcttataaaatgagttttgcaccaggtaatcttttgatcatctatgattttctggagatgaatatagtaaagaacaaatgggagtagtaaattagggatgattattttgttagtgattgtcttccaggtttatcaatcttgcttctctgagggcttgaaacagatcaccataagcaatggggaactgcatgttgtgagttcagagcttcaatgggtgggggcaagtatgcaactggagacagggaaagatttccaggag

SEQ ID NO: 37718 - DNA, 583 bp, Homo sapiens
  misc_feature (1)...(583): n = A,T,C or G
annnnnnnnnnnnnnnnnnnnnnnnnnnnnnnnnnnnnnnnnnnnnnnnnnnnnnnnnnnnnnnnnnnnnnnnnnnnnnnnnnnnnnnnnnnnnnnnnnnngtgtaagagtgtgttcacagtgggcagggctcttcctccgcatttgtctgcagagccagctgactcaggtttcaatccgagaccgttgaggtggagtgcatgctggactgggcattagagcgcctagaacactgaatgagaggacacctttgtgttcactgtcctcccgccactaactacccatgcccttgggtacmtcacctctttgaggcttagtttcctgtcttataaaatgagttttgcaccaggtaatcttttgatcatctatgattttctggagatgaatatagtaaagaacaaatgggagtagtaaattagggatgattattttgttagtgattgtcttccaggtttatcaatcttgcttctctgagggcttgaaacagatcaccataagcaatggggaactgcatgttgtgagttcagagcttcaatgggtgggggcaagtatgcaactggagacagggaaagatttccaggag

SEQ ID NO: 37719 - DNA, 530 bp, Homo sapiens
gagttaatcgctattttagcatctcaaggtgtttcttcaaacagccttgcagagtccatttgtgacagggttgtggtgtgaagtggaaaggacagcagagcagagtcaggggactgtgaccccggatgaactacttattatggtttcctgaacctcactcacagcacctgcctcagtacaatgcaagccctgagaaacgcttgcaatacacatggcttgaaagagattatgatycagtttggttcatagaaacctctcatttcagaagtaatatgaccagaggaaggaactaggagggtgagggctgattctgtgaaaaacctttgggggaaaggcctttcctcaccaggctggccagaggagccaggtctgggaggctggccacagcggggactgtgggacagcagtcagtgtgcctgaaaccttgggctgagcgaggacgcctcaagagggggagataggggtgttcaggaagagcccagatgggattcagaggctcttgcttccttggtgagggagtcatttgctgg

SEQ ID NO: 37720 - DNA, 559 bp, Homo sapiens
aggaggctgaggcaggagaatggcttgaacccaggaggcagagcttgcagtgagctgagatcacgccactgcactccagcctgggcgacagagcgagactccatcaaaaaaaataataataagtcaatgagtcactaggagycactaggaggcaaagggtcaaagggtcatggaaaaggaaagtgggggtgtccagcacccccggccctgcccttttcctcctcggccaaggaacccagtgagtcacaaaattccactggggcgggctctgtgccaagctgagtgatggtgggaggctctggctctgctcccatcccctgctctgagtccctgcctcttatgcacagacaggcaggcagacaaggacaggcagatggccacaactcccacacagatacacagacacctcttagacagggaggcacaggcaggacacacacacagacatacaagccaacaagtgcacaaatgcaggcaaacaacacacgctggcagacagacagatccataatggacacagagacaacatccagacagatacacacacacagatgcacag

SEQ ID NO: 37721 - DNA, 690 bp, Homo sapiens
aattgtgtgcaggtggatattgttcaccaaggagtaaagcagtttactcttgttatcttttcttctcttcatttccactgatattattccatctttcacacacaaaaactggtatttttaatttcaaagaaaattacatttcccattctttcttgcctactaattgcttatgataagccacattctactttgttttataattaaatcacatcttacttcagcatgtttttgtttttcctggaatttgggattgctatttttctaattgagatataaaatcaataccatatttatttctaaaatcttctaagttcttacaaaatgtaacctttctttgtactattatcctctactcttatgttgaaaaccttcttcttggaagcaattggctttgagctcaaatttggaaagattaagatgtaggcctcctgcatagcttttttttttttttaatgagacttttgggcagttctagaatttcttgtatccaacatctcttcctttcttggttttcacccttgttttgctggagtacaacttaaaacstttctcatacagtatgcttgcttggaagataaaatttatgaatctttaatctgaaatgactttatgtgtactaatccataacactttcagtttctaaaatatatcccttggtcctttaaaaatttatatccccatcttctagga

SEQ ID NO: 37722 - DNA, 690 bp, Homo sapiens
aattgtgtgcaggtggatattgttcaccaaggagtaaagcagtttactcttgttatcttttcttctcttcatttccactgatattattccatctttcacacacaaaaactggtatttttaatttcaaagaaaattacatttcccattctttcttgcctactaattgcttatgataagccacattctactttgttttataattaaatcacatcttacttcagcatgtttttgtttttcctggaatttgggattgctatttttctaattgagatataaaatcaataccatatttatttctaaaatcttctaagttcttacaaaatgtaacctttctttgtactattatcctctactcttatgttgaaaaccttcttcttggaagcaattggctttgagctcaaatttggaaagattaagatgtaggcctcctgcatagcttttttttttttttaatgagacttttgggcagttctagaatttcttgtatccaacatctcttcctttcttggttttcacccttgttttgctggagtacaacttaaaacctttctcatacagtatgcttgcttggaagataaaatttatgaatctttaatctgaaatractttatgtgtactaatccataacactttcagtttctaaaatatatcccttggtcctttaaaaatttatatccccatcttctagga

SEQ ID NO: 37723 - DNA, 1106 bp, Homo sapiens
gagacagggtttcactcttgttgcccagcctggacagtgcaatggtgcgatcttggctcactgcaacctctgcctcccgggttcaagccattctcctgcctcagcctcctgagtagctgggattacaggcacccaccacaggcccagctaatttttgtattttcagtagagatggagtttcacaatgttggccaggctggtcttaaactcctgacctcaggtgatctgcctgcctcagcctcccaaagtgctgggattataggcgtgagccaccgcacccggccaaatatgagtttcttataatcagacctgaaaatttatactttaagcacttgagcatttgtgttgtatttgatttgtaattcagttatgagtacattgkccaacataatttttttattcagaagctgacacttgtaaggtatttatgtttttgcatataataggtttcagagagaggttgctaaactgtgagagctgtcttaaggacagaaaagaccactgacatatgaatacctctcccagtattttggaaaactggttttgaggatttgttttaacatagtgaaactctaataaggaattttgtttttctgtacttattttaatcatgattttacaaataaattcttagtaatgtttgttataaaattatttttgctgattttaaaaatatgcacctaggaatttttgtaatatataatgagaaaataaataatggcaaacaagtgtatctggaatctcaccctaccagagtcatacttactcttgctctcatttattcattcagtaaacgtctactgagccccctgtgttagacaagaaagatattgtctctaccccttctcctgtatagatgtcattttactagaaagagtattaactcattttggtgattttctctcaaaaatgttctagcatgttaattattcataaactattgaagctccttatatcaagttccttttaaaagatacttaagtagaaagattgggcttgcctaaataacaaggaaagataagaaatactcctttgaaaaacaacttttaaactcagtttttaatgcttatattttttaggttcctacaaacttgatgacttttgag

SEQ ID NO: 37724 - DNA, 710 bp, Homo sapiens
cccaaggaggctccatggtccctcctggaaatggccccggcatccagaatctggagacccacacatatttttgaccatggggagcacccaagaagccagacagtggtaccatctgttttcctttttagattaaaataaagaatggaaagttgaaaattcatttgtcatccttgagcaggccatgcccctgcgcatcaaggtttgagactgagtggcggcgtcacctccacagcagcaccttagctgttagcacttcacagcttgaaagggtgttcactgacgtttcctcaggagacgcacagctaacgtatgaggcaggaatcgttatcgttcccatttcacagcaggataaattgaggctcagaaagatgagacgatttgcccaggttgcacagctaggacaaataatccaaatcgaagttttctggctccaaaaaactggctacatcaaagtgctgacagcattttttaaactatgaagtgctactcaaatggcaagcattaataattattattatttccacctcctgcagcttggcttaaagccccggtgcagcctgcacttcagacctgctgcactgcacacacacaccccctgccacccacccctccctcaggaagagtcaccatcagaagtgggcagagctatgagactctcatgcacscaagatccagcccccaacaaaatgtgactccccatctggtttcac

SEQ ID NO: 37725 - DNA, 639 bp, Homo sapiens
tttccattggttgtgcaatgggtctgaaatcttctgacatacctgaaaattaatcttgattcttcccagttgcgtcctgctcaagcccatcagctgctaagttatgtgtgttcttcctctgcaacgcctcttctcttcattaccattgatgaggatgagggcagatgggaagggaacatgctacttacaccatcccagaagactcatagcctaaaccaccagacatcccccattccatgtaactttttcctcaaaaatgtggacttagaaaaggcttgctttattcatagcctaagttataagccatttgtcctgatgtaattctcctgtgaattttactgctgcaaaataaaagtatgcccaatgatcttgctttaattgattagccaacaatcctttcttctttggtatggactctagatgaaagtctttgaaaagccaactcccttgaaattgttctggccaggtgcartgactcacacctatattcccagcactttgggaggaccaaaggagggaggattgattgaggccaggagttcgagaccagcctggacaaaatagtgagactctgtctcgaaagaaggaaggaaaggaaaggaaagggaaagggaaagggaaagaaaggaaggaagaaag

SEQ ID NO: 37726 - DNA, 639 bp, Homo sapiens
tttccattggttgtgcaatgggtctgaaatcttctgacatacctgaaaattaatcttgattcttcccagttgcgtcctgctcaagcccatcagctgctaagttatgtgtgttcttcctctgcaacgcctcttctcttcattaccattgatgaggatgagggcagatgggaagggaacatgctacttacaccatcccagaagactcatagcctaaaccaccagacatcccccattccatgtaactttttcctcaaaaatgtggacttagaaaaggcttgctttattcatagcctaagttataagccatttgtcctgatgtaattctcctgtgaattttactgctgcaaaataaaagtatgcccaatgatcttgctttaattgattagccaacaatcctttcttctttggtatggactctagatgaaagtctttgaaaagccaactcccttgaaattgttctggccaggtgcaatgactcacacctatattcccagcactttgggaggaccaaaggagggaggattgattgaggccaggagttcgagaccagcctggacaaaatagtgagactctgtctcraaagaaggaaggaaaggaaaggaaagggaaagggaaagggaaagaaaggaaggaagaaag

SEQ ID NO: 37727 - DNA, 1175 bp, Homo sapiens
gcatgtactttgagtcctagaactctctgaggacaatgggagatacaaaaatatttgaagactaatggtaggaatatttccaaattccttgatataaatctgctggctcaaaaagctaaggaaactacattaaaaaaaggaagaagacagtactacagataatcataatcaaatagctgaaaatcagtaataaagagaaaaacttaaacgcatccagagaaaagttaatatgggggaacaaaaaagaattaccacagatttctcttcagaaatcattcaagccagagacaatggagcaatatctttagtgctaaaagaaaaaaaagtaaaacctttaacctaacattttatatcaggcaaacatccttcaaaattaaagrcttattcagacaaaaaattccttagggatttcatcaccagcaggcctaaactacagggaatattaaaagaacattttcaggctaaagaaaaatgatagcagatggaaatctggatatataaaaagcaattaagagcattataaatagtaagtaaaaatctcaagattctttaaagacaacataatccaagctttcagcaatacagaactcataataatcagaaggcaattgataattagtgctagtcaacatataagggagcaggaaaatgtgacctattgccagaagaaaaaatcatcaatagaagctaatgagaatgtgagaccatggattatttttagttagtaaactttttttttttagaactgtttgaggttcacagtaaaatcaaatgaaaagtacagagagttctcacatacctcctgtcttgacacatgtacaagcttcgccctgaccattgacatgctccgtctgagtggtacatttgttacaagtgatgaacctacactgatacatcgttatcacccgaagttgatagtctatattagggttcactgttgttattgcacatttggtaggtttcaacaaatacataatgacatggatccaccattgtatcatacaggataatttcactgccccaaaaatcttctgtgctctgcccattcatgtctcccactctcattaacccctgaaaaatcacttatccttttccaatctccatagttttgtctttcccagaatgtcatatggttggaattatacagcatatagccttttcggattggcttcctt

SEQ ID NO: 37728 - DNA, 1175 bp, Homo sapiens
gcatgtactttgagtcctagaactctctgaggacaatgggagatacaaaaatatttgaagactaatggtaggaatatttccaaattccttgatataaatctgctggctcaaaaagctaaggaaactacattaaaaaaaggaagaagacagtactacagataatcataatcaaatagctgaaaatcagtaataaagagaaaaacttaaacgcatccagagaaaagttaatatgggggaacaaaaaagaattaccacagatttctcttcagaaatcattcaagccagagacaatggagcaatatctttagtgctaaaagaaaaaaaagtaaaacctttaacctaacattttatatcaggcaaacatccttcaaaattaaaggcttattcagacaaaaaattccttagggatttcatcascagcaggcctaaactacagggaatattaaaagaacattttcaggctaaagaaaaatgatagcagatggaaatctggatatataaaaagcaattaagagcattataaatagtaagtaaaaatctcaagattctttaaagacaacataatccaagctttcagcaatacagaactcataataatcagaaggcaattgataattagtgctagtcaacatataagggagcaggaaaatgtgacctattgccagaagaaaaaatcatcaatagaagctaatgagaatgtgagaccatggattatttttagttagtaaactttttttttttagaactgtttgaggttcacagtaaaatcaaatgaaaagtacagagagttctcacatacctcctgtcttgacacatgtacaagcttcgccctgaccattgacatgctccgtctgagtggtacatttgttacaagtgatgaacctacactgatacatcgttatcacccgaagttgatagtctatattagggttcactgttgttattgcacatttggtaggtttcaacaaatacataatgacatggatccaccattgtatcatacaggataatttcactgccccaaaaatcttctgtgctctgcccattcatgtctcccactctcattaacccctgaaaaatcacttatccttttccaatctccatagttttgtctttcccagaatgtcatatggttggaattatacagcatatagccttttcggattggcttcctt

SEQ ID NO: 37729 - DNA, 1175 bp, Homo sapiens
gcatgtactttgagtcctagaactctctgaggacaatgggagatacaaaaatatttgaagactaatggtaggaatatttccaaattccttgatataaatctgctggctcaaaaagctaaggaaactacattaaaaaaaggaagaagacagtactacagataatcataatcaaatagctgaaaatcagtaataaagagaaaaacttaaacgcatccagagaaaagttaatatgggggaacaaaaaagaattaccacagatttctcttcagaaatcattcaagccagagacaatggagcaatatctttagtgctaaaagaaaaaaaagtaaaacctttaacctaacattttatatcaggcaaacatccttcaaaattaaaggcttattcagacaaaaaattccttagggatttcatcaccagcaggcctaaactacagggaatattaaaagaacattttcaggctaaagaaaaatgatagcagatggaaatctggatatataaaaagcaattaagagcattataaatagtaagtaaaaawctcaagattctttaaagacaacataatccaagctttcagcaatacagaactcataataatcagaaggcaattgataattagtgctagtcaacatataagggagcaggaaaatgtgacctattgccagaagaaaaaatcatcaatagaagctaatgagaatgtgagaccatggattatttttagttagtaaactttttttttttagaactgtttgaggttcacagtaaaatcaaatgaaaagtacagagagttctcacatacctcctgtcttgacacatgtacaagcttcgccctgaccattgacatgctccgtctgagtggtacatttgttacaagtgatgaacctacactgatacatcgttatcacccgaagttgatagtctatattagggttcactgttgttattgcacatttggtaggtttcaacaaatacataatgacatggatccaccattgtatcatacaggataatttcactgccccaaaaatcttctgtgctctgcccattcatgtctcccactctcattaacccctgaaaaatcacttatccttttccaatctccatagttttgtctttcccagaatgtcatatggttggaattatacagcatatagccttttcggattggcttcctt

SEQ ID NO: 37730 - DNA, 1175 bp, Homo sapiens
gcatgtactttgagtcctagaactctctgaggacaatgggagatacaaaaatatttgaagactaatggtaggaatatttccaaattccttgatataaatctgctggctcaaaaagctaaggaaactacattaaaaaaaggaagaagacagtactacagataatcataatcaaatagctgaaaatcagtaataaagagaaaaacttaaacgcatccagagaaaagttaatatgggggaacaaaaaagaattaccacagatttctcttcagaaatcattcaagccagagacaatggagcaatatctttagtgctaaaagaaaaaaaagtaaaacctttaacctaacattttatatcaggcaaacatccttcaaaattaaaggcttattcagacaaaaaattccttagggatttcatcaccagcaggcctaaactacagggaatattaaaagaacattttcaggctaaagaaaaatgatagcagatggaaatctggatatataaaaagcaattaagagcattataaatagtaagtaaaaatctcaagattctttaaagacaacataatccaagctttcagcaatacagaactcataataatcagaaggcaattgataattagtgctagtcaacatataagggagcaggaaaatgtgacctattgccagaagaaaaaatcatcaatagaagctaatgagaatgtgagaccatggattatttttagttagtaaactttttttttttagaactgtttgaggttcacagtaaaatcaaatgaaaagtacagagagttctcayatacctcctgtcttgacacatgtacaagcttcgccctgaccattgacatgctccgtctgagtggtacatttgttacaagtgatgaacctacactgatacatcgttatcacccgaagttgatagtctatattagggttcactgttgttattgcacatttggtaggtttcaacaaatacataatgacatggatccaccattgtatcatacaggataatttcactgccccaaaaatcttctgtgctctgcccattcatgtctcccactctcattaacccctgaaaaatcacttatccttttccaatctccatagttttgtctttcccagaatgtcatatggttggaattatacagcatatagccttttcggattggcttcctt

SEQ ID NO: 37731 - DNA, 1175 bp, Homo sapiens
gcatgtactttgagtcctagaactctctgaggacaatgggagatacaaaaatatttgaagactaatggtaggaatatttccaaattccttgatataaatctgctggctcaaaaagctaaggaaactacattaaaaaaaggaagaagacagtactacagataatcataatcaaatagctgaaaatcagtaataaagagaaaaacttaaacgcatccagagaaaagttaatatgggggaacaaaaaagaattaccacagatttctcttcagaaatcattcaagccagagacaatggagcaatatctttagtgctaaaagaaaaaaaagtaaaacctttaacctaacattttatatcaggcaaacatccttcaaaattaaaggcttattcagacaaaaaattccttagggatttcatcaccagcaggcctaaactacagggaatattaaaagaacattttcaggctaaagaaaaatgatagcagatggaaatctggatatataaaaagcaattaagagcattataaatagtaagtaaaaatctcaagattctttaaagacaacataatccaagctttcagcaatacagaactcataataatcagaaggcaattgataattagtgctagtcaacatataagggagcaggaaaatgtgacctattgccagaagaaaaaatcatcaatagaagctaatgagaatgtgagaccatggattatttttagttagtaaactttttttttttagaactgtttgaggttcacagtaaaatcaaatgaaaagtacagagagttctcacatacctcctgtcttgacacatgtacaagcttcgccctgaccattgacatgctccgtctgagtggtacatttgttacaagtgatgaacctacactgatacatcgttatcacccgaagttgatagtctatattagggttcactgttgttattgcacatttggtaggtttcracaaatacataatgacatggatccaccattgtatcatacaggataatttcactgccccaaaaatcttctgtgctctgcccattcatgtctcccactctcattaacccctgaaaaatcacttatccttttccaatctccatagttttgtctttcccagaatgtcatatggttggaattatacagcatatagccttttcggattggcttcctt

SEQ ID NO: 37732 - DNA, 1175 bp, Homo sapiens
gcatgtactttgagtcctagaactctctgaggacaatgggagatacaaaaatatttgaagactaatggtaggaatatttccaaattccttgatataaatctgctggctcaaaaagctaaggaaactacattaaaaaaaggaagaagacagtactacagataatcataatcaaatagctgaaaatcagtaataaagagaaaaacttaaacgcatccagagaaaagttaatatgggggaacaaaaaagaattaccacagatttctcttcagaaatcattcaagccagagacaatggagcaatatctttagtgctaaaagaaaaaaaagtaaaacctttaacctaacattttatatcaggcaaacatccttcaaaattaaaggcttattcagacaaaaaattccttagggatttcatcaccagcaggcctaaactacagggaatattaaaagaacattttcaggctaaagaaaaatgatagcagatggaaatctggatatataaaaagcaattaagagcattataaatagtaagtaaaaatctcaagattctttaaagacaacataatccaagctttcagcaatacagaactcataataatcagaaggcaattgataattagtgctagtcaacatataagggagcaggaaaatgtgacctattgccagaagaaaaaatcatcaatagaagctaatgagaatgtgagaccatggattatttttagttagtaaactttttttttttagaactgtttgaggttcacagtaaaatcaaatgaaaagtacagagagttctcacatacctcctgtcttgacacatgtacaagcttcgccctgaccattgacatgctccgtctgagtggtacatttgttacaagtgatgaacctacactgatacatcgttatcacccgaagttgatagtctatattagggttcactgttgttattgcacatttggtaggtttcaacaaatacataatgacatggatccaccattgtatcatacagrataatttcactgccccaaaaatcttctgtgctctgcccattcatgtctcccactctcattaacccctgaaaaatcacttatccttttccaatctccatagttttgtctttcccagaatgtcatatggttggaattatacagcatatagccttttcggattggcttcctt

SEQ ID NO: 37733 - DNA, 555 bp, Homo sapiens
gaaggtctcctgagaggccctgyaaagccagagtccctcttagcagctcagatcagtgctatcaaagtatagctcggggattgctgccagcatacaaacttttactggtctgcagcgagataagtacagaaattgaaagtaagcatttagaaacttttataacaattttacaaggtcttgtcaaatgttattaaaacaaagctgaggctggaatttcacctttttcatttcgtttttttcaatttaaacaaattgtagtaaaatatagataatataaatgtaccattttagccatttttgagcgtacaatttagtagcagtaagtgctttcacaatattgtgtaaccactagtattatatagtatatatttttaaaattttacagaagtattaagttagcagcagattaaacatttttttcttaaattgagcttgagaagcgctggcctaaatggtaacctgtggggaagccttgatggtttggaggctcctaattgagtccattgcttggcttttttccccaaatcacggagtggagttaggtcccagagaatg

SEQ ID NO: 37734 - DNA, 555 bp, Homo sapiens
gaaggtctcctgagaggccctgtaaagccagagtccctcttagcagctcagatcagtgctatcaaagtatagctcggggattgctgccagcatacaaacttttactggtctgcagcgagataagtacagaaattgaaagtaagcatttagaaacttttataacaattttacaaggtcttgtcaaatgttattaaaacaaagctgaggctggaatttcacctttttcatttcgtttttttcaatttaaacaaattgtagtaaaatatagrtaatataaatgtaccattttagccatttttgagcgtacaatttagtagcagtaagtgctttcacaatattgtgtaaccactagtattatatagtatatatttttaaaattttacagaagtattaagttagcagcagattaaacatttttttcttaaattgagcttgagaagcgctggcctaaatggtaacctgtggggaagccttgatggtttggaggctcctaattgagtccattgcttggcttttttccccaaatcacggagtggagttaggtcccagagaatg

SEQ ID NO: 37735 - DNA, 666 bp, Homo sapiens
tgagctaaaacttatctgtttggatgaaaacttaagcagtgggcaagaaacattgattctccaggccaagaccacgtaagacagatattcttgatctgagtgagaagtttgtgggtttggagttattatttctctttcaaccatgtcctatttggaagaggataacaatgcccaacagatcttttgtttagggcttcttatatatagtaaaatactgtaatttaacagcttgctgggggaacaagaatttgttccagttcctgatttaaatgtttatgctaattgctatttattggcccagatgcaaatgataggttggccaaagtgaaattttatgacgagcaaactcccccsttttgtgcaaattgaaaaagtgaaacaagaggaggatgaaatgagccgaagatggtcttaatggctgctttttaatggggaagataaaattaagactgatttacgtggccaactcccctgttttctcttatcagctcatttggcaggaaaaatggaaaagtaattgttcctctttcaatgtgggcctcaaaccattatttattggctgaaattaatcgctgtttatccttcattcacgtggaaaccgctctatcagcattatgaaccccagcaactcaactagtcccttgcaattttgtcgacagcaagctt

SEQ ID NO: 37736 - DNA, 529 bp, Homo sapiens
gtttctaagagtaggtgaaattaggtgcctaacagagagcctggcatggtgttggccctcagtaaagactagttcccagggccaggcacagtggctcacgcttgtaatcccagcactttgggaggctgaagcaggaggatcacctgagttcaggagttcgagaccagcctggccaacatggagaaaccctgtctctactaaaaatacaaaaattagccaggtgtggtggtgcgcacctgtaattccagctacctgggaggctragacaggagaatcacttgaacccgggaggcagaggttgcagtgagccaagactgcaccactgcactctagcctgggcagcagagtgagactccatctcaaaaaaaaaaaaaaagaaaagaaaaaagaaaaaaaagactagttcccctttttatgtaggcaaactttaaaattagttctcaattttttagtacatggccgcttggaggtagagagacctagccaagtgatataacaataaaaagcctgcatggaaaaaacatttact

SEQ ID NO: 37737 - DNA, 529 bp, Homo sapiens
gtttctaagagtaggtgaaattaggtgcctaacagagagcctggcatggtgttggccctcagtaaagactagttcccagggccaggcacagtggctcacgcttgtaatcccagcactttgggaggctgaagcaggaggatcacctgagttcaggagttcgagaccagcctggccaacatggagaaaccctgtctctactaaaaatacaaaaattagccaggtgtggtggtgcgcacctgtaattccagctacctgggaggctaagacaggagaatcacttgaacccgggaggcagaggttgcagtgagccaagactgcaccactgcactcyagcctgggcagcagagtgagactccatctcaaaaaaaaaaaaaaagaaaagaaaaaagaaaaaaaagactagttcccctttttatgtaggcaaactttaaaattagttctcaattttttagtacatggccgcttggaggtagagagacctagccaagtgatataacaataaaaagcctgcatggaaaaaacatttact

SEQ ID NO: 37738 - DNA, 594 bp, Homo sapiens
tccccaagaaaaatgtatgctccaggaaagtggtgttttatttcattgttatattacagtggaatcactttataatgttttttgactggctatttgtgatataaagaaagacttggttttttataagtgtttcttaaattccaattctaatattcttaatagattttcagctgactctcttgaagtcttatagcattatatcactaacgaataatgacaattacttattttcattgcccatcgtgtgtattgtgtatctttctgkagtcttatttatcaccttggctagaaccttcagaaaaatgtccaatactaatggacagaatatgctatatcagtctatttaagctaacttatatgttagtaacaaacgactccaacatttctgtggcttgtaacagtagaggcttatttctcacttatagttcatgtacattatcagtcagacacagctctgttccatgttgcctttttttttaaacccaggctgttatagcctctaactaggacagtgtaatctcgtgggagagaggaagaaaaccatggttgaaatggttgaatcatgagctgcctctctttttttttttttttttt

SEQ ID NO: 37739 - DNA, 594 bp, Homo sapiens
tccccaagaaaaatgtatgctccaggaaagtggtgttttatttcattgttatattacagtggaatcactttataatgttttttgactggctatttgtgatataaagaaagacttggttttttataagtgtttcttaaattccaattctaatattcttaatagattttcagctgactctcttgaagtcttatagcattatatcactaacgaataatgacaattacttattttcattgcccatcgtgtgtattgtgtatctttctggagtcttatttatcaccttggctagaaccttcagaaaaatgtccaatactaatggacagaatatgctatatcagtctatttaagctaacttatatgttagtaacaaacgactccaacatttcwgtggcttgtaacagtagaggcttatttctcacttatagttcatgtacattatcagtcagacacagctctgttccatgttgcctttttttttaaacccaggctgttatagcctctaactaggacagtgtaatctcgtgggagagaggaagaaaaccatggttgaaatggttgaatcatgagctgcctctctttttttttttttttttt

SEQ ID NO: 37740 - DNA, 532 bp, Homo sapiens
aggtccacaggtcaggataagaggtaaagagggaaatctttctctcttcctaagcccaaaccctccatgacaattgagattaaaaaaaaaaaataaactgatgagagaatccaagcacagttgatcaaagaggaaagagaaatgatgatgtttccctctttctttttcatgagaaagtggctctcttattgatcggctacttgattagagaaacagtgggggaaagaactrccatatccacatgtgcaattttttaaaacacacagtgattctggacactagtataaattcccagtcagtgttctggccatctgactactcaggttataatacctaatttttacaagggagttgggaagtgtgccaaacctgtagaagtctatatctactgtattcagattttatatgcattattttatataaccttttgacctctctcctctatcatcacttgagtgatttcatccagcgtcatcatttaacatattttaaataactctatatactgataattcccaaatttatatctcca

SEQ ID NO: 37741 - DNA, 641 bp, Homo sapiens
ttaggcaactatttacatattctgtgagcattatacatgcaccagtctaataaaatgggcagtttaacttttgtacctagaagaaattttgacatacatgctttcattattttataatttattattttagatgtttttgaaatatgattttgacagttacgattattcaaaaatctggtctttaaaatttttgaagttagtcttttctaagcatacatattttgataataccaggagttttcaaaatgtgtrgtgcaagggttatataaggagatgggttggggtaggatggaagataagtgactcttccttttctgcctcaaccatagtgtcatcactttgcaatattttacatattgagattccttgtaaaactttgttttaagccttctgcagcccaaaaagagtaaattggaaaccattgatctttaaacaagagggcaatttgtttccatgccacaatagcatcattgaccgaaactgtaagagccaagtattcttggaacagatctagtataatgattaccactcacacaattcattgtcttataaaattaacagattgtcagaatagttgtggatatttaaaatagacaaaagttaatacctggcctttggagattgattttatgggtctagaa

SEQ ID NO: 37742 - DNA, 516 bp, Homo sapiens
catttaaaccactataatttctcctagttcagtctgattccttcttgcttttttgcatacagtgagtactatggtccaaatgtttgttctcccacaaaattcatgttgaaacctcgcccgtaagttgttggtattaagagttggggcctttggggggagattaggttagtgcccttatgaaagagactccaaagaggtagagccctcgacgattgaggatgcagcaggaaggygccatctgcgaggaagtggggcctcaccaggcactgaatctgccggcgccttggtcttagacttcctggcctccacaactgtgagaaagaaatgtctgttgtttatgagccacgcagtctataggattttgttatggcagctcagatggcctaacacagtgagcatgccccacccggagatggccttgcccctcttgctgtcagcatcaggactgacagaagctgggcccatgcagattttccggaagctgtgtcaggtattgggggtcattggactctaacc

SEQ ID NO: 37743 - DNA, 555 bp, Homo sapiens
aagctccagtcccctagatacagagtgtattgcggatatttatcccttcctggctgagcgcggggcagtttctgcctgcagatttgggctctggctctgggttatggacctttgaatgtggccatgccagagtttgtgaccttgacgtcttgaggcatcctgtaagtggtatgacctcaagggaagaaagctagcgtggcctgcatacaggtgggcctgtggactgtaaaagcaggtttacttagcgggagtarttacccatgttgatgacagcctctaacagaggtgcagtcttcaaattcacatttaaatgtctctgcctgctactgagaaatccacagcaagggaaaagagcaaaacagtctttctgtgaagggtctgttttattttttattttattttattttaattaatgagacggtgatcatccagggaacaggatctaaacgcagtctttgaacttgaactctgtatgtggtgtctacaggtttgggtgtgagcagcctcactctgtgctggttcccagcttaaacgtccaaggaagagctcatgaca

SEQ ID NO: 37744 - DNA, 1027 bp, Homo sapiens
ccacctgagtctggagccctgagcccaggcctcctgactccgacagcctgcagccctgcccgaactgggatgatagagcagcaaacatggctccatggagagcgaaacccaagctgggctgtttactgccagtctgctgggagctttgacccaccatcgtgcagggcgagtttccaagaaatggcgagagagcatccagatttctcacgttgcctctagagccctgttgtctgaccagtatcttctgtgaacatactttgggaaatgatctcatggacgcttggcctggatggtggtcacactggtaattcagttccacaagtattttatgagccccttgtgtgtgtgatgtgtgctgttcttcagggagccctgagcagagctgccagcatcctgcctgagaagcagtggcccgggatggtgggagatgtctgcaggcgcagggcggaggctgtgggccaagattgtggctctgagaaatggagatgggagaaggggaggcagtcactttggaagaatgggcgggatggtgatgatttgaatgagacttgggggagttggggcagcgtactccaggggataagatcagaggtgaagggggttgggctaaaatgttgatcatggtgggaayagtagtgatccccaaatcctacagagcctttgggaagcctggtctttgcatacgttccctctaaactcgtgccgacgttgtgatttggtctgatttatcctacagacaaagacagttgaagcaccaagagtgattttctcacagcaaagggacagagggtgggaggccgtgatttgcaccccctgcctttatctggcccctgccacatggtaagtggaaggcaggtggctccttccacagggctctctttgccctctcgggaagcctggtttttacccttgaggcagcagggaggctgcagggtgagatgttgaaggagtgtgatgtgggcagagcctctgtgatggggcatggtttctggcacatcccatttccatattctggggtgatcgaatg

SEQ ID NO: 37745 - DNA, 1231 bp, Homo sapiens
ttccaagcgaatgaatggacatttcctatatggatcatctacagatattggtaaggtttctttaagtctcttttgtactctgcattcgtggctaaacctatgcactttgaccctgttctgcaaaacaaaccatggcctactttcagactctccttcgttcttttgctgttggttacggtggcagagtgcctactgtgtacacagaatctagacatttcacattgaattatctgagtatttatgtgccctgacaattcagcgttaaagttcaatacaaatatataaattattaagcagttaaccagtgacacattcatcagctgaacgtcttttattgtggcctgtagacagattattttcattcagccattaaagcacaatattgtcgggtgaaattctgtttctggattttctttgtctctgttgctgctatggaatttcattgaaagcatcgaaatatgagactaacacagaatactgagtgtttcttttcagaaacgggaactttcagacattttctctccagctgaattcagtaaagagcagtgtgtgtgtgtgtgtgtgtgtgtgtgtgygtgtgtgtgtgtgttcctttcccagccagcagtgttatatctgaagggaagggtggggatgagctgtggtgccgcccttcacgccattgagacgggctgggaaggtgccctttcaccctctacctgcagttggtgcctagtgattttaaagattcaggaatgtctttcaccgtgattctcactattaaccaatctcacgtatctaactttccttactatattattagttactactttctatacaagagagaggtggagcctgcctgtgtcacgatggggaaggcccttgggattcgctctgtgggtgcgggcagcgacaggggtgggtcagggtgcaggcggtgagacggcgagcgaggaggtcgggaaggagcctccacaccccagcagggcccattccacacgagaccccagacgaggggagcagaagctgctggtgcctctctgttctttgccggatgctaccgttgtctgtggccacacttgcttcttcaggtgtggaaatagaagctcagagaagttaaacaatgcgccaaatgttacaccttcccattctaacgattttgtcaatttcggtgtcaaggtgatatcttgtctgatggtggaggtcatagttgtctgtgaggacatggtatccaccctcaagcatgtaatta

SEQ ID NO: 37746 - DNA, 1231 bp, Homo sapiens
ttccaagcgaatgaatggacatttcctatatggatcatctacagatattggtaaggtttctttaagtctcttttgtactctgcattcgtggctaaacctatgcactttgaccctgttctgcaaaacaaaccatggcctactttcagactctccttcgttcttttgctgttggttacggtggcagagtgcctactgtgtacacagaatctagacatttcacattgaattatctgagtatttatgtgccctgacaattcagcgttaaagttcaatacaaatatataaattattaagcagttaaccagtgacacattcatcagctgaacgtcttttattgtggcctgtagacagattattttcattcagccattaaagcacaatattgtcgggtgaaattctgtttctggattttctttgtctctgttgctgctatggaatttcattgaaagcatcgaaatatgagactaacacagaatactgagtgtttcttttcagaaacgggaactttcagacattttctctccagctgaattcagtaaagagcagtgtgtgtgtgtgtgtgtgtgtgtgtgtgtgtgtgtgtgtgtgttcctttcccagccagcagtgttatatctgaagggaagggtggggatgagctgtggtgccgcccttcacgccattgagacgggctgggaaggtgccctttcaccctctacctgcagttggtgcctagtgattttaaagattcaggaatgtctttcaccgtgattctcactattaaccaatctcacgtatctaactttccttactatattattagttactactttctatacaagagagaggtggagcctgcctgtgtcacgatggggaaggcccttgggattcgctctgtgggtgcgggcagcgacaggggtgggtcagggtgcaggyggtgagacggcgagcgaggaggtcgggaaggagcctccacaccccagcagggcccattccacacgagaccccagacgaggggagcagaagctgctggtgcctctctgttctttgccggatgctaccgttgtctgtggccacacttgcttcttcaggtgtggaaatagaagctcagagaagttaaacaatgcgccaaatgttacaccttcccattctaacgattttgtcaatttcggtgtcaaggtgatatcttgtctgatggtggaggtcatagttgtctgtgaggacatggtatccaccctcaagcatgtaatta

SEQ ID NO: 37747 - DNA, 616 bp, Homo sapiens
ggcaccaccatggtacaggcagttcattgttgaccaaaacatcattatgtggcacatgactgtattatcattaatttctacaagtcctatctttctagttctttagtatcttaatgaatctccaataaatgtcstaattaagattaatccctaagacaaagaaccaaggcacagacttgccaatgcttttgcttggccttggggcagggacaaggctaggagagtgccctgggttggcaccaagttgtctcgctgtccagcctcatgaaatgcgtccccttgtcaacagcctccctggaaagctccgctgcacagagtcagatccaccgggcacttatttagtggccagaaactccctctactgctttggggaagatggggctgcaggaagcagagcacccccagccccctcctcaccagggcctccccaacccaatccatacacagctggtggatgaagagttgtgaagacttaaggtgaggcagcatgtgagtatgcatgctcagcacaaagggctcaagggctggcacacagcaggtgcaccatccttgtgaacagggaggatacaaacttggtggcttactgcctcatggtgatcctgcccttcccacccct

SEQ ID NO: 37748 - DNA, 577 bp, Homo sapiens
gatttaatttttctttctttcttttttttttttttgttttttgtttgtttttttatttcttttgagatggagttttgctcttgttgcccaggctggagtgcagtggtgcgatctyggctcactgcaacctctgcctcccgggttcaagtgattctcctgcctcagcctcccaagtggctgggattataggcgcctgccacatgcccggctgactttttgtatttttagtagagacggggttttcaccatgttggccaggctggtcttgagctcctgatcgcaggtgatccacccgtctcggcctcccaaagtgctgggattacaggcatgagccaccaggcctggccagatttagttaatttggaaaaccccattaaatagctcagatcagattgcttacttggttgaaaaaaaggcaaaggtaatattttctgtcatgaacaaggtttgtggatattgctaattacttatttgaaagaaataataaaatgaaattcagtaaaatcaaataacttggcagttatttgaaggaagcggctcttttctgctgggctgcgactttgaggagcagttgcgt

SEQ ID NO: 37749 - DNA, 1197 bp, Homo sapiens
atggctccagcaccagaatgaaaaggaagagcagcagagacttggggcacccacctgggggctgtttcctagtgctgggcagaatcctggggtcagggttggagggccttaaggccagattggaggtgggagcatggcaaggttgccgtgccaggatgcacagtgtccatctggggtcctggagcggcctgggttcttcccgcagggtgctgtcctctgcctgacaagtcctgttccctgtctcctcgggagaacaccagtaccaggackccaggagttgccaggtgggggcatctaaggaaaggaaatgttcatgggatgcgccacagagatgatccctcggagaatattttccggtctttcatagaggctaaaatataacatagttgttagaaatatgtggttttgtaggaagttacataccttggggaaaacgctggaattgacacctgagaatgggtgaaatgttggaagatgttgaacaggtgagaggactgaatcggtgcagagccacacctggtggtgggagcacgttgagggcctgcgggtgcccttgaggaagggttttggtggatgacaaatatgataggaaccacgtgtcttggggaaaacactggaattgatgagtgagaatggatacattattggctctattggaaattatggctgacagatctgaagctctgtcatgcattgggggcttgctggttatttcagtttagtaatttcattgatctgtaacagatatgtgtcaaagagttttaggaagttgatagaagtgtacatattgatgaaaataaaaattcgtaagaaatagatgatgggttcaggtacagaataagggcaggaaaataaatgaaaccagtataccagatgcaggcatgtgcttcccatgatgggaaccccagataccagacgcagccagatgcagccacgtgcttcctgtgatgggaacccggtatactagacgcaggcacgtgcttcatgcagtaggaaccccatatatcggatgcagccacatgcttcctgtgatgggaaccccgtataccagacacaggcacattcttcctgtgatgggaacctggtataccagatgcagccacgtgctttccgtgatgagaaccctgtataccgtccgcagccagacacagacacgtgcttcctgtaatgggaacccgtataccagatgcagcctgg

SEQ ID NO: 37750 - DNA, 1197 bp, Homo sapiens
atggctccagcaccagaatgaaaaggaagagcagcagagacttggggcacccacctgggggctgtttcctagtgctgggcagaatcctggggtcagggttggagggccttaaggccagattggaggtgggagcatggcaaggttgccgtgccaggatgcacagtgtccatctggggtcctggagcggcctgggttcttcccgcagggtgctgtcctctgcctgacaagtcctgttccctgtctcctcgggagaacaccagtaccaggactccaggagttgccaggtgggggcatctaaggaaaggaaatgttcatgggatgcgccacagagatgatccctcggagaatattttccggtctttcatagaggctaaaatataacatagttgttagaaatatgtggttttgtaggaagttacataccttggggaaaacgctggaattgacacstgagaatgggtgaaatgttggaagatgttgaacaggtgagaggactgaatcggtgcagagccacacctggtggtgggagcacgttgagggcctgcgggtgcccttgaggaagggttttggtggatgacaaatatgataggaaccacgtgtcttggggaaaacactggaattgatgagtgagaatggatacattattggctctattggaaattatggctgacagatctgaagctctgtcatgcattgggggcttgctggttatttcagtttagtaatttcattgatctgtaacagatatgtgtcaaagagttttaggaagttgatagaagtgtacatattgatgaaaataaaaattcgtaagaaatagatgatgggttcaggtacagaataagggcaggaaaataaatgaaaccagtataccagatgcaggcatgtgcttcccatgatgggaaccccagataccagacgcagccagatgcagccacgtgcttcctgtgatgggaacccggtatactagacgcaggcacgtgcttcatgcagtaggaaccccatatatcggatgcagccacatgcttcctgtgatgggaaccccgtataccagacacaggcacattcttcctgtgatgggaacctggtataccagatgcagccacgtgctttccgtgatgagaaccctgtataccgtccgcagccagacacagacacgtgcttcctgtaatgggaacccgtataccagatgcagcctgg

SEQ ID NO: 37751 - DNA, 575 bp, Homo sapiens
cccctaaggacataccccccaaaattgaaagcagggtcttgagtagatatttgtacactggtgttcatagcagcatcattcacagtggccaaaaggagaacacacacaaacgtctmtctgtgagtgaacagatacattaaatgtggcctatccatgcaatggaacattattcagccttagaaagggtgggaattctggcacatgctgcaacatggacaaactttaaagacattacgctgagtgatataagccagtcacaaaaggacaagtactatatgggtccacagacatgaggcacccagaacaggcagattcagagatcaagtagaatagtgggtgctggggggtggggagagctattgttaaatggggacatagcttttgctgaggttaatgagaaaattttggctatagatagaggtgatggatacacaactttgtgaatgtatttaatgccactgaattacacacttacaaaatagttaacataaatattgcattttgccacaataaaaatatatttcctaacatttaaacaaaaggagtgtctgggacgttacctctgacacacctgg

SEQ ID NO: 37752 - DNA, 1071 bp, Homo sapiens
tttccatctgccaccacctgtgcaagcccctggggccatgtccaggcctcagcccctccccagccctccttcccacccgccagaactgggcaagagccaaatggcattcagtggatggccagcagctcccagccccaggccttttcctctaaacattcacagggcccaagaattcaactctgagtcacagctccttagaccccatatccatttgcaaagagtagtaacaggatatccccaactatggtcagagtattgcttatgtgcaggcagagagtatcctcttgagtaagtgatctcttccaagatatatcagttggtggcatctgcaacgtcaggcagcagagaagccaagtgacatgtttaactccaggaccccccaagtccaagtcccactttcacatctggtgcctttgccaaaatattcaacctcaaatatacctaagtcctctcacctgtaaactggtgatgcgtatgctgctctcaacctcaccagcttgagtaaggggtacgttagcgggatgatgcatgtgaaatttttaggaaactataaaatcattgcacaaatacttgttcgtattacagtggggtcccttgcacactcagaaccaaacatcagaagaaaggtttttccgaagggcatggaatgcatctgggaggagagcagacagacgtgctcacaccttcgcaggcgtgtggaggggagggcgggtgrccaggcacatctgtgtgcacatgtgccttcatccggtgcggaacatgttggatcttgagtcaatcactccaggagcattttctttgctccttgacctccacattctttctcctcacccctccctcccgcttccctcctgggtccctcctggctgtttacccttttcccggcttctctctcacaccccattcatcatccagggccagattctcactcagggagcacttttcatctcctgccctaggtcctccctccccggcctgccattcccaccctgctccccatcagcacattcttccccctgtctcaacctctcagaaaactgcgcccgtcactctccctcacagtgggctgag

SEQ ID NO: 37753 - DNA, 1071 bp, Homo sapiens
tttccatctgccaccacctgtgcaagcccctggggccatgtccaggcctcagcccctccccagccctccttcccacccgccagaactgggcaagagccaaatggcattcagtggatggccagcagctcccagccccaggccttttcctctaaacattcacagggcccaagaattcaactctgagtcacagctccttagaccccatatccatttgcaaagagtagtaacaggatatccccaactatggtcagagtattgcttatgtgcaggcagagagtatcctcttgagtaagtgatctcttccaagatatatcagttggtggcatctgcaacgtcaggcagcagagaagccaagtgacatgtttaactccaggaccccccaagtccaagtcccactttcacatctggtgcctttgccaaaatattcaacctcaaatatacctaagtcctctcacctgtaaactggtgatgcgtatgctgctctcaacctcaccagcttgagtaaggggtacgttagcgggatgatgcatgtgaaatttttaggaaactataaaatcattgcacaaatacttgttcgtattacagtggggtcccttgcacactcagaaccaaacatcagaagaaaggtttttccgaagggcatggaatgcatctgggaggagagcagacagacgtgctcacaccttcgcaggcgtgtggaggggagggcgggtgaccaggcacatctgtgtgcacatgtgccttcatccggtgcggaacatgttggatcttgagtcaatcactccaggagcattttctttgctccttgacctccacattctttctcctcacccctccctcccgcttccctcctgggtccctcctggctgtttacccttttcccggcttctctctcacaccccattcatcatccagggccagattctcactcagggagcacttttcatctcctgccctaggtcctccctccccggcctgccattcccaccctgctccccatcagcacattcttccccctgtctcaacctctcagaaaactgcrcccgtcactctccctcacagtgggctgag

SEQ ID NO: 37754 - DNA, 1034 bp, Homo sapiens
cataaatccatatagaagttagggaggggctgggcatggtggctcatgcctgtaatcccagcattttgggaggccgaggcaggcagagatcacttgaggtcaggagtccaagacaagcctggccaacatgttgaaaccctgtctctcccgaaaatacaaaaaatagctgggtgtgatggtgggtgcctgtaatcccagtgacatgagaggctgaagtagggggatcacttgagcacaagaggtagaggttgcagtgagccgaggttaccccactgcactccagcctgggtgacagagcgaggctctgtctcaaaaaaaaaaaagttagggaggcagtaaaaagtcctaatataaagatgctttgggattaagggaagggagagattaattccacctggaggggatcagcacccctggtggaagtatatgtgagttaggccggggctggaaggatggcatgagggccaccawggggcacttacctaggtctctaggtcattggcacaatcctctactccagggaagaacttggacaagactagtatgctttctcaagagcagcaaaagccaatcagaaagccaaaagcagagtataggggttcaggttcctgtctgtttgggaactgagggagatcctggtccactaaagcattccatgaaatgatgccaactcactcagtaattgtgacaactcaagatatgaaatgaaaacatgtacatcaaatgcctcaaacagtgcctggatgaaatgatgtggtagcaccttttttttttttttttaaccaacatcattttatactccttaatatttactttcaaatttgattcccagtgccagtccctgctcccagtcttggtatcaaatctaaatacagggactttaataagaagttgtatcaaggtgggagcagcattttatagaaatagggggactctcaggacaagtcaggaatgggaaatacttccacatggcttaaacagagagcaaaaaagtgaggataacgggaagcaacattgccaaaggatttggggat

SEQ ID NO: 37755 - DNA, 1034 bp, Homo sapiens
cataaatccatatagaagttagggaggggctgggcatggtggctcatgcctgtaatcccagcattttgggaggccgaggcaggcagagatcacttgaggtcaggagtccaagacaagcctggccaacatgttgaaaccctgtctctcccgaaaatacaaaaaatagctgggtgtgatggtgggtgcctgtaatcccagtgacatgagaggctgaagtagggggatcacttgagcacaagaggtagaggttgcagtgagccgaggttaccccactgcactccagcctgggtgacagagcgaggctctgtctcaaaaaaaaaaaagttagggaggcagtaaaaagtcctaatataaagatgctttgggattaagggaagggagagattaattccacctggaggggatcagcacccctggtggaagtatatgtgagttaggccggggctggaaggatggcatgagggccaccatggggcacttacctaggtctctaggtcattggcacaatcctctactccagggaagaacttggacaagactagtatgctttctcaagagcagcaaaagccaatcagaaagccaaaagcagagtataggggttcaggttcctstctgtttgggaactgagggagatcctggtccactaaagcattccatgaaatgatgccaactcactcagtaattgtgacaactcaagatatgaaatgaaaacatgtacatcaaatgcctcaaacagtgcctggatgaaatgatgtggtagcaccttttttttttttttttaaccaacatcattttatactccttaatatttactttcaaatttgattcccagtgccagtccctgctcccagtcttggtatcaaatctaaatacagggactttaataagaagttgtatcaaggtgggagcagcattttatagaaatagggggactctcaggacaagtcaggaatgggaaatacttccacatggcttaaacagagagcaaaaaagtgaggataacgggaagcaacattgccaaaggatttggggat

SEQ ID NO: 37756 - DNA, 1034 bp, Homo sapiens
cataaatccatatagaagttagggaggggctgggcatggtggctcatgcctgtaatcccagcattttgggaggccgaggcaggcagagatcacttgaggtcaggagtccaagacaagcctggccaacatgttgaaaccctgtctctcccgaaaatacaaaaaatagctgggtgtgatggtgggtgcctgtaatcccagtgacatgagaggctgaagtagggggatcacttgagcacaagaggtagaggttgcagtgagccgaggttaccccactgcactccagcctgggtgacagagcgaggctctgtctcaaaaaaaaaaaagttagggaggcagtaaaaagtcctaatataaagatgctttgggattaagggaagggagagattaattccacctggaggggatcagcacccctggtggaagtatatgtgagttaggccggggctggaaggatggcatgagggccaccatggggcacttacctaggtctctaggtcattggcacaatcctctactccagggaagaacttggacaagactagtatgctttctcaagagcagcaaaagccaatcagaaagccaaaagcagagtataggggttcaggttcctgtctgtttgggaactgagggagatcctggtccactaaagcattccatgaaatgatgccaactcactcagtaattgtgacaactcaagatatgaaatgaaaacatgtacatcaaatgcctcaaacagtgcctggatgaaatgaygtggtagcaccttttttttttttttttaaccaacatcattttatactccttaatatttactttcaaatttgattcccagtgccagtccctgctcccagtcttggtatcaaatctaaatacagggactttaataagaagttgtatcaaggtgggagcagcattttatagaaatagggggactctcaggacaagtcaggaatgggaaatacttccacatggcttaaacagagagcaaaaaagtgaggataacgggaagcaacattgccaaaggatttggggat

SEQ ID NO: 37757 - DNA, 1034 bp, Homo sapiens
cataaatccatatagaagttagggaggggctgggcatggtggctcatgcctgtaatcccagcattttgggaggccgaggcaggcagagatcacttgaggtcaggagtccaagacaagcctggccaacatgttgaaaccctgtctctcccgaaaatacaaaaaatagctgggtgtgatggtgggtgcctgtaatcccagtgacatgagaggctgaagtagggggatcacttgagcacaagaggtagaggttgcagtgagccgaggttaccccactgcactccagcctgggtgacagagcgaggctctgtctcaaaaaaaaaaaagttagggaggcagtaaaaagtcctaatataaagatgctttgggattaagggaagggagagattaattccacctggaggggatcagcacccctggtggaagtatatgtgagttaggccggggctggaaggatggcatgagggccaccatggggcacttacctaggtctctaggtcattggcacaatcctctactccagggaagaacttggacaagactagtatgctttctcaagagcagcaaaagccaatcagaaagccaaaagcagagtataggggttcaggttcctgtctgtttgggaactgagggagatcctggtccactaaagcattccatgaaatgatgccaactcactcagtaattgtgacaactcaagatatgaaatgaaaacatgtacatcaaatgcctcaaacagtgcctggatgaaatgatgtggtagcaccttttttttttttttttaaccaacatcattttatactccttaatatttactttcaaatttgattcccagtgccagtccctgctcccagtcttggtatcaaatctaaatacagggactttaataagaarttgtatcaaggtgggagcagcattttatagaaatagggggactctcaggacaagtcaggaatgggaaatacttccacatggcttaaacagagagcaaaaaagtgaggataacgggaagcaacattgccaaaggatttggggat

SEQ ID NO: 37758 - DNA, 512 bp, Homo sapiens
agcaatggaattttgtctcaatccttgcagaagacatgtgcaggtatataaagggcaagaaaaatctttctatattcttttttcttttaatgcagctgtgcctggaatctatatttattcttattagtcataccactggctttagtaatcaactgtagtacttccaaagtttcctagctctgacttgtctgctacagtctggagttccatattttcaactgtttgcagggtaattctgaatgtgtgtatgtggctgtcagsctctaaggtggcccccaattactcttgcctgctcatattcatgcccttgtttattcccctcccatagaaagcacaggtatcctctgtaaacactttggatactgtagaaatgacaatgtgtgacttttgaagctgagagacattgtggtttctactatgtcctctcctgaatcattagctttggaaggacaccgtgaagacactatggagaagtcctcatgacaaggaactggggccttcggtcaacaaac

SEQ ID NO: 37759 - DNA, 979 bp, Homo sapiens
caaaaaagagaaagcaggagtccaggttcactttataacaactcactctcttggtaactaacccactcctacaataacaacattaacccatgcgagctctaccttcatgatccaatcccctgtcattaggccccacctgccaacactgccacactgctactcagtttcagcatgaattttggaggtacaaacacccaaaccatagcaggagctgtggtatgtaattatttcatatacttctggatcctatttgcaaatattttatttagaatttttgcatttatattaatctgaaatgtttgatttagaatttgtatttataagtgaaattcatgtatagtattagtctgtctttatctgatttgtgtattatggcatagaattgaaaatgagctgagaaactctttatccttctcagtggcctagaatagcacagcagtgatctgttttcctcagtcattgactgaggcttggtctttgcttctgcagaatgagaaccacagatcttttctgctttcagaactgctaagaagatgaaatgcacatgaaaatatttttcaaattctgacatgctatacaaattgttgttaaaataattattacttgcattctacattcaaagtttgaactgtttttatgtttaaggctgtattgcatccaaatactctatttttcctttattctttcattttctatgtactttgcaaattctggaaattgacttggaaattcagtataattaagagctyagctttgcgaggccaaggcaggcagatcacctgaggtcaggagttcgagaccagcctggccaacatggcgaaactctgtctctactaaaaatacaaaaattagccacgtgtggtggcaggtgcctgtaatcccagctactcgggaggctgaagcatgagaatcgcttgaactcgggaggcagaggttgcagtgagccgagactgcaacactgcacttcagcctgggtgac

SEQ ID NO: 37760 - DNA, 1108 bp, Homo sapiens
atgtaaaataaatataatagagatagttaactttaggctcacacgtctcccaagcaaaccacaagcttatgagtgcaggactcttacgtgtttccttccgcagagccctgcacactgtaggggctggggcgtgacttggcgagtacagcaagtctggctagagtttctcaagggtgtgcccatggggattagtggaaagagctctgtgcttgggttgggtggtttgcccactccaccttttattctccttgggtaagtggcttgggacctcatttgccctttccaatgggatagcaacatgtttctttttggaagctactgtgaaagatgatgatctgggagggacttgggacacaggcttatttgttacacagatgcyaccggccttgcatctctcttgtgagctcagaagttgcttgacatcactgcctttttcatcaggtggttcataggaagaggccaagagagagagaaggatgctgtatttatgggaaaaggctaccagaatttccatccgaggttggtggtccattcctctacctatgtggaaggcaggttctccttgacaatagccaggtctgcatgtgtcttccactcaatctacaacgtatccacggagagtgaccttgtactcagtactcagtactccagccccttggctggagttagctctgcccgctccacccctgtgccttttctggcccacttgaaatttgatgtcttgggttgtagcctatttttaaggttgagtctcactcttagactatgagctcttgaaaaataataactgtgtcttatttgtctttgctcttccacttacatataggaactactaatgacatttagcaaatgtctctttatcttttgatggagcagagagaggtctgaggatgaactgctttcatcttctcgctgtgtgatcttgcacgggtcctttcctatccctcctctgccactcttctaggaccgaaggggttcgagggtgacctttctggccacttgcaattgctaagagtgtattgatttgagaattaaaggaacgtggctcttgaaatgtgtgtgcggtagaggccatccaaaatagctaatgaagaaacatcctggggat

SEQ ID NO: 37761 - DNA, 1239 bp, Homo sapiens
tgcatatttaaatttaacagtgaatactttaacattttaatggtaaaggtattattgaaggtattcaacacagacacgccaatggtaacaatggcatggacggtattgccctgtctgagctgaggtggtggagagtacaccagcccacctcagagcttgatgataactctgtcaagtccctcctcctaccatggatctcacctcatcatcccctccttcaattgttttttgtccttggttccccatccagatcagcgacacctctgtccttcaggccccaaccaggaggctgagaggtgtctcctgctcttatttacctcactcctcaacagtggccagtcccttctccgatccctctcctctccagcccacagtgcagcccgccttcggattggtctcctttcctgaagtctgagacctttcctgactgcaaagctgatcatgatgcttcttacagaattctttggtattcccccttgattacaagatggggtccaaattccttcttctggcataaatgggctctgygacccatccctgagcacctccctaaactctcccttgcccctctccctcaccccagctaggcccagctgcaggaattcctcagcatcggacctactgcccctaggctgctctcactcctttaacctggatgaagtaaacagagtaatacaatgatcaatctgcattgagtaatctaagatgccactggaaatactagaataattccgaggaataactggggtctggagagggaaatgtgggattggcgggtaggtcaagcatggctgaaagtcttgaaaagactgagatggcccaggcacatttcatagaggaagggagcagagcagatggagttaaaggagtgagagcagcccatgggcagcaggaattcctccctccagggatcagctcaacttttccttcctctgggaagccctccctcttttcttctctttatctctcatcttgtatccttaaaaatctctcctgtgagtcaccaaagtaatcagcaaatgctcaccttcaccaatggcccataaaaattgattgcatttattgatttgaggtctgtgatctcagcctggcatgtacacaccctttgtccctttgtcggggatgggcaagtagggctggggacagggcctgtatcttattgcattttatattcataccttgtcgtatacttcatgcacataaagtcagaaggtaagtctattaaatgaatgtagattg

SEQ ID NO: 37762 - DNA, 1239 bp, Homo sapiens
tgcatatttaaatttaacagtgaatactttaacattttaatggtaaaggtattattgaaggtattcaacacagacacgccaatggtaacaatggcatggacggtattgccctgtctgagctgaggtggtggagagtacaccagcccacctcagagcttgatgataactctgtcaagtccctcctcctaccatggatctcacctcatcatcccctccttcaattgttttttgtccttggttccccatccagatcagcgacacctctgtccttcaggccccaaccaggaggctgagaggtgtctcctgctcttatttacctcactcctcaacagtggccagtcccttctccgatccctctcctctccagcccacagtgcagcccgccttcggattggtctcctttcctgaagtctgagacctttcctgactgcaaagctgatcatgatgcttcttacagaattctttggtattcccccttgattacaagatggggtccaaattccttcttctggcataaatgggctctgtgacccatccctgagcacctccctaaactctcccttgcccctctccctcaccccagctaggcccagctgcaggaattcctcagcatcggacctactgcccctaggctgctctcactcctttaacctggatgaagtaaacagagtaatacaatgatcaatctgcattgagtaatctaagatgccactggaaatactagaataattccgaggaataactggggtctggagagggaaatgtgggattggcgggtaggtcaagcatggctgaaagtcttgaaaagactgagatggcccaggcacatttcatagaggaagggagcagagcagatggagttaaaggagtgagagcagcccatgggcagcaggaattcctccctccagggatcagctcaacttttccttcctctgggaagccctccctcttttcttctctttatctctcatcttgtatccttaaaaatctctcctgtgagtcaccaaagtaatcagcaaatgctcaccttcaccaatggcccataamaattgattgcatttattgatttgaggtctgtgatctcagcctggcatgtacacaccctttgtccctttgtcggggatgggcaagtagggctggggacagggcctgtatcttattgcattttatattcataccttgtcgtatacttcatgcacataaagtcagaaggtaagtctattaaatgaatgtagattg

SEQ ID NO: 37763 - DNA, 822 bp, Homo sapiens
ctaaagcatcgcttttacctggggggactttaatgttctcagactgaatgacctgctgctttctgagcttcactaatacactccgttcatgtgttttttatagagagcctatcacattgtactgttaaatggatttttttctaggtctaaaataatggaacattttagaaagtctaaaaaagtgaaaagaaatgaatttaaatcacctactaacattgtacttccgaaattcagtgataacactacaatacttgcccacatggatttttcatagtatactttaaaaatgtgcctttcatttttatgacacatgaaatgttgtaatggcacaggccttgtctgtatagatgttcagtaaataaatactatgttagaggaatactatttaacataaatactatattagaggaatgagtgaaggtacacattagtttytgtcagtgatcttttccattcttttgctaagattttcagtatttcagctttagaaaaacaaacatagctacgatgtcagtcaggaatcatacattgatatgcttctcataaccggcgtgataagtattatctaaatagtgtgcttagctcactggacacattactttccttcttttatgtcaaagaaacttagtatgcagcccaagttgaagtccacttatcagcagcgctgctccgtcaccccatgaaatggttacacttattatgaaaacattgttcaactttatcacaagttaaaattcatgtacattccgcccagagggtgcaggcagaaaagcggacgatttcccctatcacaactctctcactatgtaggagcgtattttg

SEQ ID NO: 37764 - DNA, 697 bp, Homo sapiens
ttgcaattgcaaaaatgtggaaccagcccaaatgtccatcaatcaacaagtggatwaaaaaaatgtgatacacacgcacaccatggaatactactcagccattaaaaggaatgaaataatggcattcacagcaacctggatggaattggagagcattattctaagtgaagtaactcaggaatggaaaatgaaacatcatatgttctcactcacatgtggaaactaacctatgaggacacaaaggcataagaatgatacattggactttgggggctcaggaaagggtgggagctggcgagggataacagactacacattgggtacagtgtacactgctcgggtgatgggtgcaccaaaatcccagaaatcaccactaaagaatttatttatgtaaccaaataccacctgttaccccaaaacctattgaaataaaaaaaaatttaaaaagaaagaaagaaactcgtggctttgagagaaagtagttgaattataacacttcttgcagtatcagacagggttgtgtatttggtgaaaaataggcctacaaggcaacctctgctgccaaaagtggtgcttccagaagtctaaagtgtcaagattattggtttagtaaccaggacaatgaagctagtaacattggagaggaaagatgacaatccaaaggggacagaccagacagccactctcttggtcacac

SEQ ID NO: 37765 - DNA, 697 bp, Homo sapiens
ttgcaattgcaaaaatgtggaaccagcccaaatgtccatcaatcaacaagtggataaaaaaaatgtgatacacacgcacaccatggaatactactcagccattaaaaggaatgaaataatggcattcacagcaacctggatggaattggagagcattattctaagtgaagtaactcaggaatggaaaatgaaacatcatatgttctcactcacatgtggaaactaacctatgaggacacaaaggcataagaatgatacattggactttggggrctcaggaaagggtgggagctggcgagggataacagactacacattgggtacagtgtacactgctcgggtgatgggtgcaccaaaatcccagaaatcaccactaaagaatttatttatgtaaccaaataccacctgttaccccaaaacctattgaaataaaaaaaaatttaaaaagaaagaaagaaactcgtggctttgagagaaagtagttgaattataacacttcttgcagtatcagacagggttgtgtatttggtgaaaaataggcctacaaggcaacctctgctgccaaaagtggtgcttccagaagtctaaagtgtcaagattattggtttagtaaccaggacaatgaagctagtaacattggagaggaaagatgacaatccaaaggggacagaccagacagccactctcttggtcacac

SEQ ID NO: 37766 - DNA, 697 bp, Homo sapiens
ttgcaattgcaaaaatgtggaaccagcccaaatgtccatcaatcaacaagtggataaaaaaaatgtgatacacacgcacaccatggaatactactcagccattaaaaggaatgaaataatggcattcacagcaacctggatggaattggagagcattattctaagtgaagtaactcaggaatggaaaatgaaacatcatatgttctcactcacatgtggaaactaacctatgaggacacaaaggcataagaatgatacattggactttgggggctcaggaaagggtggsagctggcgagggataacagactacacattgggtacagtgtacactgctcgggtgatgggtgcaccaaaatcccagaaatcaccactaaagaatttatttatgtaaccaaataccacctgttaccccaaaacctattgaaataaaaaaaaatttaaaaagaaagaaagaaactcgtggctttgagagaaagtagttgaattataacacttcttgcagtatcagacagggttgtgtatttggtgaaaaataggcctacaaggcaacctctgctgccaaaagtggtgcttccagaagtctaaagtgtcaagattattggtttagtaaccaggacaatgaagctagtaacattggagaggaaagatgacaatccaaaggggacagaccagacagccactctcttggtcacac

SEQ ID NO: 37767 - DNA, 697 bp, Homo sapiens
ttgcaattgcaaaaatgtggaaccagcccaaatgtccatcaatcaacaagtggataaaaaaaatgtgatacacacgcacaccatggaatactactcagccattaaaaggaatgaaataatggcattcacagcaacctggatggaattggagagcattattctaagtgaagtaactcaggaatggaaaatgaaacatcatatgttctcactcacatgtggaaactaacctatgaggacacaaaggcataagaatgatacattggactttgggggctcaggaaagggtgggagctggcgagggataacagactacacattgggtacagtgtacactgctcgggtgatgggtgcaccaaaatcccagaaatcaccactaaagaatttatttatgtaaccaaataccacctgttaccccaaaacctattgaaataaaaaaaaatttaaaaagaaagaaagaaactcgtggctttgagagaaagtagttgaattataacacttcttgcagtatcagacagggttgtgtatttggtgaaaaataggcctacaaggcaacctctgctgccaaaagtggtrcttccagaagtctaaagtgtcaagattattggtttagtaaccaggacaatgaagctagtaacattggagaggaaagatgacaatccaaaggggacagaccagacagccactctcttggtcacac

SEQ ID NO: 37768 - DNA, 631 bp, Homo sapiens
ttagtttttgggtaaaaatagctaactaactatatatgtataactatatatatagttayatatatatttagttagtttttgggtaaaaataaatatatgtaactaactatatataactatagtatatatatatatagttatatatattagttatagcaaaacatatatatatatatgttttgctattgttgtttaatttataacaagatttctcaatcttggcactatccacatgtccttggcagataattcttttctgtgagggcgtcttgtgcattgtaagatgctagcagcattgctcctttctatccattcaaccccagtggcacccccaatctagttttgacaaccaaaattatctctgggcattgccaaatatcccaggaggattgcaagagtgggataaattgcacgctgtttgagaatcagtgatttagagccactctctggcactttctagctctctacagagtattcaaacagagtaaagattctgtacaagtttctgtaactgatatttatgaattagtagaaatatacatcccagccagaagatagtgcactatagtaccaatgttttaagctgtttcacagaatatacatacatattaatgaatgggatatttactgt

SEQ ID NO: 37769 - DNA, 631 bp, Homo sapiens
ttagtttttgggtaaaaatagctaactaactatatatgtataactatatatatagttatatatatatttagttagtttttgggtaaaaataaatatatgtaactaactatatataactatagtatatatatatatagttatatatattagttatagcaaaacatatatatatatatgttttgctattgttgtttaatttataacaagatttctcaatcttggcactatccacatgtccttggcagataattcttttctgtgrgggcgtcttgtgcattgtaagatgctagcagcattgctcctttctatccattcaaccccagtggcacccccaatctagttttgacaaccaaaattatctctgggcattgccaaatatcccaggaggattgcaagagtgggataaattgcacgctgtttgagaatcagtgatttagagccactctctggcactttctagctctctacagagtattcaaacagagtaaagattctgtacaagtttctgtaactgatatttatgaattagtagaaatatacatcccagccagaagatagtgcactatagtaccaatgttttaagctgtttcacagaatatacatacatattaatgaatgggatatttactgt

SEQ ID NO: 37770 - DNA, 631 bp, Homo sapiens
ttagtttttgggtaaaaatagctaactaactatatatgtataactatatatatagttatatatatatttagttagtttttgggtaaaaataaatatatgtaactaactatatataactatagtatatatatatatagttatatatattagttatagcaaaacatatatatatatatgttttgctattgttgtttaatttataacaagatttctcaatcttggcactatccacatgtccttggcagataattcttttctgtgagggcgtcttgtgcattgtaagatgctagcagcattgctcctttctatccattcaaccccagtggcacccccaatctagttttgacaaccaaaattatctctgggcattgccaaatatcccaggaggattgcaagrgtgggataaattgcacgctgtttgagaatcagtgatttagagccactctctggcactttctagctctctacagagtattcaaacagagtaaagattctgtacaagtttctgtaactgatatttatgaattagtagaaatatacatcccagccagaagatagtgcactatagtaccaatgttttaagctgtttcacagaatatacatacatattaatgaatgggatatttactgt

SEQ ID NO: 37771 - DNA, 502 bp, Homo sapiens
ttttcagtagagacggggttttgccatgttggccaggctggtctcgaactcctggtctcaagtgatccccctggcttagcctcccaaagtgctgagattacagacaggtgtgagccaccacacctggccaaaataatgaagtgtttcataatgatgatttcttacgctagataaaatattctattactacctgtatcctagggttttgtgggtgttaactgagccaatatacctaaaatgcttagaactataagtggctaatattaatattaatcacttaataaatgtaatatgttagctgggcatggtggcatgtatgtagctccagctactctggaggctatggcaggaggatcacttgagcccaagagtcttaggccacagtgacctatgattgtgcttgtaaacaaccactgcactccagcctgggcatcatagtagaccctgtctctaaaatatatatrtgtgtgtgtgtgtgtgtgtgtgtgtgtgtgtgtgtgtg

SEQ ID NO: 37772 - DNA, 607 bp, Homo sapiens
taaatgtaagctgtttttatgaggacatttgaaacagcagggcattgcttcatcctagcattgggtgagaaagcattggacagttttcaacagtgactccatgtggccataatagaaatagcagtggcagaaaacacgtgttgtcagaaatgaccagatttatcagttctttctttggtgtttgttaacaggactgtccatttggatggccaaagcctgtgcccgagattcttttttttttttttttttttgagacagagtttcrctcttgtcgcccagcctggagtgcaacggcaaaatctcggctcaccgcaacttctgcctcccaggttcaagcgattctcctgcctcagcctcccgaatagctgggattacaggcatgtgccaccatacttggctaattttgtatttttagtagagatgaggtctctctatgttggtcaggctggttgccaacccccaacctcagatgatctgcccgccttggcctcctaaagtgctgggattacaggcgtgagccaccgtgtcaggccatgagattcttgaataatttgatacagacaaagttcaggaaagagataatgggccctgctaatctttttttttt

SEQ ID NO: 37773 - DNA, 549 bp, Homo sapiens
ggttcacgccatcctcctgcctcagcctccagagtagctgggactacaggtgcccgccaccacgcccggctaattttttatatttttagtagagatggggtttcaccatcttagccaggatggtctcgatctcctgacctcgtgatccgcctgtctcggcctcccaaagtgctgggattacaggcgtgagccaccgcgcccgacccagcttttctctttcttaatccattcagagaccacatcaaccagtggccagaatagcagaagtgttttgcatcttgggatgcttagatacctaaagaagattttcaytggccctgttcatcttttcatattatattcctgttggtcactgtccagcctaagaatgagtaggtcttagataacaagctgactcctggtccatttaattagccatctctggaaggaggttatagggtacagagcctcactgtgggcagtagggcctatgagcaggtagttaacctcacaaaagggtatgagtatggcagacattttgaagattgcctagttcagcacaaaggcata

SEQ ID NO: 37774 - DNA, 1407 bp, Homo sapiens
aacccaaatgttcatcaatgatagactggataaagaaaatgtgacacatatacaccatggaatactatgaagtcatataaaaaggatgaattaatgtcctttgtagggacatggatgaagctggaaaccatcattctcagcaaactaacacaggaacagaaaaccaaacaccccctgttctcactcacaaatgggagttgaacaatgagaacacatggacacagggaggggagcatcacacaccagtgcctgtcagggggtgggggggctaggggaggsatagcattaggagaaataactaatgtagatgacgggttgatgggtgcagcaaaccaccatgatacgcgtgtatctatgtaatgaacttgcacgttctgcacatgtatcccagaacttaaagtataataataataataaataataataataataaaacattgaggacaacgtgctgagaggaagatagttctctaaggtgggagttttggtctgtgatgacaaaacactgcattaaagtttctcgtgggtttattcaggacaaagacagtgttgataaggcccttatgtggctgcagagtagcttttaccaaaatgattctactattgtctctcaattgaaatgagtaagggaagaataataagaaaaacacatacaactgaattatttatttttggtaatgtgtgttttataccttctaggagtttttttcaagggtatggctaatcattgcaaaaggaatactttcctctgtcaatcaaccattcaagacgtacagacataaatgaaattataaaagtgttgcctgatttcattatttttaaaagaccccctcttttttgatatgagtatccatgagtgatcaagtaagattttttttaaaattgtttaacatttacctctgtcaaaatagattttaattaaatttaaattctgatttttttaaataatgagccaaataaatattgactcagaacagaagatatggttgttttaaagggcttgacctaaattaacatcaagctttttgaatttcttggtaattttactcaatatctaagtcaacgtatcaatctctacctgtgcctatatcacatatatcaaagttaccatttttacaaatggcactaatccagctgtcatgctgcttattgcatgagctctcatccatagagttcttcagcaagtctcagcaggatccactgatttctaacttttgccagatcccctgcagattaactggtgaactatgagaagtctgttttgaatcccgagtaatactgaaggtgattgaactctttatgaaaatagctacctgctttcttcggtttcagcaaggaacatgtagagtatagtatgatagtgaagagtgatttcctcatatatatatttgttgtcaaaattttctc

SEQ ID NO: 37775 - DNA, 1407 bp, Homo sapiens
aacccaaatgttcatcaatgatagactggataaagaaaatgtgacacatatacaccatggaatactatgaagtcatataaaaaggatgaattaatgtcctttgtagggacatggatgaagctggaaaccatcattctcagcaaactaacacaggaacagaaaaccaaacaccccctgttctcactcacaaatgggagttgaacaatgagaacacatggacacagggaggggagcatcacacaccagtgcctgtcagggggtgggggggctaggggaggcatagcattaggagaaataactaatgtagatgacgggttgatgggtgcagcaaaccaccatgatacgsgtgtatctatgtaatgaacttgcacgttctgcacatgtatcccagaacttaaagtataataataataataaataataataataataaaacattgaggacaacgtgctgagaggaagatagttctctaaggtgggagttttggtctgtgatgacaaaacactgcattaaagtttctcgtgggtttattcaggacaaagacagtgttgataaggcccttatgtggctgcagagtagcttttaccaaaatgattctactattgtctctcaattgaaatgagtaagggaagaataataagaaaaacacatacaactgaattatttatttttggtaatgtgtgttttataccttctaggagtttttttcaagggtatggctaatcattgcaaaaggaatactttcctctgtcaatcaaccattcaagacgtacagacataaatgaaattataaaagtgttgcctgatttcattatttttaaaagaccccctcttttttgatatgagtatccatgagtgatcaagtaagattttttttaaaattgtttaacatttacctctgtcaaaatagattttaattaaatttaaattctgatttttttaaataatgagccaaataaatattgactcagaacagaagatatggttgttttaaagggcttgacctaaattaacatcaagctttttgaatttcttggtaattttactcaatatctaagtcaacgtatcaatctctacctgtgcctatatcacatatatcaaagttaccatttttacaaatggcactaatccagctgtcatgctgcttattgcatgagctctcatccatagagttcttcagcaagtctcagcaggatccactgatttctaacttttgccagatcccctgcagattaactggtgaactatgagaagtctgttttgaatcccgagtaatactgaaggtgattgaactctttatgaaaatagctacctgctttcttcggtttcagcaaggaacatgtagagtatagtatgatagtgaagagtgatttcctcatatatatatttgttgtcaaaattttctc

SEQ ID NO: 37776 - DNA, 1407 bp, Homo sapiens
aacccaaatgttcatcaatgatagactggataaagaaaatgtgacacatatacaccatggaatactatgaagtcatataaaaaggatgaattaatgtcctttgtagggacatggatgaagctggaaaccatcattctcagcaaactaacacaggaacagaaaaccaaacaccccctgttctcactcacaaatgggagttgaacaatgagaacacatggacacagggaggggagcatcacacaccagtgcctgtcagggggtgggggggctaggggaggcatagcattaggagaaataactaatgtagatgacgggttgatgggtgcagcaaaccaccatgatacgcgtgtatctatgtaatgaacttgcacgttctgcacatgtatcccagaacttaaagtataataataataataaataataataataataaaacattgaggacaacgtgctgagaggaagatagttctctaaggtgggagttttggtctgtgatgacaaaacactgcattaaagtttctcgtgggtttattcaggacaaagacagtgttgataaggcccttatgtggctgcagagtagcttttaccaaaatgattctactattgtctctcaattgaaatgagtaagggaagaataayaagaaaaacacatacaactgaattatttatttttggtaatgtgtgttttataccttctaggagtttttttcaagggtatggctaatcattgcaaaaggaatactttcctctgtcaatcaaccattcaagacgtacagacataaatgaaattataaaagtgttgcctgatttcattatttttaaaagaccccctcttttttgatatgagtatccatgagtgatcaagtaagattttttttaaaattgtttaacatttacctctgtcaaaatagattttaattaaatttaaattctgatttttttaaataatgagccaaataaatattgactcagaacagaagatatggttgttttaaagggcttgacctaaattaacatcaagctttttgaatttcttggtaattttactcaatatctaagtcaacgtatcaatctctacctgtgcctatatcacatatatcaaagttaccatttttacaaatggcactaatccagctgtcatgctgcttattgcatgagctctcatccatagagttcttcagcaagtctcagcaggatccactgatttctaacttttgccagatcccctgcagattaactggtgaactatgagaagtctgttttgaatcccgagtaatactgaaggtgattgaactctttatgaaaatagctacctgctttcttcggtttcagcaaggaacatgtagagtatagtatgatagtgaagagtgatttcctcatatatatatttgttgtcaaaattttctc

SEQ ID NO: 37777 - DNA, 1407 bp, Homo sapiens
aacccaaatgttcatcaatgatagactggataaagaaaatgtgacacatatacaccatggaatactatgaagtcatataaaaaggatgaattaatgtcctttgtagggacatggatgaagctggaaaccatcattctcagcaaactaacacaggaacagaaaaccaaacaccccctgttctcactcacaaatgggagttgaacaatgagaacacatggacacagggaggggagcatcacacaccagtgcctgtcagggggtgggggggctaggggaggcatagcattaggagaaataactaatgtagatgacgggttgatgggtgcagcaaaccaccatgatacgcgtgtatctatgtaatgaacttgcacgttctgcacatgtatcccagaacttaaagtataataataataataaataataataataataaaacattgaggacaacgtgctgagaggaagatagttctctaaggtgggagttttggtctgtgatgacaaaacactgcattaaagtttctcgtgggtttattcaggacaaagacagtgttgataaggcccttatgtggctgcagagtagcttttaccaaaatgattctactattgtctctcaattgaaatgagtaagggaagaataataagaaaaacacatacaactgaattatttatttttggtaatgtgtgttttataccttctaggagtttttttcaagggtatggctaatcattgcaaaaggaatactttcctctgtcaatcaaccattcaagacgtacagacataaatgaaattataaaagtgttgcctgatttcattatttttaaaagaccccctcttttttgatatgagtatccatgagtgatcaagtaagattttttwtaaaattgtttaacatttacctctgtcaaaatagattttaattaaatttaaattctgatttttttaaataatgagccaaataaatattgactcagaacagaagatatggttgttttaaagggcttgacctaaattaacatcaagctttttgaatttcttggtaattttactcaatatctaagtcaacgtatcaatctctacctgtgcctatatcacatatatcaaagttaccatttttacaaatggcactaatccagctgtcatgctgcttattgcatgagctctcatccatagagttcttcagcaagtctcagcaggatccactgatttctaacttttgccagatcccctgcagattaactggtgaactatgagaagtctgttttgaatcccgagtaatactgaaggtgattgaactctttatgaaaatagctacctgctttcttcggtttcagcaaggaacatgtagagtatagtatgatagtgaagagtgatttcctcatatatatatttgttgtcaaaattttctc

SEQ ID NO: 37778 - DNA, 1407 bp, Homo sapiens
aacccaaatgttcatcaatgatagactggataaagaaaatgtgacacatatacaccatggaatactatgaagtcatataaaaaggatgaattaatgtcctttgtagggacatggatgaagctggaaaccatcattctcagcaaactaacacaggaacagaaaaccaaacaccccctgttctcactcacaaatgggagttgaacaatgagaacacatggacacagggaggggagcatcacacaccagtgcctgtcagggggtgggggggctaggggaggcatagcattaggagaaataactaatgtagatgacgggttgatgggtgcagcaaaccaccatgatacgcgtgtatctatgtaatgaacttgcacgttctgcacatgtatcccagaacttaaagtataataataataataaataataataataataaaacattgaggacaacgtgctgagaggaagatagttctctaaggtgggagttttggtctgtgatgacaaaacactgcattaaagtttctcgtgggtttattcaggacaaagacagtgttgataaggcccttatgtggctgcagagtagcttttaccaaaatgattctactattgtctctcaattgaaatgagtaagggaagaataataagaaaaacacatacaactgaattatttatttttggtaatgtgtgttttataccttctaggagtttttttcaagggtatggctaatcattgcaaaaggaatactttcctctgtcaatcaaccattcaagacgtacagacataaatgaaattataaaagtgttgcctgatttcattatttttaaaagaccccctcttttttgatatgagtatccatgagtgatcaagtaagatttttttwaaaattgtttaacatttacctctgtcaaaatagattttaattaaatttaaattctgatttttttaaataatgagccaaataaatattgactcagaacagaagatatggttgttttaaagggcttgacctaaattaacatcaagctttttgaatttcttggtaattttactcaatatctaagtcaacgtatcaatctctacctgtgcctatatcacatatatcaaagttaccatttttacaaatggcactaatccagctgtcatgctgcttattgcatgagctctcatccatagagttcttcagcaagtctcagcaggatccactgatttctaacttttgccagatcccctgcagattaactggtgaactatgagaagtctgttttgaatcccgagtaatactgaaggtgattgaactctttatgaaaatagctacctgctttcttcggtttcagcaaggaacatgtagagtatagtatgatagtgaagagtgatttcctcatatatatatttgttgtcaaaattttctc

SEQ ID NO: 37779 - DNA, 1117 bp, Homo sapiens
ttttttttttactagagatatttcaatgtgtctgggtccttaaaagccagcattatacaacataaacaaatcagaagttattcctctgctaatgtagctgtgaaaatcctatgatgtcagtggctttatgaaatccacctgtctgtagtctggggagaatgctgccttttctaataatctacagattagctcagatacctaagtaaggacaatattcaggtgcccataaacctgttatcgatgataagttttatagaataatgactatatgccatggtattttctaagccccatacccagatgtcagttattgcgtaatagttattacgtccagatgccattttaactctttttgcgttacatatattattgtatttaatcctattcaccaccctgtaaatcagttagtaccattattttactatttaagttgcagaacaacaggactcaaagtttaaattcaactcactatctccacccctaacatctggtctgagccattaccatcatatcttgcttcatttattgctttccatctcctacttttgatttacttttctcttatcatttagcacctgaatcctattttatatatgctcatgcttcttttgttgtctttcttcattttcctcataacaaagacaaatttatgccttctaggtagaataatggaatttgaatgagaaggaaagakatctgaaatttattgctttactaccagaaagatgacttcaaattctgcagctagaagctttctgttcagtgctcacagtggacttaagttagtctataacttgacaggttacactggtgttttatctaatcactcatttaatcaatttataaacatttactgagcaaaactttttattaaaggccattttttaggggtttggaaaacaaaatttaagtatgatatcatccctgcctttagaaaattagattatgttatgagatcatcatgcaaaattcatccattcattctacaagtgtttattgagtaccttctatttgctaggcacagatctactgctacacatagggactttaacaaaagagcaaacatctctgatttcatggagcatatattctagcacagggagacaaataatacaca

SEQ ID NO: 37780 - DNA, 975 bp, Homo sapiens
gtgtgtgtgtgtgtgtrtgtagagacagggtctcagtatattatgcaggctaatcttgaacttctgggcttaagcaatccacccactttggcctcccagactgctggaattacaggtgtgggccaccatggctggctatttttttcttacattttttaatgacctttccaccacaaatgaaatttacacattatgtttgatatttattttatttaagatgtcagaggattaatatcttaacatttaatttggaaatattatatatataatatgtacatatatatttgcataccaaagtacaaaaaataaattgtcttcaagtggactgtattatcgactttaaatttgatcaactttaaataaattatggtccacaagtactatcacatgacaattttctgattagctgaatacatataggacagacattaaaggctgttaaaaatgctatcaaccaactttgaaagagatcacttcgtaatgtgaatttaaagtttaaaattttaagatgaataaaacaatatcactcctaaaataaaataagaaaactcagaaatttgttataagaatatcaaaatatcttacagaaattaggaagagaaccagagacactcggtcctacttgagggtggagggtgagagaagggtgaggatcaaaaaactacctatcaggtattatgtttattacctgagtggtgaaataatctgtacaccagcctcccaagacatgcaatttatctatataacaaacttgtgcatgtacccctgaacctataaaataaacgttttaaaaaaaaagaaattaagggaaggaatgcagacagctgggcatgagatgtaactctgagtctaataagaatttgctttctgtctcttgatgccttttctacatgcctacttcattcttctctcttcattacattctttgtttttccaagaccacatagccaaagaaatttgacagtttctgaatta

SEQ ID NO: 37781 - DNA, 975 bp, Homo sapiens
gtgtgtgtgtgtgtgtgtgtagagacagggtctcagtatattatgcaggctaatcttgaacttctgggcttaagcaatccacccactttggcctcccagactgctggaattacaggtgtgggccaccatggctggctatttttttcttacattttttaatgacctttccaccacaaatgaaatttacacattatgtttgatatttattttatttaagatgtcagaggattaatatcttaacatttaatttggaaatattatatatataatatgtacatatatatttgcataccaaagtacaaaaaataaattgtcttcaagtggactgtattatcgactttaaatttgatcaaytttaaataaattatggtccacaagtactatcacatgacaattttctgattagctgaatacatataggacagacattaaaggctgttaaaaatgctatcaaccaactttgaaagagatcacttcgtaatgtgaatttaaagtttaaaattttaagatgaataaaacaatatcactcctaaaataaaataagaaaactcagaaatttgttataagaatatcaaaatatcttacagaaattaggaagagaaccagagacactcggtcctacttgagggtggagggtgagagaagggtgaggatcaaaaaactacctatcaggtattatgtttattacctgagtggtgaaataatctgtacaccagcctcccaagacatgcaatttatctatataacaaacttgtgcatgtacccctgaacctataaaataaacgttttaaaaaaaaagaaattaagggaaggaatgcagacagctgggcatgagatgtaactctgagtctaataagaatttgctttctgtctcttgatgccttttctacatgcctacttcattcttctctcttcattacattctttgtttttccaagaccacatagccaaagaaatttgacagtttctgaatta

SEQ ID NO: 37782 - DNA, 710 bp, Homo sapiens
cttggaaaacagcctcaatgggccctattttcttcaatatttagactgggtgatttactgtattgttttaagcataacattaatgttgtttctctgtctacaaatcgctgtctggggacaaacttaatttaaagtcagcatagtcttttgcctgcctgtctgggactccctttgatttcccacttgcatttattaggggtatctgacaccttatctcactcgtttttttgtgtgtgagttaatattttaatatacttcaatttattttatttagttttagaaaaatagccttcaaaatgaaaaaaattagttttaatttcttgcctttggtgatgtaggccctctgagtttattttttctrgaagtgcttcagccatgttcccagggaaactgcctcttcactcttctccaaatcctgccaggacttcttgaatggtccctacacgtggattcctcagcttctggagaagcttctgtcttaatggatgaaaaagactctgaacaacccttgcgtttttttaatgtgatactttataaaaccttttcagtttagatcttgttatggtttattatttgtggagtatcagtatttagtacagagatttcaagaaactcagtcaaaagacagtatgttttagcccaaaggcattattctcatatcagtggaatactttcttcaggaacttgtccataggattttaatatcctga

SEQ ID NO: 37783 - DNA, 603 bp, Homo sapiens
tagaatttgattacctgaaaatctccatttgtgtacttttgttaatgtgtatacaaattttcatcaccactcctgagtcactggccttgaatggtgtgctactttaaatcagatgactcaaaatgtctcttctcactctcagaacaggtatttgtgacaagtatttgttgatttgattggttgtttttgttcttggtccttttgatgcaatgcaatatattaacaaaattctaatgttcagcctcctatgaaggacatgcctgattactgcatrtaattattaataaactaaaataatttgaaaataaattttaaaaattgttaataaaattgtaataaaaacttaataaatatttgatttctcggcattttactttaaaagttttcattgttcccaacctacagcactgagagatagagaggataaataaagagggagaagagaaaaagataattggtaaagacttacgcttcagggaatcaatgagtacttgaaatttaatgtaaattttagtgtgactgcatatttttcctgcaagaatatttatatatttttcataaggttctcaaagaaatgtatgaatcaaaagatgattaagaatc

SEQ ID NO: 37784 - DNA, 651 bp, Homo sapiens
ccactgtactccagcctgggcaacagagcgagaccctgtctcaaaaaaataaataaataaaaataaaaaagaaatatctggaaagaaggccagctgtatacattcactggagtgtgacaattgggtccagaagctcaggctctgagaacgctctcctccttcttctccagtccctttcttactcaacacctcaagtaatttatttattccacaagtgtctattaaatacctattactgccagagcaccatatgtcagtgagcaaaacaaaaaatttcctgccccagtggataagagggaggatacacacaactcttagtatgtttaataaatcagcacattacatgtattcacagggtgttgagggctaagggaaaaacaagcacaggaggaaaagggtgattgagagtgtgggataggagtggggagtttgcaattttygataaggtgaacaaggtagcccttattgaaacagtgatgtgggggtggtgtcctgaatgcatgcactcaatcactcactaccccatgcattcatgacaccgttcattcattcactccttcatccatgcaggtatccattcattcactcaatcactcattcctcatttactcattcactattcattgccccattttcttgctcactcattca

SEQ ID NO: 37785 - DNA, 687 bp, Homo sapiens
cataatggttacagtacgggctctcattttggacttcttgtctccttccaggtacacaacttcaggcaaaacacttatctctgcacttacttagttgttgtttttccaagtaaaaaccaggcatggaaattgtaactatctcataggattaccaaaaacattaaatgagttgatgtatgtgaaaggcttagaacagcacctggcacatgtgggtgtccaataaatattagctattataatttctgtagaaaaacttgatcrtgtttctccttcaaagctcccctctgggaaccagactctggaagggtaagctttggtgattgctgaaatattcaaaagatagggaaccccatgatactcttggaggacaactgtttatccaaggatcaaagattaaagacattattgatgcaatgagtacctcgggggaaaggggccggacagatgactacttcatgcgtttgctcatcacgggggctgaatctaagaacccagggacatagaagattcctataactaggtcctccccaatcaagggagaacttgtggtccaaaaggtaaaattaaataaggaaagcattctgtgtcctgccagtacaatagacctagtcctgcaagtaaagcagagacaaactgatacatgattaaaacctgtctccaatactaacttacaatgtatccttgggg

SEQ ID NO: 37786 - DNA, 1130 bp, Homo sapiens
aggcagccttctccttattctaggcaacacattcctaatagcgcagcttaaggtggccagtagcatataacggagttggggacactatcggtgcaaatatctgtgtgtcattgacaggtacagagtcttagctgtatttccctgccatacaaagcctgtgctgctggtgtttagacatcagcacaggattctcagttatccccatgatgttttatcttgtaggattcaatctgaaatcataatgctgagatcttttgtgcatcctgagcctgtcttccaaaacattccctgacccttccagaatcttgtccctgaaaaactagatatccatgccatccacatctccttttctccattcggttataatatctaacactcactaagcacattccatgggtcaggcagtgttttaagagctttacacggattagctcatttaatcctcacaacaaccctgcaagataggttctttcatcatccctatttgacaacgaagaaaacgaagcatccagtggttaaacatcttgtctaacatctcaaaaaataaagcatcaggggcaggatttggctccatgttcttccatgccacactatccagcctctcatggggtttttaagggccaggatctctgataataagacacaggaataagcagctcccttcagacagcttagcagattctgtggttaaatgtagttaaacattataggtcctttgctggctctcctactgtgggaccttgggcaaggtcttacttactctgttctttggtttcctcatctgtaaaagaacactgaaaataatgcctaccttatggagctgttgggagggttaagtgagctaacacaagtaagggacttagaagagtaccttgcatgtaattagtactcagttaatgttaactattaactattattattatggtaggatatagggaggtacaaagaaaggaataaatactcattgctcttgagagcagtcaagaggactttagaggccaggcgcagaggctcacaactgtaatccyagcactttgggaggacaaagcgggtggatcacctgaggtcaggagttcaagaccagcctggccaacatggcaaaaccccatctctactaaaaatacaaaaat

SEQ ID NO: 37787 - DNA, 536 bp, Homo sapiens
agagcaagaggcaattaattatgtttggctggagctgtgcagggatcatggaaggagatgacatttgaattrttattaaaaagataagtcatttggcagagagaaaaaaagaatgtttagcagtgggattttggacaagtcactaaaactgtttaggttaatgttactatgaaagagtactagaatatacagttttgctgctgtgctgctatagttattaatttacttccaaatctagctacagattttgaaaacatttcttttctgtattatgaaagaaagcactagttaagtattgcaaatagtttgttgtaacaaactttttcctcattatctattatcaaaggagggcagtcaccagggaggatcaaaccatcaaaactggcatatgtaaagttcatggctagcgtccccagcctgctctttgtaagtttgttttcctacttgttggcatctgctgccttctcctgccagaccccaatgttccttgcttttagtttgccattattaaaatatgctttcctgaatgatttttt

SEQ ID NO: 37788 - DNA, 1079 bp, Homo sapiens
caggagatcgagaccacggtgaaaccccgtctctaccaaaaatacaaaaaattagacgggcacggtggcgggcgcctgtagtcccagctactcgggaggctgaggcaggagaatggcgtgaacccaggaggtggagcttgcagtaagccaagacggcgccactgcactccagcttgggcgacagagccagactccgtctcaaacacaacaacaacaacaaaaaacaaaaacaaacaaacaatgtaaaaagcctaagagatgcctagtcaaccctctcattttatatagataaaccaaggctcagaaatgttaagggattctttcctgttagaaggagaataggggccatcagaactgtctttccttctaacggaaaattctgctttctttactacgtcatgagagtttaatgataatgaccccatttttatgtcactgcgtctgatacttaaaactaacagtgcagattgggaagtgggctgtggggataaagtttgggatcaattatgcccaagtaagaactcatttctggctcttaaatactctgaagttgggcaagcttcattttcttcagttataaatgggatattctatgaggttgtttgcagggttaataaaatgcagagagctgttaccatagaattcaacatagattagccactttaaaaaggtaataatgtgaatctggctaataacaatgacacttattgttactaagcagaagcttgctagggtgactgtttagaagaccttggcattggattaagtcacgatgccctctaatagaccgttgtggcaactgctactttccctctgtgatgcctttcacaactcaaatgagacaatcatttgcataataaacttctcagyatcttctagactgtgattctgagtacctatagaactctgtgagaacaaggacaggtctgtcttgtttaccattctatctattgccctgcaacccaccctcatcaagtaatatatgtcacaaaacaagaattggtgcttgactagatacttccatcctttatgatgttggttttgtgattaggtactgatttctgcctcctgcaaaattt

SEQ ID NO: 37789 - DNA, 569 bp, Homo sapiens
tttttttttactatcattttctttattttttgagatggggtctcactctgtcgcccaggctggagtgcaactccgctcactgcaagcttctcctcccgggttcacgccattctcctgcctcagcctcccaactagctggaactacaggtgccagccaccatgcccagctaatttttttgtatttttttggtagagacggggtttcactgtgttagccgggatcgtcttgatctcctaacttcgtgatctgcccacctcggcctcccaaagtgctgggattacaggcgtgagccaccgtgccygtccgagggcttttgaactcacaggttggcacctcagtgcttcttgtcctccctccccttccctgccctcccctccccttcgtttctctcctgttccctctgcttttaacctttttctcctcttgttcttcttcctcctcctcatccttctttgtctccctctctctctttctctcccttcatatgacttcttaccattctagtatacggtgacttcacttgcttgggcttcttaacagcatggtgggtggtctcagggcagtggca

SEQ ID NO: 37790 - DNA, 934 bp, Homo sapiens
aaattgaacaggacaaggacaatggacacaaatgaaaaagaagtacagataaacgtggggcacaggaattgaaccaggaaatattaaaaagcaaattgccatattattggccacgctacaaaatcattagaagaagaaagtctgtaaagttagcaagagctctcttaaaccctctcattttaaaagttgaggaacactaatttcacataaaaataataaataaaaaakattgaggtcaaagagataaagaaacagaataagactattcagaaaatgtctgagtcccagaaagacagaaggaaaacattccttaatatttcaaaatgagcaaaaagacatcaaaaaatgataaaatatataaaaagaaaatatgcatctgaaatagaaaatatcagaaaggtgacaaaactcaataaagaattagaaatatagacaaatcatttcagaaatgaagactaagttagaaggaacacaaaagaaaataaacataatagataatgccttaagacaaatagaacactaaaaagttaaaattttaaaatgaagagaaagataagttggattaggcagaaagtaacaaatacaaaagataggtgaagaaaatgcaattaatgaataatagatattcctgcagaacaaattaaagcaagaaaacagaacaagcattgttttcctgaaataaagagatttaaaactacctatacatttgtaaggtacctcatgtctgtttctagtgaggggctctggctgcttccactcatggcaaaaggtgaacgggagcctgtgtgtacagagatcacatggtgagagagaaagcaagaaagaggaggaggtgccaggctcttttcaaaaccagctctcagggggaattctcatgggaactaacagagcaagaactcattcattattgcaaagacagcaccagagtttccta

SEQ ID NO: 37791 - DNA, 521 bp, Homo sapiens
catgtgaacaaagaacgctggaagaatataacaagcactcaatgttttatgacatcaaaggcaaagctatatcagtgctcatttccctacctctggtttctctgcgttttgtactttaatccactacacctcacctgcaggctcaagagagcctaacttctcagctgataatcataataatcaaataattaaaatactatttattaatttattaccacttacatggtgtgcacaatgattatcttatctgagccttaaaacaaccctttaatatgagttattaatgttttaataaatataaagcaaccctttatacttatctttattttactgatgcaataataagacawacagaggttagttaataaccatttcactcagcaagtgacttatcctaggttttgctgaattgcaatcagccatttctgctgagttcctatttggcccttgaagaaacttcactgaacctggataagtaaaaacacataaaaaatgtctcctttcaacttctcttcctttat

SEQ ID NO: 37792 - DNA, 760 bp, Homo sapiens
atcaattataataacgtcaaagaaacattacattcctagaaataaatctggcaaaacacatgggagaagactgttctgaaagctctagacattaggaagatattttaaagaacaaaaaattataatatgccatgttcactgatgataaaacacaatattctaaagatgtaatttctcccaaaatgaatgaatatattcaacacagttcaaaatctctgccagtgtgtgtgtgtgtgtgtgtgtgtgtgtgtgtgtgtgtgtgtgtgaaaactgaccaggggaaaataaaatgtaccaggaaatatgaagtcatgaatacccaaagcaatcacgaaaataaaaagtaaaaatggaccacttccagatatgaagatctattataaagtaatactaattagaaaagcatagatgaaatgaactataaagttgaatagagagcccagaaagagacctaatcatatacaactccatgtagtgtaataacagtgacaatgcttatgtgaaaatcaattttcgacagaatgcagatcaagatttaacatatgaaacagtaaaacattgagaaaaaacacagaagatttttctagttgagcctgaggtaggcaaatatttyttaagcaagacatacaattgctgaccaaaagaaaaataattcataaaatgaacaatattatactcacagaacttctgttcctcaaggtatacttcatggtgaaagggcaacccatagagtgggaggtgctgttcactataattcata

SEQ ID NO: 37793 - DNA, 867 bp, Homo sapiens
cataacaccgaaaagccgatattcataaaaccaaagcagtgcctgtgggaggtgcaccaaagtcccttcatatgaaatttcctggtgtccctaagggggaacacagtgacatcccagggggtacaggaaagacaagtcccccccaagaccctgtccaggagctctccagcctgggcctcccctctcattctcttagtcctaaacgtttggggacatgtcagaacatgaaagggaaaggaaaaccaaaataaagtcttagttagctataaaacccaagtaaccagagtccttggatgagttttattttgctgccttatttcatttttaggaaatgtgagatgaatgtttttacaaaataaaacagaaactccctaaatatgacttagggacaagttccaacctagcctggagctcttataccttttaaagtttacagtaagaactgacctacactaatccattaaattagtgaattgactttcyaccaaattctagaaacattacagattacagaccattagaaaaacattttaatgtttttagaaaaattaaagctatattttatctattctaaacagggcaaaaagtacacatatcacagaaggataagaagaatagaaagtaaaagtttaaaaagttcacttttttaaacattgaagaaaaatgctactagaaatctggttgagtatatgtagtttgctaaaaggaatactgaaatactttgctttctggtatcctagttaaaaagcacaaaacgatctttaacagggagaaaaatactaaaatgtgattttcccttgctgttgctcatttgcttaccctgaatgaaacatttaaaaaagatacatatcactggctgtcaaagtc

SEQ ID NO: 37794 - DNA, 619 bp, Homo sapiens
atttgcaaactggatgattacaaaagttaagtgaacttgaacattgccattaactcattagggccacccccagcctctctctttcaagtatggtcaatgtggctttataattgccataagaccaagttccgtttagtgggggaaacccacatatccagctcattggcaactagggctagcaaatgctcctgccacagttttaaaagtctgaacagtctgtctgaccataggtgagaacaggtgaatttttcacatctgcacttcacaacagaaaagaatccactccaaactctgtgaaagaagagctcttgtagcatttccttttggggggtggggattttccaatagatcaggctccagactactgaatggaaactatttcctcactcttccctccatccccccaacatacacacacacacacacacacacatacacacacacacacacacacacacacacagatgtctaaaratttttctgaaatcagggattgactcaaggaaaggatgtgtttcattagctgttccatcaaaggaaagagacacggagtctgctaaaggtcaagagagaagaagagaaggagccgaacaccggtggcccagatgcccaggccctg

SEQ ID NO: 37795 - DNA, 1501 bp, Homo sapiens
cataataaatgttgctctccttattttataatctcatgagaggggaacataagaaagcaattacttaggatcctggcaaagtagggtaatcaaggaatagagataaaactaaaatataaagcggtattctgggctaaatatggaggratgatttatggatcaggtggcattttgttgcatattagaagatgtaatggcattttagatagaatgggaaggctatcttctcagaagtctatgtaactgaagtgcatcatttgagcataaaaagaaacacttcctggcttcgctagtcattattgtgtcatttgttaacattatcaaatcttttccatgtggctctgcttcctatccaaaaatagcttacaaacgagaagtttagattctagttcccaaagaatcctcatcccctgtatcttccatagatgctggtggcgggaaggtgctaaatctcttcatagtaactatacagtgagtctatcttcctctctgaagaaaggaaacagctatctagttccctgagcatggagggaggaaggacatcattgtataggagaatccttggcaaaacagaatcgtacctaagtaggtagagaatcagtgcccactccggcatgcatcatagccatgagagactagaatgtgtagcagatgttgtatgtggactacggcctcaaggatcacttgactagaagtccctaacctagtgccaagcacactggggtggctggtggtgccgaaatccctatggaagaccagcaagttctcataagggttagctgtgggcagttcccttgtatattgtgaaaatctctattcctaagtggacattgttatttttgggaggtcagaaaaaccgaataaatgcacactgcttagcacacagtactcatcatgatctctcccctatggatcatgtgcccatctctcccaaactactcactgctcctgaagtctcttctatgcctctttgcttttgcatatgctgtatattctaccagattatccttcccaaactactttgctttgaggatgtttcaaaactcagagataaatcagctaatcctccctatagcctgggttagacaacctacatctagcatgtacctacctcagtcacaggatttattctgctgcattgtaataacattgttccttgtcttgttttcacacttgactgtaagcttcttgaagagcaggtactgaatgtttaggtccctggttcctagcgtagtatctagtaaaagggaacacctggaatttgaggcaggaggcagcatgtgtatattggaaaggcatagaattcatgcccaggtgagagatgagaggctttggtaactcattttacctgtttcacccatttgctaaagagcaacaacaagaggaatcagaaatgcttccatcactcctcagttgctggaagatcttggattagtcatgctttctgcaaaacattagctatcttctcactcgaaccaaactaaaccatttagtaagaagc

SEQ ID NO: 37796 - DNA, 1501 bp, Homo sapiens
cataataaatgttgctctccttattttataatctcatgagaggggaacataagaaagcaattacttaggatcctggcaaagtagggtaatcaaggaatagagataaaactaaaatataaagcggtattctgggctaaatatggaggaatgatttatggatcaggtggcattttgttgcatattagaagatgtaatggcattttagatagaatgggaaggctatcttctcagaagtctatgtaactgaagtgcatcatttgagcataaaaagaaacacttcctggcttcgctagtcattattgtgtcatttgttaacattatcaaatcttttccatgtggctctgcttcctatccaaaaatagcttacaaacgagaagtttagattctagttcccaaagaatcctcatcccctgtatcttccatagatgctggtggcgggaaggtgctaaatctcttcatagtaactatacagtgagtctatcttcctctctgaagaaaggaaacagctatctagttccctgagcatggagggaggaaggacatcattgtataggagaatccttggcaaaacagaatcgtacctaagtaggtagagaatcagtgcccactccggcatgcatcatagccatgagagactagaatgtgtagcagatgttgtatgtggactacggcctcaaggatcacttgactagaagtccctaacctagtgccaagcacactggggtggctggtggtgccgaaatccctatggaagaccagcaagttctcataagggttagctgtgggcagttcccttgtatattgtgaaaatctctattcctaagtggacattgttatttttgggaggtcagaaaaaccgaataaatgcacactgcttagcacacagtactcatcatgatctctcccctatggatcatgtgcccatctctcccaaactactcactgctcctgaagtctcttctatgcctctttgcttttgcatatgctgtatattctaccagattayccttcccaaactactttgctttgaggatgtttcaaaactcagagataaatcagctaatcctccctatagcctgggttagacaacctacatctagcatgtacctacctcagtcacaggatttattctgctgcattgtaataacattgttccttgtcttgttttcacacttgactgtaagcttcttgaagagcaggtactgaatgtttaggtccctggttcctagcgtagtatctagtaaaagggaacacctggaatttgaggcaggaggcagcatgtgtatattggaaaggcatagaattcatgcccaggtgagagatgagaggctttggtaactcattttacctgtttcacccatttgctaaagagcaacaacaagaggaatcagaaatgcttccatcactcctcagttgctggaagatcttggattagtcatgctttctgcaaaacattagctatcttctcactcgaaccaaactaaaccatttagtaagaagc

SEQ ID NO: 37797 - DNA, 1501 bp, Homo sapiens
cataataaatgttgctctccttattttataatctcatgagaggggaacataagaaagcaattacttaggatcctggcaaagtagggtaatcaaggaatagagataaaactaaaatataaagcggtattctgggctaaatatggaggaatgatttatggatcaggtggcattttgttgcatattagaagatgtaatggcattttagatagaatgggaaggctatcttctcagaagtctatgtaactgaagtgcatcatttgagcataaaaagaaacacttcctggcttcgctagtcattattgtgtcatttgttaacattatcaaatcttttccatgtggctctgcttcctatccaaaaatagcttacaaacgagaagtttagattctagttcccaaagaatcctcatcccctgtatcttccatagatgctggtggcgggaaggtgctaaatctcttcatagtaactatacagtgagtctatcttcctctctgaagaaaggaaacagctatctagttccctgagcatggagggaggaaggacatcattgtataggagaatccttggcaaaacagaatcgtacctaagtaggtagagaatcagtgcccactccggcatgcatcatagccatgagagactagaatgtgtagcagatgttgtatgtggactacggcctcaaggatcacttgactagaagtccctaacctagtgccaagcacactggggtggctggtggtgccgaaatccctatggaagaccagcaagttctcataagggttagctgtgggcagttcccttgtatattgtgaaaatctctattcctaagtggacattgttatttttgggaggtcagaaaaaccgaataaatgcacactgcttagcacacagtactcatcatgatctctcccctatggatcatgtgcccatctctcccaaactactcactgctcctgaagtctcttctatgcctctttgcttttgcatatgctgtatattctaccagattatccttcccaaactactttgctttgaggatgtttcaaaactcagagataaatcagctaatcctccctatagcctgggttagacaacctacatctagcatgtacctacctcagtcacaggatttattctgctgcattgtaataacattgttccttgtcttgttttcacacttgactgtaagcttcttgaagagcaggtactgaatgtttaggtccctggttcctagcgtagtatctagtaaaagggaacacctggaatttgaggcaggaggcagcatgtgtatattggaaaggcatagaattcatgcccaggtgagagatgagaggctttggtaactyattttacctgtttcacccatttgctaaagagcaacaacaagaggaatcagaaatgcttccatcactcctcagttgctggaagatcttggattagtcatgctttctgcaaaacattagctatcttctcactcgaaccaaactaaaccatttagtaagaagc

SEQ ID NO: 37798 - DNA, 2145 bp, Homo sapiens
tttaaattgtaagcacaaagaaggaccaagacttttagtccaaatgagaccagagactcagacactggagcagcttgctcaagagcataggactagtcagaggcaatgacaatatcggcctccaggtcccctggcctccagcctgggactttytccagtgtccccctcactcttctgtcaactcagtcagatgttggaggctctgtagtcatgggaaagaggataaagacagaattgctgctctcagcagaaacactgtaatggaaaccatttcacaggctgtggcagaaagagccttccctcctcatcacatgttagcttcgggaagagtttatgactcattcaggacatttgggtgtgtcagttccgcaaaactagggtatcctgggcagagtctcagaagaaagacaggagtcaggaatctcatctactccaggcagagggaaggtggctgtctattaagaaatactgaaaggcctctcaactgtacttctgtagccaccaggggagcagggacttgaaatttctgagtatttctcatccagtcatttcaatcatgacaatatagtagttctggagatgaaatatttaaagttgtaaagaaagagtgagtttttaagccagatcaatttgcatgcaaccctgtttcctcattcatagaatgcacataaatacctacttcgcagaatcacagtgggggttgattgaaataaagcctgaaaaatttctagcagacaaaaggcactcaatgggtacaaagtaaaggttgaattgatctcctcttgataagatgaaaccaaagccaatgaaaactatttggagaatatagcaggctgaataatgctccccgggagacgttaccttatatgttaaaaaaaaaaaaaaaaaaaaaaaaaaaaaaaaaacctttgcagatgtgattaagttaaggatattgagatgaagatattgagataaatggcttttatgaaatggagtcaagaggatcagagttaggagaaaggctgaaagatactgtactgtcgtctttgataatgaggaaaaggccatgagccaaggacagcaggcagtcacagaatctagaaaacgtaaaacaaacaaacaaacaaacaagcaaaaaaactctcctctagagcctccaaaaggaacatagcttgctgacaccttaattttagcccgtgaggctgacttaggacttctgactgccagaattgtaagataataaatgtgtgtgtgagtttgtgtgtatgtgtgtgtgtgtttgaggtcactaagtttgtgctaatttgttaaatcagcaataggaaactaatacagagtgatatatcacaagcaaaacattcaccccaatataaagaacatccctataagtaggtggactcaatagctcagagaccagcagcctgtgaatatagatgaggtcacaagttcatcagtgtgtaaataacggtagttcttaacaacccccaccaacaccaccatcaatttccaataacccagtctttattttttaatgtttccccgtcccttcaagcattctcaggaacaagttcactcagtctttctttgaaatccttccatgagcagaattttaggaggaatcttcgcaaagccacagacactgtaaccttggtgagatcccgggtctctctctggcactcctccagctaccatcctgctccacacatctttgtccaatgctgtcactcagtctagaaccaccagaaataaaaatcttttgagtaaattgtcatatttgttgccaatctccaaagagcgctgctgcttcccaaaatcttacagttttttcataaacatgattccttaagctttagatagcaccctcacagtctctcatcgggccaggctgagtggaaattaatcacgttattccctctcaattttacctcttccttctctaccctctgtcccacatgtcagtatgtccccctcttcctccagttaaaagctaaagcaccgtctttgtataacaacttatgcaactggacacttgatagaaaacagtaccattaactccacttgccagacacatatgaaccccagctctagcttgtgcaaaacactctccctacccaacctacctaccaagttgtacacatccctggatttggagagtctattcct

SEQ ID NO: 37799 - DNA, 2145 bp, Homo sapiens
tttaaattgtaagcacaaagaaggaccaagacttttagtccaaatgagaccagagactcagacactggagcagcttgctcaagagcataggactagtcagaggcaatgacaatatcggcctccaggtcccctggcctccagcctgggactttttccagtgtccccctcactcttctgtcaactcagtcagatgttggaggctctgtagtcatgggaaagaggataaagacagaattgctgctctcagcagaaacactgtaatggaaaccatttcacaggctgtggcagaaagagccttccctcctcatcacatgttagcttcgggaagagtttatgactcattcaggacatttgggtgtgtcagttccgcaaaactagggtatcctgggcagagtctcagaagaaagacaggagtcaggaatctcatctactccaggcagagggaaggtggctgtctattaagaaatactgaaaggcctctcaactgtacttctgtagccaccaggggagcagggacttgaaatttctgagtatttctcatccagtcatttcaatcatgacaatatagtagttctggagatgaaatatttaaagttgtaaagaaagagtgagtttttaagccagatcaatttgcatgcaaccctgtttcctcattcatagaatgcacataaatacctacttcgcagaatcacagtgggggttgattgaaataaagcctgaaaaatttctagcagacaaaaggcactcaatgggtacaaagtaaaggttgaattgatctcctcttgataagatgaaaccaaagccaatgaaaactatttggagaatatagcaggctgaataatgctccccgggagacgttaccttatatgttaaaaaaaaaaaaaaaaaaaaaaaaaaaaaaaaaacctttgcagatgtgattaagttaaggatattgagatgaagatattgagataaatggcttttatgaaatggagtcaagaggatcagagttaggagaaaggctgaaagatactgtactgtcgtctttgataatgaggaaaaggccatgagccaaggacagcaggcagtcacagaatctagaaaacgtaaaacaaacaaacaaacaaacaagcaaaaaaactctcctctagagcctccaaaaggaacatagcttgctgacaccttaattttagcccgtgaggctgacttaggacttctgactgccagaattgtaagataataaatgtgtgtgtgagtttgtgtgtatgtgtgtgtgtgtttgaggtcactaagtttgtgctaatttgttaaatcagcaataggaaactaatacagagtgatatatcacaagcaaaacattcaccccaatataaagaacatccctataagtaggtggactcaatagctcagagaccagcagcctgtgaatatagatgaggtcacaagttcatcagtgtgtaaataacggtagttcttaacaacccccaccaacaccaccatcaatttccaataacccagtctttattttttaatgtttccccgtcccttcaagcattctcaggaacaagttcactcagtctttctttgaaatccttccatgagcagaattttaggaggaatcttcgcaaagccacagrcactgtaaccttggtgagatcccgggtctctctctggcactcctccagctaccatcctgctccacacatctttgtccaatgctgtcactcagtctagaaccaccagaaataaaaatcttttgagtaaattgtcatatttgttgccaatctccaaagagcgctgctgcttcccaaaatcttacagttttttcataaacatgattccttaagctttagatagcaccctcacagtctctcatcgggccaggctgagtggaaattaatcacgttattccctctcaattttacctcttccttctctaccctctgtcccacatgtcagtatgtccccctcttcctccagttaaaagctaaagcaccgtctttgtataacaacttatgcaactggacacttgatagaaaacagtaccattaactccacttgccagacacatatgaaccccagctctagcttgtgcaaaacactctccctacccaacctacctaccaagttgtacacatccctggatttggagagtctattcct

SEQ ID NO: 37800 - DNA, 2145 bp, Homo sapiens
tttaaattgtaagcacaaagaaggaccaagacttttagtccaaatgagaccagagactcagacactggagcagcttgctcaagagcataggactagtcagaggcaatgacaatatcggcctccaggtcccctggcctccagcctgggactttttccagtgtccccctcactcttctgtcaactcagtcagatgttggaggctctgtagtcatgggaaagaggataaagacagaattgctgctctcagcagaaacactgtaatggaaaccatttcacaggctgtggcagaaagagccttccctcctcatcacatgttagcttcgggaagagtttatgactcattcaggacatttgggtgtgtcagttccgcaaaactagggtatcctgggcagagtctcagaagaaagacaggagtcaggaatctcatctactccaggcagagggaaggtggctgtctattaagaaatactgaaaggcctctcaactgtacttctgtagccaccaggggagcagggacttgaaatttctgagtatttctcatccagtcatttcaatcatgacaatatagtagttctggagatgaaatatttaaagttgtaaagaaagagtgagtttttaagccagatcaatttgcatgcaaccctgtttcctcattcatagaatgcacataaatacctacttcgcagaatcacagtgggggttgattgaaataaagcctgaaaaatttctagcagacaaaaggcactcaatgggtacaaagtaaaggttgaattgatctcctcttgataagatgaaaccaaagccaatgaaaactatttggagaatatagcaggctgaataatgctccccgggagacgttaccttatatgttaaaaaaaaaaaaaaaaaaaaaaaaaaaaaaaaaacctttgcagatgtgattaagttaaggatattgagatgaagatattgagataaatggcttttatgaaatggagtcaagaggatcagagttaggagaaaggctgaaagatactgtactgtcgtctttgataatgaggaaaaggccatgagccaaggacagcaggcagtcacagaatctagaaaacgtaaaacaaacaaacaaacaaacaagcaaaaaaactctcctctagagcctccaaaaggaacatagcttgctgacaccttaattttagcccgtgaggctgacttaggacttctgactgccagaattgtaagataataaatgtgtgtgtgagtttgtgtgtatgtgtgtgtgtgtttgaggtcactaagtttgtgctaatttgttaaatcagcaataggaaactaatacagagtgatatatcacaagcaaaacattcaccccaatataaagaacatccctataagtaggtggactcaatagctcagagaccagcagcctgtgaatatagatgaggtcacaagttcatcagtgtgtaaataacggtagttcttaacaacccccaccaacaccaccatcaatttccaataacccagtctttattttttaatgtttccccgtcccttcaagcattctcaggaacaagttcactcagtctttctttgaaatccttccatgagcagaattttaggaggaatcttcgcaaagccacagacactgtaaccttggtgagatcccgggtctctctctggcactcctccagctaccatcctgctccacacatctttgtccaatgctgtcactcagtctagaaccaccagaaataaaaatcttttgagtaaattgtcatatttgttgccaatctccaaagagcgctgctgcttcccaaaatcttayagttttttcataaacatgattccttaagctttagatagcaccctcacagtctctcatcgggccaggctgagtggaaattaatcacgttattccctctcaattttacctcttccttctctaccctctgtcccacatgtcagtatgtccccctcttcctccagttaaaagctaaagcaccgtctttgtataacaacttatgcaactggacacttgatagaaaacagtaccattaactccacttgccagacacatatgaaccccagctctagcttgtgcaaaacactctccctacccaacctacctaccaagttgtacacatccctggatttggagagtctattcct

SEQ ID NO: 37801 - DNA, 2145 bp, Homo sapiens
tttaaattgtaagcacaaagaaggaccaagacttttagtccaaatgagaccagagactcagacactggagcagcttgctcaagagcataggactagtcagaggcaatgacaatatcggcctccaggtcccctggcctccagcctgggactttttccagtgtccccctcactcttctgtcaactcagtcagatgttggaggctctgtagtcatgggaaagaggataaagacagaattgctgctctcagcagaaacactgtaatggaaaccatttcacaggctgtggcagaaagagccttccctcctcatcacatgttagcttcgggaagagtttatgactcattcaggacatttgggtgtgtcagttccgcaaaactagggtatcctgggcagagtctcagaagaaagacaggagtcaggaatctcatctactccaggcagagggaaggtggctgtctattaagaaatactgaaaggcctctcaactgtacttctgtagccaccaggggagcagggacttgaaatttctgagtatttctcatccagtcatttcaatcatgacaatatagtagttctggagatgaaatatttaaagttgtaaagaaagagtgagtttttaagccagatcaatttgcatgcaaccctgtttcctcattcatagaatgcacataaatacctacttcgcagaatcacagtgggggttgattgaaataaagcctgaaaaatttctagcagacaaaaggcactcaatgggtacaaagtaaaggttgaattgatctcctcttgataagatgaaaccaaagccaatgaaaactatttggagaatatagcaggctgaataatgctccccgggagacgttaccttatatgttaaaaaaaaaaaaaaaaaaaaaaaaaaaaaaaaaacctttgcagatgtgattaagttaaggatattgagatgaagatattgagataaatggcttttatgaaatggagtcaagaggatcagagttaggagaaaggctgaaagatactgtactgtcgtctttgataatgaggaaaaggccatgagccaaggacagcaggcagtcacagaatctagaaaacgtaaaacaaacaaacaaacaaacaagcaaaaaaactctcctctagagcctccaaaaggaacatagcttgctgacaccttaattttagcccgtgaggctgacttaggacttctgactgccagaattgtaagataataaatgtgtgtgtgagtttgtgtgtatgtgtgtgtgtgtttgaggtcactaagtttgtgctaatttgttaaatcagcaataggaaactaatacagagtgatatatcacaagcaaaacattcaccccaatataaagaacatccctataagtaggtggactcaatagctcagagaccagcagcctgtgaatatagatgaggtcacaagttcatcagtgtgtaaataacggtagttcttaacaacccccaccaacaccaccatcaatttccaataacccagtctttattttttaatgtttccccgtcccttcaagcattctcaggaacaagttcactcagtctttctttgaaatccttccatgagcagaattttaggaggaatcttcgcaaagccacagacactgtaaccttggtgagatcccgggtctctctctggcactcctccagctaccatcctgctccacacatctttgtccaatgctgtcactcagtctagaaccaccagaaataaaaatcttttgagtaaattgtcatatttgttgccaatctccaaagagcgctgctgcttcccaaaatcttacagttttttcataaacatgattccttaagctttagatagcaccctcacagtctctcatcgggccaggctgagtggaaattaatcacgttattccctctcaattttacctcttcyttctctaccctctgtcccacatgtcagtatgtccccctcttcctccagttaaaagctaaagcaccgtctttgtataacaacttatgcaactggacacttgatagaaaacagtaccattaactccacttgccagacacatatgaaccccagctctagcttgtgcaaaacactctccctacccaacctacctaccaagttgtacacatccctggatttggagagtctattcct

SEQ ID NO: 37802 - DNA, 1112 bp, Homo sapiens
agtcatgtcaagaaataactcaaatggaaagtagtcagtgctatgttagaagaatgtacaaaattcctggagaacccagaggaggatgatgattcagaacagctgaggggatcgggaagggccccaggcaatctctgcaggaacccttcattccagggagttcctacgaagtgtgactgaaactctagccatattttgtttttgtccttattccctggaacacagacccagcagaaaaggcaaccaagatgttgggggaattgccccacacatacaggatatatgtcagattctaagaaatgccatagggattccaaggaataagggagacttttcatcctgagctggcacaggaggtctttgaggagataggatttcagccaagcagtaaaaggtagattggattatttcaggggtgtggggtaaatcttggggcaggccattttatttatttatttatatttgagatggagtctccctctgttgcccgggctggagtgcagtggcataatctcggctcacggcaacctccacctcccaggtccaagtgattctcctgcctcagcctcctgagtagctggaactataggcgcgagccaccacaccgagctaatttttgtgtttttagtagagacagggtttygccatattggccaggctggtctcgaactcctgacctcaggtgatccacctgcctcagcctcccaaagtgattggattacagacatgagccaccacgcctatggtggcaggccatcttagtagaaggaagagaatgtacaaagaaccaaaggcaggagaataagctctattccagagatggtgtagagcaggaatgcaggagcagtgtgtgagtggagtggaggaaaatgagacccaaaatgtggcctgagagccagatcctaaatgcaagactaagggcagtgccctttaggtgagaagagccactgaagtctctgaaaactgaaatggcatgatagaaaagacatttcggggtaacaggaagatgaccctggtatgatggagagtggaactggagggcaaactggagaggggctactaaaagggttactaatggggaggctgtttaatgttccaggcgaggtaggagg

SEQ ID NO: 37803 - DNA, 598 bp, Homo sapiens
ttggaattggttaaagtgcaccatggttatgttggctggatgtgtgggtctgagcccaggactgggagcctgctatctccagttactttctgagtgactttgagaaaatgccttcccatttctggacttcagttgccagcagctataaagtcagctagaccactccaaagctccttccaactttaaaatatacctgacatatggccataaagaataagtaattggctattatggtggttttaaggggcmcatgtttagacaccatatcctcttctcacccacaaagtcagaaccaacttcctactttgaaattagagtcatatttaaacaagggaattaaaatgtcatcttcattagataagggtttggttggagaacatggtttaggtatctgaaatcatgggctttccaacagtgcacctgaaattagcatacaggaacacctattcaaggacagcactgcatagctgcatgtccttccccaactccaacaggcagaccctttttttaaccacaaggcagaaaacagacacagcctctctgtgagcaggcaggtccacagaggatgaaggaaccagctaactagtggttctcaaac

SEQ ID NO: 37804 - DNA, 604 bp, Homo sapiens
gaattcataattcactaggatactagtagtataattcctaagagaagttataccactcttccaatcaaaaataaggtttcgtaattttcaatgtattaaccaacaatgaaatagtataaggaacagttggacaaggacaataattcttataattattagctttcaaattacagaagtgttgaattagatagtaccctggactttgcacacatgctctgatttaaacaattygcaatcttcactaaagaaagtcagtgggtttatcttctgatatgctgggtgctggcaaaagtcattgcactagaagctataaactgggattattgtccacattggctattttttcagttggattgccttgggcatgtcacatttcttctctgaccttctttcttcgtatgtcaatttcagatgataatacctgtagacaactgaaaggtctgtgcccccttacctttgtctgtacggccttgagcgctttatatttttgcaagctgtaagttcatttggtgcctgttgattgagagcccttaaaatcaagcaactcttctcacctagtaaagcagaaatatgtctatatatatagatatatgtatatatatat

SEQ ID NO: 37805 - DNA, 1054 bp, Homo sapiens
gagccacaaacatacactgggggaaaggacaacctcttcaataaagggtgataggaaaactgaatatccatatgcagacgaatgaaactagaattattgaaactctctcaccatataaaaatcaactcaaaaagaatgaaagacttaaatgtaagacctgaaactataaaatgactagaagaaaacactggagaaatactcgggacatttgtctgggcatakaattttttgagtaagacctcaaaagcacaggcaattattttactcattttggttcacaatttcctgttttttatgatctctgaaaattgcagccctacctactaaaaatcttttattagattagaaatttgtttttgtttgtagttgatttattgttgattattagttgattatagttgattattgtttttatcttgatttttatgattgtgatctattttttatgtttattgggttttggttttgctgtttggatgttgggctttcattttcaggatagctctatcacatatttcgtaattttgttttgtagaattatcttatattgaaggaatgttgttttgtgctaatacattttctctttctttagagcatatgtgatgttttcgtccaatggcccctggatctgctatccacagttgtgttttatgtcaactgtttgagattccttctccatggacataatgaggctgttttgataccattactcaagggagcatatagcttggttcagcttgacttttgactgcaaggctgggtttgcatatactgccttttttgtcaggtggctgtagccctagacagcctcttattaacgggggatttccagtctcgcttattaacaggggatctcaatctccctcttaatcctcagcagggagcctgactgcagtctacagcttcagcttcatgttggctgaactttttctctgttcttcccatagaagtagaaaacctggatgcctcttcctgtgtggactaggagcccagaagcctgtagcttcagcccattttaccttttacttattctatttctcatccacagagatgt

SEQ ID NO: 37806 - DNA, 1054 bp, Homo sapiens
gagccacaaacatacactgggggaaaggacaacctcttcaataaagggtgataggaaaactgaatatccatatgcagacgaatgaaactagaattattgaaactctctcaccatataaaaatcaactcaaaaagaatgaaagacttaaatgtaagacctgaaactataaaatgactagaagaaaacactggagaaatactcgggacatttgtctgggcatagaattttttgagtaagacctcaaaagcacaggcaattattttactcattttggttcacaatttcctgttttttatgatctctgaaaattgcagccctacctactaaaaatcttttattagattagaaatttgtttttgtttgtagttgatttattgttgattattagttgattatagttgattattgtttttatcttgatttttatgattgtgatctattttttatgtttattgggttttggttttgctgtttggatgttgggctttcattttcaggatagctctatcacatatttcrtaattttgttttgtagaattatcttatattgaaggaatgttgttttgtgctaatacattttctctttctttagagcatatgtgatgttttcgtccaatggcccctggatctgctatccacagttgtgttttatgtcaactgtttgagattccttctccatggacataatgaggctgttttgataccattactcaagggagcatatagcttggttcagcttgacttttgactgcaaggctgggtttgcatatactgccttttttgtcaggtggctgtagccctagacagcctcttattaacgggggatttccagtctcgcttattaacaggggatctcaatctccctcttaatcctcagcagggagcctgactgcagtctacagcttcagcttcatgttggctgaactttttctctgttcttcccatagaagtagaaaacctggatgcctcttcctgtgtggactaggagcccagaagcctgtagcttcagcccattttaccttttacttattctatttctcatccacagagatgt

SEQ ID NO: 37807 - DNA, 1054 bp, Homo sapiens
gagccacaaacatacactgggggaaaggacaacctcttcaataaagggtgataggaaaactgaatatccatatgcagacgaatgaaactagaattattgaaactctctcaccatataaaaatcaactcaaaaagaatgaaagacttaaatgtaagacctgaaactataaaatgactagaagaaaacactggagaaatactcgggacatttgtctgggcatagaattttttgagtaagacctcaaaagcacaggcaattattttactcattttggttcacaatttcctgttttttatgatctctgaaaattgcagccctacctactaaaaatcttttattagattagaaatttgtttttgtttgtagttgatttattgttgattattagttgattatagttgattattgtttttatcttgatttttatgattgtgatctattttttatgtttattgggttttggttttgctgtttggatgttgggctttcattttcaggatagctctatcacatatttcgtaattttgttttgtagaattatcttatattgaaggaatgttgttttgtgctaatacattttctctttctttagagcatatgtgatgttttcgtccaatggcccctggatctgctatccacarttgtgttttatgtcaactgtttgagattccttctccatggacataatgaggctgttttgataccattactcaagggagcatatagcttggttcagcttgacttttgactgcaaggctgggtttgcatatactgccttttttgtcaggtggctgtagccctagacagcctcttattaacgggggatttccagtctcgcttattaacaggggatctcaatctccctcttaatcctcagcagggagcctgactgcagtctacagcttcagcttcatgttggctgaactttttctctgttcttcccatagaagtagaaaacctggatgcctcttcctgtgtggactaggagcccagaagcctgtagcttcagcccattttaccttttacttattctatttctcatccacagagatgt

SEQ ID NO: 37808 - DNA, 694 bp, Homo sapiens
tattgagccaatatatcttttcctctgtgtttttttaaatcaaaatcaagttgatttgagtttattgtcacttgcaacaaaatattactggatttccacaaattcacaatcagttggggaaaagtcgatatgtgaacaggtaaacactgaaaatagatggtttgtatgatacaggtgaacacgagggcctttaaccagtgtgggtgttgaggtgggggaaagtgtccacttccctccaggagacaatatctggtctgaatcttgaaatatacttagcagttgtcatgatgtatctatcaaacagaggatggcagagagacattccagggagaagagaaggcatgagtcaaggcatggcgtgaaatgggatgatagtttctgggaactacamgtcactcatactagctttaatgcagcctggatggtgaaggcaaagggagagatgctacagagaaaggcacaggccatactgtgaagtgtccaatagtttgtcctaacaagataatgttatcctgggaattttgagagagcattgagaaattaatttttccactttaaaaatgaacattctaatccttccccagcctatgtaccataaaagatgatggtgaaggtctcttagtaaaatgtctgtgaaaatgctttgaaccaggtataaattggctaattatactatggaaaacagaaactggaa

SEQ ID NO: 37809 - DNA, 555 bp, Homo sapiens
gggtttccatggcaacaggcacatgtttcagcatgttacatgtaaaggggatgtacctgacagtcttcctggtcaggaaaatcggatcatgtgccgcttcttccctggttgtctaaatgggctctaccatgagtcagtctcccttccttccatatgatacccacagagaaagatgctggaagtcagcgtccaagatcctgaaacmaccatggatcccagtggagacatctgagaatagagtctgctccaaagacagctggcatggttgcaatacatcagaaactgaggctgagtctccttccctgctcttacttggctcctggccttggctgggctttgagggccatgaaatgaaaatattttctggatattggccattgtgattgtgttccaaggactgtgatccatgagggagctggtaccaaagaaaactccatgcgtgagcctgggatattcctcccctgcgatgtctgtctattgctcatatgaccaacctgagagctgagtgtttacagtttataggatcatggagtcatattcaaagtcaatctggtt

SEQ ID NO: 37810 - DNA, 555 bp, Homo sapiens
gggtttccatggcaacaggcacatgtttcagcatgttacatgtaaaggggatgtacctgacagtcttcctggtcaggaaaatcggatcatgtgccgcttcttccctggttgtctaaatgggctctaccatgagtcagtctcccttccttccatatgatacccacagagaaagatgctggaagtcagcgtccaagatcctgaaacaaccatggatcccagtggagacatctgagaatagagtctgctccaaagacagctggcatggttgcaatacatcagaaactgaggctgagtctccttccctgctcttacttggctcctggccttggctgggctttgagggccatgaaatgaaaakattttctggatattggccattgtgattgtgttccaaggactgtgatccatgagggagctggtaccaaagaaaactccatgcgtgagcctgggatattcctcccctgcgatgtctgtctattgctcatatgaccaacctgagagctgagtgtttacagtttataggatcatggagtcatattcaaagtcaatctggtt

SEQ ID NO: 37811 - DNA, 1333 bp, Homo sapiens
aaaaaaaaaaaaggttgtgtggttgactcagtgtctcctaggtcttcttttgcatccaactgctttggaagacatatgcaccctctgctgctccatagagtaagttgaaagtctggctttcaccctgtcagggagctttgcagatgtccagtggcactagcgactgcaggactaagtctacttaatgcaaggatgaaagattagcaggtcaattttcccacattaactaaagttctgatctctactcactattatttgtaatacacccatcattgtacctttcatcctcctgacgttctgtcctgagaaaggttaaaaggcttgtacggttttacagtttttctttcatttcttttcctttctttttttatctttcctccaggaaagctcagcatcttcttgttaaaagaaaaactttagacaaatttaacagagtttatttggccaaagaacaattcatgtattgaatggggcagtgcccagaaccagaagaggtggacagtgagcttttaaaggctgaacacagaatcaaagtagaagcatcacctgattggatacatctagatgttggctctattggagcatggtctgagcaatgggcggcctgtgcttggctgattctcagctgctcatgattggcaaaaacttcgctgtttgttacaaaatatattcccaaattatgtttcagttttatacttagtaactcctgcttatttaatttaacactacagtattaacatgaagccttgtgaatatgcaagactggtattgagggactaaaaaagattgaagtttctggtatagtactagtgaaaggtcttagaaaatgaaggtcatgttgcatttcgaatttagcttttcacagtggcttgtccatgggagattagctgtttttagaggttcagtgctgtttttaatgagcccttgaattattaagtgtgggttgtacaaaccttaataagcaataataatgttctcygcagttgacattgatctgacctaaggcatgcgatggtccctcatgactgaacatgaccccaccaaagctgaacaaattttacgtagcatataaattacattgaataaaagaagactttgatacctgctttatgctcacttaagccaagcaaaaattcattagacaagcatttatgtcattgaagtatggattaactttccgtgattttcctgtgcttctcagctattacctcacattagaatttataattgcaaagggagctaagttccaattgagaactccacagtgtgaccaatgtcaggcagatggtgccagctcagatgttacacattctgctaatctttatgtagtttg

SEQ ID NO: 37812 - DNA, 602 bp, Homo sapiens
gtggacccttgatagaaaaagaaaataaatgttgaacctatccatgcttttccttcatgtccgaagttctgaattttttcttaaattccaaagtaataaaaaccattttattcccacaattattaaaccagtatataaagtaaccattccttttataaackttgagtctcccctgccatggcttacagcatgagaagggaggagaagggcttcatgatagatcagtactttacagccttcctacagcaatatgtgtataccaatggcatagctgaggagtgttttcctgactgttctgagtattatctaatcttacaaaaacagaacctctgttcatcaacattgagtgatatacgaatatctagactcctattgcagaaaactgctcctagattattgggttatttaataatggcataatatttttaaggacaagtgtttatagttatatggtactggggatgtgataccatcattatatacatattcaaggccaaggaaatccacaaaattttaagaagacagcagggactggtctccctcttccattatggatgcagccttctcaccctgcattcaactctattaaatagctgaaaaat

SEQ ID NO: 37813 - DNA, 602 bp, Homo sapiens
gtggacccttgatagaaaaagaaaataaatgttgaacctatccatgcttttccttcatgtccgaagttctgaattttttcttaaattccaaagtaataaaaaccattttattcccacaattattaaaccagtatataaagtaaccattccttttataaacgttgagtctcccctgccatggcttacagcatgagaagggaggagaagggcttcatgatagatcagtactttwcagccttcctacagcaatatgtgtataccaatggcatagctgaggagtgttttcctgactgttctgagtattatctaatcttacaaaaacagaacctctgttcatcaacattgagtgatatacgaatatctagactcctattgcagaaaactgctcctagattattgggttatttaataatggcataatatttttaaggacaagtgtttatagttatatggtactggggatgtgataccatcattatatacatattcaaggccaaggaaatccacaaaattttaagaagacagcagggactggtctccctcttccattatggatgcagccttctcaccctgcattcaactctattaaatagctgaaaaat

SEQ ID NO: 37814 - DNA, 602 bp, Homo sapiens
gtggacccttgatagaaaaagaaaataaatgttgaacctatccatgcttttccttcatgtccgaagttctgaattttttcttaaattccaaagtaataaaaaccattttattcccacaattattaaaccagtatataaagtaaccattccttttataaacgttgagtctcccctgccatggcttacagcatgagaagggaggagaagggcttcatgatagatcagtactttacagccttcctacagcaatatgtgtataccaatggcatagctgaggagtgttttcctgactgttctgagtattatctaatcttacaamaacagaacctctgttcatcaacattgagtgatatacgaatatctagactcctattgcagaaaactgctcctagattattgggttatttaataatggcataatatttttaaggacaagtgtttatagttatatggtactggggatgtgataccatcattatatacatattcaaggccaaggaaatccacaaaattttaagaagacagcagggactggtctccctcttccattatggatgcagccttctcaccctgcattcaactctattaaatagctgaaaaat

SEQ ID NO: 37815 - DNA, 631 bp, Homo sapiens
ggtggttgccaggggctagggaggagagagggatgaacaggcagggcacacaggactggtgctcccagggtggtgaaactactctgtatgagactgtgatggtagatacatgtcattatacattcatccaaagccatggaatctacagctccaagactgaaccctaatgtaaactatggactttgggtaataatgatgtgtcaatatatgtttattgattgcaacaaacagaccattctgttgaaagatcttggtagtcgggaggctgtgcgtgtggggcaggaggtatatgggaaatctctgtgctttctgcgtaattttgctgtgaaccttaaactgctctataaaatggtattatgaaacagcaacaacattcaaaccaaagtgaggagacacagcactgcattctactcatgacatctagtaaagtgtcttttgacctatagtacttcttgaagttctttgcagcctgtcggcttgggcagcagtcactgggcagcaggggagaatccctcatcaagcaggaggctctgatactctaagaatgggattttccctggcggcttcatagctgtgaaagcactgacttcaygttcctgttttcttccttctggccatgtgctgcgctgtg

SEQ ID NO: 37816 - DNA, 617 bp, Homo sapiens
ttttcctttttttcttttcttttctttttctttttctttctttctttcttcttttttttttttttttttgagacagttttgctcttgttgcccaggctggagtgcaatggcacgatctcggctcactgcaacctccgcctgctgrgttcaagtgattctcctgcctcagcttcccgagtagctgggattacaggcatgtgccaccacgctcgcctaattttgtatttttagtagagacaagatttctccatgttggtgaggctggtcttgaactcctgacctcaggtgatctgcccgccttggcctcccaaaatgttgagattacaggtgtgagccaccgtgcctgacctctgaaggaattttctaatgaggaaaaaaaatttataactattgttattcttttggaggttaaagttttaccttagtggtattatcctttaccatctggtaaaatttgtgcttagatttttgagttttgaagtgttttcattttattttatttggtccattttaggcattgtgtggctgctcaattaatgtaccaacactggatggaagaaacatacctatgtcagtaaatgatattgtgaaacccggaatgaggagaagaattattg

SEQ ID NO: 37817 - DNA, 534 bp, Homo sapiens
cgctggcacgtgagctccctgagaaccgggctctgacctgtttcctcctgtttgccaagtgcctggcagatctcagcctgaaagatatcctcagtaaacgcctagcacatcaaactgaataaattcagcattcatggttagcaaagggctcgagcttctgccccatgcagctccctcgagtgccatggctaggscttcccagcattacttccctgttatacaaagggaggaccaggcttgtgagctcccctatcagatgtggactttgactttcacctctggggatgggctgccctgtgcaggtctgcacctccctctggccttccaaaggctgctgctcttcagattttgccagccatcttgttgaggggtcctgccgaggggcttccccagaggcggttatgctcctaaatgcactggtcccaaactgctgcctcagtgagccataggaaccttccctgggccccacccctccagcaaattcctctcccggagcccctcccttcccctcccctcccagcacttggtggcatc

SEQ ID NO: 37818 - DNA, 534 bp, Homo sapiens
cgctggcacgtgagctccctgagaaccgggctctgacctgtttcctcctgtttgccaagtgcctggcagatctcagcctgaaagatatcctcagtaaacgcctagcacatcaaactgaataaattcagcattcatggttagcaaagggctcgagcttctgccccatgcagctccctcgagtgccatggctaggccttcccagcattacttccctgttatacaaagggaggaccaggcttgtgagctcccctatcagatgtggactttgactttcacctctggggatgggctgccctgtgcaggtctgcacctccctctggccttccaaaggctgctgctcttcagattttgccagccatcttgttgaggggtcctgccgaggggcttccccagaggcggttatgctcctaaatgcactggtcccaaactgctgcctcartgagccataggaaccttccctgggccccacccctccagcaaattcctctcccggagcccctcccttcccctcccctcccagcacttggtggcatc

SEQ ID NO: 37819 - DNA, 533 bp, Homo sapiens
gaaaacaccaaatatttttcaagttagagatgttttaataaaaacagtcatattgaactggaagcagccaaataaaatggccctttatttcacagttgagaatttgaaattggaaggtaattaacatatgtaaggatgatgtatttgctgcctggcttataggaakgagccaaggtgttttttgagggatgttgttgctgtgtatgtcccacctattttgcttccttaatgaacaatgcaagtttgagacagaaatatttgagaacatttttatcagttgcgacattttgatagtgaacattttatatcttctgtcaacttaaaatgtttgcatcttctgtctgcttaaaatgtttaatttgttatagccaaataatttggctataattgagaatttaatttatcaaattaaattgctttttttccctttagactttcttcagtcacatctgaataaatcacttagaagtaagctagatgtaatataatgaaatgcttaaaagggctgtgtatcttcatattacacttacagt

SEQ ID NO: 37820 - DNA, 533 bp, Homo sapiens
gaaaacaccaaatatttttcaagttagagatgttttaataaaaacagtcatattgaactggaagcagccaaataaaatggccctttatttcacagttgagaatttgaaattggaaggtaattaacatatgtaaggatgatgtatttgctgcctggcttataggaaggagccaaggtgttttttgagggatgttgttgctgtgtatgtcccacctattttgcttccttaatgaacaatgcaagtttgagacagaaatatttgagaacatttttatcagttgcgacattttgatagtgaacattttatatcttctgtcaacttaaaatgtttgcatcttctgtctgcttaaaatgtttaatttgttatagccaaataatttggctataattgakaatttaatttatcaaattaaattgctttttttccctttagactttcttcagtcacatctgaataaatcacttagaagtaagctagatgtaatataatgaaatgcttaaaagggctgtgtatcttcatattacacttacagt

SEQ ID NO: 37821 - DNA, 562 bp, Homo sapiens
tgcaaaccacaaagggctgaatcagtcaaggagaactgcagggcgggatgaacagggaccaacggaacatttggataagctgttgagaagaaaggagaattcagagaaaaagaactgtcagtgaggtcataataggaactgttacagtgaactaaatatggcctgggaaggactctgtacttctagatttgagtccctgtggacaaactgcaacctmacttaataggtagaaagactgaaaacctaacttaggagtatgcgcctgtaactatagctgagtcctgaccaatcccaacagccaaacttctgccactcacacactgctgagtgttcagctgtgttcaaataaggcaaatgctgagcactgtaaccagtccagttgtttctggacctcactgctgagaactgtaacaggctcaggtgcttctggacctcactcctcacttcagacttctgtacatcacgttccctttattgtctataaatcttccaccatgtagctgtgctggagtctcaccgaatctgctgtgattctgggggctgcctgattcgtgaatcattc

SEQ ID NO: 37822 - DNA, 562 bp, Homo sapiens
tgcaaaccacaaagggctgaatcagtcaaggagaactgcagggcgggatgaacagggaccaacggaacatttggataagctgttgagaagaaaggagaattcagagaaaaagaactgtcagtgaggtcataataggaactgttacagtgaactaaatatggcctgggaaggactctgtacttctagatttgagtccctgtggacaaactgcaacctcacttaataggtagaaagactgaaaacctaacttaggagtatgcgcctgtaactatagctgagtcctgaccaatcccaacagccaaacttctgccactcacacactgctgagtgttcagctgtgttcaaataaggcaaatgctgagcactgtaaccagtccagttgtttctggacctcactgctgagaactgtaacagrctcaggtgcttctggacctcactcctcacttcagacttctgtacatcacgttccctttattgtctataaatcttccaccatgtagctgtgctggagtctcaccgaatctgctgtgattctgggggctgcctgattcgtgaatcattc

SEQ ID NO: 37823 - DNA, 562 bp, Homo sapiens
tgcaaaccacaaagggctgaatcagtcaaggagaactgcagggcgggatgaacagggaccaacggaacatttggataagctgttgagaagaaaggagaattcagagaaaaagaactgtcagtgaggtcataataggaactgttacagtgaactaaatatggcctgggaaggactctgtacttctagatttgagtccctgtggacaaactgcaacctcacttaataggtagaaagactgaaaacctaacttaggagtatgcgcctgtaactatagctgagtcctgaccaatcccaacagccaaacttctgccactcacacactgctgagtgttcagctgtgttcaaataaggcaaatgctgagcactgtaaccagtccagttgtttctggacctcactgctgagaactgtaacaggctcaggtgcttctggacctcactcctcacttcagacttctgtacatcacgttccctttattgtctataaatcttccaccatgtagctgtgctggagtctcaccraatctgctgtgattctgggggctgcctgattcgtgaatcattc

SEQ ID NO: 37824 - DNA, 1477 bp, Homo sapiens
tgcatctaagctgagttctcatcagagccaacttcaattataaacaactgagatgatgccagaggccagaatccctgagaacccaatttgctgtcatcaccgcagctgaaacaaggcgcttggcatctagaaaagctgatctgtaggaaatttccaatagagttcaattttttttctaagtttaaagtgtacaatatcatcaaggtcagacactcgaggtaaaactaggcttgtgtttaaatataataaaaatatttgaggaatagtaagagtggtgactacttttacacaggaatgtttcaaataaattgtttttttcttgtgccttttaaattttgtgatttgtcaatgagatgctgacatatttttaatgaagcatgccttgtaaaataataagtgaatgaaaactacacagtaatatttacatcaacaaagctagaagactgtatgtctcaagaggctccattatctacccagtggccacttgaccaaattaagatccaaataccaaaaagaaaagtaattaaaatttgtgttgtatgccttataagaccaaacctataaaatgaggggaaacttcacaattacttgtaatttgctctgtggaattgtaacagatggattataaagatgattccatgataaacatctaaatgtggttactaccttctgtgctttcttggttcatatttttattttttttctttataaacagacaattcattcttatctatggcaatgcaaacttttcagatgtattgaatatgtcatagtttttttctattgtaggcatctctaaaaaaggtatagaaaacaaacagagaaaagtctggtgttggaaaggagagagaaataaagcttgtaaaggaatgaagattagagctttctggagataaaaattcttagaagatacaaaagctagttactgaattagatgaaggttctttttcagtttttcccagttgttcacctcttagaaggcacatattcacagcagaaaagaaaaaaagggttaaaaagaaaatacctcggtgtagtgagactgtaatttcatgagggcattactgaagactcactttttccagcatcactcagcatggtattatgcatgtgtgtaatgtaaaggaaagtgaatatgcattcttggatgggtgatcaaatcgtaattccagaatgtaatcagaagctgattcattatcctcttgagatttcacaatcttttcatcaggaattaaaattcagaagagggtaaatgtatctaatcatttgaaagttaaaaattagtggatggaggcaacatggccgaataggaacagctccagtctacacctcccagcgtcagtgatgcagaagacaggtgatatctgcatttccaactgaggtacmaggttcatctcaatggggagtgctggacagtgggtgcagcacaccatgcatgagccaaagcagggcaaggcatcacctcacctgggaagca

SEQ ID NO: 37825 - DNA, 615 bp, Homo sapiens
tggtacattgttacatctcagataattaaaaccttgaaaaactcatgagagatcacaagtagaaccttgatctgaaacatggcatgtggcgatttatattgagtattaggttaaaaatgcaagaaaggagcatagttaatattttacrttaaagctaaaactataattgcctacttaacattttcagtaattaggttgtcactttttgttcttaaccaagaaatcaattagttttagtccataaacagttagaactgatatacacatccgtttttccttactcattttaaacagctatctgaaataggaagcgtaatataatctttaaagaatctgaaaacatgacagaaatgtttaaactataaaaacatattgtatatgttagcatattgtatacattgcatattaacataagctagaatcattgacataaatttatatagacaaaaggtagaaaatatgacaatgttcttcttgttttttgtctttgcatatttctttattggcgcttgtcaaacgtgacccactaactcctgaatgctttctctctccccatggattcctaaggatgtcaccacagttttggccagatgtacaggtcacaggggactgaat

SEQ ID NO: 37826 - DNA, 615 bp, Homo sapiens
tggtacattgttacatctcagataattaaaaccttgaaaaactcatgagagatcacaagtagaaccttgatctgaaacatggcatgtggcgatttatattgagtattaggttaaaaatgcaagaaaggagcatagttaatattttacgttaaagctaaaactataattgcctacttaayattttcagtaattaggttgtcactttttgttcttaaccaagaaatcaattagttttagtccataaacagttagaactgatatacacatccgtttttccttactcattttaaacagctatctgaaataggaagcgtaatataatctttaaagaatctgaaaacatgacagaaatgtttaaactataaaaacatattgtatatgttagcatattgtatacattgcatattaacataagctagaatcattgacataaatttatatagacaaaaggtagaaaatatgacaatgttcttcttgttttttgtctttgcatatttctttattggcgcttgtcaaacgtgacccactaactcctgaatgctttctctctccccatggattcctaaggatgtcaccacagttttggccagatgtacaggtcacaggggactgaat

SEQ ID NO: 37827 - DNA, 615 bp, Homo sapiens
tggtacattgttacatctcagataattaaaaccttgaaaaactcatgagagatcacaagtagaaccttgatctgaaacatggcatgtggcgatttatattgagtattaggttaaaaatgcaagaaaggagcatagttaatattttacgttaaagctaaaactataattgcctacttaacattttcagtaattaggttgtcactttttgttcttaaccaagaaatcaattagttttagtccataaacagttagaactgatatacacatccgtttttccttactcattttaaacagctatctgaaataggaagcgtaatataatctttaaagaatctgaaaacatgacagaaatgtttaaactataaamacatattgtatatgttagcatattgtatacattgcatattaacataagctagaatcattgacataaatttatatagacaaaaggtagaaaatatgacaatgttcttcttgttttttgtctttgcatatttctttattggcgcttgtcaaacgtgacccactaactcctgaatgctttctctctccccatggattcctaaggatgtcaccacagttttggccagatgtacaggtcacaggggactgaat

SEQ ID NO: 37828 - DNA, 615 bp, Homo sapiens
tggtacattgttacatctcagataattaaaaccttgaaaaactcatgagagatcacaagtagaaccttgatctgaaacatggcatgtggcgatttatattgagtattaggttaaaaatgcaagaaaggagcatagttaatattttacgttaaagctaaaactataattgcctacttaacattttcagtaattaggttgtcactttttgttcttaaccaagaaatcaattagttttagtccataaacagttagaactgatatacacatccgtttttccttactcattttaaacagctatctgaaataggaagcgtaatataatctttaaagaatctgaaaacatgacagaaatgtttaaactataaaaayatattgtatatgttagcatattgtatacattgcatattaacataagctagaatcattgacataaatttatatagacaaaaggtagaaaatatgacaatgttcttcttgttttttgtctttgcatatttctttattggcgcttgtcaaacgtgacccactaactcctgaatgctttctctctccccatggattcctaaggatgtcaccacagttttggccagatgtacaggtcacaggggactgaat

SEQ ID NO: 37829 - DNA, 615 bp, Homo sapiens
tggtacattgttacatctcagataattaaaaccttgaaaaactcatgagagatcacaagtagaaccttgatctgaaacatggcatgtggcgatttatattgagtattaggttaaaaatgcaagaaaggagcatagttaatattttacgttaaagctaaaactataattgcctacttaacattttcagtaattaggttgtcactttttgttcttaaccaagaaatcaattagttttagtccataaacagttagaactgatatacacatccgtttttccttactcattttaaacagctatctgaaataggaagcgtaatataatctttaaagaatctgaaaacatgacagaaatgtttaaactataaaaacatattgtatatgttagcatattgtatacattgcatattaacataagctagaatcattgacataaatttatatagacaaaaggtagaaaatatgacaatgttcttcttgttttytgtctttgcatatttctttattggcgcttgtcaaacgtgacccactaactcctgaatgctttctctctccccatggattcctaaggatgtcaccacagttttggccagatgtacaggtcacaggggactgaat

SEQ ID NO: 37830 - DNA, 1239 bp, Homo sapiens
tgtaatattatgctcactcatgaccctggacacactctttctatgtctaaattcaagtctccttatcatcggaattgacttccaagtgatttaaattagcttcccgtaagaagacacagttatgccacaggagttttaccctttaaatgactggcctgtaataaagattttaggttttatcaagataatccatgtgttgcctttatttttttttaattacttgggaaaactgagggttttcagttttcacatccatgtaaccttctatgttgcttttgatgtcttttggttgtcatgctaattaaatgaatgactgttatttaaaaatgacatgtggctgtgtgcagcggctcwtgtctgtaattccagccctttgggaggccaaggtgggtggatcacttgagcccaggagttcaagtccagcctgggcaaaatggcaaaaccccatctctactaaaaatacaaaagctagctaggtgtggtagcaagtgctcatagtcctggctacttgggagactaaggtggaggatcacctgagcctgggaggttgaggctgcattgagccatgatttcaccactgcactccagcctgggcaatagggtgagaccctgtctcaaatatataataaaataaaaaacaataaactgtcattctgttttggtcaaatgttttcaatttttttacatctttgctaaaatttagttgataactttgtatgggaagcattgccaaaagataagtctaaatcttcttttttttttctctaagacagaatcttgctttgtcacccaggctggagtgcagtggcgtgatctaggttcactgcaacctctgccccaaggttcaagcgattctcctgcctcaacctcccaagtagctgggactacagacacatgccaccatgcccggctaattttgtatttttagtagagacaagatttctccatgttggcgaggctggtgtcgaagtcctgacctctgatgatctgtccaacttggcctcccaaagtgttggaattacaggcatgagccactgtgcctggtctaaatcttcttttggttacatttacaggtatattattaatataaatattttaaatgttatataaattataaaaatctaatatggtatcagtcataattttgatgatgttaaatattctctaaagttgtatatgtatagatatattattaatataaatattctaaagattatataaaatttgtggaagtctgat

SEQ ID NO: 37831 - DNA, 1212 bp, Homo sapiens
aagtgttccctagtgaatctgaatataatatatttttaaaaacttcttttatcctgtcaggaatgagatgtattttttgaaggactacttaaactagcaattacaattcgattattatgattatagaatctcgggatttctcttccttcttgtcaaggtctttacttgatgtttgtctcattaaaaaaaaaatgagactgattacactctactcaagactgaagacatgtactttaacctgtctctgttaccagtaaaccaaagccttaactttcagaatctgtcagggacactgtgtggtccctggatcaaccacccatgggcttatgaatgtgttgacygctggcatatgagaagtaattgtctattaggttatgtgactcttcctctttctatttataactccaatgtttctgaacactgaagtaattcatcgaaattactttccaggattagacaaaccttacctgcacaccaaggagatgaattttggcctatgtttggcagaagtcacttgcaatggtggggagtaacctctcatgaacgtataattagaaatctgtcaaccaaccactctaggtaacttagcaaatgaactagctgaagccatagctaccaaacaaagatctttagactctttagccaggatagtcatggatgatggaataactttaggctacatagtggtgaaacagggagaaattcatatggcagctagctaacacatcatgttgtgtttagatccatgcatcttctgaagttgaaacacatgtaaaaaaataagacaatatgagaattaattatgacaaatcctagggaagaggctgaaagagctgtaacacaaacagggctgagacatgccccttgctagccacattgtgggcaaagagaaggaaagaagagctgtgaccctttgggaagcccagacctgggagctccccgagccagggctgtgattccctctttggggccctgtggttcctggtatctccaagcttctgggtgccactgtgttcccagtgtgccagctgtggaagctgcttgcggtgcccgtggtccagccacagacttgtggagagctggtacccatgttggcacctggagttacctgctccactgcagcagccaggaagtctgactgcacagtggccagaccccatgcttgctcacacaccccttgccactccgcgcagtctcccttggcaaacatgg

SEQ ID NO: 37832 - DNA, 1212 bp, Homo sapiens
aagtgttccctagtgaatctgaatataatatatttttaaaaacttcttttatcctgtcaggaatgagatgtattttttgaaggactacttaaactagcaattacaattcgattattatgattatagaatctcgggatttctcttccttcttgtcaaggtctttacttgatgtttgtctcattaaaaaaaaaatgagactgattacactctactcaagactgaagacatgtactttaacctgtctctgttaccagtaaaccaaagccttaactttcagaatctgtcagggacactgtgtggtccctggatcaaccacccatgggcttatgaatgtgttgactgctggcatatgagaagtaattgtctattaggttatgtgactcttcctytttctatttataactccaatgtttctgaacactgaagtaattcatcgaaattactttccaggattagacaaaccttacctgcacaccaaggagatgaattttggcctatgtttggcagaagtcacttgcaatggtggggagtaacctctcatgaacgtataattagaaatctgtcaaccaaccactctaggtaacttagcaaatgaactagctgaagccatagctaccaaacaaagatctttagactctttagccaggatagtcatggatgatggaataactttaggctacatagtggtgaaacagggagaaattcatatggcagctagctaacacatcatgttgtgtttagatccatgcatcttctgaagttgaaacacatgtaaaaaaataagacaatatgagaattaattatgacaaatcctagggaagaggctgaaagagctgtaacacaaacagggctgagacatgccccttgctagccacattgtgggcaaagagaaggaaagaagagctgtgaccctttgggaagcccagacctgggagctccccgagccagggctgtgattccctctttggggccctgtggttcctggtatctccaagcttctgggtgccactgtgttcccagtgtgccagctgtggaagctgcttgcggtgcccgtggtccagccacagacttgtggagagctggtacccatgttggcacctggagttacctgctccactgcagcagccaggaagtctgactgcacagtggccagaccccatgcttgctcacacaccccttgccactccgcgcagtctcccttggcaaacatgg

SEQ ID NO: 37833 - DNA, 1212 bp, Homo sapiens
aagtgttccctagtgaatctgaatataatatatttttaaaaacttcttttatcctgtcaggaatgagatgtattttttgaaggactacttaaactagcaattacaattcgattattatgattatagaatctcgggatttctcttccttcttgtcaaggtctttacttgatgtttgtctcattaaaaaaaaaatgagactgattacactctactcaagactgaagacatgtactttaacctgtctctgttaccagtaaaccaaagccttaactttcagaatctgtcagggacactgtgtggtccctggatcaaccacccatgggcttatgaatgtgttgactgctggcatatgagaagtaattgtctattaggttatgtgactcttcctctttctatttataactccaatgtttctgaacactgaagtaattcatcgaaattactttccaggattagacaaaccwtacctgcacaccaaggagatgaattttggcctatgtttggcagaagtcacttgcaatggtggggagtaacctctcatgaacgtataattagaaatctgtcaaccaaccactctaggtaacttagcaaatgaactagctgaagccatagctaccaaacaaagatctttagactctttagccaggatagtcatggatgatggaataactttaggctacatagtggtgaaacagggagaaattcatatggcagctagctaacacatcatgttgtgtttagatccatgcatcttctgaagttgaaacacatgtaaaaaaataagacaatatgagaattaattatgacaaatcctagggaagaggctgaaagagctgtaacacaaacagggctgagacatgccccttgctagccacattgtgggcaaagagaaggaaagaagagctgtgaccctttgggaagcccagacctgggagctccccgagccagggctgtgattccctctttggggccctgtggttcctggtatctccaagcttctgggtgccactgtgttcccagtgtgccagctgtggaagctgcttgcggtgcccgtggtccagccacagacttgtggagagctggtacccatgttggcacctggagttacctgctccactgcagcagccaggaagtctgactgcacagtggccagaccccatgcttgctcacacaccccttgccactccgcgcagtctcccttggcaaacatgg

SEQ ID NO: 37834 - DNA, 1212 bp, Homo sapiens
aagtgttccctagtgaatctgaatataatatatttttaaaaacttcttttatcctgtcaggaatgagatgtattttttgaaggactacttaaactagcaattacaattcgattattatgattatagaatctcgggatttctcttccttcttgtcaaggtctttacttgatgtttgtctcattaaaaaaaaaatgagactgattacactctactcaagactgaagacatgtactttaacctgtctctgttaccagtaaaccaaagccttaactttcagaatctgtcagggacactgtgtggtccctggatcaaccacccatgggcttatgaatgtgttgactgctggcatatgagaagtaattgtctattaggttatgtgactcttcctctttctatttataactccaatgtttctgaacactgaagtaattcatcgaaattactttccaggattagacaaaccttacctgcacaccaaggagatgaattttggcctatgtttggcagaagtcacttgcaatggtggggagtaacctctcatgaacgtataattagaaatctgtcaaccaaccactctaggtaacttagcaaatgaactagctgaagccatagctaccaaacaaagatctttagactctttagccagkatagtcatggatgatggaataactttaggctacatagtggtgaaacagggagaaattcatatggcagctagctaacacatcatgttgtgtttagatccatgcatcttctgaagttgaaacacatgtaaaaaaataagacaatatgagaattaattatgacaaatcctagggaagaggctgaaagagctgtaacacaaacagggctgagacatgccccttgctagccacattgtgggcaaagagaaggaaagaagagctgtgaccctttgggaagcccagacctgggagctccccgagccagggctgtgattccctctttggggccctgtggttcctggtatctccaagcttctgggtgccactgtgttcccagtgtgccagctgtggaagctgcttgcggtgcccgtggtccagccacagacttgtggagagctggtacccatgttggcacctggagttacctgctccactgcagcagccaggaagtctgactgcacagtggccagaccccatgcttgctcacacaccccttgccactccgcgcagtctcccttggcaaacatgg

SEQ ID NO: 37835 - DNA, 1212 bp, Homo sapiens
aagtgttccctagtgaatctgaatataatatatttttaaaaacttcttttatcctgtcaggaatgagatgtattttttgaaggactacttaaactagcaattacaattcgattattatgattatagaatctcgggatttctcttccttcttgtcaaggtctttacttgatgtttgtctcattaaaaaaaaaatgagactgattacactctactcaagactgaagacatgtactttaacctgtctctgttaccagtaaaccaaagccttaactttcagaatctgtcagggacactgtgtggtccctggatcaaccacccatgggcttatgaatgtgttgactgctggcatatgagaagtaattgtctattaggttatgtgactcttcctctttctatttataactccaatgtttctgaacactgaagtaattcatcgaaattactttccaggattagacaaaccttacctgcacaccaaggagatgaattttggcctatgtttggcagaagtcacttgcaatggtggggagtaacctctcatgaacgtataattagaaatctgtcaaccaaccactctaggtaacttagcaaatgaactagctgaagccatagctaccaaacaaagatctttagactctttagccaggatagtcatggatgatggaataactttaggctacatagtggtgaaacagggagaaattcatatggcagctagctaacacatcatgttgtgtttagatccatgcatcttctgaagttgaaacacatgtaaaaaaataagacaatatgagaattaattatgacaaatcctagggaagaggctgaaagagctgtaacacaaacagggctgagacatgccccttgctagccacattgtgggcaaagagaaggaaagaagagctgtgaccctttgggaagcccagacctgggagctccccgagccagggctgtgattccctctttggggccctgtggttcctggtatctccaagmttctgggtgccactgtgttcccagtgtgccagctgtggaagctgcttgcggtgcccgtggtccagccacagacttgtggagagctggtacccatgttggcacctggagttacctgctccactgcagcagccaggaagtctgactgcacagtggccagaccccatgcttgctcacacaccccttgccactccgcgcagtctcccttggcaaacatgg

SEQ ID NO: 37836 - DNA, 1307 bp, Homo sapiens
ccgtgttagccaggatggtctcgatttcctgacctcgtgatccgcccgactcggcctcccaaagtgctgggattacaggtatgagccacttcgcccggcctgtatcccatagggtttggtttgactttaaagtttttcttttctcaaaaactcagtgtcgtggtaccggcttctagtgctctgggcagtgagacccttttacttgataactggtagctgggacaacttggcaatgtaaataaataaacggcatctagattaaaaaggaagaagtacagttatctttatgtacagatgacatgatcttgcatttagaaaatcataagaaatttactaaaaagtggtaggactcattaacaaatttaggaatgtaacactatgtaagattggtatacaaaaataactgtatttctttaccaagaaatcaagaatccaaaaatggaattacaaaaataaatcttgttacaatagaattaaagctggggtaactttaacataagaagcttaaacttgaacactaaaaacatggttagtgttggaaacacccaggtaccatccctgagccttctctccttggctctgaggactttaccttcatggggtgargaaaggggttgcattcttggcttttacataatattaggtgggttcagggtgaggtatctgcaagtcaaatgagtattacaatctctacttttatgtataagagactgaggaccacaaagagagagaatgacaatccatatcctggaaggcgaattgtcaggcactgatttcccctatgtaacccctgccagtcatcgtgtattcaaaggatccccagataccttaccaataggtgttcaagagagaggcctgtaatctaggcttctgagaaaacaaggctagagtttccaatattggagaaaacagggctctgggaagattaaggttgagttttctggatctgcggaatagagtcactgaggaccaattgcaagatcagaggagaggaaagaacaagtcaggtcatgcttaggaaaagagaataccagggataggttttaggcaagagtcacactgaggaagggcaggttcttggcatcgctcaggaaggaatccaaaagcaagcctgtggtggaagaaagcagctctacaggggcactggcggtgttacagccctgcttctgctcctgcaggacagggagccctccgtgggttgtgctcccagagtagcagcctaggggtggcttgcagtcatttttatatttcacttttaatggcatgctaattaaggggagggttattcagaaatagctagaaatggg

SEQ ID NO: 37837 - DNA, 1307 bp, Homo sapiens
ccgtgttagccaggatggtctcgatttcctgacctcgtgatccgcccgactcggcctcccaaagtgctgggattacaggtatgagccacttcgcccggcctgtatcccatagggtttggtttgactttaaagtttttcttttctcaaaaactcagtgtcgtggtaccggcttctagtgctctgggcagtgagacccttttacttgataactggtagctgggacaacttggcaatgtaaataaataaacggcatctagattaaaaaggaagaagtacagttatctttatgtacagatgacatgatcttgcatttagaaaatcataagaaatttactaaaaagtggtaggactcattaacaaatttaggaatgtaacactatgtaagattggtatacaaaaataactgtatttctttaccaagaaatcaagaatccaaaaatggaattacaaaaataaatcttgttacaatagaattaaagctggggtaactttaacataagaagcttaaacttgaacactaaaaacatggttagtgttggaaacacccaggtaccatccctgagccttctctccttggctctgaggactttaccttcatggggtgaagaaagggkttgcattcttggcttttacataatattaggtgggttcagggtgaggtatctgcaagtcaaatgagtattacaatctctacttttatgtataagagactgaggaccacaaagagagagaatgacaatccatatcctggaaggcgaattgtcaggcactgatttcccctatgtaacccctgccagtcatcgtgtattcaaaggatccccagataccttaccaataggtgttcaagagagaggcctgtaatctaggcttctgagaaaacaaggctagagtttccaatattggagaaaacagggctctgggaagattaaggttgagttttctggatctgcggaatagagtcactgaggaccaattgcaagatcagaggagaggaaagaacaagtcaggtcatgcttaggaaaagagaataccagggataggttttaggcaagagtcacactgaggaagggcaggttcttggcatcgctcaggaaggaatccaaaagcaagcctgtggtggaagaaagcagctctacaggggcactggcggtgttacagccctgcttctgctcctgcaggacagggagccctccgtgggttgtgctcccagagtagcagcctaggggtggcttgcagtcatttttatatttcacttttaatggcatgctaattaaggggagggttattcagaaatagctagaaatggg

SEQ ID NO: 37838 - DNA, 631 bp, Homo sapiens
ctactaaaaatacaaaaattagtcaagcgtggtggcgcgcctgtaatcccagctactcaggaggctgaggcaggagaatcgcttgaacccgggaagcggaggttgcagtgagccgagatcgcaccattgcactccagcctgggcgacagagtgagactccgtctcaaaaaaaaaaaaaaaaaaaaagttactcattaacagcatagaccaattggcctctattgaaatttctccattattttcacaatgtcccaggctgtgaaatcaggatttaataaagaaccagaatgccatatctgtrtcacctgggtagggaccagtcctgattcattaagtccgtgtctctgggtaactggactcaactgctggactaaacagaatgtccggcgtgggttcctaaccgggcaccacagagcctcatgggaaatgtagtgtcactttccaatgatgttaccatcaaggactttgggaaccagcttttctctctgcgcatgcgccgcccggcccactccgccattttcatccggaagtgcgtcacccacaggcggtcttgtagcggggccggcttggggcttggttctatgtccctgcgggtcggtgcgagggcgaagaggaacccgtgggcctcggg

SEQ ID NO: 37839 - DNA, 631 bp, Homo sapiens
ctactaaaaatacaaaaattagtcaagcgtggtggcgcgcctgtaatcccagctactcaggaggctgaggcaggagaatcgcttgaacccgggaagcggaggttgcagtgagccgagatcgcaccattgcactccagcctgggcgacagagtgagactccgtctcaaaaaaaaaaaaaaaaaaaaagttactcattaacagcatagaccaattggcctctattgaaatttctccattattttcacaatgtcccaggctgtgaaatcaggatttaataaagaaccagaatgccatatctgtatcacctgggtagggaccagtcctgattcattaagtccgtgtctctgggtaactggactcaactgctggactaaacagaatgtccggcgtgggttcctaacsgggcaccacagagcctcatgggaaatgtagtgtcactttccaatgatgttaccatcaaggactttgggaaccagcttttctctctgcgcatgcgccgcccggcccactccgccattttcatccggaagtgcgtcacccacaggcggtcttgtagcggggccggcttggggcttggttctatgtccctgcgggtcggtgcgagggcgaagaggaacccgtgggcctcggg

SEQ ID NO: 37840 - DNA, 631 bp, Homo sapiens
ctactaaaaatacaaaaattagtcaagcgtggtggcgcgcctgtaatcccagctactcaggaggctgaggcaggagaatcgcttgaacccgggaagcggaggttgcagtgagccgagatcgcaccattgcactccagcctgggcgacagagtgagactccgtctcaaaaaaaaaaaaaaaaaaaaagttactcattaacagcatagaccaattggcctctattgaaatttctccattattttcacaatgtcccaggctgtgaaatcaggatttaataaagaaccagaatgccatatctgtatcacctgggtagggaccagtcctgattcattaagtccgtgtctctgggtaactggactcaactgctggactaaacagaatgtccggcgtgggttcctaaccgggcaccacagagcctcatgggaaatgtagtgtcactttccaatgatgttaccatcaaggactttgggaaccagmttttctctctgcgcatgcgccgcccggcccactccgccattttcatccggaagtgcgtcacccacaggcggtcttgtagcggggccggcttggggcttggttctatgtccctgcgggtcggtgcgagggcgaagaggaacccgtgggcctcggg

SEQ ID NO: 37841 - DNA, 761 bp, Homo sapiens
ctctaacattaggagtgtactttcacatgagctttggaaggggcatagagaaaaaccgtattattctgtccctgaccccacaaatctcatgtccttctcacattgcaaaatacagtcatgccttgccagcagtctcccaaattcttaactcatttcagcattaactcaaagttacaaagtccaaagtctcatctgggtcaaggctacattctcttttgcctacgagtctctgaaataaaaagcaagttcactgtgtctaaggtacaatgatggtacaggcattktgtaagctttccatatccaaaagggagacattttccagaaaccttcttatttttatctgaggccccctcagcctggccttcactgtccatgtttttgtcagcattcttgtcacagccatttaaccagtctctaagatggtccaaaaatgttctcatctgtctgtcttctttggagccctccaaactcttccaacctctacccattacccagttccgaagttgcttccacattttcaggtatctttatagcaatgctccagtcctcatttgccatttttggtaagatttattttgaaaaagaggtttaattggctcatggttctgcagagtggacaggaagcttagtgcttctgcttctggggggcctcagaaatcttttaatcattgtgcaaggtaatgaaagagtgaattgtctcatatggcaagaggaaatcacggagagtagggagtgatatagagttttcagtggccagatct

SEQ ID NO: 37842 - DNA, 761 bp, Homo sapiens
ctctaacattaggagtgtactttcacatgagctttggaaggggcatagagaaaaaccgtattattctgtccctgaccccacaaatctcatgtccttctcacattgcaaaatacagtcatgccttgccagcagtctcccaaattcttaactcatttcagcattaactcaaagttacaaagtccaaagtctcatctgggtcaaggctacattctcttttgcctacgagtctctgaaataaaaagcaagttcactgtgtctaaggtacaatgatggtacaggcattttgtaagctttcyatatccaaaagggagacattttccagaaaccttcttatttttatctgaggccccctcagcctggccttcactgtccatgtttttgtcagcattcttgtcacagccatttaaccagtctctaagatggtccaaaaatgttctcatctgtctgtcttctttggagccctccaaactcttccaacctctacccattacccagttccgaagttgcttccacattttcaggtatctttatagcaatgctccagtcctcatttgccatttttggtaagatttattttgaaaaagaggtttaattggctcatggttctgcagagtggacaggaagcttagtgcttctgcttctggggggcctcagaaatcttttaatcattgtgcaaggtaatgaaagagtgaattgtctcatatggcaagaggaaatcacggagagtagggagtgatatagagttttcagtggccagatct

SEQ ID NO: 37843 - DNA, 761 bp, Homo sapiens
ctctaacattaggagtgtactttcacatgagctttggaaggggcatagagaaaaaccgtattattctgtccctgaccccacaaatctcatgtccttctcacattgcaaaatacagtcatgccttgccagcagtctcccaaattcttaactcatttcagcattaactcaaagttacaaagtccaaagtctcatctgggtcaaggctacattctcttttgcctacgagtctctgaaataaaaagcaagttcactgtgtctaaggtacaatgatggtacaggcattttgtaagctttccatatccaaaagggagacattttccagaaascttcttatttttatctgaggccccctcagcctggccttcactgtccatgtttttgtcagcattcttgtcacagccatttaaccagtctctaagatggtccaaaaatgttctcatctgtctgtcttctttggagccctccaaactcttccaacctctacccattacccagttccgaagttgcttccacattttcaggtatctttatagcaatgctccagtcctcatttgccatttttggtaagatttattttgaaaaagaggtttaattggctcatggttctgcagagtggacaggaagcttagtgcttctgcttctggggggcctcagaaatcttttaatcattgtgcaaggtaatgaaagagtgaattgtctcatatggcaagaggaaatcacggagagtagggagtgatatagagttttcagtggccagatct

SEQ ID NO: 37844 - DNA, 1312 bp, Homo sapiens
ctaaaaaaacctttttttatgcctcaatacctcctttcttcccctctgctctgttctgcacaatgctatcacatgatttctcaaaacataaatctgatcaccccacctccttcaatgatttcagtgctttcagaatgaagccacaatgcccaacgctacctacaaatcatgcataacttggtcctaactctggtttcacctcatacaacattctccaaccttctctgcacttcaccagcactaggctacatttcattgaaccaattcatgccacagggacttcatacatgctgctcttctgcctggaagccccttctctgccttttttgtttagttaaaggctacttcttcagactgttgcttaatcattccttcctcaaggaatcctctactattatcttcaatttcatcaaatctgcctttaataaactgtgatacaggaataccttcccttcaataacactcatcacagttgtaatttcatatttattgtgctataagtgttatagttgctatactttatagtttttttttcccatcagtatctcccctgtatctagcacaagtctgatacatggtagatgcacaatgaatttattaaatgaatgcataattgatgaattaattgtgttttaatgaacttgagtaattcaaagaggtaaagagtgaatgacatccataccataatagtcagcaaagccttgatgaggcaaaagtaaaactattacaagtttaaactataatarcaagtaatatgactgtataccttgattcttctactaaattatattccacgaatcttattttaaagtccaattaaataaattgtgtgggttgccatattgtcaccttagaatgccatcatatgtagtgaatactaagactgttctaaatataactacttttcgatacttcagatcacatcctaaaaacttgtagtgccttagggacatcattgtgaaccccaatttatcataagcacaactcagcagtcacagacaacaaaggcttgctttcaggatctgtcaaaaatgctgcaccagcatttttgcacttcagccttctgctgtgctctgggctgaagacagtaccctggcatacaccaagtaggcaaaattagctctcacaagccttatccatgggaaatgggtaaggcaaccactaacctccatccacagaaaatggccttcatgccatttatggtacaagtgtttagcgttgttcctgctgaggacagcaataatgtagtgaaacatataacagggtttagtcagaaatttgggacttaatcctgcctccattattaaccagt

SEQ ID NO: 37845 - DNA, 695 bp, Homo sapiens
aatgagggttcagaaagtggagatgygagtgtagacaagttttctggaaaatatgtctgtgaagagggaaagagagatagcatcatatcagcaggagaatgggagttgagaagggtagtttttcaatgaaagtcttgatgatgtgttaaaaactgttcagaaattctgatggaggggggtgagtctgtaaaagtgagaaagaatagttattcctgtttaagaattctgagaagaaaagaggagggggatataggacactggaatgattggccttagataggaaagggacagttcctttattatatctgaatggagtgaaagggatgggtgtaagctgatatatttggttttaagaagttgaggaaatttctgagggcttctgtattttattctctcatacgaagtaggagtcaaggtcgccctctgagcgtgggggaggtggtaaaaatgtaggcgaagtcagtggctgtgacagtggcaccgcagcagagaatcagcagtttgagaagagtgaagaagacttgaataatcattttggagaacaggagattaagttacccagagaaacatcgtcatatttttgtcagcctcaagggctcatttaaggatttatttgatttgctaccatcctcttaagttgttcacaaattactacacgtcttagatttctcctcactgcccaacaagtattgtaa

SEQ ID NO: 37846 - DNA, 562 bp, Homo sapiens
ttaggtagtatgtggactcagaggagaagggccttggtggattagtagtaataatggcatttgggctcartgtctgtctgtcatgagctatctggtggcaacaatgaaaatggcttggttacaattagtcaagttgtgtttaatataagataacttgattgagaaaattaagtattttctcatgttatttactttctgctttccctcccactagaatgaaagctcaatgaaggcaggtttttatctattttaatcactgtggagtccagtacccagtcagcatctggtatgtgggaggtacctgataaatatctgtagaatatgaatgaactgtttctgtctggcagggcttcaaatctacatttattctcttctgatgttagactacaactttaacgtcattctagtgatctgacctagagggatgtctaggcatcggggccagccaggtccctcaggaacttatatcatccctgggaagaaaagacagtgaaagaggaggaggagggagggagggggattgttttgaagtgactgagtatttacccaaagtttcaaactg

SEQ ID NO: 37847 - DNA, 562 bp, Homo sapiens
ttaggtagtatgtggactcagaggagaagggccttggtggattagtagtaataatggcatttgggctcagtgtctgtctgtcatgagctatctggtggcaacaatgaaaatggcttggttacaattagtcaagttgtgtttaatataagataacttgattgagaaaattaagtatkttctcatgttatttactttctgctttccctcccactagaatgaaagctcaatgaaggcaggtttttatctattttaatcactgtggagtccagtacccagtcagcatctggtatgtgggaggtacctgataaatatctgtagaatatgaatgaactgtttctgtctggcagggcttcaaatctacatttattctcttctgatgttagactacaactttaacgtcattctagtgatctgacctagagggatgtctaggcatcggggccagccaggtccctcaggaacttatatcatccctgggaagaaaagacagtgaaagaggaggaggagggagggagggggattgttttgaagtgactgagtatttacccaaagtttcaaactg

SEQ ID NO: 37848 - DNA, 824 bp, Homo sapiens
cagccaggtcttcttctgcttaaacctatcctgggctaaaactcaaagtaaaaggagaggaagctggttctgtagcatccagtgaggatggcattcaggcaatgctgtttactatgggctgacctcaattatgctgtaaaacacaactgcagaaactctctctagttctccttaaattcaaattacagtgcggaagtatctgagctcagtggagctgggaatgagccccctaggaggaggtactcttggagcactggtgtcagcagcttgcccaagtgaggcctggtcatgtcctcaaagtaagcctcagaagtcctcatcagctttgcagccaaagcaaagactaccattggtatgatcttcacatacctattcagcttgttttggatgtctcatgacatagagcagtggccacgaatgcacagatttcaacagcaatgcagtgtcagtaactgtcatcctagtttaaaatgaaccatatcttatccacacatgaccagcctattccatgttgggagggccgtgtggttcatggaagcttaccaataacaagtttgtttttaaccagattttctattccatgggtgcctctggtggccatgaagggtttcccttgatctcttatatcagcargaatggtacaaatgtaaaactgatgaatgtatgcaatcaggtatcaattactcagccacagtactctctacttttggaccagtttggggtccaggccagagagctgatggacgttgagattctctcccctgccgagtgtcttgtgtgctgttttggagacagctctgacgtgagcatgtttaatctcctct

SEQ ID NO: 37849 - DNA, 824 bp, Homo sapiens
cagccaggtcttcttctgcttaaacctatcctgggctaaaactcaaagtaaaaggagaggaagctggttctgtagcatccagtgaggatggcattcaggcaatgctgtttactatgggctgacctcaattatgctgtaaaacacaactgcagaaactctctctagttctccttaaattcaaattacagtgcggaagtatctgagctcagtggagctgggaatgagccccctaggaggaggtactcttggagcactggtgtcagcagcttgcccaagtgaggcctggtcatgtcctcaaagtaagcctcagaagtcctcatcagctttgcagccaaagcaaagactaccattggtatgatcttcacatacctattcagcttgttttggatgtctcatgacatagagcagtggccacgaatgcacagatttcaacagcaatgcagtgtcagtaactgtcatcctagtttaaaatgaaccatatcttatccacacatgaccagcctattccatgttgggagggccgtgtggttcatggaagcttaccaataacaagtttgtttttaaccagattttctattccatgggtgcctctggtggccatgaagggtttcccttgatctcttatatcagcaagaatggtacaaatgtaaaactgatgaatgtatgcaatcaggtatcaattactcagccacagtactctctacttttggaccagyttggggtccaggccagagagctgatggacgttgagattctctcccctgccgagtgtcttgtgtgctgttttggagacagctctgacgtgagcatgtttaatctcctct

SEQ ID NO: 37850 - DNA, 824 bp, Homo sapiens
cagccaggtcttcttctgcttaaacctatcctgggctaaaactcaaagtaaaaggagaggaagctggttctgtagcatccagtgaggatggcattcaggcaatgctgtttactatgggctgacctcaattatgctgtaaaacacaactgcagaaactctctctagttctccttaaattcaaattacagtgcggaagtatctgagctcagtggagctgggaatgagccccctaggaggaggtactcttggagcactggtgtcagcagcttgcccaagtgaggcctggtcatgtcctcaaagtaagcctcagaagtcctcatcagctttgcagccaaagcaaagactaccattggtatgatcttcacatacctattcagcttgttttggatgtctcatgacatagagcagtggccacgaatgcacagatttcaacagcaatgcagtgtcagtaactgtcatcctagtttaaaatgaaccatatcttatccacacatgaccagcctattccatgttgggagggccgtgtggttcatggaagcttaccaataacaagtttgtttttaaccagattttctattccatgggtgcctctggtggccatgaagggtttcccttgatctcttatatcagcaagaatggtacaaatgtaaaactgatgaatgtatgcaatcaggtatcaattactcagccacagtactctctacttttggaccagtttggggtccaggccagagagctgatggacgttgagattctctccyctgccgagtgtcttgtgtgctgttttggagacagctctgacgtgagcatgtttaatctcctct

SEQ ID NO: 37851 - DNA, 1092 bp, Homo sapiens
ggatcccatgatcagttagtcatcatcaaaggtccttgcaagtcaaacattctaattgatgtttttagtaatggctcactagcaacccttcccttgacaactagtagaaagcaaacaaaatatttttgaaacctcttacagacatagaaggcacagagaaggtacaaaagtaacaagcacttgagaatgcaagattgcagaaagaagggatgtatagaattccatattcaagcaattattcctcttgagggatttgctgattaacaaactgcaattaggtcagaaactgaggaactgacactcttactgagatgggagaccaaattaaagtgagaacccagcaaacaagagagatttaaagggatatttcagctttttcagtgggacccccccaagattcctaaaggactgcatccgggagtgggttagaaataaatcagaactcaaaggactatgacatcatctaaaggctctaatgatatctacagctgttttttttttttttttgcaatgcccaccattcaatcaattacctctcataccataaataagaccacatgccccccaaaattatgagcattaaacagacccacaggaaattacagatatcgggggcatcagacacaggttttaaaataattatgattaatatgttcaagaaatgagatggcatgatgaagaaactcagtagagaactggaaactgatctttaaaaaagacaagagaaaggaggggaaaatataaaagtcaatcttaacagtttktgcagtatctcttatctgcagaccacgggatttatattattgcactcttggtgcaacttatagtatgtatgtaatagcttttatgaattgtttgagttatgaatttctataccctctattaaaatggacctaagtttttaaatgaattatagaactggaattatgaacaaaatcaattgggtttaacagtagattacagagctgaaaggatgagtgaagaggtagatcagaagatcaaagcataggaaggtaaaaaagaatttaaaactatagaaaagagccagagacacatttgacacagtaaaaacttttaatatacatgcaatct

SEQ ID NO: 37852 - DNA, 584 bp, Homo sapiens
tattttctatttatttatcgtttatttaccctaattaatacagcaaccccatccccatgcccatcactctctatccctcaccttttaacttccttcaaaactagttacattccttgacatgttaaatattaatttgtttattgtctgctttctaccaactagaatgcaccatgcatgagagcagaaattgtttcctctaactattttcattgttcttagaagtgttggtgcttacgaatagtttctcattaaataaatgacagaactatttgaaattgcctaattaacacatgcacctaatttctgtctttatgtcttcaccaccttccctgacatayaagcctttgaagacacagctgtagaggagaaggggagggttattcaaccgcatttacaaatcataactgattttaacttctgtattttcagacctccccagcgactttctctcaggaaactccactcccaactgacaggtgctatttccagccagtcctatgctgttgcaaatagtgagtccatgaatgccctctgccgtgtgcattacttattttcatcagcagatcttcgtaacacactcctgg

SEQ ID NO: 37853 - DNA, 1101 bp, Homo sapiens
  misc_feature (1)...(1101): n = A,T,C or G
tgcaccgcgcgtcgctttcccggccggagtctcgccgccttcccgcgccccgcagcgccccgcagagcagtcgaggtaagtggcgctcccagtcccgggagccctgggagcgccagcacgggcccctcggggctgtcaggaacccgtttgtcaagcccgtcgggtccgacgccgggggcagctccaggatctggcctcgtgaacgcgtgcccccaggcgtggccctsgagcgcagcgggtccccagggtcccctccgctgatctccactctggacccggctcgcgagggtgggggtgtgagggttnnnnnnnnnnnnnnnnnnnnnnnnnnnnnnnnnnnnnnnnnnnnnnnnnnnnnnnnnnnnnnnnnnnnnnnnnnnnnnnnnnnnnnnnnnnnnnnnnnnngggtacctcctccgacatgatgctgccacatctcggtacctcggcgtctgctgaggggtcgtgggtgtgtgacggagtttagggagtctcgggggatgctttttccagagctattgcaacagatacgacagatttactgcccaggaaattgctgcaaggtcaaacggggaactgatatgaacccttgcacgtccagcaggtcagcaggtcagcaggtcagcaggtccgggagccccagtctcccggaacctggagggattcttgaggggccaagattagatgtggattaaatgccagccgtgtgagaatttgagtgtggctcgcagtctgatgcatcttagagtgtttccttcctctaaaacttttggacaactctttcctctttttaaaaataactttttccctcgaatattctcattttcattttaaaataccataaagatagatttggacaccaggcacaagtttcataatttggcttgaaatgaatatccagagggccttttacagaatggaggaaactaactagggtgtcctaatgtctccaagaacctctgcgcaggtgttccaccaaagacctagcccggtgtacctcttactttcctgctaaggtatttcttagttcatacccctgtggaacgtgaaatgtgtttcctagacactcagggcatagcggttcaaaagaacttttaatgt

SEQ ID NO: 37854 - DNA, 1298 bp, Homo sapiens
tatagtatctcatttaatattttaacttagtgaattattctgatacatttcccactggtgagttgttcttgtatwcttggttattatgtactatccttttaatgtatttatgggatcaatttttgaaaattttgtttgggattttttcatctatatttgtaagtaatagtgatttgttgttttcctattttaggaatgctttttttagtggcaactcattcttgttgctgtcatcttaaatctctctgaagacagcaattggaatttcttaaaagcctctcttctatttctttcatccactcaatttcctctggggtcaatatcttggtttttaatctcgatgcttcatgctcttgttactcctcaaatgtttgatgaccccgattgtcgactcataattttaatgaaagggttagaatgacatagaaggtggtatggatttacttgggaactagagcaagcctccttctggactgagaggctgactgtggcattctgtagatgaacatgggcatttatagacagatctaccctttgggttggatgaagatcagacagtaaacttcagccatcgttgagcgttatttgccgaagccagcaaaaatatgtactgaaaatggagcacccaagagtgcttagtaaaattcactggaaggccaggcgtggtggctcacacctgaaatctcagccttttgagaggcagaggtgggagaatcatttggtgctaggagttcaagactagcctgggcaagatagtgagatcccatctttaccaaaaaattcaaaaaattagctggggatagtgtcacacacttgtagtcctagctactcaggaggctaaggcgagagaattacttgaacccaggagtttgaagctgtagtgagctatgactgtgccactgtactccagcctgagtgacagagtgggaccccatgtctaaaatttttaaaaaaatgtaaaacttcactggaatgtggaaatttcttttcccactcccttctgattgattgattggatgcttggctggttggatgggaatctgcctgactgttatggtgtcccaagctttctgggcactgctctacttgttttttggctcaagacccacctttggaatcaatgaggtattttttccacgttatttaaggcaagggttcttgctgattgtagactgggggtgattatggcagcccattgttgacagggaagtcaaatggcccatagcatttttaaaaaatgtttactttaaggtctgggatacatgtgcagaatgtgcaggtttgttacatatgtatgc

SEQ ID NO: 37855 - DNA, 1298 bp, Homo sapiens
tatagtatctcatttaatattttaacttagtgaattattctgatacatttcccactggtgagttgttcttgtatacttggttattatgtactatccttttaatgtatttatgggatcaatttttgaaaattttgtttgggattttttcatctrtatttgtaagtaatagtgatttgttgttttcctattttaggaatgctttttttagtggcaactcattcttgttgctgtcatcttaaatctctctgaagacagcaattggaatttcttaaaagcctctcttctatttctttcatccactcaatttcctctggggtcaatatcttggtttttaatctcgatgcttcatgctcttgttactcctcaaatgtttgatgaccccgattgtcgactcataattttaatgaaagggttagaatgacatagaaggtggtatggatttacttgggaactagagcaagcctccttctggactgagaggctgactgtggcattctgtagatgaacatgggcatttatagacagatctaccctttgggttggatgaagatcagacagtaaacttcagccatcgttgagcgttatttgccgaagccagcaaaaatatgtactgaaaatggagcacccaagagtgcttagtaaaattcactggaaggccaggcgtggtggctcacacctgaaatctcagccttttgagaggcagaggtgggagaatcatttggtgctaggagttcaagactagcctgggcaagatagtgagatcccatctttaccaaaaaattcaaaaaattagctggggatagtgtcacacacttgtagtcctagctactcaggaggctaaggcgagagaattacttgaacccaggagtttgaagctgtagtgagctatgactgtgccactgtactccagcctgagtgacagagtgggaccccatgtctaaaatttttaaaaaaatgtaaaacttcactggaatgtggaaatttcttttcccactcccttctgattgattgattggatgcttggctggttggatgggaatctgcctgactgttatggtgtcccaagctttctgggcactgctctacttgttttttggctcaagacccacctttggaatcaatgaggtattttttccacgttatttaaggcaagggttcttgctgattgtagactgggggtgattatggcagcccattgttgacagggaagtcaaatggcccatagcatttttaaaaaatgtttactttaaggtctgggatacatgtgcagaatgtgcaggtttgttacatatgtatgc

SEQ ID NO: 37856 - DNA, 1298 bp, Homo sapiens
tatagtatctcatttaatattttaacttagtgaattattctgatacatttcccactggtgagttgttcttgtatacttggttattatgtactatccttttaatgtatttatgggatcaatttttgaaaattttgtttgggattttttcatctatatttgtaagtaatagtgatttgttgttttcctattttaggaatgctttttttagtggcaactcattcttgttgctgtcatcttaaatctctctgaagacagcaattggaatttcttaaaagcctctcttctatttctttcatccactcaatttcctctggggtcaatatcttggtttttaatytcgatgcttcatgctcttgttactcctcaaatgtttgatgaccccgattgtcgactcataattttaatgaaagggttagaatgacatagaaggtggtatggatttacttgggaactagagcaagcctccttctggactgagaggctgactgtggcattctgtagatgaacatgggcatttatagacagatctaccctttgggttggatgaagatcagacagtaaacttcagccatcgttgagcgttatttgccgaagccagcaaaaatatgtactgaaaatggagcacccaagagtgcttagtaaaattcactggaaggccaggcgtggtggctcacacctgaaatctcagccttttgagaggcagaggtgggagaatcatttggtgctaggagttcaagactagcctgggcaagatagtgagatcccatctttaccaaaaaattcaaaaaattagctggggatagtgtcacacacttgtagtcctagctactcaggaggctaaggcgagagaattacttgaacccaggagtttgaagctgtagtgagctatgactgtgccactgtactccagcctgagtgacagagtgggaccccatgtctaaaatttttaaaaaaatgtaaaacttcactggaatgtggaaatttcttttcccactcccttctgattgattgattggatgcttggctggttggatgggaatctgcctgactgttatggtgtcccaagctttctgggcactgctctacttgttttttggctcaagacccacctttggaatcaatgaggtattttttccacgttatttaaggcaagggttcttgctgattgtagactgggggtgattatggcagcccattgttgacagggaagtcaaatggcccatagcatttttaaaaaatgtttactttaaggtctgggatacatgtgcagaatgtgcaggtttgttacatatgtatgc

SEQ ID NO: 37857 - DNA, 1298 bp, Homo sapiens
tatagtatctcatttaatattttaacttagtgaattattctgatacatttcccactggtgagttgttcttgtatacttggttattatgtactatccttttaatgtatttatgggatcaatttttgaaaattttgtttgggattttttcatctatatttgtaagtaatagtgatttgttgttttcctattttaggaatgctttttttagtggcaactcattcttgttgctgtcatcttaaatctctctgaagacagcaattggaatttcttaaaagcctctcttctatttctttcatccactcaatttcctctggggtcaatatcttggtttttaatctcgatgcttcatgctcttgttactcctcaaatgtttgatgaccccgattgtcgactcataattttaatgaaagggttagaatgacatagaaggtggtatggatttacttgggaactagagcaagcctccttctggactgagaggctgactgtggcattctgtagatgaacatgggcatttatagacagatctaccctttgggttggatgaagatcagacagtaaacttcagccatcgttgagcgttatttgccgaagccagcaaaaatatgtactgaaaatggagcacccaagagtgcttagtaaaattcactggaaggccaggcgtggtggctcacacctgaaatctcagccttttgagaggcagaggtgggagaatcatttggtgctaggagttcaagactagcctgggcaagatagtgagatcccatctttaccaaaaaattcaaaaaattagctggggatagtgtcacacacttgtagtcctagctactcaggaggctaaggcgagagaattacttgaacccaggagtttgaagctgtagtgagctatgactgtgccactgtactccagcctgagtgacagagtgggaccccatgtctaaaatttttwaaaaaatgtaaaacttcactggaatgtggaaatttcttttcccactcccttctgattgattgattggatgcttggctggttggatgggaatctgcctgactgttatggtgtcccaagctttctgggcactgctctacttgttttttggctcaagacccacctttggaatcaatgaggtattttttccacgttatttaaggcaagggttcttgctgattgtagactgggggtgattatggcagcccattgttgacagggaagtcaaatggcccatagcatttttaaaaaatgtttactttaaggtctgggatacatgtgcagaatgtgcaggtttgttacatatgtatgc

SEQ ID NO: 37858 - DNA, 1298 bp, Homo sapiens
tatagtatctcatttaatattttaacttagtgaattattctgatacatttcccactggtgagttgttcttgtatacttggttattatgtactatccttttaatgtatttatgggatcaatttttgaaaattttgtttgggattttttcatctatatttgtaagtaatagtgatttgttgttttcctattttaggaatgctttttttagtggcaactcattcttgttgctgtcatcttaaatctctctgaagacagcaattggaatttcttaaaagcctctcttctatttctttcatccactcaatttcctctggggtcaatatcttggtttttaatctcgatgcttcatgctcttgttactcctcaaatgtttgatgaccccgattgtcgactcataattttaatgaaagggttagaatgacatagaaggtggtatggatttacttgggaactagagcaagcctccttctggactgagaggctgactgtggcattctgtagatgaacatgggcatttatagacagatctaccctttgggttggatgaagatcagacagtaaacttcagccatcgttgagcgttatttgccgaagccagcaaaaatatgtactgaaaatggagcacccaagagtgcttagtaaaattcactggaaggccaggcgtggtggctcacacctgaaatctcagccttttgagaggcagaggtgggagaatcatttggtgctaggagttcaagactagcctgggcaagatagtgagatcccatctttaccaaaaaattcaaaaaattagctggggatagtgtcacacacttgtagtcctagctactcaggaggctaaggcgagagaattacttgaacccaggagtttgaagctgtagtgagctatgactgtgccactgtactccagcctgagtgacagagtgggaccccatgtctaaaatttttawaaaaatgtaaaacttcactggaatgtggaaatttcttttcccactcccttctgattgattgattggatgcttggctggttggatgggaatctgcctgactgttatggtgtcccaagctttctgggcactgctctacttgttttttggctcaagacccacctttggaatcaatgaggtattttttccacgttatttaaggcaagggttcttgctgattgtagactgggggtgattatggcagcccattgttgacagggaagtcaaatggcccatagcatttttaaaaaatgtttactttaaggtctgggatacatgtgcagaatgtgcaggtttgttacatatgtatgc

SEQ ID NO: 37859 - DNA, 1083 bp, Homo sapiens
tcgaaaagccttaagcggggaggtgccctatcacagacggaaatccccgagaggaggggagggagcccagagccggctgaaaggaccggtcccggggagctttaaggtgacggtcgaagcccagggaccccttcctacccagatcccttcgcacgaatttcacccttgatcacagcctggagcagttgggaggaccccttctatatttctctggtctctacctgagacgaataaacacacacgcttgtaaacatactgagtatctctgcaaaggaacacaggaaactgccctaggggaggggaaccgcccttggaaggaaacttcctttcccttttgtgctgtttgcgttttactactctttgtatgcgttatctatcaaaacgacgaaaaatattaaaagaaaaaagatacacttcatacagacaacctggcctatggctattttgtgccactgagtggtggtggggagtgctcgtatttgcgggggcctgggtggctcttgaaggcgatggttgtccaagtttttcggaaatacaggattggtctgcaccccaagaatgatggaacgtccacatttcctcttgttactttccagttgtgttaccgtgggctcatagctgatcttatggtgaaaagatgcgttagtgaacattacattcatgacatattttaaaatagtataaaaacaaaaacaacaataaccaaaatacatttgttttctgtcatcaaactgtggttggaccatcaaaccattgatggtcgtctagccccatctcctgttgggtcttttttttttttttttgagacagagtttccctcttgttgtccaggctagagtgcaatggtgcgatctcggctcactgcaacctccgcctcccggattcaagcgattstcctgcctcagcctcccgagtagctgggattacagccatacaccaccacacccgactaattttgtgtttttagtagagatgagatttctccggagatgagatttctccatgttggtcaggctggtctcgaactccctacctcaggtggtccactcgcctcggcctcccaaagtgctgggattacaggca

SEQ ID NO: 37860 - DNA, 804 bp, Homo sapiens
ttttcaaggtatcaagtgatcaaaatcatttatatagagatctcctgaaaacatgtgtgaccatctatcttgggaagtttcataaacctgatgctattttgttgtttccattttgttttcccatatactgaaaagaacagggccatgagcggttcttatgcaatatggtttgatatatattttgttgagatgacctaacaccattgattttgggttgcattccactaacagaacatggcaagatcaaggttatggtcacggttggttggtgatcctcagtgttgcagtagaaggtgagtttgagatgagaggaatgagtaggaaagagtgatcccctgaaccacctcctcgctttctcagctttcaccccacctaggttttgtgagcctggaacttgggagactgttctgtagcccaggtctcctaagattggctgctggacttgcctgagttgagggtgcggtgggttgaccctgggctgcccagcattcatgtggtagtgaaggaaggagsactggatcaatcccatttcaaagcatgtctctctgcactccacactgtcctccaatgacactgtaaggaaaccgctttaagacgtatcaacggctttaagtaaatgtattttctggcatctgggagacctgacattctgtgtcataatgaaaatctgtcatgtttctttattttaaaaatgataaaactgcaggttcacagagttacatggcttacttgaggtcacacggggatgagttttcagcactgccaataaaagcaatcacatgaattattcagtaattattcata

SEQ ID NO: 37861 - DNA, 804 bp, Homo sapiens
ttttcaaggtatcaagtgatcaaaatcatttatatagagatctcctgaaaacatgtgtgaccatctatcttgggaagtttcataaacctgatgctattttgttgtttccattttgttttcccatatactgaaaagaacagggccatgagcggttcttatgcaatatggtttgatatatattttgttgagatgacctaacaccattgattttgggttgcattccactaacagaacatggcaagatcaaggttatggtcacggttggttggtgatcctcagtgttgcagtagaaggtgagtttgagatgagaggaatgagtaggaaagagtgatcccctgaaccacctcctcgctttctcagctttcaccccacctaggttttgtgagcctggaacttgggagactgttctgtagcccaggtctcctaagattggctgctggacttgcctgagttgagggtgcggtgggttgaccctgggctgcccagcattcatgtggtagtgaaggaaggaggactggatcaatcccatttcaaagcatgtctctctgcactccacactgtcctccaatgacactgtaaggaaaccgctttaagacgtatcaayggctttaagtaaatgtattttctggcatctgggagacctgacattctgtgtcataatgaaaatctgtcatgtttctttattttaaaaatgataaaactgcaggttcacagagttacatggcttacttgaggtcacacggggatgagttttcagcactgccaataaaagcaatcacatgaattattcagtaattattcata

SEQ ID NO: 37862 - DNA, 853 bp, Homo sapiens
ctaaatttttcagtgcaatamtttatcagggtagaatttactcttaaatacctcctatggcttacgtgccagaattcagtttgggggagttccttagagatgttctcatagaaatctctacagaagccccataacttatcatccaccctttcctcttctgtcctgcattaggaaatatgattccctgattcaggatcagccccgggaactgtcttacctacggcaaaaaatacgagaagggagaggtgtttgttatcttctcacccagcatgcaaaagatacagtaaaatcttttgaggatctcctaaggagcaatgacattgactactacctgggacagagcttccgggagcaactggcccagggaagccagctgacagagaggctcaccagcacactcagcaccagtaagttggccacagggctttggatactctcagtcaccccacagttccagcccctggtggccaccacatctccactgcaactttttaacgtagggtcctgtttctatttcatttcctggggctaatacaggatcaagactgctcaatggggagcatggagaggaacacacagggctggagatgccatggttacaactctagaaacttcaccactcatggaatgtgacctgtggggcaggggagacatctctctggtgctaagagggagtaggggacatgagatggaacggccttgttataggaggaagagccgtgagctaagaattgcaagacgtcgaggcgctgaggccaaagggtccgtgaggaaacaggtgcagctcacgcccctcggcctacgggagggagggcaaggagggttctacggttcctgggaggacgagaagagc

SEQ ID NO: 37863 - DNA, 853 bp, Homo sapiens
ctaaatttttcagtgcaatactttatcagggtagaatttactcttaaatacctcctatggcttacgtgccagaattcagtttgggggagttccttagagatgttctcatagaaatctctacagaagccccataacttatcatccaccctttcctcttctgtcctgcattaggaaatatgattccctgattcaggatcagccccgggaactgtcttacctacggcaaaaaatacgagaagggagaggtgtttgttatcttctcacccagcatgcaaaagatacagtaaaatcttttgaggatctcytaaggagcaatgacattgactactacctgggacagagcttccgggagcaactggcccagggaagccagctgacagagaggctcaccagcacactcagcaccagtaagttggccacagggctttggatactctcagtcaccccacagttccagcccctggtggccaccacatctccactgcaactttttaacgtagggtcctgtttctatttcatttcctggggctaatacaggatcaagactgctcaatggggagcatggagaggaacacacagggctggagatgccatggttacaactctagaaacttcaccactcatggaatgtgacctgtggggcaggggagacatctctctggtgctaagagggagtaggggacatgagatggaacggccttgttataggaggaagagccgtgagctaagaattgcaagacgtcgaggcgctgaggccaaagggtccgtgaggaaacaggtgcagctcacgcccctcggcctacgggagggagggcaaggagggttctacggttcctgggaggacgagaagagc

SEQ ID NO: 37864 - DNA, 853 bp, Homo sapiens
ctaaatttttcagtgcaatactttatcagggtagaatttactcttaaatacctcctatggcttacgtgccagaattcagtttgggggagttccttagagatgttctcatagaaatctctacagaagccccataacttatcatccaccctttcctcttctgtcctgcattaggaaatatgattccctgattcaggatcagccccgggaactgtcttacctacggcaaaaaatacgagaagggagaggtgtttgttatcttctcacccagcatgcaaaagatacagtaaaatcttttgaggatctcctaaggagcaatgacattgactactacctgggacagagcttccgggagcaactggcccrgggaagccagctgacagagaggctcaccagcacactcagcaccagtaagttggccacagggctttggatactctcagtcaccccacagttccagcccctggtggccaccacatctccactgcaactttttaacgtagggtcctgtttctatttcatttcctggggctaatacaggatcaagactgctcaatggggagcatggagaggaacacacagggctggagatgccatggttacaactctagaaacttcaccactcatggaatgtgacctgtggggcaggggagacatctctctggtgctaagagggagtaggggacatgagatggaacggccttgttataggaggaagagccgtgagctaagaattgcaagacgtcgaggcgctgaggccaaagggtccgtgaggaaacaggtgcagctcacgcccctcggcctacgggagggagggcaaggagggttctacggttcctgggaggacgagaagagc

SEQ ID NO: 37865 - DNA, 853 bp, Homo sapiens
ctaaatttttcagtgcaatactttatcagggtagaatttactcttaaatacctcctatggcttacgtgccagaattcagtttgggggagttccttagagatgttctcatagaaatctctacagaagccccataacttatcatccaccctttcctcttctgtcctgcattaggaaatatgattccctgattcaggatcagccccgggaactgtcttacctacggcaaaaaatacgagaagggagaggtgtttgttatcttctcacccagcatgcaaaagatacagtaaaatcttttgaggatctcctaaggagcaatgacattgactactacctgggacagagcttccgggagcaactggcccagggaagccagctgacagagaggctcaccagcacactcagcaccagtargttggccacagggctttggatactctcagtcaccccacagttccagcccctggtggccaccacatctccactgcaactttttaacgtagggtcctgtttctatttcatttcctggggctaatacaggatcaagactgctcaatggggagcatggagaggaacacacagggctggagatgccatggttacaactctagaaacttcaccactcatggaatgtgacctgtggggcaggggagacatctctctggtgctaagagggagtaggggacatgagatggaacggccttgttataggaggaagagccgtgagctaagaattgcaagacgtcgaggcgctgaggccaaagggtccgtgaggaaacaggtgcagctcacgcccctcggcctacgggagggagggcaaggagggttctacggttcctgggaggacgagaagagc

SEQ ID NO: 37866 - DNA, 1275 bp, Homo sapiens
tgcatctggattgagttgctgatgaatttcaatgtgaataatatttatagtttctcttaattgtcttagcacctgcaggtgcctatgattattttctttatttatactctccttaactatagtgagtcactattgagttctgggtagcaaatttagctttaagtttcagctcagctgaagctaaatttcagaaaaaaagaaaacagtcttggggctgttttcagagtgagacttagtctcaaaaaaaaaaaaaaaagaagtctttgcattaaatggttacmaaattatctgaaaatttataggatgataacaattatagggatataataaacatgaaatgcaaaactgggctatttgcctgggctcgtacttctttttctttcttatggtttctgtatattttgttttttttatcctacttatttcattaatggcaggacatcaagtatacaagaacataaaaatttgtttcatctgtcaaatgcaagtttgtattaggtaatctctttgattttatgattttatttgctattatgggaaacgtttgtgattcatccatgcaagtgttgagtctaatactgacactaaagaatgttttgtcagccaggcgcggtggctcacgcctgtaatcccagcactttgggaggctgaggcgggcggatcacgaggtcaggagatcgagaccatcctggctaacgcggtgaaaccccgcctctactaaaaaatacaaaaaattagccgggcgtggtggtgagcgcctgtagtcccagctactcgggaggctgaggcaggagaatgtcgtgaatctgggaggcagagcctgcagtgagccgagatcatgccactgcactccagcctgggtgacaaagcaaagactccgtctcaaaaaaaaaagaaaagaatgttttgtgagcagttttcttttgtaaattcaactgcaagattatgagatcctaattgtgagattctgattctcttaataactccttaagaataacacccatgaagtaacaaatctgcctaagagttctatgacgctataattgggatttcagaatattctgttctctacccattgtgatttcaggggttctagaaaactcctctctacaaaaacaatgctttcttgccctctacgataacggatatgactggagaccttgtctttccatcactgttacttagagtagcactgaggtataatatccgaactgttttagaaagtgcaataaattgagtttaattcacactggagtgtaaaagtataacatcata

SEQ ID NO: 37867 - DNA, 954 bp, Homo sapiens
agctggttctcaaattgctcccctgtaccctgtattagaaatttgagggaatgaaagcagctcattctcactggtgactaaagattacatatgagaaaatgaagtcctagactttattttccacaaactgtgttctgtgatcacagtggactttattccaacatactaatgcaatggagaaagacacataaagccttcctctttgtccctgtttgcagatgacatgactgtatatctagaaaaccccattgtctcagcccaaaatctccttaagctgataggcaacttcagcaaagtctcaggatacaaaatcaatgtgcaaaaatcacaagcattcttatacaccaataacagacaaacagagagccaaatcatgagtgaactcccattcacaattgcttcaaagagaataaaatacctaggaatccaacttacaagggacgtgaaggacctcttcaaggagaactacaaaccactgctcaaggaaataaaagaggatacaaacaaatggaagaacattccatgctcatgggtaggaagaatcaatatcatgaaaatggccatactgcccaaggtaatttatagatccaatgccatccccatcaagctaccaatgactttcttcacagaattggaaaaaactactttaaagttcatatggaaccaaaaaagagcccacatcrccaagtcaatcctaagccaaaagaacaaagctggaggcatcacgctacctgacttcaaactatactacaaggctacagtaaccaaaacagcatggtactggtaccaaaacagagatatagatcaatggaacagaacagagccctcagaaataacgctgcatatctacaactatctgatctttgacaaacctgagaaaaataagcaatggggaaaggattccacatttaataaatggtgctgggaaaactggccagccatatgtagaaagct

SEQ ID NO: 37868 - DNA, 954 bp, Homo sapiens
agctggttctcaaattgctcccctgtaccctgtattagaaatttgagggaatgaaagcagctcattctcactggtgactaaagattacatatgagaaaatgaagtcctagactttattttccacaaactgtgttctgtgatcacagtggactttattccaacatactaatgcaatggagaaagacacataaagccttcctctttgtccctgtttgcagatgacatgactgtatatctagaaaaccccattgtctcagcccaaaatctccttaagctgataggcaacttcagcaaagtctcaggatacaaaatcaatgtgcaaaaatcacaagcattcttatacaccaataacagacaaacagagagccaaatcatgagtgaactcccattcacaattgcttcaaagagaataaaatacctaggaatccaacttacaagggacgtgaaggacctcttcaaggagaactacaaaccactgctcaaggaaataaaagaggatacaaacaaatggaagaacattccatgctcatgggtaggaagaatcaatatcatgaaaatggccatactgcccaaggtaatttatagatccaatgccatccccatcaagctaccaatgactttcttcacagaattggaaaaaactactttaaagttcatatggaaccaaaaaagagcccacatcgccaagtcaatcctaagccaaaagaacaaagctggaggcatcacgctacctgacttcaaactatactacaaggctacagtaaccaaaacagcatggtactggtaccaaaacagagatatagatcaatggaacagaacagagccctcagaaataacgctgcatatctacaactatctgatctttgacaaacctgagaaaaataagcaatggggaaaggattccayatttaataaatggtgctgggaaaactggccagccatatgtagaaagct

SEQ ID NO: 37869 - DNA, 735 bp, Homo sapiens
cccacaacactatctttcttcctcactttcttttttccatagcacttatcaccagtagaataaaacatatattatttaccaatttattttattgtctaattcctctgtagggggataagggaaagtacagctgaatatggagccaacaagtctccataccccaccccactagtatgtaagctacttgaggacaaggaaacttcttctctgttttactgctgtacctgcagtgctyagaagagagcttggcacagggaagaagcttagtaaatatttataaaataaatggatgaattagtttttgtgaagatggatttaattttaatgttgttttcttgaatttgtgatatccaatatcatttaagaatccagatatttacccattaaatagagaaatgaatacttagatcttatccacgagtttacagacttctggaattttgtcttatatttgtttttacttcttcattatcagctctgaatcccaatccagtaatatgtttttctcagtttctcaatatgctcataaaagaagcaaataatagtgtttttatcctatttattactataataaacattcacttacttgtaggtagttgttctcggcaaaaataaatgaagtactaatgcatgacttgctcaaaggaaaaatgtttttagaagcagctccttaggtgtgcaaattacaaataaacaagcattgttattgtaggggccaagggaaaacttcccctt

SEQ ID NO: 37870 - DNA, 505 bp, Homo sapiens
tcattttgtcccgttaagctattcaattgaatgtcaggagccatgctcttcaaggaaacctttcaaagcctattccatgaaaggtcaccctctggtaccttccccaaagttgctgtgaaaggaggaaggacaaaggaatccactatacactgaccaaggagaacrtgttgcagcgctgcaatgagcaggaaaaatatgatgggcctcagattaaagctactgtctgagattataaactaataaaaaacatttaaagccaacagactcagaaaggtaatctatcttaatggttaaaagcataggtacttggatagtatgggttgataggtgcagcaaaccgccacagcacatgtatacctatgtaacaaacctgcaggttctgcacatgtatcccagaacgtaaagtaaaatttaaaaaaaaatgtaatctccgcatgtcgaggaagggacctggtgggtggtgattggattatgggggcagtttccctcatgctgttttcatgac

SEQ ID NO: 37871 - DNA, 505 bp, Homo sapiens
tcattttgtcccgttaagctattcaattgaatgtcaggagccatgctcttcaaggaaacctttcaaagcctattccatgaaaggtcaccctctggtaccttccccaaagttgctgtgaaaggaggaaggacaaaggaatccactatacactgaccaaggagaacgtgttgcagygctgcaatgagcaggaaaaatatgatgggcctcagattaaagctactgtctgagattataaactaataaaaaacatttaaagccaacagactcagaaaggtaatctatcttaatggttaaaagcataggtacttggatagtatgggttgataggtgcagcaaaccgccacagcacatgtatacctatgtaacaaacctgcaggttctgcacatgtatcccagaacgtaaagtaaaatttaaaaaaaaatgtaatctccgcatgtcgaggaagggacctggtgggtggtgattggattatgggggcagtttccctcatgctgttttcatgac

SEQ ID NO: 37872 - DNA, 579 bp, Homo sapiens
gaaaattaccacctaggtggtggtaataaacataatagtagtaataatacaactaactcacgagctgttattacctacagtatactgttaaattcttccccagacattttaatttcatcttcctaatgactttaagaagcacctttatttggaaattttacagatctgaacttagtacccaaggatgattacataacttgcctaaagttctagccagcaagtggcaggagaaagcaacagcatagattagaggcagcattgcacactggaagacagacatgtataagcatcagagattgggagtttgtacacctgtgcacatagttctgcctggccggaacccaaaacgggtacagggagatattacagcagtgggaaaggcactggagggagacaggaagcaggaattgaggaggggctctggtcaccctaaagagcccgcacactttgtagggggccactttagaattttaggcataaagcaaaagttacaagaccataattgttcttgcaacactaatacccagaacatagattttcaaagaaatctaagtgctttttcttscttccataggcaaa

SEQ ID NO: 37873 - DNA, 804 bp, Homo sapiens
taaaggtaattcagcccatcattaattatgccaagtgctgaagaaaaaaatgaataatatctgaattaccagtaccctagttaaaattagtttcccatattagcgaaagttaaaagcagggccaggtgcggtggctcatacctacaatcacagcgctttgggagtctgaggcaggattactgtaggccaggggttcgagattagcctgggcaaaagtgagaccttgtctctacaaaaattaaaaaattagccgagtacacacctgtagtccwagctactcgggaggcttggttgagcccagtactttaggctgcagtaagctatggtcacaccattgcactctggcctgggcaacatagtgagaccttgtctttaaaaaagaaattacatttaaaagaaaaagaaaaagcctacttaagaaaaaccagtgacatactcagatgtttgctgctcttacaaaattaatatagctaaagataaaagctttgtttaatgtttaaaaaacagatttgtaggccgggcacagtggctcacgcctataatcccagcactttgggaggccgaggcaggcagatcacgaggtcaggagatccagaccatcctggctaacacggtgaaaccccgtctctactaaaaagacaaaaaattagccgggcgtggtggcgggcgcctgtagtcccagctactcaggaggccgaggcaggagaatggcgtgaacccaggaggcggagcttccagtgatccgagatcgccccattgcactccatgtgggcaacagagtgagactccgtctcaaaataaaaa

SEQ ID NO: 37874 - DNA, 548 bp, Homo sapiens
ggagacttatttgacttctctgagcctccttgtctataaaatgggaatcttgagtcaaagactctatctcatagtgtaatggaaagattaatttagaagcctataacatgccaacccttgtttatagcaaatactagatactccatatttgctcttcttcctacagactcacagtttaaacatataacaaaactgacttaagwaaatgttatagtaagataatagaatggaaccaggaaacataccagtgagatatgaaaagagggaagtgaggtgtcagaagaagaatatatggtcttttgctgaactctgaactcaaagagttataacaagtattttatttttatatagttccctatgatcagatcttttactttcaggccttctaattacctaaaacgaatgaggtctgaataaaaaaaaaaaatttacgtacacacaaagatatactgtcctgttttaagaaagaaaactatggacaaaaatggcatatagccagcagctcaagaaactttaagacatatacctggaacagtagctttaagtta

SEQ ID NO: 37875 - DNA, 862 bp, Homo sapiens
cacacctgccaagggtgagctaggtgcagaatggcaaggggtgtgtgaacgaccatagggtccagccactatacatagccaggcatgccggctgtggtggtgtgagcagctccaggcgccagcacgggcgccagctccctgtgaggctgtggctggaccaggtatagcataagcagcttctgtggctgacaccagggaacggggtggtactggaagcttggagacaccaggaaccacagagccctaaagagggtgtcacagccctggctcgggaagctcataggtctgggctcccctgaagggctgtagctcttctctccttctcttgtcttttcttcttgttgcctgcaacgtagtgagcaggggggcrtgtttcagccatttgtgttacagcattttaagccccaccattcagtgggtcctgagttcttgtcctgcatccaggaagaatgaggtaagcaaacaagtggagggtgagcaagagaagctctgttgagcgacagaacagctcagaggagacccacagtgggtagctcctctgaatggctacccccacctcatttgcgttctggtacatgtggacacagtcaatgcagcagtacccgatgtcaattgccaccttcacagcttcagttacctggcccaagggggacttgcaggtgcccagccccagtatgagcatctaggtgctgttgttgagcatgaggtagctggccgtggctgctgcactttacagacccccacctggaactgtcttattttattttatttttttttagagatagggtcttgctctgtcacccaggctagaatgcagtgttgcgatcatggctcactgcagcctcaaacccctgcgttcaag

SEQ ID NO: 37876 - DNA, 608 bp, Homo sapiens
tttttttttttttttgagacagatctactccgtcgcccagctggagtgcagtggtgtgatctcaactcactgtaacctctgactcccaggttcaagtgattctcttgcctcagcctcctgagtagctgagatcacaggtgccckccaccacatccagctaatttttgtatttttagtagagacggggatttcaccatgttggccaggctggtcttgaactcctgacctcaggtggtccacccacctcggcctcccaaagtgctgggattacaagaatgagccgccgtgcctggccaaactttacttttcgcggtattgtgaggaaggcaaaaggtttgaggtgagaagagatacacgagggagaaagtattacccagttttcttacttgttatttactcattccttttccctctcaagcagtatacacaacacacacatgtgcacgcgcacacacacacacagtctgtggggaaaaaaatatctcaatctcctccttatgaaggaagtaggatgttacagagatattatgatgcaatgaggaccctatgaaggacactgatgacattgtgaggtcaggatttttactgaaatgtttgtctgtatgaaa

SEQ ID NO: 37877 - DNA, 1029 bp, Homo sapiens
catctagtttgtcccctccctgtgaacccagggttcctccaggattccagctgggctctgtttgagtggaattgtcttgtgtttgcaccctctcccgttattctggtctcgagtttttctctctatccatcttctctcatttaacataggtttccccaacaccccccgacccccgcaccaggttctgagacccaccaagatacagagtgtgatagaactcagaccccgacctcgaggagcagagggggaaattgaggcctggagagggaggagaccagtcctcatgtatctgacagccttctcctgagacagacgttaagaaacagttcctggtggggacacaggacacctggtcactgagcagaagcttcagagaaaatgtaattcaaagcagagacctggagactgcataaggactgaccaatggaagaggtggtggaatgggtagagtcccagaaaggagaggcacaggtgcaagcaaggacacacactggagggaggggcggctggggaggtgggcggaggccgagtcccccagggcatcgcgtggtgggaggtggggtctgggacttggcgctggggtggaccctcattgcaggagaggagacctggagtgcactctggctgcagtgcwaggcatgggctggaaggcagcaggccgagggtcatcagaaccagaaggtccaggacaggctgaggcctggagaggggcacagagcgatgcagggcagtaggtagagttgggggagactgtggaggactcgaagcacgcctgggatggactcaccgtccatagggcaggagcagagacatccggagggtgctgcttgggaggcagcgtccctgacatgccgttcaccatatggagctcccgggggtttgtggggtgggggcagtgcggggagatgaaattagggtgcggcggctctgagaaccctgtgttgtgtcctcttggcagctggaacttagatctggaaatctgaggccccaagaggcagattttcccatcgtccttccacagggatgatt

SEQ ID NO: 37878 - DNA, 1029 bp, Homo sapiens
catctagtttgtcccctccctgtgaacccagggttcctccaggattccagctgggctctgtttgagtggaattgtcttgtgtttgcaccctctcccgttattctggtctcgagtttttctctctatccatcttctctcatttaacataggtttccccaacaccccccgacccccgcaccaggttctgagacccaccaagatacagagtgtgatagaactcagaccccgacctcgaggagcagagggggaaattgaggcctggagagggaggagaccagtcctcatgtatctgacagccttctcctgagacagacgttaagaaacagttcctggtggggacacaggacacctggtcactgagcagaagcttcagagaaaatgtaattcaaagcagagacctggagactgcataaggactgaccaatggaagaggtggtggaatgggtagagtcccagaaaggagaggcacaggtgcaagcaaggacacacactggagggaggggcggctggggaggtgggcggaggccgagtcccccagggcatcgcgtggtgggaggtggggtctgggacttggcgctggggtggaccctcattgcaggagaggagacctggagtgcactctggctgcagtgcaaggcatgggctggaaggcagcaggccgagggtcatcagaaccagaaggtccaggacaggctgaggcctggagaggggcacagagcgatgcrgggcagtaggtagagttgggggagactgtggaggactcgaagcacgcctgggatggactcaccgtccatagggcaggagcagagacatccggagggtgctgcttgggaggcagcgtccctgacatgccgttcaccatatggagctcccgggggtttgtggggtgggggcagtgcggggagatgaaattagggtgcggcggctctgagaaccctgtgttgtgtcctcttggcagctggaacttagatctggaaatctgaggccccaagaggcagattttcccatcgtccttccacagggatgatt

SEQ ID NO: 37879 - DNA, 2231 bp, Homo sapiens
ctgcatctgatgtggcccttctgctgtgcctgtggctccccagttgcctctgggccatcccagcctcagtttccccatctctgtcrtgagttaagttggactcagtggaggggcagggcaagggccctttggcttccttggaactgggaatgaaggctcagtttgtttgggaagcctcttgggaaagggtgggcgtgggtctgttcccctcaccccagccttatgcctacctgctcctgctttgggccccctggaaggctggcagcagaggggacccctttacagacctcatgctcggagagttgctgtagcttgctaaagatgagtttgtctcttaattgcttgtccacctggttttaataacactttgccctgcagaaatactcacccctcaagattctcaccccttgtgtgaggctccagcaacataagtagaaattagagcactgggaagctctgtttgttggaatagcactgggaagctctgtttgttggaatagcactgggaagctctgtgtgctggaatagcactgggaagctctgtgtgttggaatagcatgacaaacaggaaaagaacgagtgtgcctgcctttatgggtggctcgccctgtgccagacactcatttatctttgctgaaatgttctgtaatgtgtgctgttatgattcccattgtacagatgacaccatggaggttccgtgaggttaaatgtgatctcacagtttacatttgatggagctgggctttgaacctggggaccgcatcctctcacccctctccttttctgccaccttggctgggaagtggaggagttctgactcacagcccaaagtcctgtctacaccggatgccaagagaagaacccggcatacagcagacggtgaagatgcaggcgcagccctgccagggggtgggcagtggggtggggtggggggcagggctccgagctgctggggtggctgggctccgtaaacagaggagggtggaaaggtggtggggcccccagtctgcccatgataaatgtggtgattcgtggacagccgtcaacaagggctagagaaatctaacgagcccaaaaaacgccctgcacgaaaatctttggaaaaatcaacgggaaaccaaagcctgccaaagacttaagcttgtaccactcgcttctttggagctcatcgggcccagttatttaagaacaaccacccaagatcaactttagagccacttttccttgcaaggagaaggcagaaagctgagaggaacataaggaggagaaaaaacacggaaccttctttgacgggatccgtgtgcctcttgccaggtttacactttgaaatgagaagcaaatgttgggaaaacatgtcagacgatccaggctctgaaaccagtgagaggcttggagggaactaaggaggggcgggaacagcctgcatgaggccagcggctcctgtcaagaggaaggggcctgagcaggagagccccacgggcccccagaagggtggtgacaccgtccgtccacatatgggcacctgcctcaggaacttgtccagagcaggtggtcacgctgtcacatggaaatgggtctcaggactggagatgtgtcgaagcctggagccaggaagcctggggtgttgggctcaggacaggcatgagaactgccctcccatgtctgcaaagctcccagggggtgaaggagccagagaaggttcttgaattagaggtcatctccttctacccagcaaggcacccaggacagcatcctgttagcacctccgacctggtcatcttgtctcccactttcctctgggaacaagttcctgggagcccctgcaggtttttctggcacgtttgccctctcctgggatcaggccgaaagtcactttctccagaaaaaacaggattccacctgtgctcctgcagctcccaggtttgggagtgaacagcggggacaggttcctgggggcactggaggtcatccccttcctaagggggccggctcctggctctggtgttttctccatccctgtatataaccacacctcgaaggacctactctcccacaggcctgagcacccacccactatgtggcaccaggcagcagagcacatgggcaggggctatggaccaacttgcacctcaccttcagacttaggggcacctgggctgggagtgaatgcctcattcctggaggctgtcttcttgcagggctgtgggaagagagggtagagactgaaatta

SEQ ID NO: 37880 - DNA, 2231 bp, Homo sapiens
ctgcatctgatgtggcccttctgctgtgcctgtggctccccagttgcctctgggccatcccagcctcagtttccccatctctgtcatgagttaagttggactcagtggaggggcagggcaagggccctttggcttccttggaactgggaatgaaggctcagtttgtttgggaagcctcttgggaaagggtgggcgtgggtctgttcccctcaccccagccttatgcctacctgctcctgctttgggccccctggaaggctggcagcagaggggacccctttacagacctcatgctcggagagttgctgtagcttgctaaagatgagtttgtctcttaattgcttgtccacctggttttaataacactttgccctgcagaaatactcacccctcaagattctcaccccttgtgtgaggctccagcaacataagtagaaattagagcactgggaagctctgtttgttggaatagcactgggaagctctgtttgttggaatagcactgggaagctctgtgtgctggaatagcactgggaagctctgtgtgttggaatagcatgacaaacaggaaaagaacgagtgtgcctgcctttatgggtggctcgccctgtgccagacactcatttatctttgctgaaatgttctgtaatgtgtgctgttatgattcccattgtacagatgacaccatggaggttccgtgaggttaaatgtgatctcacagtttacatttgatggagctgggctttgaacctggggaccgcatcctctcacccctctccttttctgccaccttggctgggaagtggaggagttctgactcacagcccaaagtcctgtctacaccggatgccaagagaagaacccggcatacagcagacggtgaagatgcaggcgcagccctgccagggggtgggcagtggggtggggtggggggcagggctccgagctgctggggtggctgggctccgtaaacagaggagggtggaaaggtggtggggcccccagtctgcccatgataaatgtggtgattcgtggacagccgtcaacaagggctagagaaatctaacgagcccaaaaaacgccctgcacgaaaatctttggaaaaatcaacgggaaaccaaagcctgccaaagacttaagcttgtaccactcgcttctttggagctcatcgggcccagttatttaagaacaaccacccaagatcaactttagagccacttttccttgcaaggagaaggcagaaagctgagaggaacataaggaggagaaaaaacacggaaccttctttgacgggatccgtgtgcctcttgccaggtttacactttgaaatgagaagcaaatgttgggaaaacatgtcagacgatccaggctctgaaaccagtgagaggcttggagggaactaaggaggggcgggaacagcctgcatgaggccagcggctcctgtcaagaggaaggggcctgagcaggagagccccacgggcccccagaagggtggtgacaccgtccgtccacatatgggcacctgcctcaggaacttgtccagagcaggtggtcacgctgtcacatggaaatgggtctcaggactggagatgtgtcgaagcctggagccaggaagcctggggtgttgggctcaggacaggcatgagaactgccctcccatgtctgcaaagctcccagggggtgaaggagccagagaaggttcttgaattagaggtcatctccttctacccagcaaggcacccaggacagcatcctgttagcacctccgacctggtcatcttgtctcccactttcytctgggaacaagttcctgggagcccctgcaggtttttctggcacgtttgccctctcctgggatcaggccgaaagtcactttctccagaaaaaacaggattccacctgtgctcctgcagctcccaggtttgggagtgaacagcggggacaggttcctgggggcactggaggtcatccccttcctaagggggccggctcctggctctggtgttttctccatccctgtatataaccacacctcgaaggacctactctcccacaggcctgagcacccacccactatgtggcaccaggcagcagagcacatgggcaggggctatggaccaacttgcacctcaccttcagacttaggggcacctgggctgggagtgaatgcctcattcctggaggctgtcttcttgcagggctgtgggaagagagggtagagactgaaatta

SEQ ID NO: 37881 - DNA, 1171 bp, Homo sapiens
caaggaggcagagctgctagaggggccacctgagttctccagtcctgggaacaccccacttcgctctgaaccaacaaaggcctccgctctcccattccgaggtcgtgtcctgggatcgctgtgttgagtaattacttactggaagccgtccctccctcaggtggtgggtgggccgtgtgcgcgcaagttcgaattgtgtgtccacagagggaatattcatgaactcagtggcrggggtgggggtgttttggaagacagacttggatttctgagggagaagatacttacaaggccttggtggccagccaggttccccctcagcctctcgggcaaggaccccaggaggccacacatcgggggaggcctggaggccctggggccaagtatttggttcctgtcgatgaacaatttaatgagagttttcagaagggccagacagccctgggatgaatggctgatcccaaaatagcctcagctggcacttgggcagcttaaaagaggcttaaaaacagaaagaaccttcaaagaagggtgcccgggtgcccctgaagcactctcatgcggaggcctggggttctgctccccagggacgctgccctgccccactctgccctgagcagccgggcacagatgcactctgtcacatcccgtcctggcagaggccagaaggggcttggcagaaggagccttaggtgagcaccgttcccacccaaaatgcctgccctccagtccgccacggtcggcccaagctcccataccactgcccatgttggaaaagcccctcttggcagcccctatcccccagcaggcaagagtggtcctgagcctggaaggaatgttctagatgggaagaattgtctcctactctcggtggggtgccccggaccagctacaaatggtgaggaagacttgactcaagagtattacagcagggacagagatggactcagttctgaacacagtggggacacctggggattgacagcccatgggcaaagggaggggctgtggatggaaaatgatgacgtggaattcaatcatttgtcaaggggaggggattctcaatcagctcacttaggattctctgctaaaattgagttcagcaggccgtggtggagtctcgtggagaagagctcagagagaagggcccaactgaagggcagccagggag

SEQ ID NO: 37882 - DNA, 1171 bp, Homo sapiens
caaggaggcagagctgctagaggggccacctgagttctccagtcctgggaacaccccacttcgctctgaaccaacaaaggcctccgctctcccattccgaggtcgtgtcctgggatcgctgtgttgagtaattacttactggaagccgtccctccctcaggtggtgggtgggccgtgtgcgcgcaagttcgaattgtgtgtccacagagggaatattcatgaactcagtggcgggggtgggggtgttttggaagacagacttggatttctgagggagaagatacttacaaggccttggtggccagccaggttccccctcagcctctcgggcaaggaccccaggaggccacacatcgggggaggcctggaggccctggggccaagtatttggttcctgtcgatgaacaatttaatgagagttttcagaagggccagacagccctgggatgaatggctgatcccaaaatagcctcagctggcacttgggcagcttaaaagaggcttaaaaacagaaagaaccttcaaagaagggtgcccgggtgcccctgaagcactctcatgcggaggcctggggttctgctccccagggacgctgccctgccccactctgccctgagcagccgggcacagatgcactctgtcacatcccgtcctggcagaggccagaaggggcttggcagaaggagccttaggtgagcaccgttcccacccaaaatgcctgccctccagtccgccacggtcggcccaagctcccataccactgcccatgttggaaaagcccctcttggcagcccctatcccccagcaggcaagastggtcctgagcctggaaggaatgttctagatgggaagaattgtctcctactctcggtggggtgccccggaccagctacaaatggtgaggaagacttgactcaagagtattacagcagggacagagatggactcagttctgaacacagtggggacacctggggattgacagcccatgggcaaagggaggggctgtggatggaaaatgatgacgtggaattcaatcatttgtcaaggggaggggattctcaatcagctcacttaggattctctgctaaaattgagttcagcaggccgtggtggagtctcgtggagaagagctcagagagaagggcccaactgaagggcagccagggag

SEQ ID NO: 37883 - DNA, 1171 bp, Homo sapiens
caaggaggcagagctgctagaggggccacctgagttctccagtcctgggaacaccccacttcgctctgaaccaacaaaggcctccgctctcccattccgaggtcgtgtcctgggatcgctgtgttgagtaattacttactggaagccgtccctccctcaggtggtgggtgggccgtgtgcgcgcaagttcgaattgtgtgtccacagagggaatattcatgaactcagtggcgggggtgggggtgttttggaagacagacttggatttctgagggagaagatacttacaaggccttggtggccagccaggttccccctcagcctctcgggcaaggaccccaggaggccacacatcgggggaggcctggaggccctggggccaagtatttggttcctgtcgatgaacaatttaatgagagttttcagaagggccagacagccctgggatgaatggctgatcccaaaatagcctcagctggcacttgggcagcttaaaagaggcttaaaaacagaaagaaccttcaaagaagggtgcccgggtgcccctgaagcactctcatgcggaggcctggggttctgctccccagggacgctgccctgccccactctgccctgagcagccgggcacagatgcactctgtcacatcccgtcctggcagaggccagaaggggcttggcagaaggagccttaggtgagcaccgttcccacccaaaatgcctgccctccagtccgccacggtcggcccaagctcccataccactgcccatgttggaaaagcccctcttggcagcccctatcccccagcaggcaagagtggtcctgagcctggaaggaatgttctagatgggaagaattgtctcctactctcggtggggtgccccggaccagctacaaatggtgaggaagacttgactcaagagtattacagcagggacagagatggactcagttctgaacacagtggggacacctggggattgacagcccatgggcaaagggaggggctgtggatggaaaatgatgacgtggaattcaatcatttgtcaaggggaggggattctcaatcagctcacttaggattctctgctaaaaytgagttcagcaggccgtggtggagtctcgtggagaagagctcagagagaagggcccaactgaagggcagccagggag

SEQ ID NO: 37884 - DNA, 586 bp, Homo sapiens
gcttatctatgttccattagtgtataaactccagggcaaggaccctgtattcatcttgtattcctctatccctagtagggctatatcatggctggaaatctggtagatgcattttcctcagttcagaatgtgtggattagtaaggtggctctggcctggcgctggctaagccaatagaaccatactttgtggtgtcaagttgccatccctgagcttgctgacatcaatcttttggggcaagcccttaactccattttcagatagtttaactcttcacagcccctcatatatgactaaagctccctcatctgagccttctgtaaccttccctcagatgaagtcccacatttcaggaaaagaagtattcaggaaactggtattgaatgatatttactgattaaatgaagaggtggcattacaaagaacatatttcaagtaaaatgaagacagatggcaggaaacagtcgaggctcccagggcaagtttcctctctgattacaactagattctcccccaggaccaatttaatccaggagtccctttgattgccaacactgsctccccattcctctggcttaagcctttt

SEQ ID NO: 37885 - DNA, 591 bp, Homo sapiens
gcatacatacccaaatggaatgaaaattgagtaattcttcaaaagcattacacattgtctgcctatattaaaatatcacatgtaatccataaatatgtayggccattaggtattcattaaaattcaaaataataaatttaaaaaatcacaattgttatgaaacatttctggttcttatggtgctcactagtcattgtaagaaaacttaatatttttggatatttctaagtgtgtttatatttttttctatgaacaagaaattataatatcaccattagttgatgctgttttagatcttgcatattgatcttatgttctaaagaaattttctttacctcactaattagatttgctttcttgtttcactgattatcttcctattattttttgcgtcaagttctaagcccaacattacaatagacaagtgttgttatgagacccaaagcactgaagatcaattataatgttttaactgttattactggactaatttcaattgtcccctgagtccaaacaaattaagagtttgtttttaacatgctacattctttcaagagcagatattctgaagctgccaactgtacaccagtt

SEQ ID NO: 37886 - DNA, 748 bp, Homo sapiens
agctgggaccacaggcatatgccaccacacccagctaatttttgtatttttaatggagacggggtttcaccgtgttggccaggctggtctcgaactcctgacctcaggtgatccacccacctcggcctcccaaagtgctgggattacaggcatgagccaccactcctggcaactaaagtttgttctctttttaaattaacattttctttttaccaggatccaggttgttatttgtagcatcagtcctttcattttcttttccttctttctttctttttttttttttttgagaaaggatctcactctgtcacccaggctggagtgcagtagtaccatcacggctcagtgtaacctctgcctcccaggctcaaatgatcctcccacctcagcctctcgagtggctgggaccacaggtgtgcaccaccacacccagctaatttttaaattttttgtagagatggggcgctccctattttgcccaggctggtcttgaactcccgggctcaagcaatctgcccacctcggcctcccaaagtgctgggattacaggcatgagccactgtacctgactcatttttcatcayatataatagtttctaatatgtaaataaaccatgatatacttgtccagtctgtttacagacatcagggtttttttctgatttgtgtctactgtgaaaagttctgctggcttccatgaagggataagataaaaagtactttaaaaaaagtttctgctctatatata

SEQ ID NO: 37887 - DNA, 729 bp, Homo sapiens
ggctcacgcctgtaatcccagcactttgggaggcccaggcgggcggatcatgagctcaggagatagagaccattctggctaagagggtgaaaccctgtctctactaaaaatacaaaaaattagacggcgtggtggcacatgcctgtagtcccagctattcaggaagctgaggcaggagaatcgcttggacccagggggcggaggttgcagtgaaccgagatcacaccactgcactccagcctgggcaacagagcaagactccatctaaaaaagacaaaacaacaacaaaaaaaacaagccagaccagaggtgtgctgtggctaagttcccagacccatcagaccccactgtgcttgactgtgctcccatcacaagcaccaggagcaggcttgcaatgacagtgtccaccactccagatgcacctccagaagtggggcctctgattcaccctgttcccaccccattcctccatgctgtggagtgagcctccctcccgaggcctcccctcctccatccagggggatatactaagaagcacaggracctcagagtctaagcatcattccccaaactcatgcaaaaaatatccatcggccatcttcacctctgattgcagttccctcatttgacagcctctatcattgcccctactttacagaggaggatgccaagactcagggaagtaaaatgccttgcccagaatcaatactagttggcagtgacctgagg

SEQ ID NO: 37888 - DNA, 590 bp, Homo sapiens
atgtagatgaggggttgatgggcgcagcaaaccactatgacacgtgtatacttatgtaacaaacctacatgttctgcacatgtatcccagaacttaaagtattaaaaagaaaaaaaaaggaaaaaaaaaaagcatattgtgtatgccaagataagcctttgaaaaacactgggctacaacaatgaattagatatctgccctcaaagcacttttatatgctaaacataaaccacaaacatttactggacgcatactatgtgcagagtaagttaatccaaaagagggaataatcatttgaatttcaatatgaaaaaaagaaaaacactgattgcaaaggcatagtatgataaaaagaatgtaaaaatctcattacatgctgaaatgattaagttttggatacgtcaagttaaataacatcgttaaaattaatttcatctgtttctttatcctttaaaaaatatcctaaaaaaaataacatcattaaaatttwaaaaaaaaaagaaagaaaaagtgctcatcattaggacaaatagctaatgcctgtggggcttaaaacctaaatgcaggttaataggtgcagcaaaccagca

SEQ ID NO: 37889 - DNA, 798 bp, Homo sapiens
cttctcaagacatgttcgcagtaaatccataagatagatgggcaagtattttttgttttgttttgtcttgtttgctttttaaaatattaccttttgtcagatgaagaaagtgaacacagactggcttacrtgatttgaccaaagtcttcttacgacagagccaggattaagactcggatttcctgactttgattctagtatttcttccaacagtcatgaagagtatatttcctttgcagtcatataacatattctcattagcaaaatgctcctttctgatgtctacgaaaaggagttggcaagtatcattcttgatgacagatgctggggagagatgtatcattagggtgcaaaggccactttcgaatgttctttcttgcttcttgaatatttgcagaggcagaagatatgtgcatcttaggatctatcatcatgtaagctgaaatgaaaaaagaactcgggttgaatttacatagacctatcattatttccaattgcatctggtcaaaaacaaatgggaattttagaatgtcgtcatctgttcaatgccttcattgcaaggcttggttgtaactcctgctggctctttcatctgagtacatttccaattttgctttacatgattcatcttaaactttattgtcatgctcatggtaataatgcaggttgacaacactttaaatggctggcttcccatgacacaaggtaattaatttttatattgcattttttagtataaagtattgagacaaagactttaaagaccaaaatgataatggttttgggggtacacgaatt

SEQ ID NO: 37890 - DNA, 1295 bp, Homo sapiens
cttcttgtttccctagaactctacagagaccccaagagatatttaccaggaaggtaaacatagtcttttcctaacaaaaacccttatatccaagaaggtagtttatgggtgttcttaaatatcaaacttggtgcaagcttgtccaacatgcagcctgcaggctgcatgcagctcaggatggcttggaatgcagaccaacacaaattcataaactgttttaaaacattatgagggccaggtgaggtgactcacgcctgtaattccagcactctggggggctaaggtgggtgaatcacctgagattaggagtttgagaccagcctgaccaacatggtgaaaccctgtatctactaaaaatacaaaataagctgggtgtggtggcgcatgcctgtaatcccagctacttgggaagctgaggcaggagaatctcttgaacccgggaggtggaggttgcagtgagctgagatcgacccattgcactccaacctgggcaataagagtgaaactctgtctccaaaaaaaaaaaaaaaaaaaaactgtgagatttttctttttccgattttattttktagctcatcagctatcattagtgtcagtgcattttatgtgtggtccaagacaattcttccaatgtggctcagggaagtcaaaagattggacacctctggttgctggtttagaattgatgtataggcaagaaatgcctgcagtagatacttgagcagggaaggataattatcaaaatggaaatctgactctggcagagttctgaaagctgaatgaaaatgagatgaagctgtatgaatgaaagctgttgtagaagacttttgtggttacctatcagaactcagtataagtatggggtggttctgtgtttgcagaaatgataatgaaggaatgaaaataagagatatatgagaaagattctgagatttggaagactatattattctcgtcagtcatgaagctggccagactcacaaccccttctggggaaactgtctcattcacgcacttactgaaggaacagccttgtgtttattactacatgccccccacctttctggacatagttaatttattcaataatacactttggccatgaggtcagtcaatctatatgttcaggctatgaattgacctggtgtgaaataacaagtcaatcaaagtctttctctctgaaatttaaattaacaaatgccagatgaggactgacatttggttctatggttagaaatcatagaaattgaaatggaaaagatacaccaagatagaaataagtagaatatgcataa

SEQ ID NO: 37891 - DNA, 1295 bp, Homo sapiens
cttcttgtttccctagaactctacagagaccccaagagatatttaccaggaaggtaaacatagtcttttcctaacaaaaacccttatatccaagaaggtagtttatgggtgttcttaaatatcaaacttggtgcaagcttgtccaacatgcagcctgcaggctgcatgcagctcaggatggcttggaatgcagaccaacacaaattcataaactgttttaaaacattatgagggccaggtgaggtgactcacgcctgtaattccagcactctggggggctaaggtgggtgaatcacctgagattaggagtttgagaccagcctgaccaacatggtgaaaccctgtatctactaaaaatacaaaataagctgggtgtggtggcgcatgcctgtaatcccagctacttgggaagctgaggcaggagaatctcttgaacccgggaggtggaggttgcagtgagctgagatcgacccattgcactccaacctgggcaataagagtgaaactctgtctccaaaaaaaaaaaaaaaaaaaaactgtgagatttttctttttccgattttattttttagctcatcagctatcattagtgtcagtgcattttatgtgtggtccaagacaattcttccaatgtggctcagggaagtcaaaagattggacacctctggttgctggtttagaattgatgtataggcaagaaatgcctgcagtagatacttgagcagggaaggataattatcaaaatggaaatctgactctggcagagttctgaaagctgaatgaaaatgagatgaagctgtatgaatgaaagctgttgtagaagacttttgtggttacctatcagaactcagtataagtatggggtggttctgtgttygcagaaatgataatgaaggaatgaaaataagagatatatgagaaagattctgagatttggaagactatattattctcgtcagtcatgaagctggccagactcacaaccccttctggggaaactgtctcattcacgcacttactgaaggaacagccttgtgtttattactacatgccccccacctttctggacatagttaatttattcaataatacactttggccatgaggtcagtcaatctatatgttcaggctatgaattgacctggtgtgaaataacaagtcaatcaaagtctttctctctgaaatttaaattaacaaatgccagatgaggactgacatttggttctatggttagaaatcatagaaattgaaatggaaaagatacaccaagatagaaataagtagaatatgcataa

SEQ ID NO: 37892 - DNA, 1113 bp, Homo sapiens
tgaccagcacaacttcatgatgcagccattccctccattcagggtagtggacggtgacagggcaagactccagcacattgcagggcagctttcctggtccctctgtgtaatttgtagtgaatttggtatttgtgaatgtgcctcgtgttccctcagcttcagagccatctactgttctgagaggggcttgtcttcctgaggaccatggtggaggaaaatgctcctcttgtgagacaaagggaatgagtgacaggacagagaatttcctggacggctctgtaccagaaatgtaccaggttccacagtagatgggctctgcagagttggcatgagtgattcacaggagtgtgcttggtgagtttggacaaacattgaaattgggttttgctaacaaagccctactccaccatgaacaggcagggtaccttgaatcctaattttcagattctgagggacagcatttgcatgctgtctctatgaagaactttattcaaagctcactattgattgtggtcttgcaggtcctaaagagaaaacttgcttctacagaaatttatgattcatgaaatgctgtctcctttataaattcttacccctgagaagcagaccctctccttggcaggagttcttcagggaataccctggggaccaagcaacactccagttatttttaaattgagcatattcacactgatttcaaggacagtgtatgcgcttattgattcaataaacatgatcctgcataaggaattattgagtagaaggctatgctggaaggtggaattgagaatctgccctcacgttcccagaactcaacaggaccaaaggaagtgatgcacgttgaaactatgattctgttttacacggtcaggcmtagagcatctgccactacagcctgttggctgcttgccttgccatgcaaatttgctttccatccaggccaatttgctctagtgagggtctccctggatgtcattagcaatgctttatcttctgattatgtgaggagtgttgtgtctctgaacattattgcctgcagattctggtgagtgcagtgaagaaagttgatggtatctcagtagatcgtcttattgacccttgggaagtttcttc

SEQ ID NO: 37893 - DNA, 515 bp, Homo sapiens
cacatcctcacttccacacatagcagggtctatttcttatatttttattctgttctattgggatatttgtctgagcatatgccagtgacactcttattactgggaatagatagcatgctctttttcatagctctctttttccatttctgtggatatgttggtttagttttctacacgaactttaaaatcagtttgtctgctcctgtaacgtcaccctccacccctaattgtgttagtattttatagaccagtggttaggaatgtagatgctgaaatgagactgcctgcattcaaatcccarttgccattttctctgtgagtgggcaaatttcttagttttttaaaacttcaatttctctattgaatattccacacagtatcctgttacgacaatattcacagaaggaacgcagctaacactgatttcatttaccaggtaccaggtacaatacacttattgctgatgttatgattctgataatcattactgaagtgtctccatgacaaagtgtccc

SEQ ID NO: 37894 - DNA, 578 bp, Homo sapiens
gcattgttacagaatctgtgagaggtccctgtggacctgcccagccgccccaggcgacaggtgttggcgctgccatatccctccctccctctgcacatcgagcactggtcctcccctgttcctagcacgcagcctggcacacgacagatgtccaactgttaactgagttgtcccaaataagcctagtggcaggagccccggctggctggggattgggggtccaaggccacagacaccctcaggtctgtcccaatccataggtcagacagtgggtgggggtggccctttaatcgagggaggggtgcgtcaggccgaggccagaacgttcaggctaaagctgcttgagcctgacagagctgggagcaaggcctgctggggaggtgcccggaaggagctgtgatttcaagcagctcccttagcgtaagctctgggcttctgcaaccctgcagagcacctgtctccctgggtagggcttagagggtgaggccccagctttgtgaccttggctcctgctgacaagggtgaggaggtgagggargcaactgccgatatctgctttagttcagacccgggagcca

SEQ ID NO: 37895 - DNA, 790 bp, Homo sapiens
cccaggctccctcaccacatggtggcagcagatcgaccacacaagccttggcctcagcctccaggtctaaagcagctaactcaccctccaggaactcactgctgtgtttcagaaaactttggatcaaaaacagcaatttccactgtgaaaacaaataaagtaaaagggcttttccttggacaaacgctttataaccgttctacagtcctagtatttatgctcagtcagttgtcattcactggctggtagattggggcagggagcacataaagattaagtaatgtttaacacaagcctgctttcccagcctgggatctcagctcctccattcttcagggagtttcctctsctgaaactgctggagagtctcagccctcatgtgggtcatttctccatgatgatacctgttattttcttcctctcctggagataagacagggcagagattggttctgggtctccacaattctaggttttctcctaaaccagccaggtcagctggaagcaatcatgacagagaggtcaggtcagtgaagagggtcccaggggagcagggggtcacaaggacagcccctcatggagatggtcaggaccgtgacatgggcaacatttgaccaattctgctggggataatgtgccaaggattaaggggaggatgctgccataagtagaaagaggaagaaccaaaggagtaggagaagaaggaaaataaaatgatttctataaagatagaaagaaaggcagagcccagaggcaagccccatgtcacagagggttagttccaggtttt

SEQ ID NO: 37896 - DNA, 774 bp, Homo sapiens
atttggcaagtgaaagagagaaagagtatttccagttgagcagttgagaaagtacataaagctctgtgccatgaagacaaaagccagttattggaggctgaacattatatggagaaggagtcttttttgattgcattgtctagagagttactctggtgggacttttcttaacaggtctcactcaatatgggccagtggggcatgttgggaaagtagtggctctagggcagtgtaaggatgtatgaggttcaggacaggttggaaatccacatctgaatgcagcctgaaatacaatactgtgactagcgtggttgcctgaatggttctgttcccaggaggaccaggagttccttggcatggttgtgggggagaaggataaatgggagaactcagaggaaccagtccctcaggagaaagaacaggaagtrgtgcctcgcccaaattgccctgtgaagctgagcccaaccagcttgaggtcaatttggaggatgctatgggcatcctagttacaaagttcatggtagaagtcaggtcactgcaagaatgaacaaaagctcctcttttgtcagggtttgactgacggcaatggtgaattttgactttgactgagcttgaaacgtgcttgttttctctccaaagctgaggcccatttgcacaacaagcaaaaagacaaggtaaacaacttctgtttagactttccaaggtctgtttctctagatgacatctcaagaactctatgacatcacctcacctgggagtgaacccaaacactga

SEQ ID NO: 37897 - DNA, 554 bp, Homo sapiens
aatgggggctctttccattcgcagcatcatgggattccaggatcttttcttttcttttttttttttttttgagatggagtcttgctttgttgcccaggctggaatgcagtggcgcgatctcagctcactgcaaactccacctcctgggttyaagctattctcctgcctcagcctcctgagtagctgggactacaggcgcacgccaccacaccaggctgattttgtatttttagtagagacagggttgctccatgttggtcaggctggtctcgaactcccgacctcaggtgatccgcccacctcagcctccctaagtgctaggattacaggcatgagccactgcgcccagcccaggatcttttctttttcttttgatacgggaacttgctctgtcacccaggctggagtgcagtggcaccaacatagcccactgcagcctcgaattcctgggctcaagtaatcctcctgcctcagcctctggaatagctgggactacatgcatgcgccaccatgcccagctaattattattattattatttttagaaatgagacc

SEQ ID NO: 37898 - DNA, 545 bp, Homo sapiens
tcgaacttctgggctcaggtgatcctcccgcctcaacctcttgggtagctgggactrcaggcgcatgccatcacgcccggctaatttctaaaaatatattattttaataagagacaaggtcttgctctgttgcccaaactggtctcaaacttccatgctcaagcaatcctccttacctcggcctcccgaagtgctgagactacccacatgagccaccatgcctggctacaattccaagttttctaaagtgcttgtgacaaggaaagggaggtcaggggcctgcaattgggaagaagccttctaaagtttagccagactagggggggaatggtaaggtctccttggttatctaagtcagtgcttcataaacgcaccccaaatttcactcttctgcttgggaaagaccttaagcccagcgatacacaaacttgcaaatttcaggctcctggttgtgtgctttcttatgactagcccattgaaatgagctcataaatgttttctttcaatgctttcataccagagtacttcggttgatgaattcagca

SEQ ID NO: 37899 - DNA, 1089 bp, Homo sapiens
  misc_feature (1)...(1089): n = A,T,C or G
acctcataaaactggaagcccagagtagggcacattctgtcctcatcagatcaatcattcttctcatgatcacaaaatgactgcagtggccccaggcattgcatctctacacaccgtccagaggcaaaatagaattctatcctttctttgtgtctccttttaaggactagggatccttttcttgtgctctttttaaaagttaagaatccttttccagaatcttctgcactactgtagtcttcctccctgcctcaagtttgtaaaccccttcctaagtcaatgattagcaacggattgccttgactggcttaaccaatcaagatcaatgaggagatgggtccaggtgtctctgaagcacgtggatggcggagaactggacagaatctcagctctgttgacaaagaagggggtggtagggtgctgtgcatcattgggggattgtaggtggtattgtcatatgatcaaatttgcattgtggaaagatggttttggccaggcgtggtgcctcttgcctgtaatcccagcactttgggaggctgaggcaggtggatcatgagctcaggagtttgagaccnnnnnnnnnnnnnnnnnnnnnnnnnnnnnnnnnnnnnnnnnnnnnnnnnnnnnnnnnnnnnnnnnnnnnnnnnnnnnnnnnnnnnnnnnnnnnnnnnnnntttttttttttctgaaatggagttttaactcttgttgcccaggmtggagtgcaatggcgcgaccttggctcatagcaatctctgcctcccaggttcatacgattctcctgcctcagcctcccaagtagctgggattacaagcatgtaccactacgcccagctaattttgtatttttagtagagacagggtttcaccatgttggtcaggctggtctcgaactcctgacctcaggttatctacccacttctgccgcccaaagtgctgggattacaggcgtgagccacagtgcctggctgcattgtggaaagatgaatatgacaatagcttgtagaatgatgacagagaagaatgagacgcaacacaggaaaactgctgtagcaggggtggagatgaatgatagcctcaatcagtcac

SEQ ID NO: 37900 - DNA, 657 bp, Homo sapiens
ctaatcactgcacatttcccccagaaccccctcccccttcccatgccctccaaaaatgtaagaatctagtacttttttcattaggatgtgaggctgatttgtgtccttagtaccatttggaattttaaatctgagcgccttcctgatacaaggtgttttaaacttttttccacccttaaaactcttgagaagatagtaatttaaaaggaagtgatagccacacaattcccctccccacctttttgggagccaggagaggaatagataggaggtaggaaaataactggatgcctcgtgagttggattttttctttttcttttttttttcctggtaggggtgaggctgtgttaaatgcgaggtgttttttgaggaaaggactttgttgtttttgttgaaaacgccttccaagtcaaagtggtattcaaactttcccataactctaagatggcttcaaaattctsgtctcttgtcacttgcggccagcgcctgctctttttgggcagggagacttcttggaatcgtgttcgaaggctgactcctgctcagttgttacgtttcccaccgaaatcattgctcatcccaaaccgtgtttttgtgaagacggtttggattactgcccaaactcgggcttcgtgagatttatatgagcgatgtgc

SEQ ID NO: 37901 - DNA, 901 bp, Homo sapiens
ctccctacctgcctttccttccttccttccttccttccttccttcctktgtccttccttcctctctctctgtctcgctctctttcatgacgaatgaatataccttgtagacataagtgaatacatttcatgatactgtacttttttcttttcttaatcaagtgaacatcttccttagtgacatatagggtactgtctcctgacttttgctctgagacgcagcactcagcagaacagagtgtgggctttggattcagagccataagtttgagtcccagctctccctttatgctgggcaaacagtgtcgctcttctgcagttccattcccatgttagtaatataggcacgaccatttctgccttgccatattgtgttcagaactaaaggtgattgtgcatgtaaagtgcctcactcccagtgggctttcaggcatccccaggtgctgcgttttattcagttaaaaaagtcaaaggaagagtctaaacacctcccaccagggtcgttgataaatatcttgtctcagccttcttgagtccagcaaggatgtgaatgtcataccttcagtaaactagattttgtacttctagaagacttttattaggcacataagaaaatgatgctaacaaagttcaaagttgctccgtgttgcagtgatcttttaaaagggaagttttgaggtagttttgaagcagatttctggaatcatcttcaggactttcgtgagctcattgtaatgtgttatgtgaaatgcatgtcctcaaaacatgggtggttgtataaatgaggaagctggcctcatggagccaaagcagcatggaaaggcccaaataacttgctgtggggaagactgactgcctctggggtttttaatcagcatgaaaagccacccagggccccaaat

SEQ ID NO: 37902 - DNA, 561 bp, Homo sapiens
cactttagctctgctctttgtagattgactcatctagaggagattttgtacaaatttttttcagctaatttctccagttcatttgtttattgatatagtattacattattatttagttaagcaaatggtctacaccacatgacttcaagcctcmatgtcttcttttttgttgttgatttgtatactaaatttcagaaatggctttttatggggaaggttggagacaaataatgactatatacacatatatttcacatatatatgttattgaaacatatgagtgtcatatatgtgtaagtggatgtagacaagtaatgagtatatatacatatacagtcatgtgtcacttaataacagggatacattctgaaatgcatcattaggtgattatgttattgtgggaacatcaaaaagtgtacttacacaaccctaggtagtagagcctactacatcatacctaggctatatgttatagcctatgacccctaggctacaaacctgtacaacatgctactgtactggatactataggcaattgtgacacaatggtaagtatttgtg

SEQ ID NO: 37903 - DNA, 818 bp, Homo sapiens
aattccaagatggtgtactcacatgccyaacatgtggaaggctcatgctatgcctgggccttgagactgcaccaatggaccaggagggtgatttttcttgcagtgcttgcaggtgggtgaccaccccaatgtggactcattcatctcctcctccctcccctgctgaccccattatccactcagtcaaccattcccttacacttttgcccactcagcactcactcagtcactcagtgtaccggacccctcttgggcaccgaattcctatcctctcagccacctcttgctccagccgctactatgatgacagttctactcaggcttcagtcagctttgtgtgggtgtgagctgatggtttctcacctcagacctaatcacatcctctcgtttcctgcctggagacttcctcactccatgatgtaggatgcccacagggaccctcttggcatacacacacgtgtaaccacaagtgcagaggagccaatgcctgtgaggcagccctaagacaatggaagatggaaaccagtgggttaatgcttcccctattttcccctggacagacagtcttgagatacattttacaggcttcacagaggtctgttggactcaaacaactagtgactcatagcaggggccaattcaataatgaaacttattatcatccaaaaactcaatggctaaaagcaacaataaacactaaaaatcttagtttctgtgggtcagaaatgtggaaatagcttagtggggttgttctggcttggggtctctcatgaggttgcagtcacaatattggctgggtctgcactcatctgaaggct

SEQ ID NO: 37904 - DNA, 508 bp, Homo sapiens
gtgggcaagaccagtgtttctaacacaagttctccagatctctagagggcgccagaggccatcccaggggttctgcagctgctcgaaaaggggaccaagaatttacctaggattaaatccatattggctattgcttaataaatgaagtttgttytataaccatccattcagaaaacatttattgagcacctactatatgccaggcacaatgccaagcatcagcattacgacgctgagagaaacaagcacatttatgccattttggagctggcaatgtcattggggagctcatgatattcagagtggggtcccagggcggctgcaccaacagaatttctgactccatctccagatggtcctgacagttttcgtctgcatttggagcaaatctgcctccttgagaacatttccttcttcaccccagccttggccttccatcttataaatgagacatttgtacaggaagatccttaagaacctctctggctcccacgtttcctggctcccg

SEQ ID NO: 37905 - DNA, 1092 bp, Homo sapiens
attggagaacgtggtgaagcttgtcatggcgagttttcagtgaattaaaggagccggaatttaatgtcattctggccgcgtcatttcttccccaaggagggcaatatacgaggtcagaccagctccctacactgggaacgtgcacttgatcaagtccctgaccagctctgagccctggaacccactaggcttttccgaggattaaacgagttgatgtagacaaagcacttgaaaccctgcccagcacatagcaggctcaaggtcaatgtaaaccatttattattactattcagagtattcctaggacaccaggtggaggggaggagccgtgcagataatatagttatatttgagtttggtggagggaataaaaggagaacaaatctctcctgtctctgtttctgtctctcagtgtcctgacccttgcatcccaattgcattaaaaaaaaacaaaacaaaacaaaaaaaagaacaacaacaacaaaaagcaaaacagtaagaatagcaacaacaacaaaagcagagctcagctcagggaggggcctccatgtctgggcaggttctcagacagaagccagggagaaaacagcccagaggtgaagcagcagtgccaacaccaatttcacaaaccagctgtttcaccggccgtggaatgtcatgggtctctggactccgggctgggagcccatagctggggcctgcagtgctgtgtttaaacatcatgggctgtgatgggcttgtgtgcagggagtggagggtctggacacactcaggaagtgtcatctctgagcctggggcactctatcttgtcaggagagacctgagctgatgagscttccccattagctccatcaccggctcctctggctttgagagggagcggctgcatctcccctccaggatcaaagccacccctctctttctttcctattcctgccttttgtctgctcttctgtcttgcccagaaatgatctgcgggagagcagggctgtgtcagggagtggggctgaggtgtctactccaagcttttgtgctatccagaccccttcctgcgcacccgcacctgctgccaggctgggacaacctccttct

SEQ ID NO: 37906 - DNA, 614 bp, Homo sapiens
gatactctaaacatctgctgacagggtggtacctggacaactttgaaaccatgagatggcagagccacaaggtggaaggagtctgggtctatgagtcatcactttgaggggagcctctcaagaagcccttcctactaggaattacattggattttgtataagtgagaattttatatgttaagccattgagatttgggagcgattaatcaatcctgtctaatgcaacttcaagtccatctgtttcaagtttcttctattttccaattcttctttctcagtgtccattgctgactttgctttcctctgccttatctcctgctttatagtcactgggccatatagatcatactttttaaaatagtgcctgtatcaattttctcctacctaaatgttctttttttttctttttttcttttttttttgagacagagtctcattctgtccccaggctggagtgcactggtgtratctcgtcttgctgcaacctctgcctcttgggttcaagcgattctcctgcctcagcctcccaagtagctgggactataggcatgcaccaccacgcccagctaatttttgtatttttagtagagatggggtttcaccatgttggccaa

SEQ ID NO: 37907 - DNA, 614 bp, Homo sapiens
gatactctaaacatctgctgacagggtggtacctggacaactttgaaaccatgagatggcagagccacaaggtggaaggagtctgggtctatgagtcatcactttgaggggagcctctcaagaagcccttcctactaggaattacattggattttgtataagtgagaattttatatgttaagccattgagatttgggagcgattaatcaatcctgtctaatgcaacttcaagtccatctgtttcaagtttcttctattttccaattcttctttctcagtgtccattgctgactttgctttcctctgccttatctcctgctttatagtcactgggccatatagatcatactttttaaaatagtgcctgtatcaattttctcctacctaaatgttctttttttttctttttttcttttttttttgagacagagtctcattctgtccccaggctggagtgcactggtgtaatctcgtcttgctgcaacctcygcctcttgggttcaagcgattctcctgcctcagcctcccaagtagctgggactataggcatgcaccaccacgcccagctaatttttgtatttttagtagagatggggtttcaccatgttggccaa

SEQ ID NO: 37908 - DNA, 721 bp, Homo sapiens
ttcaaaattactgtagcatacaaaatagtttcatcaccctaaacaatcttctgtgcctcgcttctgttgttttccccaccctaaacagctttcagccacagattggtttatcatctctatggtccctagctgttttttaataaaataatatttttgcatttttgtttattctttcataacataaattctctaaatctacagcagcaggagccaaaatgccatttctgaaatatattttacacaatatccctttatgatgtaacatattttctacaaataacacaaatttaaaacaaatcagggatttgccaatgaaaagtaccccacttatttttaaattattcacaggccttttacagcctctgaactacatacaaatcacgagtcatcaggaatacagattaaaatactgagaaatgtaggagtgacatatagctatagcacataattataaaaattgggccaggcatggactaatttctgtaatctcagcaatttgggaggctaaggcagaagaattgcttcaggccaggagctcaataccggcctgggcaacatagtgasatccccatctttttagcaaatttaaaaaaaattatccacgcatggtggcgtacgcctgcagcaccagctactcagaaggctgaagcagaagaattgcttgagcccaggagtttgaagttgcagtgaactatgctcgtgccactgcaatccagtctgg

SEQ ID NO: 37909 - DNA, 830 bp, Homo sapiens
aagaagtccaaccatcccgaggttggcaagctatgaggaagcccaggccacatggagaagccctgtgtaggtgctttgattccagcctcagctgaggtcccagctgacagccagcatcaacccccagacatgtgagggaagcagccttcacatgacccagctcccagccaccaagtcttcccagctaaggccccagacatcatggagcagacatcagccatctcctctgtgccttatctgaattcctgacctcacagattccacgagcacaatgaaatggttgctttaaactgctaagattttaggtaatttgtcacacctctcctctactctttttgataacctggctcctccaccaggcccttgaggaggctcagcccagtccttcaggcagggacaagggagggaggctgggggtgaggtggggtgggacagtgggggacacacctgagcacattcttaagactgtcatctttcagacactgagattcatagagaaggtagtgtccacccccctggaggaaggacttggctgcacttctgaggggcctgccaggcctaggacctgcttcttttattctgctctgaggctcaacatggcagtgctgggcctttggcagtggctcacccctgtctagctcctctcatgttttcctttgaggctggggcctgcggggtcactctcctcccatctccaaaaatagagcaagaagaggaaggtggctccattcagcggaaagatctgaggattgaaacagagttgtggagaagggtggcagggtcctgtcttttcccgaggggctrgggtatgggccaggcggctgcttctg

SEQ ID NO: 37910 - DNA, 1148 bp, Homo sapiens
atcctgccagtgtgaatactccattctctgcgagtcgcaggtcaggctgcttttgaggcaagcacacgttaagtattgarcagaaacatttgaagcaaagatgagaaagacagaaggggaagcaagaaaaatagtcttcccagtgtgcctatttgggtgcatataaagttacttttagatgtgcgattactggttaatgatttggggaattcttttcaagtagaaatcctgggctaaaaactaagtgtgctcaagctacccccgcacccactgattctgcactccatgggaaaagttctcacaagcaagtcctttgtccactacccacgtctataggaaatgtttgaacagctatacacaaagaactcacaagtccacaacctcgggggtgttgcgggtggagagggcagtggtaaaggtgatgacagggagggcctgtggggacagtaatattagattagtggtcagaagatgctggagcctgccttgccagtcacacacttttagaggaatgctggacagtacacaccctccccaaccctgaatgtaggccctcgctgacatcacgccagatgaagccctgaggtctttaacatctgtaactctatggcatgtaacataaacaggtgtctgaccagtttccccagatatagaataataataatacctttcatttaaaaaggtaagagggaattcaacaagctttccttcttaaataaatctccatctcaggaagccatggaaagatgcccctcccacactaagactgtagagagaggcactgtgaaggtctggcttggagatctcagctcttcctgcctctcagggggaaagggcagatccagcaggccgggaaaggatctcccagggtcccaaggaggcagcatggggcaaagtccaacagtgaggattctctccttctctggtctcttttctgttaaaaatgcttctttggggtacccttcattactaccctggaggttgaaggacacttcttgagaaggcatagatactcttcaggtatgctgaagaaatgagttgtgctaaaaccactggttaattttgtctgtggcaaaaaatcatgagggtgacatagactcccaggccaggaacccgagactggatttaagagatgtggccaggatcca

SEQ ID NO: 37911 - DNA, 1148 bp, Homo sapiens
atcctgccagtgtgaatactccattctctgcgagtcgcaggtcaggctgcttttgaggcaagcacacgttaagtattgagcagaaacatttgaagcaaagatgagaaagacagaaggggaagcaagaaaaatagtcttcccagtgtgcctatttgggtgcatataaagttacttttagatgtgcgattactggttaatgatttggggaattcttttcaagtagaaatcctgggctaaaaactaagtgtgctcaarctacccccgcacccactgattctgcactccatgggaaaagttctcacaagcaagtcctttgtccactacccacgtctataggaaatgtttgaacagctatacacaaagaactcacaagtccacaacctcgggggtgttgcgggtggagagggcagtggtaaaggtgatgacagggagggcctgtggggacagtaatattagattagtggtcagaagatgctggagcctgccttgccagtcacacacttttagaggaatgctggacagtacacaccctccccaaccctgaatgtaggccctcgctgacatcacgccagatgaagccctgaggtctttaacatctgtaactctatggcatgtaacataaacaggtgtctgaccagtttccccagatatagaataataataatacctttcatttaaaaaggtaagagggaattcaacaagctttccttcttaaataaatctccatctcaggaagccatggaaagatgcccctcccacactaagactgtagagagaggcactgtgaaggtctggcttggagatctcagctcttcctgcctctcagggggaaagggcagatccagcaggccgggaaaggatctcccagggtcccaaggaggcagcatggggcaaagtccaacagtgaggattctctccttctctggtctcttttctgttaaaaatgcttctttggggtacccttcattactaccctggaggttgaaggacacttcttgagaaggcatagatactcttcaggtatgctgaagaaatgagttgtgctaaaaccactggttaattttgtctgtggcaaaaaatcatgagggtgacatagactcccaggccaggaacccgagactggatttaagagatgtggccaggatcca

SEQ ID NO: 37912 - DNA, 577 bp, Homo sapiens
attgtcatgtatccataattacagtattatgcgaacagttttaccactctaagaaattcctcctgcttaacctatttaatccttcctcccctctccctgagcccctggaaatcaatgcatttttttaatgtctccatagttttgccttttccagaatgtcatstaattgtaaacatacaatatgtagcctttcagatcggattgtttcacttggaactacgcatttaagattcattcatgtctttttgtgattcaacagctcatttatttttatcatcaaataatattccagcaactgactgtaccacagtttatttatccattcacctattgaaggacatcttatttgcccccagtttttggtcattatgaatacagccgctataaatatttgtttgcaggtttttatgtggatataaatctcaaatcagttgggtaaacacctaaaagttcaaatgctgaatcatatggtaagactgtgtttagcttctctggcctacttagctagcatgtgccactcctcaaaatcaggtggtgactacccctacgatcatcgacagccaacaccgtcagttat

SEQ ID NO: 37913 - DNA, 577 bp, Homo sapiens
attgtcatgtatccataattacagtattatgcgaacagttttaccactctaagaaattcctcctgcttaacctatttaatccttcctcccctctccctgagcccctggaaatcaatgcatttttttaatgtctccatagttttgccttttccagaatgtcatgtaattgtaaacatacaatatgtagcctttcagatcggattgtttcacttggaactacgcatttaagattcattcatgtctttttgtgattcaacagctcatttatttttatcatcaaataatattccagcaactgactgtaccacagtttatttatccattcacctattgaaggacatcttatttgcycccagtttttggtcattatgaatacagccgctataaatatttgtttgcaggtttttatgtggatataaatctcaaatcagttgggtaaacacctaaaagttcaaatgctgaatcatatggtaagactgtgtttagcttctctggcctacttagctagcatgtgccactcctcaaaatcaggtggtgactacccctacgatcatcgacagccaacaccgtcagttat

SEQ ID NO: 37914 - DNA, 646 bp, Homo sapiens
cattgtcttaacaattgaataattaaaagttaatgccctcataatatgcaaaatttttaataaacacattggtccctgtgttcaagtagttggtaatcaaattagtgaagtatggtaagtcttttgaagagcattaaacagcagaaaatgtaagaaatttgtctctataatagtgtggrccttctgtgtttcctaagggcacattcatatgatctaataactgagcagagagaagcctaaaggatattttatggtttcatttttttgtttttcccaattaacatacatttctagattaaaagtcaactatcttttccttgggagtcaactataggagaagatagtgaagaggcaaggaaaattacagcagctcaacagctttaccctggaaatatctgtattgtgtaccgctatagcctacctttatcagtcagataacaatgtcaaagaggcaagcttggcaccattgttcttagtgaatctctgctgccagcctcttatcctaagtgctctccaaagacccatttaatggacctttctgaaattgtgctcaggatcaatatgaggctcactgatacagcagctttggaactcaccatttgcttatttattaaacctgggatatttgcccgacttctatcatctg

SEQ ID NO: 37915 - DNA, 646 bp, Homo sapiens
cattgtcttaacaattgaataattaaaagttaatgccctcataatatgcaaaatttttaataaacacattggtccctgtgttcaagtagttggtaatcaaattagtgaagtatggtaagtcttttgaagagcattaaacagcagaaaatgtaagaaatttgtctctataatagtgtggaccttctgtgtttcctaagggcacattcatatgatctaataactgagcagagagaagcctaaaggatattttatggtttcatttttttgtttttsccaattaacatacatttctagattaaaagtcaactatcttttccttgggagtcaactataggagaagatagtgaagaggcaaggaaaattacagcagctcaacagctttaccctggaaatatctgtattgtgtaccgctatagcctacctttatcagtcagataacaatgtcaaagaggcaagcttggcaccattgttcttagtgaatctctgctgccagcctcttatcctaagtgctctccaaagacccatttaatggacctttctgaaattgtgctcaggatcaatatgaggctcactgatacagcagctttggaactcaccatttgcttatttattaaacctgggatatttgcccgacttctatcatctg

SEQ ID NO: 37916 - DNA, 576 bp, Homo sapiens
acaatcctgtagtcatgaaaagcttcgcttggcaaaggtaagaatgtgagcacatttggacccaattcccctgacaaagggttcccattcacaatttggaagaaaatattcagtgtggctgtgacaccagccaaaatgagaaagcctggtgctggcaactcaccattttccaaatcgctgtgattctgcctcagtttgagcttcctggaaaataagggagagggtcatgtagaaaggactactcagcaaaagtgccttattatctcttgctgtatggcgctcactgctcttctccaatgcacagacacactcacaggtgtacacacgtatgctcatatctggaatgtgactgaagcacatgcagaatgggccgccacgatgcagcccgaggggcatctcagagaccttcactcaaagctgtctyctccactagggagcctcttctacctcaacttcctatcaattctagttccagctccgccttgggagtttagtacttctgcaagagactaaacttctctctggaaaaggtaatgcagaagtcccctagtagtctctttgggaatgaatttatca

SEQ ID NO: 37917 - DNA, 1275 bp, Homo sapiens
gtttgcctctgggctcccctcttactcctcacaagctgtacctcccagcttggggttggaggcttggagcattccagaatgacttcctccttctacaacagtcgtttgctttcagaaaaacagcctcctcwatgaacgaaccctgcctgccttcccttatttagatattccttcttatttctggtcctccaagaataccccttcctgttctccagccctattatgggtttattattttaaacttgtaatctcttttctgtcatttttaggcatctgtgctcagttaaccatcttaattcaatcttctgtctcttccaattctaaatgttataattttataaatgcaaaggggaaagtaaacaaaaaatacagtcattacaaaaatagctcattttaaagctgtggtttttttcctaattatatcaacaattaggtagtgatctaccacccattactatgggtagggacctctacaagtcttagcaaacacaaaaacatgtcatctgccaccctagacacctggaaaatctagctacaatttaaagtgaattaatttaaatttgtatcaaagtaactcatcaatgtagttttagaactttaagccccctggccaggcacggtggctcacgcctgtaatcccatcaattagggaagctaaggcgggcggatcacttgaggtcaggagtttgagaccagcgtggccaacatgacaaaaccccatctctactaaaaatacaaaaattagccgagcatggtggcacacacttgtaatcccagctactcgggaggctgaggcaggagaattgctagaacccggaaggtggagattgcagtgaaccgggattgcaccattgcacttcagcctgggccacagagtgagactacatctcaaagaaaaagaaacaaacaaataaaaaaaactttaagacccatctcccaggcctccccaactggaatcgtgctttctaatgatatcgacttcaaaactatcccctatggcattttcctccgtcattcttagtaatgtgtttatagcaccatgtttcaccgaatcccttttgaaatgtaatcgtctgttatcctagatgaggatttggctttctttccccgctgctgtcctgacttctcattcttcctaacttatatcataagttttgggtaaatcaatatttggaattcacattattatgactatgtaaatgttttttattttttggctgaggtaagtagaagagcatatgttccttttcttatttaaaatttaaattttttttt

SEQ ID NO: 37918 - DNA, 1275 bp, Homo sapiens
gtttgcctctgggctcccctcttactcctcacaagctgtacctcccagcttggggttggaggcttggagcattccagaatgacttcctccttctacaacagtcgtttgctttcagaaaaacagcctcctcaatgaacgaaccctgcctgccttcccttatttagatattccttcttatttctggtcctccaagaataccccttcctgttctccagccctattatgggtttattattttaaacttgtaatctcttttctgtcatttttaggcatctgtgctcagttaaccatcttaattcaatcttctgtctcttccaattctaaatgttataattttataaatgcaaaggggaaagtaaacaaaaaatacagtcattacaaaaatagctcattttaaagctgtggtttttttcctaattatatcaacaattaggtagtgatctaccacccattactatgggtagggacctctacaagtcttagcaaacacaaaaacatgtcatctgccaccctagacacctggaaaatctagctacaatttaaagtgaattaatttaaatttgtatcaaagtaactcatcaatgtagttttagaactttaagccccctggccaggcacggtggctcacgcctgtaatcccatcaattagggaagctaaggcgggcggatcacttgaggtcaggagtttgagaccagcgtggccaacatgacaaaaccccatctctactaaaaatacaaaaattagccgagcatggtggcacacacttgtaatcccagctactcgggaggctgaggcaggagaattgctagaacccggaaggtggagattgcagtgaaccgggattgcaccattgcacttcagcctgggccacagagtgagactmcatctcaaagaaaaagaaacaaacaaataaaaaaaactttaagacccatctcccaggcctccccaactggaatcgtgctttctaatgatatcgacttcaaaactatcccctatggcattttcctccgtcattcttagtaatgtgtttatagcaccatgtttcaccgaatcccttttgaaatgtaatcgtctgttatcctagatgaggatttggctttctttccccgctgctgtcctgacttctcattcttcctaacttatatcataagttttgggtaaatcaatatttggaattcacattattatgactatgtaaatgttttttattttttggctgaggtaagtagaagagcatatgttccttttcttatttaaaatttaaattttttttt

SEQ ID NO: 37919 - DNA, 630 bp, Homo sapiens
gtatttgtaattagaatctgcaaaggagatgagagaggacagaaaaatatttaatggccctaaattttccacatatgacaaaagttgtaaacccgcagatccaccaagctaagtgaaccctcaaacacaaaacacaagtctgtgcaccaaattacagatcttttaattacatgaggcaaaaaactaatagatttgcaaggaggaataaagaaatgagaaaatatagtcagaaaacattagagagaagtattccccatgaacataaattctaaacaaaattttatcaaaattaaatccaacagcatattaagagcatcatggccaagtgaggtttattctagaaatgcaaggttggtttatcattcaaaaatcaataaatgtaattcaccatattaataaaccaaaaaaagaaaaattatgtaatcmtctcaatggacacagcagatgcatttgacaaaacacaacatccattcctgatgaaaattctcaacaaaaattctacagataacatcatacttaatgttgaaacacagaataatttccctctaaattggcctggccaacatggtgaaaccccatgatatggtttggctttatccccacccaaatctcaacttgaattgcatctcc

SEQ ID NO: 37920 - DNA, 553 bp, Homo sapiens
tattcattagcatcagaaattgcctgaaagatgggtaggctagtagataaataatttttaatttttgccaagcaaatgccgtgaagtaatattttgtgcattgctttgataactaataaaaacaactttttacatatgtattgatcatttatatttgcatactactcatttatctatgagtgtgtctttttcttaataatttttataaatttttgttatagaaaatttagttaatagaagtacacatgtattttccaagcttgcatatgtggtataattttcccatttattttcatatttatatgtaaataaacttaattataaatgtagttctataygttcagattttggcacaggtttattctttttctttcaattctattaaatagaaattttaatctattaatagtagtgtgttctataacttatagctgatgctaaacaaaaaatatttgtaataaaatagtatatctccttacttctatgaaaattagtagaataactgttacttataatcaaaatagtacttttggtatggacacttatttttagt

SEQ ID NO: 37921 - DNA, 553 bp, Homo sapiens
gaaggtataatgcattcacagatgtaagtgaccaggatattggaacagaaagagtaatgagaaaaaaatttatggccaccaccttttgcttagggaaccgtamattttataccccttcagtgaagattttattctcaatctgcactaaagacaaagaaaaaaagtagaataagaattaggcttcacaaggtgaaaatagttcatgtcagcaattcttccactacattcagcattaagtattagtcaagcttttataaagaatggtaagtggcagcatatttgttctttctatctcaaattcattcaacttgaaagcattgctcatgcaggatgacaggatgacagacttcttagataatgagaaagaaaaaaactctaataaatctgcatttgactaagaccttttggcatcatctcacatggtattctcatcaacattcttgataaattgtagaatgtgtacaggagaatcacacccaaatggtaatagtcaatgaccctgtcaagctcaggcaatatatttaaaaggtatcaaaatagttgaaccaagaga

SEQ ID NO: 37922 - DNA, 556 bp, Homo sapiens
tttagtagagacggggtttcaccgtgttagccaggatgatctcgatctcctgacctcgtgatccacccgccttggcctcccagagtgctgagattacaggygtgagccaccgtgcctggtcaatacttgttaaattttttttaaatttaaaacttgtttatacaatttttattttttaaattcctaattatttttcttttaaatattagagacagggtctcgctatttgcccaggctggttttgaacttctgggctcaagcaatcctgcctcggcctcccaaagtgctggaattacaggcatgagctaccgtggctggccaatatttgttaaattaaatgaaatcctcattcacagttctgggtctttgtcctaataattctctctacctggaatgtccttctgaggccctcctcaaattctctaacccacactaatctactcttttaatggggatggcatttcaagtttgtgttatagaatttagcctatgattatatcccacattggcgatattctttcaatattcaggtaaagatgctgttgactgttaggat

SEQ ID NO: 37923 - DNA, 817 bp, Homo sapiens
tgtatttatttagtcatatttctgtctaccccaataagttagaatacaatgccttaaggaaaaggacaacatacccctggctctggaaacttattatttggcacataytagatgtgcaagagatgttggtgaatcaatacattaaatgaatgaaataatctgctcctgtaattttcaggcaaaaaataattattgctgtggatattgagatacttttaaattattgtcaagagacaatatagtcaaaagaaaagatgatttagagacaggagagatgagattctcatctccaccttggacaaattagttcctatctactgatttctcaactgcaaaatggagagaagagccccttctccacagatttatgaagcttgcttctgataaagtccataaaagtcctccctttataggctttcaagttctatacagatgctgaccaatgctgatgctcaactacacatgatgattttcttcaatgaccatttaatacaaaatattagtaatacttttgtgacaagaaaatatgagggctaaagagatttgatgtttttcaccaatcaacacacatttatggggcaactgcaccatacaagatatagggttgaaatttaatcttttctcccaaaataataaagttgatggcagcagaaagtataaaggggaaaaactagaatatatttattataaaataacacaatgcctttctttctcatcagagttgaaattctacaagggctggaactgtgtctgttttggttgccactatgtcatcccagtataatatctgatatacaggtggcactcaacactcatt

SEQ ID NO: 37924 - DNA, 605 bp, Homo sapiens
actcacaatcaaagcagctgtcctaggtctagagccaggacacttcctgcctcaaaccaatcttcataattcccagttggtttggctgaggcatggccatgaggccggtggcttcatatcaacaagtgaggcactttgtgaataaaagcaacaagtcatggcacctcattccacccacaaaggggaagaaggttgcccaaggtcaagggcaggggttggcatcaaacctccctcttgagactctcatatatccaggaacatggaaaaataaaggccaggaggaggcctactctctagcrtttataggagactggcgtccgatgtagtttgctgtttagaatgtgtctgtgttaaaacatctctgtggaggtagtgggggagcgactggtttgttcactctgcagaaaaaattggaccactggccttacaaacacatcattactgggtataaggttagagaagatacaataatcatttcagctccaagcttccactgtgattttacactgtggttttacctttctcccaaagcttctagacaatagtcatagcttaggcccacaggctccaaaggtagccaattaaaatcctggtaaacagaagca

SEQ ID NO: 37925 - DNA, 605 bp, Homo sapiens
actcacaatcaaagcagctgtcctaggtctagagccaggacacttcctgcctcaaaccaatcttcataattcccagttggtttggctgaggcatggccatgaggccggtggcttcatatcaacaagtgaggcactttgtgaataaaagcaacaagtcatggcacctcattccacccacaaaggggaagaaggttgcccaaggtcaagggcaggggttggcatcaaacctccctcttgagactctcatatatccaggaacatggaaaaataaaggccaggaggaggcctactctctagcatttataggagactggcgtccgatgtagtttgctgtttagaatgtgtctgtgttaaaacatctctrtggaggtagtgggggagcgactggtttgttcactctgcagaaaaaattggaccactggccttacaaacacatcattactgggtataaggttagagaagatacaataatcatttcagctccaagcttccactgtgattttacactgtggttttacctttctcccaaagcttctagacaatagtcatagcttaggcccacaggctccaaaggtagccaattaaaatcctggtaaacagaagca

SEQ ID NO: 37926 - DNA, 605 bp, Homo sapiens
actcacaatcaaagcagctgtcctaggtctagagccaggacacttcctgcctcaaaccaatcttcataattcccagttggtttggctgaggcatggccatgaggccggtggcttcatatcaacaagtgaggcactttgtgaataaaagcaacaagtcatggcacctcattccacccacaaaggggaagaaggttgcccaaggtcaagggcaggggttggcatcaaacctccctcttgagactctcatatatccaggaacatggaaaaataaaggccaggaggaggcctactctctagcatttataggagactggcgtccgatgtagtttgctgtttagaatgtgtctgtgttaaaacatctctgtggaggtagtgggggagcsactggtttgttcactctgcagaaaaaattggaccactggccttacaaacacatcattactgggtataaggttagagaagatacaataatcatttcagctccaagcttccactgtgattttacactgtggttttacctttctcccaaagcttctagacaatagtcatagcttaggcccacaggctccaaaggtagccaattaaaatcctggtaaacagaagca

SEQ ID NO: 37927 - DNA, 1476 bp, Homo sapiens
tacccaacactgcatgtgatagatattgtcacatgaaacgaggacacagaaagatcaagtaatcattcccactcagtgacagaaccaggatttagatggaacattggatctcctctgaacctgtgttcttaccactattgacacccatttatctctaaagtctctactgtatctgctgtttgatttcttctgtcattagaaatttccatttctgcagctccttttgattttttgtaagcatatggtaacctagagaattgcattctaatgttttcacctgtgtatttaattttttcatctcctaaaagaaaccatgaccatttcagctgtcatgattctgtattctttcagaacatgcattcatcttttattttcgtgagcgaggttttgtttatagcatataagatagggaaacagaattgagaaggtagggagaatataaatcttctcacagaagcaagatgctcccaccacatttgaaagcrtttaagagttctttgatgccctcacctgacaagaaaattttggacaatgtaaatgttgacagtcacaagtacattcaaaaagacttgctgaatttttttaggtctgccatgtaacctggtgatttctatttcttcaattacatgatgcattctgtatgtagtatgtggaatctgaacacttcatttgggctcactgtgctttcttattgccagatccttctttccagctagactgcaaaccccttgagggctgcagtcacatcttacaatgccggggtacccagcccttccacaggcccttatatatagtaggaactcaaaagaagtttaatcaagtcagagatcatttattttttgagcaaactccaaacctctgaaagttgacattctagaatgcattgcctcctccaatattgcttcatcccaggggagccttcgagtagcaataaaattgatttctttgccagcaaaaactgaaaccctgatggctctggaattatcatctggatataaacccatccatgccaaaggtgcccatttctttaaagagctgaggaagcaaagatctgaagaagcagtatttgatgaagatatttggcctttcagtttaaagattatgcaattttgtaagaggtgtactgtacgttagaaactgaattatgtcataactagagagtgcttgataaatatttatggaatgaacgtcttcttcaaaaaaattaaacttaacacctcatcttattttacaattgaatttcaccataaaagctggagatgggtttatgaggaaaaacactttagattacatgtgactcattttaaccaaggactaattctactttgagaacatatctgttagagtattgaaacctgaagaaaagaaaaccttgcaatatgcttattgcctttatgtgagacacaaaagcttaaatgtcacagcagttttcaggggcacatgagacaaaggggcctgggataccagtgtctgagt

SEQ ID NO: 37928 - DNA, 743 bp, Homo sapiens
tgaaacactggcagtcgttggaaacaggactcaggtttgcttgttttgctttgatattgttttccttttatctatgcagactccccgactatccaaagctaacttcgaaattgggaggcacatgttcctgttctcagatctatcaactactccctagatggccaggcgcgatggctcatgcctgtaatcccaacactttgggaggccgaggctgaggtcaggagttcaagaccagcctgaccaaggtggcaaaaccctgtcactactaaaaaaaaaaaaaaaaaaaaaaaaaaaaaaattaaccaggtatggtggcatatgcctgtagtcccagctattcaggaggctgaagcacaagaatcactagaaccggggaggcagatgttgcagtgagctgagattgcaccattgcactccaccctgggcaacagggcaagactctgtctaaaaaaaaaaaaaaaaawttttttttttttttttttttttttttgctaaatgacattgaaaggggaacagagctatctagaaaaatatgctgaggggttacactctaactttgggggctttagttttggttctgtcattagtgaaattataatggcatagataaataagctagttgtgattaatttcctaagaagttttaaaacaatcaagaaatttcattagtgcagtcaaatgccaatagatctaaattatttgaattgtaaaaggaaagaacaacctatcttcacaatgctgtg

SEQ ID NO: 37929 - DNA, 743 bp, Homo sapiens
tgaaacactggcagtcgttggaaacaggactcaggtttgcttgttttgctttgatattgttttccttttatctatgcagactccccgactatccaaagctaacttcgaaattgggaggcacatgttcctgttctcagatctatcaactactccctagatggccaggcgcgatggctcatgcctgtaatcccaacactttgggaggccgaggctgaggtcaggagttcaagaccagcctgaccaaggtggcaaaaccctgtcactactaaaaaaaaaaaaaaaaaaaaaaaaaaaaaaattaaccaggtatggtggcatatgcctgtagtcccagctattcaggaggctgaagcacaagaatcactagaaccggggaggcagatgttgcagtgagctgagattgcaccattgcactccaccctgggcaacagggcaagactctgtctaaaaaaaaaaaaaaaaatwtttttttttttttttttttttttttgctaaatgacattgaaaggggaacagagctatctagaaaaatatgctgaggggttacactctaactttgggggctttagttttggttctgtcattagtgaaattataatggcatagataaataagctagttgtgattaatttcctaagaagttttaaaacaatcaagaaatttcattagtgcagtcaaatgccaatagatctaaattatttgaattgtaaaaggaaagaacaacctatcttcacaatgctgtg

SEQ ID NO: 37930 - DNA, 743 bp, Homo sapiens
tgaaacactggcagtcgttggaaacaggactcaggtttgcttgttttgctttgatattgttttccttttatctatgcagactccccgactatccaaagctaacttcgaaattgggaggcacatgttcctgttctcagatctatcaactactccctagatggccaggcgcgatggctcatgcctgtaatcccaacactttgggaggccgaggctgaggtcaggagttcaagaccagcctgaccaaggtggcaaaaccctgtcactactaaaaaaaaaaaaaaaaaaaaaaaaaaaaaaattaaccaggtatggtggcatatgcctgtagtcccagctattcaggaggctgaagcacaagaatcactagaaccggggaggcagatgttgcagtgagctgagattgcaccattgcactccaccctgggcaacagggcaagactctgtctaaaaaaaaaaaaaaaaattwttttttttttttttttttttttttgctaaatgacattgaaaggggaacagagctatctagaaaaatatgctgaggggttacactctaactttgggggctttagttttggttctgtcattagtgaaattataatggcatagataaataagctagttgtgattaatttcctaagaagttttaaaacaatcaagaaatttcattagtgcagtcaaatgccaatagatctaaattatttgaattgtaaaaggaaagaacaacctatcttcacaatgctgtg

SEQ ID NO: 37931 - DNA, 743 bp, Homo sapiens
tgaaacactggcagtcgttggaaacaggactcaggtttgcttgttttgctttgatattgttttccttttatctatgcagactccccgactatccaaagctaacttcgaaattgggaggcacatgttcctgttctcagatctatcaactactccctagatggccaggcgcgatggctcatgcctgtaatcccaacactttgggaggccgaggctgaggtcaggagttcaagaccagcctgaccaaggtggcaaaaccctgtcactactaaaaaaaaaaaaaaaaaaaaaaaaaaaaaaattaaccaggtatggtggcatatgcctgtagtcccagctattcaggaggctgaagcacaagaatcactagaaccggggaggcagatgttgcagtgagctgagattgcaccattgcactccaccctgggcaacagggcaagactctgtctaaaaaaaaaaaaaaaaatttttttttttttttttttttttttttgctaaatgacattgaaaggggaacagagctatctagaaaaatatgctgaggggttacactctaactttgggggctttagttttggttctgtcattagtgaaattataatggcatagataaataagctagttgtgattaatttcctaagaagttttaaaacaatcaagaaatttcattagtgcagtcaaatgccaatagayctaaattatttgaattgtaaaaggaaagaacaacctatcttcacaatgctgtg

SEQ ID NO: 37932 - DNA, 1069 bp, Homo sapiens
cttggccttgttcctttaatttctctgcccttcagtttctgtgaaatggagattgtcattcctaactttataaggtggttttgaagattaaatggaacaatacatgcaaacacagagtctgaacctggcatttcataaatgtcaactgctattattattttaagtgcatgacttagagccacaactgtgtaaggcattataagttgctttatatatagtctctcattttatactttcaagaaaactgttcttcctattatacatatgtagaaagaaactgagctctagatagaataataacttatccataaaacaaaatataagttttaggggctgaatggtatccartttgataaatggaacacaatttgtttaaccattcctgtattttgaagcatctcaaatgtgttcagtatcttgctgttctaagtaactgtggtgattttcctggtacatatttatgtacatctctatttctctagtgtagaaatctacaagcagatttgccaggtcaacagagattatttttatgacttttgttatatgttgaaaaatttctattggattaattctttgtcaaccctgagaattataattctaacaaaacagcatggcactggtacaaaaaacagacacatagaccaatggaacagaatagagaacccagatacaaggccacacacctacagccatctgatctttggcaaagctgacaaaaacaagcaatgaggaaaagcctccctactcaataaatggtgctgagataactggctagccatatgcagaagattgaaactgtaccccttccttacaccatatacaaaaattaacccaagatgggttacagacttaaatgtaaaacccaaaactataaaaaccctggaacacaacttaagcaatacctttctggacataggaacgggcaaagatttcatgatgaagacaccaaaagcaattgccacaaaagcaaaaattgacaaatgggatctaattaaactaaagagcttctgcccagcaaaagaaactatcaacagactgaacagacaacctacagaatgggagaaaattt

SEQ ID NO: 37933 - DNA, 1069 bp, Homo sapiens
cttggccttgttcctttaatttctctgcccttcagtttctgtgaaatggagattgtcattcctaactttataaggtggttttgaagattaaatggaacaatacatgcaaacacagagtctgaacctggcatttcataaatgtcaactgctattattattttaagtgcatgacttagagccacaactgtgtaaggcattataagttgctttatatatagtctctcattttatactttcaagaaaactgttcttcctattatacatatgtagaaagaaactgagctctagatagaataataacttatccataaaacaaaatataagttttaggggctgaatggtatccagtttgataaatggaacacaatttgtttaaccattcctgtattttgaagcatctcaaatgtgttcagtatcttgctgttctaagtaactgyggtgattttcctggtacatatttatgtacatctctatttctctagtgtagaaatctacaagcagatttgccaggtcaacagagattatttttatgacttttgttatatgttgaaaaatttctattggattaattctttgtcaaccctgagaattataattctaacaaaacagcatggcactggtacaaaaaacagacacatagaccaatggaacagaatagagaacccagatacaaggccacacacctacagccatctgatctttggcaaagctgacaaaaacaagcaatgaggaaaagcctccctactcaataaatggtgctgagataactggctagccatatgcagaagattgaaactgtaccccttccttacaccatatacaaaaattaacccaagatgggttacagacttaaatgtaaaacccaaaactataaaaaccctggaacacaacttaagcaatacctttctggacataggaacgggcaaagatttcatgatgaagacaccaaaagcaattgccacaaaagcaaaaattgacaaatgggatctaattaaactaaagagcttctgcccagcaaaagaaactatcaacagactgaacagacaacctacagaatgggagaaaattt

SEQ ID NO: 37934 - DNA, 859 bp, Homo sapiens
aggtccagttgttcacacttctaatttcataccggcagcctcagtaaagttctgccatcaggctaaggccccactgatcgtcgaccttttctgcataaagattcacctccagggctcttagaaaatactgctgcctggctaccaccccatccttagtgtgacatagggtttttttttcttcttcttctgttttttgttttttttagaataattaggcagctctgttgcccaggctggagtgcagtggcatgatctcagctcactgcaacctctgcctcctggttcaagcaattctcctacctcagcctcttgagtacctaggactataggcacacgccaccatgcccggctaattttttgtatttttagtagagacggggtttcaccaggttagccaggatggtctcaatctcctgaccttgtgatccgcccacctcagcctcccaaagtgctgggattacagacgtgaggcaccacacctggcctgccccgggttgtttttttttttaaagctccccagggatttgtaagtgcataccaaagactgggaacccctggcttagctcacagagcaaagagccttttgagggttccccycgacagttgctccctcacctccagctgtggggccacacagagcgctgggccattgtggtgttagagaccagagttaaagggactccatctgtaatatccaggacaaatgggctggcaggtgctgctcaaacccttacacacagatagtatttggggaggtgaggtcaattcccccattatggaacgctgcggttttaaaagcaagcaaacaaacaaaaacaggaaaaaagtgagctttttaaaactaaggtaaaatttgtcc

SEQ ID NO: 37935 - DNA, 536 bp, Homo sapiens
ttaatcacctttttcatttactgacacaagtaatgccaatggactcatggggcatcccaatagtctacgctaaatgccttaattcttatctcaggcccccaacaaaatcgcaatggctctgttcagctcaagccctagccagataactgtctttggtaatatgcctgggctaagactcccgtaccataagacttgtattctggaaactggtccaggaaaaaaagtaaacaacaacaacaacaacaacaaaaagccatctcagaagctcatggccgtaaaggctgcatttgtagttaatgaatgggatgcttatcagcaggtgatcrtttcatttccaaagagcaatttccattacatttccaatacagtcttcattatttttaaagaaaggataagagaatgatactcttaaatatcccttgtctcttctagtttattttttaatcttttttcttacaataaatgtattacacagtcactgtgggaaaaacataacaaattaagatgacttttgagatcacctatagcaggtatca

SEQ ID NO: 37936 - DNA, 505 bp, Homo sapiens
tggaaggctcctgaagattgtttgagaacttgactgctgtgtcagggcagtgctgacactctctgttgccaactgttttttattattccaaaaaatcagagaagcaaaaacgacccckccaaacaactccaagacaaactccaagcaaaacaacaacacacacacaaacccacaattttcctttggttgcttctgagaaggagttttaatggtatagtaaatacagcatttatcggatgatttttgctgccattgatatgtttctcttcttgaaagaggaattcaaatgacaatgaacatttttggggtcctcttttatggagtttgattttcaggggattgtcaggcatgtcgtctccgggttcccatgctgcacagtcccagcactctctgtggctcagccttcccgtcccttgccctctgaataccttgccgttgactgaatggtcatcgttagcacaggtcatcacaatacatgactcctgggcaggaggaacagaggagc

SEQ ID NO: 37937 - DNA, 505 bp, Homo sapiens
tggaaggctcctgaagattgtttgagaacttgactgctgtgtcagggcagtgctgacactctctgttgccaactgttttttattattccaaaaaatcagagaagcaaaaacgacccctccaaacaactccaagacaaactccaagcaaaacaacaacacacacacaaacccacaattttcctttggttgcttctgagaaggagttttaatggtatagtaaatacagcatttatcggatgatttttgctgccattgatatgtttctcttcttgaaagaggaattcaaatgacaatgaacatttttggggtcctcttttatggagtttgattttcaggggattgtcaggcatgtcgtctccgggttcccrtgctgcacagtcccagcactctctgtggctcagccttcccgtcccttgccctctgaataccttgccgttgactgaatggtcatcgttagcacaggtcatcacaatacatgactcctgggcaggaggaacagaggagc

SEQ ID NO: 37938 - DNA, 604 bp, Homo sapiens
tggctctccggccagctaggggacacccaggccctcctctgcatacccccctaccacgtcgcctccgaacttggatggccaggatggggtcccgcggctctctgctcctcgtggaagcagggatctcgctactgggctagcgtgggatacaagaggccctggggagaatgcctggaggagccagcggctgcgggtgcgcaaagggcccgctctagctcagccgccgccgctccgcagtatgaccagtggaccatctccaaggcctgcgggaaaaacttgcctttgcgactggcgcactgccgcagcaccatggaggtaaccaggcaggaggggcctttgagaacccaaaccctccccacccctgccagcacccccccactagatgttgcggagccgacgagggacggagcaggtgcccagccccaggttccctgtgggggttgccacgagcctccacccgcccgcctgctggcgggctccatggcggccccctacgcaaccacgagtgggcggtgcccttcccgaccmactggtgcgggagaagctgcgcaagtacgtcttcgaccgcgtgaacatgcacaacctactgatccacctggtgcgg

SEQ ID NO: 37939 - DNA, 517 bp, Homo sapiens
tgcaggtattggctggaygatgctcagagaagcaggaagagtgggcatggcactgagtggctgaggccatcactggtggccttggtgcttaggcagaaggagagggcatggtgcagggcgctgaggccgtctgtggctgccttggtggggcttactgagttctagtggacagcaaggtgccagggcagggctggcacatggagggctctgaaggccatgtgtatcgtctgaagtgagggaaacccgtggtagctaaagggaatgcactagccagccccaggtgcgccacattcctgctctaggggctggagggaaacccgtggtagctaaagggaatgcactagccagccccaggtgtgctacgttccgctctcggggctggaggggaacccgtggtagctaaagggagtgcactaggcagccccaggtgtgctacgttcccgctctcggggctggagggaaacccgtggtagctaaagggaatgcactaggcagccccaggtgtgctacgttcccg

SEQ ID NO: 37940 - DNA, 669 bp, Homo sapiens
agcagtatagaaaactacaacacaaaaaggaaaagctcctctgccctcagctcctacactcctcagaggtggccatcatgaacattggcttctttctagaacttttcctgcatagacaatcagagaaacatagattgatagactgatttatgcaaagatggctgaataatgatgtttaatgctctgttacttgctttttcmtacttaatttatgctagacatgatttcacagcagttgtcaaggaggtctatcacccttttcaacatttgcattttttcaattataaataaaaaattaattaattaagaaacacttgcatttggttctactgtagaagtgtaccatcatttgtttaaccaatattccacagattgacttgtagattacttcagaggtcttaatattaaatgttccagtaaatatcctcaggcatgtgtttttgaagaacagggctagtgtatcaacaggagattgttttataggtctttataaaattaaactgttttcactggtataaaaatttaataattgtcaaataaaatgttgctcttttaaagtttcttctcattatcaaatgacgcttttttttttgtcttggtcttctataaacctgcccttaagctgtgacaaaattaatttaaaaaaatcgatgttggtccatgggatcc

SEQ ID NO: 37941 - DNA, 622 bp, Homo sapiens
caacaaatattttattaaataaaagtatgtctcaaatattacatggaacatatttagaataaaccacaattcgcagtttatctgaagttcatatttacctgggaatcctgtctgtaagctggctgccttcctggtggcatgttycaggagactggatttttaaaatagattcctcagttgatttctctcatcaaccatgttggaaacaattgctaatgccaatcagtaatccactagatgccatttttgctcaagttattaactggcaagtttatacatttttatttaatttacggatctggagtccttgtcattcattaacagtgtctctcactggcacaggagactggagaaatcaccatttttccagggtttataatttatagaggaaattcctgatagacagagatggggtgagctagccttgaagacaggcaaaagaacttcctgccaactgccctgtgtgctctgctcctgcaggaaggttactgggcttgtcagccattagaagggggcaatatcagagaatgacggggtgatcctgtgttttctcttggggtgggtgggtagataatggccccaacaaccagaactggggacacaaagaagtgtctttaggtaa

SEQ ID NO: 37942 - DNA, 622 bp, Homo sapiens
caacaaatattttattaaataaaagtatgtctcaaatattacatggaacatatttagaataaaccacaattcgcagtttatctgaagttcatatttacctgggaatcctgtctgtaagctggctgccttcctggtggcatgttccaggagactggatttttaaaatagattcctcagttgatttctctcatcaaccatgttggaaacaattgctaatgccaatcagtaatccactagatgccatttttgctcaagttattaactggcaagtttatacatttttatttaatttacggatctggagtccttgtcattcattaacagtgtctctcactggcacaggagactggagaaatcaccatttttccagggtttataatttatagaggaaattcctgatagacagagatggggtgagctagccttgaagacaggcaaaagaacttcstgccaactgccctgtgtgctctgctcctgcaggaaggttactgggcttgtcagccattagaagggggcaatatcagagaatgacggggtgatcctgtgttttctcttggggtgggtgggtagataatggccccaacaaccagaactggggacacaaagaagtgtctttaggtaa

SEQ ID NO: 37943 - DNA, 622 bp, Homo sapiens
caacaaatattttattaaataaaagtatgtctcaaatattacatggaacatatttagaataaaccacaattcgcagtttatctgaagttcatatttacctgggaatcctgtctgtaagctggctgccttcctggtggcatgttccaggagactggatttttaaaatagattcctcagttgatttctctcatcaaccatgttggaaacaattgctaatgccaatcagtaatccactagatgccatttttgctcaagttattaactggcaagtttatacatttttatttaatttacggatctggagtccttgtcattcattaacagtgtctctcactggcacaggagactggagaaatcaccatttttccagggtttataatttatagaggaaattcctgatagacagagatggggtgagctagccttgaagacaggcaaaagaacttcctgccaactgccctgtgtgctctgctcctgcaggaagkttactgggcttgtcagccattagaagggggcaatatcagagaatgacggggtgatcctgtgttttctcttggggtgggtgggtagataatggccccaacaaccagaactggggacacaaagaagtgtctttaggtaa

SEQ ID NO: 37944 - DNA, 831 bp, Homo sapiens
catctatttcagggtgcctagaaatttaatatcagacttacagtttcaaaaatggactttattaactatcataaacaaatataaattacagtcrgattaaagacataaatgtcagcgtagagttccatatccagcaaaaaatatgtttcaaaaataaagactgtttgcagaaataaaaagctaaaagaattcatcaccagcaaacatggactaaaagaaacgttaaggaaacttctcagcagaaggaaattgagacccgcatggaaatctggatctatgcaaaggaataaagagtatcagaagttgttaactgcatgagtaactgtataaggttttattcttattaaaaaataataatgatgtaattgtgtcatttacaacatatgtagacataaaatgtatgacaacagcacaaaaagccaggagggggaaaatgggaataactatcatgagattgtaataccgtctataaagtgctataaatacactcaaagatcaactatgataagctaaggacgtatactatgaaggctaaagcaaccattcaaatgataaaacatagagtcacagcaaacagaccccagtcttcaggtcatctcatgcctgtgagcaaaaccacgctccaagcagtgtgaagcagatggaaggaatgagaacctggacagcaaggaacccgaggcctggggctcaggtttcccctcctggagagactcactttgaagctgcaggcctctcattacagttccatgtgcttctcagcctctcatattcttccctcttgaaataccccatttgtgctttttttcaaagaacaaggatcagaagagactt

SEQ ID NO: 37945 - DNA, 1115 bp, Homo sapiens
gtgggaggactgctcaagctcaggagttcaagaccagcctgggcaatataaggagaccttgtctccacaaaaaataaagaaagaaaaactagccaggcatggtggcatgtgcctgtggtcccagctactcgggtgtctcaggtgggaggactgtttgagcccaggagctcgaggctgctgygagccatgaacgtgctactgcactccagcctgggcaacagaaaagagactctttctttaaaaaaaaaaaaaaaaaaaaaaaaaaaaaagaaagctcccaaagaagcggctgcctgctttgggcagattacttttaaatttcgagtagttcaagaaccaagctgtacccgtgtttcaatatttatttacccaagtttgttccaaatattaacaacacatactgtatgtcaggggcaaagctttaggatttctagggaagctgtaagaaagactaacacacagctactggtctatgagattatgcaggactgcatactttgaacttttctgagatttgctttaatttaaagaaagctgaacacaaagatatatgtaccatgaacactgtacaaaacatctgtgaacgatagagctagggaataaaaaaagcagttctgaaaggcagccttgaaagaaggaaatatgtccatgaaagacaaaattagtactttacatgtccaaagctcttagtgactctaaaaaaaggtctttagttaacaacaagatctttaattttcccccaaaagatctccagggattttcagatcctcattcccttcaaatctacaaaggtccccaggctcagggcaatgccaaatgttcttgaagtctgctcccttcttccccgttcccagcatcatcatgtgtgtgggaggaactgagttgtttttatcctgctcactgcctaagtacagcagaagccaactgggagttctattccccaatatgctcattgtacaatgcttagttcctagaagggtgggtagaaaagagctgacaggcaaagaagcagtttatagtagctgcatgtttaaaaactgaaattcatctagacaccctgtgtgaacacatttagattttcagcattgctgtgaatgagaccgtaagaatttcta

SEQ ID NO: 37946 - DNA, 553 bp, Homo sapiens
acagcaacactagaagcaaaaagacaatggagtaatatcttcaaaatatttaaagaaaataatttccaacctaaaatttgtaccccaccaratatcaacaaagtgcaaggaaagatcaggatgttttcagatatgcaactatcaaaaacatatctatcttccaggccctatttctgaatatgagtcaccaaaatgagggaataaatcatggtgaggaaagacatagtatataagcttgaggatgagggaattctcaaaatgatgatgaagggggatggtagcaggacagccatgcccctgtgtgtataaggcatcagtccagactgcagggatatgactcaagagacagccgtgttgaggagtgtggtcaccaagatggcttctgctcttgtgtcatctttttattctgaaaatgtaagggtgagccttgcccagattcttaacagtacctggtcaccaagggccatgtactgttgaagctcctgcctacctctttgtcccctgccataggcattagctgagtatactcatttcaccgcaaaggagttcttca

SEQ ID NO: 37947 - DNA, 553 bp, Homo sapiens
acagcaacactagaagcaaaaagacaatggagtaatatcttcaaaatatttaaagaaaataatttccaacctaaaatttgtaccccaccagatatcaacaaagtgcaaggaaagatcaggatgttttcagatatgcaactatcaaaaacatatctatcttccaggccctatttctgaatatgagtcaccaaaatgagggaataaatcatggtgaggaaagacatagtatataagcttgaggatgaggkaattctcaaaatgatgatgaagggggatggtagcaggacagccatgcccctgtgtgtataaggcatcagtccagactgcagggatatgactcaagagacagccgtgttgaggagtgtggtcaccaagatggcttctgctcttgtgtcatctttttattctgaaaatgtaagggtgagccttgcccagattcttaacagtacctggtcaccaagggccatgtactgttgaagctcctgcctacctctttgtcccctgccataggcattagctgagtatactcatttcaccgcaaaggagttcttca

SEQ ID NO: 37948 - DNA, 587 bp, Homo sapiens
acattttatttttgtgatccttggtagataaataacagctgaggaattagtgcctaaaagaggttaaatgacttatattatgtttgatgaaaatayttttccctaattcctgttttctttgaagagagcgtgtcccaaaacaatatcttggattttctttgccctttaacttgctccattcctgaggaggaaaagtgatttctctggttgggaaattggggaagaataactgtgagcttggctcacctctatccctcttcctttttaggagtgaccatgaagtggccaagcacgattcttccagtccttctgtgactgggagaaagttggcccagttctagagttcagttttagcaaactcatttgtctgacagatctaaagcttcattctccaacaggacttttttttcttcaatgtggtcaagctcattaaataatcagtctctcccccacccccatcccttggaggcattcctccaagagccttccattctcctgctgcaaactgtgtcactttgacaacaattaaattttaaaataaaataccacgcaaactgtgtcagagactactagttgtccaccaaaat

SEQ ID NO: 37949 - DNA, 1150 bp, Homo sapiens
tggacagcttgcagccaggagcccatgcccagaaggcattctagaactcagggctagaataattgtcttccggaattctcttttacctctgactgaaatcccacctaaggcgctcgcaggcatcacctctgacacagagatggagcagacagttgccgggaacacaaccttctagacctttaaggagaaagctgccaactttgtcctcttggggctgctgaatgttctgagagtcagagggagtgcaggcacagaatccaggtccccatgggggctggcaggggacagctgcacattttacaccccctggcagggctcaacctttccttagagatgggctgtgaaggttgtctgccttgagggaaggagctcctgacgtcacagagcggtggtgcttccacctaccctgtccccaaggagcctgcacactgatggaggaggtacagccgtggaggagaaccagagtctggaggggaggcacagtcctcaggagcccccaggctgacrggggaaacaaaacacacaataaaccccaaacttgcaaggttctggggcaggcaccgaggtccgagtggcaaggagacaggatccagccctgtgcagtggtgaggaggcccctggggctgctgtgatcagcctggaatgtcaggctgtgagctcagccctctcggcctgcgtgtcgggctgtcagcagggccggcgcacgggagaagatttccagccccctctgggccatggagaggcctaaatttagctagtagacaaggggctggccccaagcccagggacagtcggccttataaagcggccgcagtcggagcctggcacgctcgcccagaggcctgcgcccacaccctctcctgtccagccctcgcccgcctgggcagggcccggcgccgtccgtggatgagccacagaacctcttccaccttccgagcggagagaagtttccattcctcttcctcttcctcctcctcttccacctcctcctcggcctcccgtgctctcccggcccaggacccgcccatggagaaggccctgagcatgttttccgatgactttggcagcttcatgcggccccactcggagcccctggccttcccaggcaagtgatccgggccctgaggggaggggaggtgcacagggaggg

SEQ ID NO: 37950 - DNA, 598 bp, Homo sapiens
cagggtatcggagtcccagcttatgtyggggcaaggggcacagacagccccttccctggaggtctgcttggctccaggcagggaggaccctggtagttgagtctggggtagtcctgagggggccccgcctgagtcagagaggaatgcaagttgtccacgttcctcgcactgggactggcagatggctgtgtcaggatggaggagccctgaacagaacctcaggccaccactgagtgagcctggagctaccctctgctggcttgcctcacactgggggctgggcaggatttgtggcaggtgacagtggtggcacagtggatgccaggactgctgcccctgccagaaggcctttgacctgtccactctccccacccgtgcctgtactgggaggttcctgggggacagggagtgtgaagggggctggcagctatagctttcacctgtatccctgcaggatccatagcttagagagcaccagggtctagcagacttctgcgtgtcccagggcctgtggcgccaggtatcctctgggtccccagcaatgcccctggcccgctggctgcagcccagcctgggagctggccctcactggctgtgg

SEQ ID NO: 37951 - DNA, 598 bp, Homo sapiens
cagggtatcggagtcccagcttatgttggggcaaggggcacagacagccccttccctggaggtctgcttggctccaggcagggaggaccctggtagttgagtctggggtagtcctgagggggccccgcctgagtcagagaggaatgcaagttgtccacgttcctcscactgggactggcagatggctgtgtcaggatggaggagccctgaacagaacctcaggccaccactgagtgagcctggagctaccctctgctggcttgcctcacactgggggctgggcaggatttgtggcaggtgacagtggtggcacagtggatgccaggactgctgcccctgccagaaggcctttgacctgtccactctccccacccgtgcctgtactgggaggttcctgggggacagggagtgtgaagggggctggcagctatagctttcacctgtatccctgcaggatccatagcttagagagcaccagggtctagcagacttctgcgtgtcccagggcctgtggcgccaggtatcctctgggtccccagcaatgcccctggcccgctggctgcagcccagcctgggagctggccctcactggctgtgg

SEQ ID NO: 37952 - DNA, 598 bp, Homo sapiens
cagggtatcggagtcccagcttatgttggggcaaggggcacagacagccccttccctggaggtctgcttggctccaggcagggaggaccctggtagttgagtctggggtagtcctgagggggccccgcctgagtcagagaggaatgcaagttgtccacgttcctcgcactgggactggcagatggctgtgtcaggatggaggagccctgaacagaacctcaggccaccactgagtgagcctggagctaccctctgctggcytgcctcacactgggggctgggcaggatttgtggcaggtgacagtggtggcacagtggatgccaggactgctgcccctgccagaaggcctttgacctgtccactctccccacccgtgcctgtactgggaggttcctgggggacagggagtgtgaagggggctggcagctatagctttcacctgtatccctgcaggatccatagcttagagagcaccagggtctagcagacttctgcgtgtcccagggcctgtggcgccaggtatcctctgggtccccagcaatgcccctggcccgctggctgcagcccagcctgggagctggccctcactggctgtgg

SEQ ID NO: 37953 - DNA, 569 bp, Homo sapiens
cagttgggttttcttttacttgcatctgaaagcatcatatgcagtatggctgttgtatttatttaatagtctccatttcaaaatccacctataggaaaagttacaggaaaatacatccttggagagggataaactctaccaaaaagaagcacttaatgctttttttagtgactactgttatttaggggattttttttctctcctcctgcttgccttatgaaaagaattgctaagtgaggagcctggatgacytgttctgatttttgtcctcctgattactcaccatcaccaagactttctatgcaaccagacactaatcttgagtttatttttatctactattgtaccatcaacctttcaggcatttcccagaaaacatcatttcaaagactcagtgacctaactcgccagccatcattgactctctagacccataatcagcaatcgtttggggaatccaagggtgtactcactgcttggtgaggaggagctgttaggattcacagtggggaaagaagaggaataaatggtaactgtatattcattggaacctgattacatttggggaa

SEQ ID NO: 37954 - DNA, 569 bp, Homo sapiens
cagttgggttttcttttacttgcatctgaaagcatcatatgcagtatggctgttgtatttatttaatagtctccatttcaaaatccacctataggaaaagttacaggaaaatacatccttggagagggataaactctaccaaaaagaagcacttaatgctttttttagtgactactgttatttaggggattttttttctctcctcctgcttgccttatgaaaagaattgctaagtgaggagcctggatgacttgttctgatttttgtcctcctgattactcaccatcaccaagactttctatgcaaccagacactaatcttgagtttatttttatctactattgtaccatcaacctttcaggcatttcccagaaaacatcatttcaaagactcagtgacctaactcgccagccatcaytgactctctagacccataatcagcaatcgtttggggaatccaagggtgtactcactgcttggtgaggaggagctgttaggattcacagtggggaaagaagaggaataaatggtaactgtatattcattggaacctgattacatttggggaa

SEQ ID NO: 37955 - DNA, 2252 bp, Homo sapiens
tatttatataatgtcagcttcggaagaactttgtatagcagaaatcataaagaaaaaaattgaaatattgactacataaaaagttacattttctgaatattaaaaaaacataaacaaaattaaaggagaaataacactggaaaaagtatttgcatatgaagagttaatgtcttaatttatataggaatcttacaagaaatcatgaaagaaacaacaccccagtcacaaatgtgcagaagacattagctcaaaattgattcaaataaaataaaaataccaacgtttaatacacatatgaaaatatagaacctcactggtaacaaaagacattcaaattaaaatgagatctccttcaccacttttgcctatcatattgggaaagatttcttttcattattatatcaagcatttgggagaggttggaaacatgtgcaattcataagctcctgctagaaccagaaaacagaaaataaaaattcacagcaaacaaaatagcaaaaagaaaagaaaaccataatattatcgggccataatattattttacagaatgtaccctaaggtaatatttttaagatgaatacaaagatttatctataaatatacttattgcagcattaagaagtttaaaagtttgataaacttttaaatgtttgttaaatgattgtatagctgttcagtgttgctacacagcaaatattgctacagggaaatgctccccaccttagtggtaaacggaacaagcaaaataagcaagtcatgaaatagcacaggcaccttcacatgaaaatggaagttggtaatgaggtaatggaagcagagaatttttttggtggggtctattctaaagtttctaaagttttctgtgaattatatgtgttatgtttataaacaaaaattgttatttttgatagatattacaggcagggaagggtaaggtagataggaggggggacaaaaagaggtatgggtatgaacatacagttagatgaaaggcataggatctattgtttgacagcagggtagtgtgactacagtgaacaacaatgtattgtatatttcaaaatagaacagagtacttgaattgttctcaacatatagaaatggtaaatactcaaagtgagagacacctcaaatactctgacttcatcattacacattctacgtatgtaacaaaatgtcacatgtaccccataaatatgtaaaatattgtatatcaataaaaatggttatttttatgtaagaaaaataatcacaacctctcttatttgaataccactagccaagaaatgtgctgctcccaataatatttcaagtcataacacattacttcctagtcactttacaacattgacacatacacctaacaaagatagagtgctaataaaaagaagtcgtactgtattaataataaacttttttgaacaaattccgttaataaaactgagaaaatgtccatctccacaatggcttacatggacactattttgtataaccctacaagagccctctaagggggagaatgagcaaactgaggctcaaggtgtctaagtgacttgtcaaggggaggaaataataactgccacacctgaggaccaatggcttcactgcacactttggccttcatgcaagattatagatgaaggaagaatggacctgagtgagtcccatcacctgcatggttttcaagtactatggccccaggaactgaaagcctgagagccaattccagtctctgcatagcccccagcccctggcattgcatatgcccctgaaggggtctcctggactctctctctctctctgcctctattccccaactataggaaagcggagctcagacctgccccttcctcttacagtagggtgggccagctgaacagcattcatagagagccagaatgggtcagggctgagcatggttagacacaaagccttgtgtaggagtcaagtcaagcaggagatcatagctcagccagaactgccaaattggtctccagtgtctcatcacctgaagcccttctccttaacattatgccaaggaccagcaagggaacctgaaaatacagctcatgttcagaatcatactcaataaagtttcttctctgactgataccttagtacagaatgatytgtacggaataccagaatctatgcaggatatagtttttttgtgttagcatcctatctttgttaggtgcatgcgtcaattttgtgaagtaactaggaagtaatgtgacaggaaatattactgg

SEQ ID NO: 37956 - DNA, 1060 bp, Homo sapiens
tccggtccttaccgctgaacaaagctactgggaagtttcctcgccagggtcgccgcctctgccgacttccttgctctcctccttgcagttacccgttggacccacccagtgccccgctcccgccctagtgccccaggcacccacccaaaaacagcgcagctgagcccccgcagctccatcgcgcagaaggtttactggaggcctcagcccgttgtcygccccacgggatgccaggaaatccatcggaataaacgctttttaaaaagaatttaccgccgggcgcggtggctcacgcctgtaatcccagcactttgggaggccgaggcaggcggatcacgaggtcaggagatcgagaccatcctggccaacacggtgaaaccccgtatctactaaaaagaaagaaagaaagaaagaaagtaagaaagaaagaaagaaagaaagaaagagaaaaaaaattagccgggagttgtggcgggcgcctgtagtcccagctactggggaggctgagccaggaaatggcgtgaaccccggaggcggagcttgcagtgggccgagttcgcgccactgcactccagcctgggcgacagagcgagaccctgtatcaaaaaaaaaaaaaaaaaaaacttactttcccttcgcgaccagcctgggcaacacggtgaaatcccgtctctacaaaaaatacaaaaattagcccatcgtgtggcgcacgcctgtagtcccagctccttggggcgctgaggcaagaaaatcgctcggccccaggaggtcgaggctgcagtgagccgtgtttgcatcactgcactccagcctgggctaccaagtgagaccctgtctcacaaacagaacaaaacaaaacttccccatggaaaaacagttcatgatttctattttcagagctcttcaaaagactaaaaactgaatgcgacgatggattaattcaagtcctagtcgtgcgctctggtgagtgccataccctgtttcccgcgaggggacccacgagcgaccctcaccatcatccctgccctggtggagcccccgtgcgggacacaggatccga

SEQ ID NO: 37957 - DNA, 1060 bp, Homo sapiens
tccggtccttaccgctgaacaaagctactgggaagtttcctcgccagggtcgccgcctctgccgacttccttgctctcctccttgcagttacccgttggacccacccagtgccccgctcccgccctagtgccccaggcacccacccaaaaacagcgcagctgagcccccgcagctccatcgcgcagaaggtttactggaggcctcagcccgttgtccgccccacgggatgccaggaaatccatcggaataaacgctttttaaaaagaatttaccgccgggcgcggtggctcacgcytgtaatcccagcactttgggaggccgaggcaggcggatcacgaggtcaggagatcgagaccatcctggccaacacggtgaaaccccgtatctactaaaaagaaagaaagaaagaaagaaagtaagaaagaaagaaagaaagaaagaaagagaaaaaaaattagccgggagttgtggcgggcgcctgtagtcccagctactggggaggctgagccaggaaatggcgtgaaccccggaggcggagcttgcagtgggccgagttcgcgccactgcactccagcctgggcgacagagcgagaccctgtatcaaaaaaaaaaaaaaaaaaaacttactttcccttcgcgaccagcctgggcaacacggtgaaatcccgtctctacaaaaaatacaaaaattagcccatcgtgtggcgcacgcctgtagtcccagctccttggggcgctgaggcaagaaaatcgctcggccccaggaggtcgaggctgcagtgagccgtgtttgcatcactgcactccagcctgggctaccaagtgagaccctgtctcacaaacagaacaaaacaaaacttccccatggaaaaacagttcatgatttctattttcagagctcttcaaaagactaaaaactgaatgcgacgatggattaattcaagtcctagtcgtgcgctctggtgagtgccataccctgtttcccgcgaggggacccacgagcgaccctcaccatcatccctgccctggtggagcccccgtgcgggacacaggatccga

SEQ ID NO: 37958 - DNA, 1060 bp, Homo sapiens
tccggtccttaccgctgaacaaagctactgggaagtttcctcgccagggtcgccgcctctgccgacttccttgctctcctccttgcagttacccgttggacccacccagtgccccgctcccgccctagtgccccaggcacccacccaaaaacagcgcagctgagcccccgcagctccatcgcgcagaaggtttactggaggcctcagcccgttgtccgccccacgggatgccaggaaatccatcggaataaacgctttttaaaaagaatttaccgccgggcgcggtggctcacgcctgtaatcccagcactttgggaggccgaggcaggcggatcacgaggtcaggagatcgagaccatcctggccaacacggtgaaaccccgtatctactaaaaagaaagaaagaaagaaagaaagtaagaaagaaagaaagaaagaaagaaagagaaaaaaaattagccgggagttgtggcgggcgcctgtagtcccagctactggggaggctgagccaggaaatggcgtgaaccccggaggcggagcttgcagtgrgccgagttcgcgccactgcactccagcctgggcgacagagcgagaccctgtatcaaaaaaaaaaaaaaaaaaaacttactttcccttcgcgaccagcctgggcaacacggtgaaatcccgtctctacaaaaaatacaaaaattagcccatcgtgtggcgcacgcctgtagtcccagctccttggggcgctgaggcaagaaaatcgctcggccccaggaggtcgaggctgcagtgagccgtgtttgcatcactgcactccagcctgggctaccaagtgagaccctgtctcacaaacagaacaaaacaaaacttccccatggaaaaacagttcatgatttctattttcagagctcttcaaaagactaaaaactgaatgcgacgatggattaattcaagtcctagtcgtgcgctctggtgagtgccataccctgtttcccgcgaggggacccacgagcgaccctcaccatcatccctgccctggtggagcccccgtgcgggacacaggatccga

SEQ ID NO: 37959 - DNA, 557 bp, Homo sapiens
cgaaaacaaaaactgaggtttagctgtttccatgggccttcatttcctttggaaggcgttcctgtcatgtaaaatttacattaaataaatctgtatgctcttcccttgttagtctgtgttttgctgtgagggtctcagcagcgaacctaggctgggtgaggaaaagtcatatttcctccccgacatgtacaaatgtcttccactgtaaagctatatgatttttttttttttgacagggtctcactctgttgtccaggctggagtgcaatggcacgatatcagctcactgcaacctccgcctcccgggttcaagccattttcctgcctcagcctcccaagtagctgggattacaggtgcctgccaccacgtccggctactttttgtatttttagtagagatggggtttcaccttgttggccgggctggtctcgaactcctgacctcargtgatccgcccgcctcggcttcccaaagtgctgggattacaggcgtgagccactgcacctgggcaaaactataagaattttactggggcagatttgaagcaagaaattga

SEQ ID NO: 37960 - DNA, 532 bp, Homo sapiens
ttttttgtattttagtagagacagggtttcactgtgtcagccaggatggtctcgatctcctgacctcgtgatccaccggcattggcctcccaaagtcctgggaatataagcatgagccaccacgtccagccttagttttgttttatagatgctttttttttttcatattcactctgagcattaaaaatacacttatgttaacatctttggtgtactctgatatttccagttcaacattattaattgataacaagtaagtttgtttagttttattagttcttctcatagcctgtatttctttccatatattgtcattttgttctgagggcctacaattcayatgatttttttcttatgctttcctttctgtacactcatttcaactctcaggcatttttacagttatctcacacctcaactccttcttaaggatcatgactcagaggcagtattgcttgtggacacctacaagaggactgcataataatcttcaacagtgcagaacatgcaccaggcttctgcacaataaatt

SEQ ID NO: 37961 - DNA, 932 bp, Homo sapiens
acaggactccctagcacataggttacaatgctgctggagaaaatgttcttcccgggacttcatttgttgatggctccctctgccagccatcagggagtggcagggctgggcaggaggcccgcttgggtctcctctgctttctaccccaccctggcccagcaccctccggggcatagggaagcagaagaggacaggatgcccgccccagcagcctcatgctgacgctcacaccctctggctagcctgtgatcttcctcctcctacatcgatgtttgctttggctgcttggcatggagagagggacccagttcctcaggcctgtactctggtgacagggcacagagggtgctaggtgatgtcagcagctgacaactgctcctgctgtcatcctggtttcccttccctgctcactgcactccagagccccagggggctctccatgctctaggtactccaggccctaagcagtggctcmgtgtgcggctgctggtgtctcagggctccaccagctggaggcacttctatctctgggcctccgatggctttcatggccaaggagtagggcaaagggtagatggactgggctgcttttcagcagggactggtcgtaagatgacatgagaccagccctgcctgggtctggcctgaatcacagtgcgctctgcccagctgtgtatgaactggccaagctgggaactggtttgtttcaatctaactgcaacctgttcccattccagtattttaattatggcaataaagaaatgtgaacataaaaaggtacgtgctttataaatgtgattctgatgttcccttttgatactaattcacattaattgcctcagatgatactgatacccaaacagaaatctggcagaagaatcccgactggcagtcctgataacgtgcctgtgtggaggcggcagtaatggggt

SEQ ID NO: 37962 - DNA, 601 bp, Homo sapiens
catagacagctaatcccccataggaatctcctgtcacctcaggkttttttcttcttttaatggaatagaagactcagtgtatgtagagatcttttcaaatgaaactactgtactgcatctgtcagatgacattttcataatataaaactcatccaatctgtttcttttcaacattttcaatgtttgttatatgatgtcaattatagcttaacttcctttaccctaacgatttcccagagttttattagattggccagctaaaactcacatattcccatttaacttctcaagcaacagaacagaaggcatgagtggctgatgttaaccaaaccaaacgccacttgagaatgccattaaaagaatcgtggctgaaggttataaataggtgacactatttataaagcataaacaaaatgtttcttgatgtgtaacataaagcccaagcagtcctattgttaaaaacctgctcctgtgcctaatgtctacataaatagcagcagcaacgcagtatcatgagctgctttgtttggcctcaagcaaatcataggcatattagatgtaacatttcctactaattgctgcttggcctttagaaaaaaaa

SEQ ID NO: 37963 - DNA, 601 bp, Homo sapiens
catagacagctaatcccccataggaatctcctgtcacctcagggttttttcttcttttaatggaatagaagactcagtgtatgtagagatcttttcaaatgaaactactgtactgcatctgtcagatgacattttcataatataaaactcatccaatctgtttcttttcaacattttcaatgtttgttatatgatgtcaattatagcttaacttcctttaccctaacgatttcccagagttttattagattggccagctaaaactcacataytcccatttaacttctcaagcaacagaacagaaggcatgagtggctgatgttaaccaaaccaaacgccacttgagaatgccattaaaagaatcgtggctgaaggttataaataggtgacactatttataaagcataaacaaaatgtttcttgatgtgtaacataaagcccaagcagtcctattgttaaaaacctgctcctgtgcctaatgtctacataaatagcagcagcaacgcagtatcatgagctgctttgtttggcctcaagcaaatcataggcatattagatgtaacatttcctactaattgctgcttggcctttagaaaaaaaa

SEQ ID NO: 37964 - DNA, 662 bp, Homo sapiens
tcagtgaaaacacaattcgacatctatttagaaagctatggaaaatgaatgccaattcagaatcacttgtgtatacatgacaaacattgggtttaaatgtttaaaagttgcatggatttaaatggttgactaatttcatgactatttcatgtcaacttcgattttactagtagagccatataaaaattaattattttattttaaatgtagtgagaaagtcacccttattcactctattatagacaagtaattattaaatatgattaaacacgtgaaattattctaaattatctatttcttactttcatacccacactctcttcccttcccctaaacttgcatctcttctcatagcctttatttggtgaacagtaatattacccactgagttgctcaagccagaattttgggaataatcttggctcattttctccaaattcaattctttctctatgtgcccaagtgatgtgaattctcattaaacaaatcacttatctctgyttccactgctgaaacttcagttgaagattttagtgtttctttactgggctacagagattacctcttaatttatcttcctgattcctatctcactcaactgtcaaagcgatctgtcaaagtcacaaatccgattgtttcattctcttgtttgaaatcttccc

SEQ ID NO: 37965 - DNA, 579 bp, Homo sapiens
tttcaagatggatttggttatagtattagcatgtcaatttctgtaatagcaaataattggggttttataaggactgcaataaatttgtaaatcaatgtagggtatattgctatctgaatgacaataaatcccccaatttatgaccttatgatatattcccatttacttaggttttcattaaattatttcaataatgttttatagttttgattgtacaggtattacacttctgttgttaaatatattccttgttattgtttggatgttattgtaaatggaattgttttattaatattatttctcgactgctcattgccagtgtctagaaatacaatgaattttctrtattgatcttatatcttggaaccttgacagctaatttattagttctaaaagatttttgtttgtttttgtggattactctggattttccatgtatagtcatccctctgtattcacagcttctaccttcatggatttttttttttccgaaaaaagatacaataaaataccaattaaaatatagcataactctttacataatatttacataatatttggtattttaagtaatctaga

SEQ ID NO: 37966 - DNA, 599 bp, Homo sapiens
tgcatgagctttgattagacgatctttctatgactagaacttaatttcagaagtcccccaaagctgttagggcttgagctctgcctacagtgcttaactgctaaaccagctatctatgaatgggacattgtatgaattcagaaatacttgggagagatttttgaaaaattgccatgccataacagtatatatttgtcaaataattttattcaactcttagtttctatgaaatatttcctcttgttaaaatactcaagtaattatcccaatacctggatttccttcccttctttactcacacagtgtataaagttgttgacactacagctgatctaagaaaagggcagggacaattacttatttttattcttagttttagttttgagacagaatctcactctgtcacccaggctggagtgcagtgatgcgatctcggctcactgcaacctccgcctcccgggttcacgccattctcctgcctcagcctcccaagtagctgggactacaggcaaccgccaccaagtcttgctaattttttgtatttttagtggagayggggtttcaccatgttagccaggatggtctcgatctcctgacct

SEQ ID NO: 37967 - DNA, 563 bp, Homo sapiens
ctaatgatctttgctgaattacataaatattatttgattatgtattactaaccaggattcattattgactttctttattgttattagtgggaattaatctgatactttccaaggcactcagtgttttctataaataactctattctcttttataacacatatttttatttgctctgtcttttaaattagcaggattccttataatgttgagcaatattggttgtgattcatagctttgtattgttactgaatttgaaggggtctttgaccatcattttgtcattgattgtaatgttagttttaggctatatgactatttctaaaatagtattttattttatttttcaaaagtattttattgggagggatgtcaaattttcacctggaattttttaatgatragcaatttaatgtttttagcctactgacattaccgttgttacattgaaatatccttttatctctgggttacatgagacgatgagtttttttttctactttaaaaaatatttaaaaagttaatttttattttataagattggattcaaatcataattaggtca

SEQ ID NO: 37968 - DNA, 812 bp, Homo sapiens
cttttgttgtagaataaataactgcaataggaaagaaacacatatataattttattctccattcacagccctttgggttatagtcttttcccatatagcagatactatactaaaaaaaattggggtggaggaatcttcactgacatcacaaggtgatttttgaatccgacttttacagtctgaaattcasacttcctgccctactgcaatgggagtaaaaaccacctgaacctctttttggcagcttcttctcttactcccaaatggcaacaagtgttatctctttgattgagctcttggtccatgcagtctaattaccaattcagaacagtgggggaacttcttattttacacaactggcaactgagtacagatttccactactgcagtagttagaagagagtagttggggttgaaattaaaagtcttaaagttaacagaagttcatgttctggctttgtcacttactagctgtgtaacctagggctattaatcaactttcttaaacctcagtttcttttttcttttttggagacagagtcttgttctgttggccaggctggagtgcagtgacatgatcttggctcactgcaacctccacctcccagttcaagcaattctcatgcctcagcctcctgaatagctgggactaagggcgcatgccactgtgcccagctaattttttgtattttagtagagacggggtttcaccatgttgcccaggctggtcttaaactcctgagctcaggcaatccgcctgccttggccttctagagtactaggattataataggcgtgagccactgcgcctg

SEQ ID NO: 37969 - DNA, 973 bp, Homo sapiens
aaatatcagatgatattttaaaattggaaaaaaaaaagggccaggaactttaacactatatttagaataaaagaaagctgcaggctactaaatattactaagatgtctgaagaaagaccgtgagaatagaagagtatgggaagcttgcattgagtacagaaaagggaagccaggaagtactgcctccatgcctgtgaaggtgaaactgtaccctacccagcagattcaagggacataggatcttatgcccttgacaggtacatttctacagaagaaatcagactattctactttgatgatgccagctaataagcccatcctacaaatcattyctctactcaccacctctctgctctgactgcatgttcacctgacaaccttcagattattatttgcttcccatatagatattctaaagcaacaaaagcagtaagtggccaattcaaattcttgaatcacttggcagttaaaatttattttgtaaattaataaattcacatcgaccaatctcaagcaaatgtgatcagtgtgagtcagtttactaaaactattaatcaactccagatctacctggggctgggggaggggcggtagtggggagagaagctatggagctgcagagccaaggacacaataatggatcacggctcttcctataaacagcttcttcctagtaccaattctatttcagttccccttaacatttctagctacctatttcactggctaaatgcaacattgatatatctccactgccttcactgtagctgcttcacgtacatattaaagtaaaacattattgggaacaggaaatagatttgttgatgtaaaacaagacagaacttgaataagcaaaacaaaatctgagtatttgggttcttcacccaaaaatgaaattccagttagttaattgatattgtatgttcattacagccataatctttctaataacatctctcatttcttagtattt

SEQ ID NO: 37970 - DNA, 973 bp, Homo sapiens
aaatatcagatgatattttaaaattggaaaaaaaaaagggccaggaactttaacactatatttagaataaaagaaagctgcaggctactaaatattactaagatgtctgaagaaagaccgtgagaatagaagagtatgggaagcttgcattgagtacagaaaagggaagccaggaagtactgcctccatgcctgtgaaggtgaaactgtaccctacccagcagattcaagggacataggatcttatgcccttgacaggtacatttctacagaagaaatcagactattctactttgatgatgccagctaataagcccatcctacaaatcattcctctactcaccacctctctgctctgactgcatgttcacctgacaaccttcagattattatttgcttcccatatagatattctaaagcaacaaaagcagtaagtggccaattcaaattcttgaatcacttggcagttaaaatttattttgtaaattaayaaattcacatcgaccaatctcaagcaaatgtgatcagtgtgagtcagtttactaaaactattaatcaactccagatctacctggggctgggggaggggcggtagtggggagagaagctatggagctgcagagccaaggacacaataatggatcacggctcttcctataaacagcttcttcctagtaccaattctatttcagttccccttaacatttctagctacctatttcactggctaaatgcaacattgatatatctccactgccttcactgtagctgcttcacgtacatattaaagtaaaacattattgggaacaggaaatagatttgttgatgtaaaacaagacagaacttgaataagcaaaacaaaatctgagtatttgggttcttcacccaaaaatgaaattccagttagttaattgatattgtatgttcattacagccataatctttctaataacatctctcatttcttagtattt

SEQ ID NO: 37971 - DNA, 1186 bp, Homo sapiens
agcctgggcaacatagctgagacctcatctctttaaaaaaaattacaggcgcagtggctcacaccgtaattccagcactttgggaggcagaggcgggcgggtcacgaagtcaagagatcaagaccatcctggctaacacagtgaaaccccgtctctactaaaaatacaaaaacaaaattaaccgggcatggcggcgggcgcctgtagtcccagctactcgggaggctgaggcgggagaatggcgtgaacctgggagatggaacttgcagcgagccgagatcgcgccactgcactccagcctgggcgacagagcgagactctgtctcaaaaaaaaaaaaaaaaagtatcttattgttgtttgatctgtatatccttattagtaaaaaggagtcttcttatgtatatgaggcatttggatttcctttttttgtgaattgcttattcctgggctttcccctatttttctacaagggtgtttgtctttttcttattcattttcttgttcttttaagtaataatattaactagcatttattgtgattacttgtattaattcatattattctcacaacaaccctaccaagcatatgctattcttatcttccatttacaaataaggaaattgtagcacagagaagtttagtaacctgttccaagttatactgctagtaagttgcagaattgggattcaaacctagccaatctggctccatgctcttaatcactttatctataggatagtaaccccttttcagtagtcatccatggagaattggttctaggacctccctcagataccaaaatccgcagatactgaaatccacaaatgctcaagtcycagatacaaaatgaggtagtattcacatacaacctgtgtacatcctcccagctactttaaataatctctagattacttataattcctaatacaatgtaaatgttagtaaatagttgttatcttgtttagggaataatgaagtctgtacatgttcattacagatgcaatgtttttcttcagaatattttccatccgttatgggttgaatccccagacgcagaacccacaatgcagagagccaactgtatatgtattatatcataattttaccagtattattacatttttatttttatacaacttattttgcctaactttccattttatttttatacaattttatttttt

SEQ ID NO: 37972 - DNA, 618 bp, Homo sapiens
catacgtaaagacttcctcgaagaaacgggacttggaggattagcaaatgttttagtagaaagaagacggaaaaaaccacataagacttggcatagagatggacatatgcaaggtatgtgtgtatgtatgtgtgtaaagaaataagaaggtgacaggtacgttatacaactggggaagatggttcatgatgaactggaaaatagctttaaaaactgaaagaatatatacattttttgagacagagtcttgctctgtcactaggctggagtgcagtggcacaatcttggctcacggcaacctctgcctcccgagttcaagtgattctcctgcctcagcctcccgagtagctgggattacaggtgcgcaccaccacaatcagctaatttttgtatttttagtagagacggggtttcaccatgttggcctcaatctcccgaccttgtgatccacccgcctcarcctccccaagtgctgggattacaggcgtgagccaccacacccggcccacacttttaaatttaatctgcaatattaacattttccccatcactttcttaagtctaaacaataaacaaaacaagacatctaactcaaacttgtagaatttgctgatttcc

SEQ ID NO: 37973 - DNA, 579 bp, Homo sapiens
gttatttctctctccagacctagaccctggagttaactgaaggtccagagttactgaggggcggctgtgtttgtttttcagtaggctggctttactgagtgggatacaagagcccaaagcacaggccattcccagaagcctaacattttcatatttctttctctgccaaagaatctttggttagggttaagaataactagtctgtctgtggaaataccaaggccttttgtttgccagaagaaaagcgcttttgattaaggctgccttttctctctctcttttttttttcttaagctgttgtgggaagacttcagagcctctgaaggtgcygtatttaaggggtgtaggggaaggaatgatagctaaatagaactaagggagacttaatcgtgctttaccgcacatttgtgcagagattaacaacagcaacaaaatctacccagtttttggtcattgcttctactagcctttctttcttcctgtcttttatgaaatctacccaaaacagtagttcccaaaggacctgctgtactgatctgaccttgaatcatactctatcacttagtgtgatttggggca

SEQ ID NO: 37974 - DNA, 576 bp, Homo sapiens
gaaatttgagtattttagtttccgagtattagtaaagagtggctcacattgccttttactttatacrttcatgcattggaagacttaatattgttaagatggcagcactccccaaactgatctatagattcaatgcaatccctgtcagaatcccagtggggttttttcttcttctttcttctcctcctcctcctcttcctcttattcttcgtcttcctcttcctcctcctcctcttcttccagaaattggcaagctgctcctgaaattcatgtgaaaatgcaagggacccagaatagtcaaaacaatcttgaaaaagaacaaaattggaggactcacacttccagatttgaaaacttactacaaagctacagtaattaagacaggatggtactggcatagggatagacatatagatcaatggaatagaattgagagtctaaaaataaacccttacatttatggtaaattgatttgtgataaaggtgccaagacaattcaatgtagaaagaattgtcttttcaacaaattatactgggacaactggatatccatatacaaaagaatgaaattggcca

SEQ ID NO: 37975 - DNA, 619 bp, Homo sapiens
ccatataatcacatgtaggcaacaaaggtaacactcctttccttagcatctaaccagcactactttgtcaatttcttaaattaaactccactgcccgtctcattctggtatttcccatagacatgaatacgcaaaaagtatgaagttccacccagtgattagggagccagtgaattgactcatgtggccaaaacagaggctgtataggacagaatacctggaatcagtgctaccccatattcaactagagagtctcaaacagaaatagagaaagtgtaagtgggccaggtgtggtggctcatgcctgtaatcctagcactygggaaggccaaagattccttgagcacaggagtttgagaccagcctagggaacatagggataacttgtctcttaaaacagaaagacagaaagacggacggacggaaggaaggaaggaagggttggttgtaagcattattaaaaatttgaaaacttttgctggtatatatggaaattttatctaaaattccaggaaagccaggggcttctagattgcatatacaaaaatggaaagaactgctctatctgctagattaaatactgggcttttcctttctaactactaacctgtgaagtcaa

SEQ ID NO: 37976 - DNA, 1487 bp, Homo sapiens
cacagaaaatataatgtaagactgattcttagaatctatcaaaacaggttgtaaaaatgacttaaacatctagcatggcagtgactaacattttgaaaagcttaatttttccattaagaactatagcccaacacagtgtctgtgcttcagtgttcctcttatcaggaaggataatatgtgtgatgcatggactaactctaatgaaaatttttattcttaagacacaaaatatttcccagcacagtacataaggtctttgtgcttatgtcagcattggagataaatttctgggaaagaagtagagaaactgctcatttctatagacatcaaaacaccaaagtagccgggcgcggtcactcatgcctgtaatcccagcactttgggaggccgaggcgggcagatcacctgaggtcaggagttcaagaccagcctcaacatggagaaaccccgtctctactaaaagcacaaaaaattagccgggcatggtggtgcatgcctgtaatcccagctactcgggaggctgaggcagaagaattgcttgaacctgggaggtggaggttgcagtgagccgagatcgtgccattgcactccagcctgggcaacaagagcaaaactctgtctcaaaaaacaaaacaaaaaaaacaaccaaagtaaaagtgaaaataaaggtacacagcagactttttctttttaaatacctaaactgaaaagtatacctgtcaagaaacatccaactcatgaattactttaaatatgtttttaaaacagcgtgcttgttttataacaatagattcatgctagttatctgatattccccagtggttgctttgtggagctcagtgtcatccttggagaacatgggcaataaaaagcatttcttctgcaccagtaagacaaaaacaaactgactacttctcacataaaccttggagggcttccctcagtggggttagtgatcagcaaatcatgtcaaataaccccttttgttatttttgacataatagtgttcctagcagacagtactcaagaattcccagattcttagctgtaacataaatttaatatactctcttttattaaaagtcaagctgtttattcacagtagctcttaggtctacgtttcattttacacatatatgtggatgtaatagctttttccttagaacttttaaaaaatagaattcagtaaaagtcctatatttgtattttctatgtgtcaagaacagataascatcattaatgtgaaccaaatttcaattgaggagctgaaattaggaagaattgaaaaacacctgaaataaatcttcaagtaataaaggggaaagtttactttagaattagtgtatcaaaaatgagaaaattggctgggcgcagtggctcacgcctgtaatcccagcactttgggaggctgaggcatgcagatcacctgaggtcaggagttcaagacctgcctggccaacatggtgaaaccctgtctccactaaaaa

SEQ ID NO: 37977 - DNA, 1487 bp, Homo sapiens
cacagaaaatataatgtaagactgattcttagaatctatcaaaacaggttgtaaaaatgacttaaacatctagcatggcagtgactaacattttgaaaagcttaatttttccattaagaactatagcccaacacagtgtctgtgcttcagtgttcctcttatcaggaaggataatatgtgtgatgcatggactaactctaatgaaaatttttattcttaagacacaaaatatttcccagcacagtacataaggtctttgtgcttatgtcagcattggagataaatttctgggaaagaagtagagaaactgctcatttctatagacatcaaaacaccaaagtagccgggcgcggtcactcatgcctgtaatcccagcactttgggaggccgaggcgggcagatcacctgaggtcaggagttcaagaccagcctcaacatggagaaaccccgtctctactaaaagcacaaaaaattagccgggcatggtggtgcatgcctgtaatcccagctactcgggaggctgaggcagaagaattgcttgaacctgggaggtggaggttgcagtgagccgagatcgtgccattgcactccagcctgggcaacaagagcaaaactctgtctcaaaaaacaaaacaaaaaaaacaaccaaagtaaaagtgaaaataaaggtacacagcagactttttctttttaaatacctaaactgaaaagtatacctgtcaagaaacatccaactcatgaattactttaaatatgtttttaaaacagcgtgcttgttttataacaatagattcatgctagttatctgatattccccagtggttgctttgtggagctcagtgtcatccttggagaacatgggcaataaaaagcatttcttctgcaccagtaagacaaaaacaaactgactacttctcacataaaccttggagggcttccctcagtggggttagtgatcagcaaatcatgtcaaataaccccttttgttatttttgacataatagtgttcctagcagacagtactcaagaattcccagattcttagctgtaacataaatttaatatactctcttttattaaaagtcaagctgtttattcacagtagctcttaggtctacgtttcattttacacatatatgtggatgtaatagctttttccttagaacttttaaaaaatagaattcagtaaaagtcctatatttgtattttctatgtgtcaagaacagataagcatcattaatgtgaaccaaatttcaattgaggagctgaaattaggaagaattgaaaaacacctgaaataaatcttcaagtaataaaggggaaagtttactttagaattagtgtatcaaaaatgagaaaattggctgggcgcagtggctcacgcctgtaatcccagcactttgggaggctgaggcatgcagatcacctgaggtcaggagttcragacctgcctggccaacatggtgaaaccctgtctccactaaaaa

SEQ ID NO: 37978 - DNA, 530 bp, Homo sapiens
ttaccttccagaaatattattaatttaaactatctgctggtattagtaaatgtttcagtgtagaactaagaataaggagttcttctctgagaatgaaatctctgtattcaattaaaagttgggttttttgagaggtattgtctttgttttctgcctgtattctccttagcatagttttatgatataacaatgctaaccttcaatcatatattggaaaacatatttacacatatatgtgaattaacccaactagtaacattttaatctggcatttggccaagataaagtaaggatctgaatttctgctcccacttgtcatataataaaaaataggtatttgctctttgtccctggttcctagcacayagttcctaaaactactggaatctagttcagatatttgcaaagatttatatttcacttttatatagacttatacatttttaccacaagtggtagcctttttgcttatattaaaactagcagtgggctgggtgtggtggctcatgcctgtaattccagcactttgg

SEQ ID NO: 37979 - DNA, 1259 bp, Homo sapiens
tgccctttgtttattgcctgggatcccaactttatttcmtaattttatttctttgaggaaacgtttcacaagttttataacacaggataactcaatttggagagcacaatctgtgcataagttggaggctacctattgtgaaatggaaaaatgcttgtcctagcattactgagttaatgtatagctggtagaaagttttcacttttaattgctaacttgcctagtgagagtgaaagattgattacggcaactaaaaagtataaaaactactgagtagtttttaggtacagtcagttcttcagtagaacaagaatcttttttttttttttttttgagacagagtctcgctctgtggcccaggctggagtgcagtggcgggatctcggctcactgcaagctccgcctcccgggttcacgccattctcctgcctcagcctcccaagtagctgggactacaggcgcccgccactacgaccggctaattttttgtatttttagtagagacggggtttcaccgttttagccgggatggtctcgatctcctgacctcgtgatccgcctgcctcggcctcccaaagtgctgggattatgggcgtgagccaccgtgcctggcttcactcagtgttttcagttaggaaacttacattgtttagttttgggacattttcttgaattatttcactggttttttttcctctctgttttctcccgtggattccccattgcatagatgctgaattatcttgactggacctccagttttttcttcttgattctgttgccatctctttgattccttattgtttctgataaattttcctaagtttaatttccgagagctctttggaaaagtatcgattttttttcatggatggagtatctactcttttgacacagggtcttgctctgtcgtggctcactacagctttgattgctcaggctcaagcgatcctcctgccctagccctcccagtagctggtactacaggcctgcaccgccaaacctagctaacttttttgatttttagtagacaaggtctcgctgtgttgcccagactggtctcgaactcttaagcgccaagcatttctcttgcctcagcctcctaaaattctgggattacagtgtagtatcttctgtatcctttccatggacgctaatgatggggtataaaattccttttatttatttattttttattgacatcagaaattcctgctaataaaattctttttaaattttaagtttttttcttcccacag

SEQ ID NO: 37980 - DNA, 544 bp, Homo sapiens
tttttggtaagcttcaaaacttcttatctcccatgaaagtactttttcttttataatatgcaacaataactttctgtttagttaattagttttaaaacaagcttaaacttataatttataaagaatcatatttgctccctatcattgttttatagctggggctatactgacaaataagaaaaataaaattcctgcccttgtggaggagacagttaaaaaatgrgacaaatacatttcagatggaaatgaggacaatggaagaagagtagagcaggatgaaggcatgaagggtgactgagatctggtcaatctttagatagtgtaatacgggaaactgctttgaaaagatgacttttgagcagagatcttaacgtactgagggagtgaaccattcgaggtctggggaaagaattcagcttcctcttcagatgtacaaaattacaagatattgccattcttgtaactgaaaacctataaaagcaggataagaagtacggtttctaaaaacccatcgaagagctgaggatacaagggagcctaaatg

SEQ ID NO: 37981 - DNA, 544 bp, Homo sapiens
tttttggtaagcttcaaaacttcttatctcccatgaaagtactttttcttttataatatgcaacaataactttctgtttagttaattagttttaaaacaagcttaaacttataatttataaagaatcatatttgctccctatcattgttttatagctggggctatactgacaaataagaaaaataaaattcctgcccttgtggaggagacagttaaaaaatgagacaaatacatttcagatggaaatgaggacaatggaagaagagtagagcaggatgaaggcatgaagggtgactgagatctggtcaatctttagatagtgtaatacgggaaactgctttgaaaagatgacttttgagcagagaycttaacgtactgagggagtgaaccattcgaggtctggggaaagaattcagcttcctcttcagatgtacaaaattacaagatattgccattcttgtaactgaaaacctataaaagcaggataagaagtacggtttctaaaaacccatcgaagagctgaggatacaagggagcctaaatg

SEQ ID NO: 37982 - DNA, 544 bp, Homo sapiens
tttttggtaagcttcaaaacttcttatctcccatgaaagtactttttcttttataatatgcaacaataactttctgtttagttaattagttttaaaacaagcttaaacttataatttataaagaatcatatttgctccctatcattgttttatagctggggctatactgacaaataagaaaaataaaattcctgcccttgtggaggagacagttaaaaaatgagacaaatacatttcagatggaaatgaggacaatggaagaagagtagagcaggatgaaggcatgaagggtgactgagatctggtcaatctttagatagtgtaatacgggaaactgctttgaaaagatgacttttgagcagagatcttaaygtactgagggagtgaaccattcgaggtctggggaaagaattcagcttcctcttcagatgtacaaaattacaagatattgccattcttgtaactgaaaacctataaaagcaggataagaagtacggtttctaaaaacccatcgaagagctgaggatacaagggagcctaaatg

SEQ ID NO: 37983 - DNA, 544 bp, Homo sapiens
tttttggtaagcttcaaaacttcttatctcccatgaaagtactttttcttttataatatgcaacaataactttctgtttagttaattagttttaaaacaagcttaaacttataatttataaagaatcatatttgctccctatcattgttttatagctggggctatactgacaaataagaaaaataaaattcctgcccttgtggaggagacagttaaaaaatgagacaaatacatttcagatggaaatgaggacaatggaagaagagtagagcaggatgaaggcatgaagggtgactgagatctggtcaatctttagatagtgtaatacgggaaactgctttgaaaagatgacttttgagcagagatcttaacgtactgagggagtgaaccattcgaggtctggggaaagaattcagcttcctcttcagatgtacaaaattacaagatattgccattcttgtaactgaaaacctataaaagcaggataagaagtacggtttctaaaaacccatcraagagctgaggatacaagggagcctaaatg

SEQ ID NO: 37984 - DNA, 639 bp, Homo sapiens
tatcttgtttggggttcagttacatgaatgtatatatttgtcaaaactctaaattgtacacttaagacctgtgcatttaactatacgttttcatgcaatttttttttaaattccaagaaaaaggatctgattgacccaatttgagycaggcatcctactgccttgcataatcagtttttgccaaggaatccaaacaagcagtatagacgtgacctagagaaggggcaccagaatgggcttggctcccacccacaaagttccaatatctcctacatgatgtcagttttggggaccaaaaccatatcatctttttctattatttggatgtgatctttttatttatgtatgtttgttgttggttttatttttttagagacagggtctcgctttgtcatccaggctggagtgtagtggcagatcatagctcactgcagcctcaaactcccgggctcaagtgatcttcctgcctcagcctcctgagtagtgtgtcaccatgcctggctaattttttttttttttttttttttagtgttttatagagacaagatcttgctatgttgtccaggctggtctccaattcctggcctcaagcaatcctcccatctcaggctcccaaggtacagggattacgggagtgag

SEQ ID NO: 37985 - DNA, 560 bp, Homo sapiens
tagatgccagacatgaagactatatacatatcttcagagcgcttgtgtcctaaactgaaaagtgtgttttaagagtctgggatatgaaaccaccttttctctattcttgtcaaatccatgtcattctagctactgacataatttatgcaatataaatacaaataatrataagcaaagttatatgaaaatatgtttccagtatataggtagttttaaccattctttttagaagaaatgtgtgtgtgtgtaaatgtcttaattgttaaaatgattaagtcattcacaggtttgttaatgtttttccatgtagctggagtgataataatttgtattacattttagagtggtttgatgcaaataaataagaaccaactcaaaatgttattgaggttaaactccaagaagacaaaaggaaaactaaaataacaaagtaaactataattaaaacatttcaactaagaaaaaagtaaaaagttaagctatctcagacaatgttcgagattgaagcttgttaattgcaatggaaaaactgctaattaccacaaatagtaatttagagg

SEQ ID NO: 37986 - DNA, 560 bp, Homo sapiens
tagatgccagacatgaagactatatacatatcttcagagcgcttgtgtcctaaactgaaaagtgtgttttaagagtctgggatatgaaaccaccttttctctattcttgtcaaatccatgtcattctagctactgacataatttatgcaatataaatacaaataataataagcaaagttatatgaaaatatgtttccagtatataggtagttttaaccattctttttagaagaaatgtgtgtgtgtgtaaatgtcttaattgttaaaatgattaagtcattcacaggtttgttaawgtttttccatgtagctggagtgataataatttgtattacattttagagtggtttgatgcaaataaataagaaccaactcaaaatgttattgaggttaaactccaagaagacaaaaggaaaactaaaataacaaagtaaactataattaaaacatttcaactaagaaaaaagtaaaaagttaagctatctcagacaatgttcgagattgaagcttgttaattgcaatggaaaaactgctaattaccacaaatagtaatttagagg

SEQ ID NO: 37987 - DNA, 560 bp, Homo sapiens
tagatgccagacatgaagactatatacatatcttcagagcgcttgtgtcctaaactgaaaagtgtgttttaagagtctgggatatgaaaccaccttttctctattcttgtcaaatccatgtcattctagctactgacataatttatgcaatataaatacaaataataataagcaaagttatatgaaaatatgtttccagtatataggtagttttaaccattctttttagaagaaatgtgtgtgtgtgtaaatgtcttaattgttaaaatgattaagtcattcacaggtttgttaatgtttttccatgtagctggagtgataataatttgtattacattttagagtggtttgatgcaaataaataagaaccaactcaaaatgttattgaggttaaactccaagaagacaaaaggaaaactaaaataacaaaktaaactataattaaaacatttcaactaagaaaaaagtaaaaagttaagctatctcagacaatgttcgagattgaagcttgttaattgcaatggaaaaactgctaattaccacaaatagtaatttagagg

SEQ ID NO: 37988 - DNA, 525 bp, Homo sapiens
gcaaagattagtaattaatttctcctttggttagaaaaagaaataattaatgagtttagcacatagatgggaagaaatcaagaactaaattccattttggctactgtctcactyatttttttaaagaaaaaacaaaaacaaagagaagctatgagaacaaggagggagaagtatctgcttactggtacatttcatttaatttctggtgttgagaactagtagaaaaaaaaagtcttgtcaagttagcatttgtagcagttaggagagcccagttatactgagtatctagtaatttgaaggaggttaaacactcttgaattaaatttaccttgagaaatgatcattatcagtatttctgcaatccaaagaagttttcctcaactaccatgctgagatgttacatcatatttatattaagggagcatccccaagcatgggctccttactcgggaacgattcagcagaaccagggacccccagaaatgatgctgtgactcatgctaaccccacagttcctgcatagaa

SEQ ID NO: 37989 - DNA, 567 bp, Homo sapiens
taaaaaagacaccacgtttttaacaaatattgttggaaatatgtagtaaatctttggccatcttcctatattttaaagattttttttctttttttgagatagagtaaaaatgggtgggttgtaaatctttatattgtaacaagtacattctgatatgattattcaaccactagaaaaatattttcactctttaggttaaataataaaactacctttcggagcgacgcagaagacgggtgatttctgcatttccatctgaggtaccgggtccatctcactagggagtgccagacagtgggcccaggtcagtgggtgcgcgcaccgtgcgcgagccgaagcagggcgaggcattgcctcacttgggaagckcaaggggtcagggacttccctttccgagtcaaagaaaggggtgacggacagcacctggaaaatcgggtcactcccacccgaatactgcgcttttccgacgggcttaaaaaacggcgcaccacgagattataccccgcacctggctcggaggttcctacgcccccggagtctcgctgattgctagcacagcagtctgag

SEQ ID NO: 37990 - DNA, 1150 bp, Homo sapiens
cagatttttatttgattctcacaacaaccctgagataaatagagcagagatgtggaaacccaggctcagagagatggagtgccttgctcactgcctccgtgacatgggatggccccagaacctgaatgcagctcttctgacttccaatgcagggctcatgtcatgccaccactgctggtggagaattgtccttattcatcacttgcattgttggcaaatcaactatatagaatgttcctggaaatcccctgaatcttattttggtattttgccacccatccgcagttgactgtagagcraaatcataccctacctgactgtggccccaccaggtgccatgtcctgggtgagtgttttctagacacggactcgtttattttcacagccatcccaggaggtgtgagtgatccttatcctcatattacagataagggaatggatccacagagcggggaaaccccttgtctgaatttcctcagttagtgagcagcagagctgaggtgcagtcccagctatctgtctttaaaacctcagagcccccaggccattgcttgctgtagatcagtgtagcgctgacttctgcagcaccacgtcttgatgcctcacttaacccattctgtattttattttagatttagggggtacacatgcatgtctgttacatgggtatattgcatactggtgaggattgggcttcaagtatatccattacccaagtagtgaacattgcacccaacaggtaatttttcaaccctcccccttctagagtccccagtgtctattatttacgtctttactttttttttttccaagatagggtcttgctctgccatccaggctggagtttagtggcacgatcatatctcactgcagtcttgatctcctgggctcaagcgatcctcctacttcagtctcctgagtagctgggaacagagatgtgcaccaccctgcctggctaattttaaagaggtggggtctcactatgttgtccagggtggtcttgaactcctgggttcaaaccatcctccttcctcagcctcccaaagtgccgggattacaggcatgagctactgctcccggcctattatttccatcttttacgtccatgtgtacccattgtttagcccgcacctataagtgagaacatgaa

SEQ ID NO: 37991 - DNA, 1150 bp, Homo sapiens
cagatttttatttgattctcacaacaaccctgagataaatagagcagagatgtggaaacccaggctcagagagatggagtgccttgctcactgcctccgtgacatgggatggccccagaacctgaatgcagctcttctgacttccaatgcagggctcatgtcatgccaccactgctggtggagaattgtccttattcatcacttgcattgttggcaaatcaactatatagaatgttcctggaaatcccctgaatcttattttggtattttgccacccatccgcagttgactgtagagcaaaatcataccctacctgactgtggccccaccaggtgccatgtcctgggtgagtgttttctagacayggactcgtttattttcacagccatcccaggaggtgtgagtgatccttatcctcatattacagataagggaatggatccacagagcggggaaaccccttgtctgaatttcctcagttagtgagcagcagagctgaggtgcagtcccagctatctgtctttaaaacctcagagcccccaggccattgcttgctgtagatcagtgtagcgctgacttctgcagcaccacgtcttgatgcctcacttaacccattctgtattttattttagatttagggggtacacatgcatgtctgttacatgggtatattgcatactggtgaggattgggcttcaagtatatccattacccaagtagtgaacattgcacccaacaggtaatttttcaaccctcccccttctagagtccccagtgtctattatttacgtctttactttttttttttccaagatagggtcttgctctgccatccaggctggagtttagtggcacgatcatatctcactgcagtcttgatctcctgggctcaagcgatcctcctacttcagtctcctgagtagctgggaacagagatgtgcaccaccctgcctggctaattttaaagaggtggggtctcactatgttgtccagggtggtcttgaactcctgggttcaaaccatcctccttcctcagcctcccaaagtgccgggattacaggcatgagctactgctcccggcctattatttccatcttttacgtccatgtgtacccattgtttagcccgcacctataagtgagaacatgaa

SEQ ID NO: 37992 - DNA, 588 bp, Homo sapiens
cgcttcttttagaggtgttatcattcttccaggttcccttgttagaaatttgcagtcattcaaaactctaatcttccctatatttatttatttatttttatttcaaaagcttttggggtacatgtggtttttggttacatggattaattctattgtggtgaattttgagattttagtgcacctgtcactcaagcagtgtacactttacccaatatgtagtctttcatccctcaccccctcccaccctgagaacatacagcatttggttttctattcctgagttacttcacttagaataatagcctcyagctctatccaagttgttgcaaaagacattatttcattcctttttgtggataagtggtattccatggtgtatatatgccacattttctttacccagtcattggtcaatgggcacttaggttggttccatatctttgcaattgtaggactgatttattcatagtaagcatagtgcctagagctggggatagttttagaggcccataaaaatgttttaatgtcttttaaaatataaatttaaaaatttaggtttttttcctgatatgtaatattaatatattc

SEQ ID NO: 37993 - DNA, 588 bp, Homo sapiens
cgcttcttttagaggtgttatcattcttccaggttcccttgttagaaatttgcagtcattcaaaactctaatcttccctatatttatttatttatttttatttcaaaagcttttggggtacatgtggtttttggttacatggattaattctattgtggtgaattttgagattttagtgcacctgtcactcaagcagtgtacactttacccaatatgtagtctttcatccctcaccccctcccaccctgagaacatacagcatttggttttctattcctgagttacttcacttagaataatagcctccagctctatccaagttgttgcaaaakacattatttcattcctttttgtggataagtggtattccatggtgtatatatgccacattttctttacccagtcattggtcaatgggcacttaggttggttccatatctttgcaattgtaggactgatttattcatagtaagcatagtgcctagagctggggatagttttagaggcccataaaaatgttttaatgtcttttaaaatataaatttaaaaatttaggtttttttcctgatatgtaatattaatatattc

SEQ ID NO: 37994 - DNA, 588 bp, Homo sapiens
cgcttcttttagaggtgttatcattcttccaggttcccttgttagaaatttgcagtcattcaaaactctaatcttccctatatttatttatttatttttatttcaaaagcttttggggtacatgtggtttttggttacatggattaattctattgtggtgaattttgagattttagtgcacctgtcactcaagcagtgtacactttacccaatatgtagtctttcatccctcaccccctcccaccctgagaacatacagcatttggttttctattcctgagttacttcacttagaataatagcctccagctctatccaagttgttgcaaaagacattatttcattcctttttgtggataagtggtattccatggtgtatatatgccacattttctttacccagtcattggtcaatgggcacttaggttggttccatatctttgcaattgtaggactgatttattcatagtaagcatagtgcctagagctggggatagttttagaggcccataaaaatrttttaatgtcttttaaaatataaatttaaaaatttaggtttttttcctgatatgtaatattaatatattc

SEQ ID NO: 37995 - DNA, 1265 bp, Homo sapiens
atcttttgtaaatctttgccttgctttagaatatttccataatgaagtccacacaatacctgccttttgcagcttttattgaaatagtgatttttgttattttaactcacaaatataaaaatttgccaatattaatctgattttgctttatgtaaattcagatggtttaaaaataagagccaaggtagaaaagtgagtgtagtgctaaactttatgaaaatattggaagtgaatgttaaagacgaagcaggaagtttgaaagtcttgattatgttttcataaatatttgttcagtagatacagcaaattccaatatgtaaacactattaaaataagccttttcttttttttccttctccatgagttttgcagaatttctaaccatgtttcccctccctgcactcaccattgctaatttgcatgttgttaggctacacgtttaataactatgtagaagtagaaaatgaaaggcagttttatgccatggaccataacttttgtgcatataacattaccaatggcattagagacacaatggaattaatggataggtcccatttatgacatctcaatgatctctgaagggagtggttcagatttcacaaattctcttccttccttccttccttccttctttccttccttccctcctgcctcccttcctcccttccttccttctttctttctttatttcttgagtctstctatgccacccaggctggagtgcagtggcgtgatcttagctcactgcaacctccgcctcctgggttcaagcaattctcgtgcctcagccacgcaagtggctgggattacaggtgtgtgccaccacgcccagctaatttttgtagttttagtagagatggggtttcactatgttggccaggctggtcttgaacgcctgacctcaagtgatccatccgccttggcctcccaaagtgctgggattacagatgtcagccaccacgcctggccacaaattctttctttttaatctagcttttaaaatgtaattttatttagattctgggaacacatgtacatacttgttacatgggtatattgcatatggtgaaaactgggctgctagtgaactcgtctctcaaacagtgaatattgtacccaacaggtaatttttcaaccctttccccttcccaccctcttcacttttcgaatccccagtgtttattatttccatctttatcagacttccaaattctttttcttttctttctttctttcttttctttttttttttttttgagaca

SEQ ID NO: 37996 - DNA, 1265 bp, Homo sapiens
atcttttgtaaatctttgccttgctttagaatatttccataatgaagtccacacaatacctgccttttgcagcttttattgaaatagtgatttttgttattttaactcacaaatataaaaatttgccaatattaatctgattttgctttatgtaaattcagatggtttaaaaataagagccaaggtagaaaagtgagtgtagtgctaaactttatgaaaatattggaagtgaatgttaaagacgaagcaggaagtttgaaagtcttgattatgttttcataaatatttgttcagtagatacagcaaattccaatatgtaaacactattaaaataagccttttcttttttttccttctccatgagttttgcagaatttctaaccatgtttcccctccctgcactcaccattgctaatttgcatgttgttaggctacacgtttaataactatgtagaagtagaaaatgaaaggcagttttatgccatggaccataacttttgtgcatataacattaccaatggcattagagacacaatggaattaatggataggtcccatttatgacatctcaatgatctctgaagggagtggttcagatttcacaaattctcttccttccttccttccttccttctttccttccttccctcctgcctcccttcctcccttccttccttctttctttctttatttcttgagtctctctatgccacccaggctggagtgcagtggcgtgatcttagctcactgcaacctccgcctcctgggttcaagcaattctcgtgcctcagccacgcaagtggctgggattacaggtgtgtgccaccacgcccagctaatttttgtagttttagtagagatggggtttcactatgttggccaggctggtctygaacgcctgacctcaagtgatccatccgccttggcctcccaaagtgctgggattacagatgtcagccaccacgcctggccacaaattctttctttttaatctagcttttaaaatgtaattttatttagattctgggaacacatgtacatacttgttacatgggtatattgcatatggtgaaaactgggctgctagtgaactcgtctctcaaacagtgaatattgtacccaacaggtaatttttcaaccctttccccttcccaccctcttcacttttcgaatccccagtgtttattatttccatctttatcagacttccaaattctttttcttttctttctttctttcttttctttttttttttttttgagaca

SEQ ID NO: 37997 - DNA, 1265 bp, Homo sapiens
atcttttgtaaatctttgccttgctttagaatatttccataatgaagtccacacaatacctgccttttgcagcttttattgaaatagtgatttttgttattttaactcacaaatataaaaatttgccaatattaatctgattttgctttatgtaaattcagatggtttaaaaataagagccaaggtagaaaagtgagtgtagtgctaaactttatgaaaatattggaagtgaatgttaaagacgaagcaggaagtttgaaagtcttgattatgttttcataaatatttgttcagtagatacagcaaattccaatatgtaaacactattaaaataagccttttcttttttttccttctccatgagttttgcagaatttctaaccatgtttcccctccctgcactcaccattgctaatttgcatgttgttaggctacacgtttaataactatgtagaagtagaaaatgaaaggcagttttatgccatggaccataacttttgtgcatataacattaccaatggcattagagacacaatggaattaatggataggtcccatttatgacatctcaatgatctctgaagggagtggttcagatttcacaaattctcttccttccttccttccttccttctttccttccttccctcctgcctcccttcctcccttccttccttctttctttctttatttcttgagtctctctatgccacccaggctggagtgcagtggcgtgatcttagctcactgcaacctccgcctcctgggttcaagcaattctcgtgcctcagccacgcaagtggctgggattacaggtgtgtgccaccacgcccagctaatttttgtagttttagtagagatggggtttcactatgttggccaggctggtcttgaacgcctgacctcaagtgatccatccgccttggcctcccaaagtgctgggattacagatgtcagccaccacgcctggccacaaattctttctttttaatctagcttttaaaatgtaattttatttagattctgggracacatgtacatacttgttacatgggtatattgcatatggtgaaaactgggctgctagtgaactcgtctctcaaacagtgaatattgtacccaacaggtaatttttcaaccctttccccttcccaccctcttcacttttcgaatccccagtgtttattatttccatctttatcagacttccaaattctttttcttttctttctttctttcttttctttttttttttttttgagaca

SEQ ID NO: 37998 - DNA, 594 bp, Homo sapiens
attttcctatatatattatttcaaaaatctccagtctctcaagaagtcagagccttctatgattattttctttcagtcaatttaagtaccttgttctggtatcccttctttcataatatcaatttgatttatacttctgcttctgattccacatcagttcctccatccaccatatagatatagtcacctaatgtatgttccccaattgctcttttgattatgtcaagactctaaaacaattattgaagttayattttatatgaaacaaacattaacattcttaattcaacagaaaagtttctcttaaatttgttttgctgctctgctccaaattgcttgccaatgtgtctcttcattagcacttacacccccatgacatttgaatatctatatctgaagttaatcaaagggttctgtatctttctggaatcagggatttattcaatcaacctctatgcaaatttgaaaaaaaatagccattccatttttttttaaacactatattcttgagccttagtcaatttttatcctaattatttatttcttcttagccttatttattgtttttccatctccaatgttcctgtcttaaat

SEQ ID NO: 37999 - DNA, 588 bp, Homo sapiens
gtacaccccactattctgtggtgggggcaattcaattcccaaagcatcactgcaatgatgccaggtgactacagacaacaatttgattaactttttcactattactgaattcctgtcttggcatttaagcaagattttgactggtttctgccccagctatgccagatgaacaattaatagtttccacatttccttgaaagtatctgatgcaccccattcccaggtaccaatttctctctcagttggaaattttggatgtgagcagaaaaagcagttctakctaaaaggataattgttgaaagaatgttgggtagctcacagaattagctggcatgatggggtacctgctaagaaaatgggcagaaaacaacagaagctttgtagagggaaccacggccaagagtatgatgaagaaatactcttgtttggatgccccagaggtactaccagtgccatcaacaagatctgttgctggatactaccactgctacatacagcagaaaataataaatggtggatccaaaagacacaaatccaaacatagatcattattatgcatgagaaagaatgcaaaacaaacaggagaga

SEQ ID NO: 38000 - DNA, 596 bp, Homo sapiens
ttttgttttgttttgttttttggtctggtgagctacataaattcattaattttagtttaaatgtagatttgtttgggattttctgtgtgaagacatcatgttatgtgcaaatagtgagaattttggttctgccttttcactattacatgtttacttatttgtttatttaatttgtttttattggaattgcactttctgcttggcaacatggcacagttcttgtagtctgagctgggcttggagggatcacttacgcagcagcagtcaattgtgttaagctgagcagctctgcttttcttggctgggccctcttacatgtctggagcctcagctatgcctttatggctcaaatggttttgcttcacatggtttctcatccatttggaccaacttgagcttgttcgtaaggagaaagtaggggctcaacagaaagagggagagagattagaagcatggaaggccttttgagacctttgcttagaactcgcacatcaacattttacaccacattttgtyggtcaagaaaactacaagacctacttcaaaggatgtggaagtagaatcaacctctctataggaggacctgcaaagtcaca

SEQ ID NO: 38001 - DNA, 576 bp, Homo sapiens
caatctattcttatagtttttctttctcattaggacttagatcgctggtttgtaggatctcttgcttatgattttctctatttctgttttctattgctaggcctattctctagtgcattattcttgatgacttttaagtcatgtacggttagaagaaaagcaataattcatttttgccgtatgctggtcttgataaacaatgtatgtatatgctaaataaaaacatgctgtatattgtgtgattcctaatgaatacatttgatttttgtttagcttgtcttctgtctttaccctgctatctacctattctgctacaggatcataattcctaaagcctacccacctmaagtcacacaaatatacattgaaataatcatggatattcaccataaacatggaattgttcagtatgtttcatcgcttcatgtttcttcctatcctgcaaaataatttagagtcattcctttatttacaaatatcatagaattaatgcattttatgtaaccaataataagtctcaagaaagatgagactagattcatgtttccattaacatccttacttgacagcagcatg

SEQ ID NO: 38002 - DNA, 518 bp, Homo sapiens
aattgaagaagttttccttgtgtattcatagagaacctaaacttatatgaaattaagtattagttgtggagcatttaatgaagattaaaatgaatttcagctgtagactttatacaaaatttaaaaaataaattaagtggtaagaaaataatgcaagttttctgtgatgagtattcttttattcagagttggagtgggkacaatttatatctcaatttcattagtcttttttaaaaaacaatgttaatgaagtatatggaccaatgctcactaacactttggacacatagaaaccccagtggtttgtttgagtttgcacaatataaatttatgcatcccaaagaacttgtaatactaatggcatttatcaggtattgtttgtaaaggatatgaataataataatccatctgctatagtcccttttcagcagaggaatcatacaaattaatgttggcctggatataatccatttaggatgattcatgagagtcataaaaatgacctctctctctttttt

SEQ ID NO: 38003 - DNA, 868 bp, Homo sapiens
tatcaaaaaaaaaaaaagactagtcaaatgtttttcaagttcatgtgagatgggataattcccttgacccctttcatgggtgggaactggagtggctggtttcattsagccagcagctgtccactccttgcaagagggatcatgcatgctagtgagtgcaggaactggagcgaacaaatgctggaactggctagttgctcctctctggcaggagcaggctctgtgtgggccccgcagcagcatccaagtatattacaatcaatgctctttcagctctgctgtccagagatggccaagtgccagctagctcagtggagggtcagggtggcagcagctgtcctctaggcacttgggttcttgtctgacatccaggtcacacaaatggattgaagggtagtgtataaggaggattttactgggtaatggaagtggctctcatcgggatgcggaggtgaaaaggcaatgatgtgggaagaaggtgatctttccctgaagcctggctgtctctggctgggccgctctctgaagccgcactatctgaagtttgtcgtgtctatccatagtctcgaatgttcagttgcttctctgcttgccactcagccacttgtattcccaccactcagctgcttgtgttgctctgccagttgaatctttttttcttttctttggttttttctttcctggttatttttatttttaatttttctttagcaactgaagtctttttatgggcacaggataagggtgtggcaggcccaaaaagcattatttaggtggaaaaacagggtcagctgtttttccttaaggccgcggggcacgctgaatgtgggggtttagccctgacccacccttttgtatacatgtgact

SEQ ID NO: 38004 - DNA, 868 bp, Homo sapiens
tatcaaaaaaaaaaaaagactagtcaaatgtttttcaagttcatgtgagatgggataattcccttgacccctttcatgggtgggaactggagtggctggtttcattgagccagcmgctgtccactccttgcaagagggatcatgcatgctagtgagtgcaggaactggagcgaacaaatgctggaactggctagttgctcctctctggcaggagcaggctctgtgtgggccccgcagcagcatccaagtatattacaatcaatgctctttcagctctgctgtccagagatggccaagtgccagctagctcagtggagggtcagggtggcagcagctgtcctctaggcacttgggttcttgtctgacatccaggtcacacaaatggattgaagggtagtgtataaggaggattttactgggtaatggaagtggctctcatcgggatgcggaggtgaaaaggcaatgatgtgggaagaaggtgatctttccctgaagcctggctgtctctggctgggccgctctctgaagccgcactatctgaagtttgtcgtgtctatccatagtctcgaatgttcagttgcttctctgcttgccactcagccacttgtattcccaccactcagctgcttgtgttgctctgccagttgaatctttttttcttttctttggttttttctttcctggttatttttatttttaatttttctttagcaactgaagtctttttatgggcacaggataagggtgtggcaggcccaaaaagcattatttaggtggaaaaacagggtcagctgtttttccttaaggccgcggggcacgctgaatgtgggggtttagccctgacccacccttttgtatacatgtgact

SEQ ID NO: 38005 - DNA, 620 bp, Homo sapiens
gcatgtaagaaatagaataaatgattttaatgggcagaagcagcacagagaaatcaatgcctaataggggattaacatggaattaattgcaactgggagtgaaaaccacttttctgttatgcctctcattatagagtcttcctcaggtataggaggtgatatggtttagctgtgtccccacccaaatctcatcttgaattgtagctcccataattcccacatgttgtgggagggacccctgggagataactgaatcataggggtggtttcccccatactgttctcgtggtagttaagtctcacaagatctgatggttttataaggggtttcctctttctcttcgttctcattctctcttgcctgcttccacgtaagatawgcctttcgccatccaccatgattatgaggcctccccagccacatggaattgtaagtccattaaacctttttctttataaattacccaatcttgggtatgtctttatcaggagtgtgaaaacagactaatacaggaagcaagagagaagtgctttattctaactaccagagtatgggcttcgcagaggattcttacatcttacacaaggcaggtgcctgataaatgtttaaataatgacta

SEQ ID NO: 38006 - DNA, 506 bp, Homo sapiens
caagaagcgggttgaatggcataaaattaaattctcagtgttcctctctataactgtgtaaacaatgtgatctgctgtttttttggagtaggttcatcatttttacctgaaagttttaggttatgttatttttcccactagaaaatatgggtttaataataaaaatgtacacctaagaagaagtcttttaaaaaaataatcttatattgttataaaattgcttgggactaatccaaacctgtttcatttaaacctagcaaaaagaatcaaaatacaaatatcaaatttaarctaagtttagtctacagctaagcaaagagaatccaaataaaaatattaaattacaggagcctctggcttacatacaaaagaccaaattataatagagaagataaatgaggaacttgatatctacctttgaatttattacacattttcttcattaaaatgtataaatggcatctacatatattcagttgaatatttacaaaatctatagagtttaa

SEQ ID NO: 38007 - DNA, 550 bp, Homo sapiens
acatatccccattagtaagtgacacatgactgtatttttacattgtacctttagatctgtgatccatttcagttattttttgtttatgttgaggtgtaattcaatgctgattatttcacatgtggatatcctgttgttacaccatgatttgttataaaggamaaacctttccattttgaaatgcttttgcaactttgtcaaacattcaccatagggttccagttccaggtaagattgtgtaaacacacatctctttttctctaagtgaactcaaccatgaaacctggacaaaattcatgggcagctatttggtatatgatatcagcaggcagagcagagaagaacaccagaattcaaagtactggtgaaccatctagaagtttgccatttttcccctttagtgccccctgacctgaagtcaatgcaatttgaaacttggaagtaactactatagtttggacagggtaaagtcctctagttctggcccatgatgtggaaaagggaactcttaagctcagagagaatgagggagacctccctcccatttttt

SEQ ID NO: 38008 - DNA, 550 bp, Homo sapiens
acatatccccattagtaagtgacacatgactgtatttttacattgtacctttagatctgtgatccatttcagttattttttgtttatgttgaggtgtaattcaatgctgattatttcacatgtggatatcctgttgttacaccatgatttgttataaaggaawaacctttccattttgaaatgcttttgcaactttgtcaaacattcaccatagggttccagttccaggtaagattgtgtaaacacacatctctttttctctaagtgaactcaaccatgaaacctggacaaaattcatgggcagctatttggtatatgatatcagcaggcagagcagagaagaacaccagaattcaaagtactggtgaaccatctagaagtttgccatttttcccctttagtgccccctgacctgaagtcaatgcaatttgaaacttggaagtaactactatagtttggacagggtaaagtcctctagttctggcccatgatgtggaaaagggaactcttaagctcagagagaatgagggagacctccctcccatttttt

SEQ ID NO: 38009 - DNA, 550 bp, Homo sapiens
acatatccccattagtaagtgacacatgactgtatttttacattgtacctttagatctgtgatccatttcagttattttttgtttatgttgaggtgtaattcaatgctgattatttcacatgtggatatcctgttgttacaccatgatttgttataaaggaaaarcctttccattttgaaatgcttttgcaactttgtcaaacattcaccatagggttccagttccaggtaagattgtgtaaacacacatctctttttctctaagtgaactcaaccatgaaacctggacaaaattcatgggcagctatttggtatatgatatcagcaggcagagcagagaagaacaccagaattcaaagtactggtgaaccatctagaagtttgccatttttcccctttagtgccccctgacctgaagtcaatgcaatttgaaacttggaagtaactactatagtttggacagggtaaagtcctctagttctggcccatgatgtggaaaagggaactcttaagctcagagagaatgagggagacctccctcccatttttt

SEQ ID NO: 38010 - DNA, 653 bp, Homo sapiens
tggattgcwtgagcccaggtatttgagatcagtttaggcaacatggtgaaaccctgtctctacaaaaaatacaaaaattagtagggcatggtggtgcatgcctgtagtcccaactacttgggatgctgaggtgagaggattgctgagcccaggaagtcaaggctatagtgagccatgtttgtgtcattgcactccagctcaggtgacaaagcgagaccctgtctcaagaaaacaaaaaaatgctttttattgtatatcactgaggtttggtgggcataatagaggccatagttcactatataccacccaatcctccaggacttccctagcctggttcagtctttacctcttcttggaagctttccctgacttctttaacctccttatatgcattaatgcattagttcattcattcattcattcactaaatgcctgctcaatattgagcccaatgttagaagttacacaaaatactgtacttatggaacacatcactctctgtcactttgttaagcacattgcttccatgacatcattaggcttattgcagtcccctgaggatctccagatgagcgagggacgtgcatgccaaccaatgccatggctgccattatgcttgttaatattcctaatctattagctaccatttacag

SEQ ID NO: 38011 - DNA, 1111 bp, Homo sapiens
tcggctggttttggattatctttgcctggtttcccatttgcctgcatggattatctgtatctgtgaacagtgcacatggtttcagaagggacaggagtggtggggccacggagcccaggttttgcttccctgccagggtagggcctggccttggtggggagggtcagcccctattggcagccaaaatgtgtctgatggatttgggcggcgggagggaaatcagggtcctttgatgaaacaccaggtgcagcagtagaggggactgattgggagggagaggcatctgttctgaaaggcaggctggggagaagagaaagcactaatcacggcttgaatgctaaactctgggctggtgttcaccagggggcagggagggaaaggaagttctcagagcagatgaaaatccttgtcatcactgttgagaaactactggtggcccaatgactcaggtgtacagagacttattgctacttcagttgttcattgattttcttacccataagtgtctatttattcgtgacagtgtggcaggcaatgtgttaggcacctagaacataagggtaaaccagacagacactgtcatctctgctgccagggatgagtaaatgattactttggtgtgacaagtgatagcctcttgtcctacacaggatgtgtatgagcacagagcagggcaaataactttgacttgggagaggtattcagagagggcttcctggaggaagtgatgtgtaaactcagacctaaaggatgagaagataataatcatcataatagcaaacttttcataaacacttrattacatgccaaacagggttctaagcatgttacgtgcattttctcatttattttccacaaaaattctattattaattctgcttctcagataagaaaactgaagcagagggaggtgacttgtagggtcataagctaagaagtgagggacaatgatgaagaggtgagcaatggggagagaaagaagagaagcagggatatagtgtatcaagcagagggaatggtcagcccatgcaaaatcacggaggtgagagagagggagccgggctggaacagaaggtgcaaggaggagtgtggtgagtagggaggctgtggt

SEQ ID NO: 38012 - DNA, 1111 bp, Homo sapiens
tcggctggttttggattatctttgcctggtttcccatttgcctgcatggattatctgtatctgtgaacagtgcacatggtttcagaagggacaggagtggtggggccacggagcccaggttttgcttccctgccagggtagggcctggccttggtggggagggtcagcccctattggcagccaaaatgtgtctgatggatttgggcggcgggagggaaatcagggtcctttgatgaaacaccaggtgcagcagtagaggggactgattgggagggagaggcatctgttctgaaaggcaggctggggagaagagaaagcactaatcacggcttgaatgctaaactctgggctggtgttcaccagggggcagggagggaaaggaagttctcagagcagatgaaaatccttgtcatcactgttgagaaactactggtggcccaatgactcaggtgtacagagacttattgctacttcagttgttcattgattttcttacccataagtgtctatttattcgtgacagtgtggcaggcaatgtgttaggcacctagaacataagggtaaaccagacagacactgtcatctctgctgccagggatgagtaaatgattactttggtgtgacaagtgatagcctcttgtcctacacaggatgtgtatgagcacagagcagggcaaataactttgacttgggagaggtattcagagagggcttcctggaggaagtgatgtgtaaactcagacctaaaggatgagaagataataatcatcataatagcaaacttttcataaacacttaaytacatgccaaacagggttctaagcatgttacgtgcattttctcatttattttccacaaaaattctattattaattctgcttctcagataagaaaactgaagcagagggaggtgacttgtagggtcataagctaagaagtgagggacaatgatgaagaggtgagcaatggggagagaaagaagagaagcagggatatagtgtatcaagcagagggaatggtcagcccatgcaaaatcacggaggtgagagagagggagccgggctggaacagaaggtgcaaggaggagtgtggtgagtagggaggctgtggt

SEQ ID NO: 38013 - DNA, 1111 bp, Homo sapiens
tcggctggttttggattatctttgcctggtttcccatttgcctgcatggattatctgtatctgtgaacagtgcacatggtttcagaagggacaggagtggtggggccacggagcccaggttttgcttccctgccagggtagggcctggccttggtggggagggtcagcccctattggcagccaaaatgtgtctgatggatttgggcggcgggagggaaatcagggtcctttgatgaaacaccaggtgcagcagtagaggggactgattgggagggagaggcatctgttctgaaaggcaggctggggagaagagaaagcactaatcacggcttgaatgctaaactctgggctggtgttcaccagggggcagggagggaaaggaagttctcagagcagatgaaaatccttgtcatcactgttgagaaactactggtggcccaatgactcaggtgtacagagacttattgctacttcagttgttcattgattttcttacccataagtgtctatttattcgtgacagtgtggcaggcaatgtgttaggcacctagaacataagggtaaaccagacagacactgtcatctctgctgccagggatgagtaaatgattactttggtgtgacaagtgatagcctcttgtcctacacaggatgtgtatgagcacagagcagggcaaataactttgacttgggagaggtattcagagagggcttcctggaggaagtgatgtgtaaactcagacctaaaggatgagaagataataatcatcataatagcaaacttttcataaacacttaattacatgccaaacagggttctaagcatgttacgtgcattttctcatttattttccacaaaaattctattattaattctgcttctcagataagaaaactgaagcagrgggaggtgacttgtagggtcataagctaagaagtgagggacaatgatgaagaggtgagcaatggggagagaaagaagagaagcagggatatagtgtatcaagcagagggaatggtcagcccatgcaaaatcacggaggtgagagagagggagccgggctggaacagaaggtgcaaggaggagtgtggtgagtagggaggctgtggt

SEQ ID NO: 38014 - DNA, 1111 bp, Homo sapiens
tcggctggttttggattatctttgcctggtttcccatttgcctgcatggattatctgtatctgtgaacagtgcacatggtttcagaagggacaggagtggtggggccacggagcccaggttttgcttccctgccagggtagggcctggccttggtggggagggtcagcccctattggcagccaaaatgtgtctgatggatttgggcggcgggagggaaatcagggtcctttgatgaaacaccaggtgcagcagtagaggggactgattgggagggagaggcatctgttctgaaaggcaggctggggagaagagaaagcactaatcacggcttgaatgctaaactctgggctggtgttcaccagggggcagggagggaaaggaagttctcagagcagatgaaaatccttgtcatcactgttgagaaactactggtggcccaatgactcaggtgtacagagacttattgctacttcagttgttcattgattttcttacccataagtgtctatttattcgtgacagtgtggcaggcaatgtgttaggcacctagaacataagggtaaaccagacagacactgtcatctctgctgccagggatgagtaaatgattactttggtgtgacaagtgatagcctcttgtcctacacaggatgtgtatgagcacagagcagggcaaataactttgacttgggagaggtattcagagagggcttcctggaggaagtgatgtgtaaactcagacctaaaggatgagaagataataatcatcataatagcaaacttttcataaacacttaattacatgccaaacagggttctaagcatgttacgtgcattttctcatttattttccacaaaaattctattattaattctgcttctcagataagaaaactgaagcagagggaggtgacttgtagggtcataagctaagaagtgagggacaatgatgaagaggtgagcaatggggagagaaagaagagaagcagggatatagtgtatcaagcagagggaatggtcagcccatgcaaaatcacggaggtgagagagagggagccgkgctggaacagaaggtgcaaggaggagtgtggtgagtagggaggctgtggt

SEQ ID NO: 38015 - DNA, 1004 bp, Homo sapiens
actacatctcaataaaaattccagaagagattattgaggtaattaacaagttttatttttgtagatttaaatgtaagagaacagccaagatcttaaagaaccacacatttgtaggacttagaggaccatacattaaaatttattatcaagttatatttaagagaatactggccgaacgcggtggctcacgcctgtaatcccagcactttgggagactgaggcgggaggatcacgaggtcaggagatcgagcccatcccggctagcacggtgaaaccccgactctactaaaaataaaaaaaaattaactgggcatggtggcgggcgcctgtagtcccagctactcggtaggcggaggcaggagaacagggtgaacccaggaggyggagcttgcagtgagcagagatcccgctaaggcactcccgcctgggcaacagagccagattccgtctcacaacaaaaacaaacaaacaaacagaatattgaactaaaaatagaccattataccaatgaaacagaataccagaagaaaattttttgacccaaattcacataatatataaaaaaaaaatcaattccacgtgaattagagctctttatgtggactaataaagttcctttaaaaaaagaaatcatgatatgagttggctctgtgttcccactcaaatctgatcttgaagtgtaatcctcacatgtcagggagggacctggtgggaggggatggatcatggggatggtttcccccatgctattctcatcacagtgagaagttctcatgagagctgatggttttgtgtccagaattggtgggttctcggtctcactgacttcaagaatgaagccatggaccctcgggtgagtgttacagttcttaaagacagcgtgtccggagtccgttccttttgatgttcagagtttcttccttctggtgggttcctggtctcactgccttaggagtgaagctgcagaccttcacagtcagtgttacagctcataaaagcagtgt

SEQ ID NO: 38016 - DNA, 1004 bp, Homo sapiens
actacatctcaataaaaattccagaagagattattgaggtaattaacaagttttatttttgtagatttaaatgtaagagaacagccaagatcttaaagaaccacacatttgtaggacttagaggaccatacattaaaatttattatcaagttatatttaagagaatactggccgaacgcggtggctcacgcctgtaatcccagcactttgggagactgaggcgggaggatcacgaggtcaggagatcgagcccatcccggctagcacggtgaaaccccgactctactaaaaataaaaaaaaattaactgggcatggtggcgggcgcctgtagtcccagctactcggtaggcggaggcaggagaacagggtgaacccaggaggcggagcttgcagtgagcagagatcccgctaaggcactcccgcctgggcaacagagccagattccgtctcacaacaaaaacaaacaaacaaacagaatattgaactaaaaatagaccattataccaatgaaacagaataccagaagaaaattttttgacccaaattcacataatatataaaaaaaaaatcaattccacgtgaattagagctctttatgtggactaataaagttcctttaaaaaaagaaatcatgatatgagttggctctgtgttcccactcaaatctgatcttgaagtgtaatcctcacatgtcagggagggacctggtgggaggggatggatcatggggatggtttcccccatgctattctcatcacagtgagaagttctcatgagagctgatggttttgtgtccagaattggtgggttctcggtctcactgacttcaagaatgaagccatggaccctcgggtgagtgttacagttcttaaagacagcgtgtcyggagtccgttccttttgatgttcagagtttcttccttctggtgggttcctggtctcactgccttaggagtgaagctgcagaccttcacagtcagtgttacagctcataaaagcagtgt

SEQ ID NO: 38017 - DNA, 648 bp, Homo sapiens
taagttaaaaagacaccctattgaactaaaatatacctttctgaaatttaattggctatcttaaaactcttttataaataaaatttatatctatgaaggaaatctccaattttaaggatgtctgcytatgtgtgttcgaaactcttaccatcttttaaatttacataataagtcatacctttgtttaaggtgcttttctggccatcctgtcttaagtgaacttttatttaagcagatttttttccttagtttgagaaaatgatgatacaatatttaggcctaaaatcttagctctgtgcttatgaaatttaaatttttctgttccacctaagagttgtccctttagaaattcaaatttcttgtctagtacacaattgcttagggtaatgaaacaggtaattggatgattggaaggctcaatggggaaaagaaaagctatttaaaagccagcaaatgaaaatcctttatgaaagctatatgatctgtttctgtgtgtttgtatctgtatatgtgtatgtgatatttggtaaataaagctagcttttaaactgttggtaaaatgtaagtggtttcaaaattatcaagttgaatataattagatatatgcttgatttaactgtgagcttatgtctttgatttagagtctct

SEQ ID NO: 38018 - DNA, 648 bp, Homo sapiens
taagttaaaaagacaccctattgaactaaaatatacctttctgaaatttaattggctatcttaaaactcttttataaataaaatttatatctatgaaggaaatctccaattttaaggatgtctgcttatgtgtgttcgaaactcttaccatcttttaaatttacataataagtcatacctttgtttaaggtgcttttctggccatcctgtcttaagtgaacttttatttaagcagatttttttccttagtttgagaaaatgatgatacaatatttaggcctaaaatcttagctctgtgcttatgaaatttaaatttttctgttccacctaagagttgtccctttagaaattcaaatttcttgyctagtacacaattgcttagggtaatgaaacaggtaattggatgattggaaggctcaatggggaaaagaaaagctatttaaaagccagcaaatgaaaatcctttatgaaagctatatgatctgtttctgtgtgtttgtatctgtatatgtgtatgtgatatttggtaaataaagctagcttttaaactgttggtaaaatgtaagtggtttcaaaattatcaagttgaatataattagatatatgcttgatttaactgtgagcttatgtctttgatttagagtctct

SEQ ID NO: 38019 - DNA, 743 bp, Homo sapiens
gggggagggggggttatttttgtttttataagttccctaactaatactgacagcagcgagtccagagtgaggaccaggcaggctagatggtgcccgtctcccttctccttctaatcatgagtagaagaattaaggrgaggcagtctaaggtgatgtcagcctgagaagctaatcactggcagctttttagaggacaggaattggaagctgcatttagaaagagatgatttacgggcacatgtgacggggaggaaagcccaggcatagggtaaacagagcttgctcaaaagcagagtgagaatgaaacacagctcccaaggacttagcctagcctgggtggagctagatgcagggactagaggagagacatctttcagtttctactggggagctcaggtttcatggagtgtgaagtgcttgccttttttagccttgtgagctgcttctggagcagtagaggggaacaagcctctcagaggtctgcacttggatgtcagagaatggtacttagacatatccaatgagagggactttaatacttctcttaatggagcacagaacatccagaaaatatttttgtccttgccttggactttagatatcagcatccagtcctgaattcaggaatgacctgagaggtccaggcctcctctccttttagactaacagggcagaaagccagcccttcctcccagtgtcatagggagctgaaatgccttgagatgctcagcagaagggatccc

SEQ ID NO: 38020 - DNA, 671 bp, Homo sapiens
tcacatgtggggccatttggagaacttaggagacacagtggagcagggcaaattgattataaaaaaaatgggaactgtgcatgaaataaaacccatggtcactcgagaactgtcagtgtctttatcactacttacaacacaatagtacggcttaggctagttcatgttttacagcctcaagacagtgttctttcaaaggtttgcatggtatctgcaaagtcataacccagtgtcacgttgccactctttgccaggattttcaggatttcacagggatcatttcaggtggcagcagatacttttttctttcttttctttccctttttgtatgtcagattgtttgtataaacttacagrtcaattgttaactatattaaaaaaagaatgaatatcctatgattttactttgaaaaggctccagcacgaacatattgttttatacaaaatctgctctgagttgcctagcataaaagatgatttgcttccagaaacaattctaggaacacataaagtttgtttaggcaaaataacaaaagcactacaatgcatactattttcaggaaggttattttttcagttgccctcacatatctttgctttttctttgcaaagtacagagattcaggcagattagaagaaggaatttctagactattttagaagattaaagt

SEQ ID NO: 38021 - DNA, 647 bp, Homo sapiens
aacctgatgaaatctaaaagaatgatttttaaaaaatgcttaatcctcttctaaagctcacctttttattccaaacatactgtgggtaattattcatagcttggagtttgagatccactgccaaggaaaatgttccgagatagagtctactgaaaatagaagtagtagcggagtagagtgatagtaaaataaagcaatcaattctctactgacactggaggaaaggaacaggatgatgtagtttaagaaaaaaggcaacaatgaaaagtggtttataatgacaatattcagagaataccagtaactcttatttgaatagacctaaaattgcagctccttagggaagttgatcaattgctgcacctattattttagcaatgatgtttccccttttgcccaccccgcaaatctcaaatgctagagatctgcagtttgaggcaaagaaagcctgtacttggaaccatacaataaaagaaacaccaaatgttttaggaggcagcctttatttatttggttaattctctttccatctatttattctagagttaagggcataagattaccttttaggtctgatcctaccaaagagaccatcggctcagacagtcctgtgccactgaacatgaarctgattacaaatagtgatt

SEQ ID NO: 38022 - DNA, 567 bp, Homo sapiens
catcattgtcttttttatccattagctaatagcttatattttaacatttccttatttttgctgatttagctaagcaatttaattattttacaccatggaatactatgcagccataaaaaaggatgagttcatgtcctttgtagggacatggatgaagctggaaaccatcattctgagcaaactattgcaaggacagaaaaccaaacaccgcatgttctcattcataggtgggaattgaacaatgagaacacttggacacagggtggggaacatcacacactggggcctgttgtggtgaaggggaggggggaaggatagcattaggagatatacctaatgtaaatggcgagttaatgggtgcagcacaccaacatggcacatgtatacatatgtaacaaacctgcacgttgtgcacatgtatcctagaacttaaagtataattaaaaaaaactattttctccctggataatttacwagttatgctatatatttctactctttttttaggtacataacctctaaaatataagcttaaaaaattagcttaattcctacacaaagatgctc

SEQ ID NO: 38023 - DNA, 768 bp, Homo sapiens
ccagtcaaatgtactgttccgttcccaaatcaacccagtttcaggaggaaacagaacaattcaatagaagaatccagaataaagttagaaattgtttcttcctcttcacacctttacatcataatcttgagtgttactgcctcaacccaaaagtcagaagtttgactacagaacttacttgttgtagcagctattaacatccgaagtaactcagtggcagtgctttgtacactatgaagcaaaggattcttgttatttttataattggtggccctcacaaccgtacactgtagacatccagctctcccatgtcctaaaatccttttgctttttcctgaggaaaaatccaaatatccaaaaattcaccactccagtaactctcttccttcttcaaaaagtcccccattttttattctcccaagggaccaagggaagggggacagaaggtggagctagggatggaatatggacggtaaaagatgtggcatctgtggggttgctgtctctgcccctggcactgtcccccttctscagggtagagccatcacatgctacaggatgaattccattatcttatagggcaagaagttttaccaaacaattccccagcatgttcccttgaaagccctgcagagtatgaagcctctgttatatccagaaacctgggaataggaggcaaaaaggacagttcaggggagtgtgcactggaccatggcctgagcacacaggctacaaagatttcttcccctgaaactgtggggcctctgg

SEQ ID NO: 38024 - DNA, 757 bp, Homo sapiens
ttgggatgcaatgattctgggacacaatggaatattttctggactcaagaaacatctgaaaatattttacttgttaacagcaaatcttgtcccctgccagcactctctgctccccatttcccaaccttggtaacagaataatggtcttaatgaaaaacatccaaaacagaaatgacactcttttaaacaccaatcatcaagtttaggtacctggaataggggaaaaataaaatcacatcctctgtcacataatctctggctaacratgcctgtttctaatcactgacgttatacctattactctccagcatatgatactacaaggctcctaattttccactcatgctccactagttctaacttttatttttttagctctgatcacatgtgctttgcctttcacctacactacacttcacctaagctacaactatctcaagacttctgtgctctatctcttgtacatttcattctgtttcagagtgttttcagctgcaagtaaacagacaagtaataaacgttggcacattaaggacattgttatgatctgatatggtctagctgtgtccccacccaaattttgtcttgaattgtagcccccacatttcccacgtgttgtgggagggacctggtgggaggtaattgaatcatggaggtgggtctttctcaagatgttctcatgatagtaaataagtctcacgagatctgatggttttataaaggggagtttccctgcacaacctctctcttctctttt

SEQ ID NO: 38025 - DNA, 633 bp, Homo sapiens
tggtcctttgtttagagtaaagatatttttcttggagctttttggacctgcatctatattccagtccatwttggagccctgccccagattatgggccagaataaggaaacccagagggctcactgccatgttgttgttggcccttaggtctctagccagttcaccttgttctttctacttctcagggtcattctatgctcattaattgtgttgtgtacagggcttttgtgttgtaacaagaggggcttcttaatgaaatcagaagtcttcctaatgcacattgtaaaggtgctactctccctgctctgtggaaatagtcaacaggtagatgagagcagaaatgagaaattaaggagcccaagcaataatttaggcacaaagaaatggtggctcagcctaaggtattagcagtgcggtggtcagaagtggttttgattctgaatacattttaaagatagaatcaccataatgtattgatggcttaaatgtgagatatgaagtagagagagagattggatgacttcaggatttttaaaattgtcactgagatgggaagattagcatgagcttagaaaggcaaattaagatctcatttttaaacatgttacgtttgagatgagtataatgcataca

SEQ ID NO: 38026 - DNA, 636 bp, Homo sapiens
ctcttacatttatagcttcaatagccatgatctaattttaagggtgaatgcaacctttaaacaaggtttatgatataaaaggaaatttgtccattacagtgctcagaaacttttactctttaggtgaaaattattttgttgctgttattgttgaaacacacacacacacacacacacacacacacacacacacacacacgatcatcttaggaagtaattggacaagattaaaacaattaattgtatttaaaattatttagcaatttacaggtttcttattcattttgctggcttcatttataagttatgtattttaaatgtggacactgaggaacaaatgtttagagggtgtgctgaggttctcaaggaaaataattgttgtccttcggacagaatatgatgtttctatgctccttatattaataaatagcacacatgtgtatgtgtgggcagggggggagcggggtgtgtccatcttactcagygtgactgacttttaggctgagattaagtcatactcgtctacatattcttccaagtctctcacttcagtttatacaccacagttgaaaattgtattttaaggtcaagctagtcgctctcacattcaaaactacctcccatcctgcccctgcc

SEQ ID NO: 38027 - DNA, 666 bp, Homo sapiens
ctttgctagttgaatctgtcctcaaaatccgtatgttggctctcagcagctttgagccctgaggttcatgccctgatgattaaactgaaaatctctgatttcctgaatgtttttctgccccatgaagggaaggtgaaaagtccatactggctcatcctgtcatgttctgcactcttgatgcctggagaagagtcacttttagataatatagaggtagtgtaacttgccttgcagaagagaatacttaagagtaactgaagtgagaaacattgcagtagcctctcacattgaatcaaattgtttagaattttgacactattgttgactatcacataatgatatgtaaaamcttagacatattttctaaaaagtcaagttcaaaacttgaaaaataaatgcttttagataaaggattgtatcatacactttatatatttgtgtaactgtcacaaagcatacattaagatgatttttgtaaaaattgtttttttttcctttttatctttatgtagaatattttggaaaccttttaaatgttggcctatatttataccctgcttttagcatatatttgtcaaccatttaggactttttccacatttttatagataattaatgaaccaattaactgcattatgtgattcacatgtacagcaagatcaagtt

SEQ ID NO: 38028 - DNA, 868 bp, Homo sapiens
ctagttctgagagccccactgaagattttgcatctgattcctaccttattcctccaaacacactgtgtagcaagagatgactgtctgggcgccacatggtgaccccaaattgttttaataaagttagtcttacattattccttatcagtgagtgaagcagtgggaatcttaggaatatagcacagagggtttgggaagctgagtatgccagactgtagggcctgtggtgtttagatatatgctccccaaactgaggcaaggcctcatgtctaatattgattttttaacacaggaagagatttagagagggaggttgagggggaatcacttctcatggaaccaaggagcttcagggaaggttaagctgccttcagagggttawttagaatatctgagggggtggagtttaaagaaagaatattcaatactataattttaattttgttttccaaatctgagtttcttttgctgtaatataaacttgaaaattaaattcaacaaaatcatttttgttcttggaaacagaaaatacagcgagtttcaaaggaaacaacagggagtttgggggtttctatggtcctgcaggtggagactgcgctggagaaaacccagcgttattacacccacgtgggtgtggaatgcagaagcctggtcgcataataatacatgatgtttattgagtgttctctgacactcaacaataatagttaatgtttgttgagtgctttataaatgcaaccattataaatgaaggaccactcttgtttagtgttgacggagggtgcagtggaaaaactaaaacacagtccgggagccaaaagttcacaatagtgtcaactctttacttgctttgtcaaaaatggtgacg

SEQ ID NO: 38029 - DNA, 868 bp, Homo sapiens
ctagttctgagagccccactgaagattttgcatctgattcctaccttattcctccaaacacactgtgtagcaagagatgactgtctgggcgccacatggtgaccccaaattgttttaataaagttagtcttacattattccttatcagtgagtgaagcagtgggaatcttaggaatatagcacagagggtttgggaagctgagtatgccagactgtagggcctgtggtgtttagatatatgctccccaaactgaggcaaggcctcatgtctaatattgattttttaacacaggaagagatttagagagggaggttgagggggaatcacttctcatggaaccaaggagcttcagggaaggttaagctgccttcagagggttatttagaatatctgagggggtggagtttaaagaaagaatattcaatactataattttaattttgttttccaaatctgagtttcttttgctgtaatataaacttgaaaattaaattcaacaaaatcatttttgttcttggaaacagaaaatacagcgagtttcaaaggaaacaacagggagtttgggggtttctatggtcctgcaggtggagactgcgctggagaaaacccagcgttattacacccacgtgggtgtggaatgcagaagcctggtcgcataataatacatgatgtttattgagtgttctctgacactcaacaataatagttaatgtttgttgagtgctttataaatgcaaccattataaatgawggaccactcttgtttagtgttgacggagggtgcagtggaaaaactaaaacacagtccgggagccaaaagttcacaatagtgtcaactctttacttgctttgtcaaaaatggtgacg

SEQ ID NO: 38030 - DNA, 868 bp, Homo sapiens
ctagttctgagagccccactgaagattttgcatctgattcctaccttattcctccaaacacactgtgtagcaagagatgactgtctgggcgccacatggtgaccccaaattgttttaataaagttagtcttacattattccttatcagtgagtgaagcagtgggaatcttaggaatatagcacagagggtttgggaagctgagtatgccagactgtagggcctgtggtgtttagatatatgctccccaaactgaggcaaggcctcatgtctaatattgattttttaacacaggaagagatttagagagggaggttgagggggaatcacttctcatggaaccaaggagcttcagggaaggttaagctgccttcagagggttatttagaatatctgagggggtggagtttaaagaaagaatattcaatactataattttaattttgttttccaaatctgagtttcttttgctgtaatataaacttgaaaattaaattcaacaaaatcatttttgttcttggaaacagaaaatacagcgagtttcaaaggaaacaacagggagtttgggggtttctatggtcctgcaggtggagactgcgctggagaaaacccagcgttattacacccacgtgggtgtggaatgcagaagcctggtcgcataataatacatgatgtttattgagtgttctctgacactcaacaataatagttaatgtttgttgagtgctttataaatgcaaccattataaatgaargaccactcttgtttagtgttgacggagggtgcagtggaaaaactaaaacacagtccgggagccaaaagttcacaatagtgtcaactctttacttgctttgtcaaaaatggtgacg

SEQ ID NO: 38031 - DNA, 868 bp, Homo sapiens
ctagttctgagagccccactgaagattttgcatctgattcctaccttattcctccaaacacactgtgtagcaagagatgactgtctgggcgccacatggtgaccccaaattgttttaataaagttagtcttacattattccttatcagtgagtgaagcagtgggaatcttaggaatatagcacagagggtttgggaagctgagtatgccagactgtagggcctgtggtgtttagatatatgctccccaaactgaggcaaggcctcatgtctaatattgattttttaacacaggaagagatttagagagggaggttgagggggaatcacttctcatggaaccaaggagcttcagggaaggttaagctgccttcagagggttatttagaatatctgagggggtggagtttaaagaaagaatattcaatactataattttaattttgttttccaaatctgagtttcttttgctgtaatataaacttgaaaattaaattcaacaaaatcatttttgttcttggaaacagaaaatacagcgagtttcaaaggaaacaacagggagtttgggggtttctatggtcctgcaggtggagactgcgctggagaaaacccagcgttattacacccacgtgggtgtggaatgcagaagcctggtcgcataataatacatgatgtttattgagtgttctctgacactcaacaataatagttaatgtttgttgagtgctttataaatgcaaccattataaatgaagkaccactcttgtttagtgttgacggagggtgcagtggaaaaactaaaacacagtccgggagccaaaagttcacaatagtgtcaactctttacttgctttgtcaaaaatggtgacg

SEQ ID NO: 38032 - DNA, 868 bp, Homo sapiens
ctagttctgagagccccactgaagattttgcatctgattcctaccttattcctccaaacacactgtgtagcaagagatgactgtctgggcgccacatggtgaccccaaattgttttaataaagttagtcttacattattccttatcagtgagtgaagcagtgggaatcttaggaatatagcacagagggtttgggaagctgagtatgccagactgtagggcctgtggtgtttagatatatgctccccaaactgaggcaaggcctcatgtctaatattgattttttaacacaggaagagatttagagagggaggttgagggggaatcacttctcatggaaccaaggagcttcagggaaggttaagctgccttcagagggttatttagaatatctgagggggtggagtttaaagaaagaatattcaatactataattttaattttgttttccaaatctgagtttcttttgctgtaatataaacttgaaaattaaattcaacaaaatcatttttgttcttggaaacagaaaatacagcgagtttcaaaggaaacaacagggagtttgggggtttctatggtcctgcaggtggagactgcgctggagaaaacccagcgttattacacccacgtgggtgtggaatgcagaagcctggtcgcataataatacatgatgtttattgagtgttctctgacactcaacaataatagttaatgtttgttgagtgctttataaatgcaaccattataaatgaaggwccactcttgtttagtgttgacggagggtgcagtggaaaaactaaaacacagtccgggagccaaaagttcacaatagtgtcaactctttacttgctttgtcaaaaatggtgacg

SEQ ID NO: 38033 - DNA, 538 bp, Homo sapiens
gaggctgcctacaagggcagcaatttttctttttttttttttttttcttttttttttttgagacagagtctcgctctgttgcccaggctggagttcagtgacatgatctgggctcactgcaagctctrcctcctgggttcacgccattctcctgcatcagtctccctagcagctgggactacaggcgctcaccaccacgcccggctaattttttgtgtttttagtagagacggggtttcaccgtgttagccaggatggtctcaatctcctgacctcgtgatccgcctgcctgggcctcccaaagtgctgggattacagacgtgagccaccgcgcccggccagggtcagcaatttcatctgtaatagtcaggtttcatttcaggcaggaaagtgatggaaatgtttaaacatgttaaaaatgtggaagacttttcagattacagagcaggaatttcaaggaaattgcaaaggaagaagatagaaaattttcagattaggttacatgcttagtgttatataggtaggagaatacaatgat

SEQ ID NO: 38034 - DNA, 566 bp, Homo sapiens
atggatgcagctcgaggccattagcctaaatgaattaatgcaggaacaaaaaaaccatataccacatgttctcacttatgagtgggagctagacatcgggtactcatggacataaagatgggaatgatagacacgggggactactagaggggaagggtagaagcgggtaagggtggaaaaactaactgttagatactatgctcagtacctaggtgatgggatcatttgtaccccaaacttcagcatcatgcaatatatataggtaacaaacctgcacrtgtaccccctgaatctaagacagaagttgaaaaataaaaaagtaaaaaacaaaaataaataaaaataaaaatctaggctgagttctgggcacaaggcaaccactgagaagagcagagcatggcatatgctgagtcagaccatgatgttctggatggagggcctcatgccaaagctggacctggaggaggtgaaagagaagatgcatgaggatgtgttctcctccatatagaacttcctcctgtacatggccctgctgagaatcactctttttatcttaaagaaactgg

SEQ ID NO: 38035 - DNA, 1208 bp, Homo sapiens
tccgtctccaaaaaaaaaaaattgtgacctaaaaaaagttgaacgcattttgatggctggaaaagaggacactcttctttattttcttctccccctcccacctttttttaatacagtactttgagctgctgttttaagaaaaggacgttctttctctaggacaggatagacagagatcagtgatgaccataaggcaaaaagatagaaaacaatgtgtaaaaagagtcacaaaacctaagttctagtctttgttctgtcattcactatccatgtsatttgtttttaatttacttataatatgtaacttttttggcctacggttctatgagtttttagcacatgtaaccaccactacaatctggatgcagcagttgcatcctgagcctgcccctttgtagtcaaacacctcctcaccctggaccttggcaatcactgcttcattcttcgtcttacagttttacctcttcctgatatgcttagtctctctgagtctttttctccacaaataaaattatacacacacacacgcacacatatacatgtcatcttcattactttaaaatattaagttatttatgatgattgtctgctgtggctaaaaaacctggtctgtgacaagcatcccattccttccactgtttatatttagaaaaggctttctctaagtttgtccaatttttgcaattccgcatcttgaacttacagtcttctccagaagggtggctccagctcagatttctgcaggctaccctgacacaccggtagctttgttcactcctacaaagctaggagctgcaaaacattccttaatccctcctggtggctgtccttcctcagttagttaaccacactgccatagtctgagcagcctaattatcctttcagcagtctttgctaaagggcttccaaaattgttctagctctttgctatttacgagcatagcttgtcactgaatgtctaaaggtaatactgatgccactgtcaaatcaacacatcagctgtagtagagacaagtttcacttccacctagatagaagatctaatattaaaaagctcactcccttggctcatagggtggctaacactagttaatcacaagaatgctgtatataacattatatggattttaataagtacatctgcaaaatcactcataattcttttgtagtacaatggatgaggtatgactataattgtttgaataact

SEQ ID NO: 38036 - DNA, 1208 bp, Homo sapiens
tccgtctccaaaaaaaaaaaattgtgacctaaaaaaagttgaacgcattttgatggctggaaaagaggacactcttctttattttcttctccccctcccacctttttttaatacagtactttgagctgctgttttaagaaaaggacgttctttctctaggacaggatagacagagatcagtgatgaccataaggcaaaaagatagaaaacaatgtgtaaaaagagtcacaaaacctaagttctagtctttgttctgtcattcactatccatgtcatttgtttttaatttacttataatatgtaacttttttggcctacggttctatgagtttttagcacatgtaaccaccactacaatctggatgcagcagttgcatcctgagcctgcccctttgtagtcaaacacctcctcaccctggaccttggcaatcactgcttcattcttcgtcttacagttttacctcttcctgatatgcttagtctctctgagtctttttctccacaaataaaattatacacacacacacgcacacatatacatgtcatcttcattactttaaaatattaagttatttatgatgattgtctgctgtggctaaaaaacctggtctgtgacaagcatcccattccttccactgtttatatttagaaaaggctttctctaagtttgtccaatttttgcarttccgcatcttgaacttacagtcttctccagaagggtggctccagctcagatttctgcaggctaccctgacacaccggtagctttgttcactcctacaaagctaggagctgcaaaacattccttaatccctcctggtggctgtccttcctcagttagttaaccacactgccatagtctgagcagcctaattatcctttcagcagtctttgctaaagggcttccaaaattgttctagctctttgctatttacgagcatagcttgtcactgaatgtctaaaggtaatactgatgccactgtcaaatcaacacatcagctgtagtagagacaagtttcacttccacctagatagaagatctaatattaaaaagctcactcccttggctcatagggtggctaacactagttaatcacaagaatgctgtatataacattatatggattttaataagtacatctgcaaaatcactcataattcttttgtagtacaatggatgaggtatgactataattgtttgaataact

SEQ ID NO: 38037 - DNA, 807 bp, Homo sapiens
aattctcatcaccactgtccccatcactgtgtaattcatgcaaacactggcctgcaggtgcttcaggaaaaggcctttattatcccaggcccctcctcccccgtgctttctgacccgcgtgcagagccctcgggagcccatgtttcctgcccatgtttgtgggagcctggtgatgggttcctcaacctggccctccatgagcctcttcaatcacttctccttcagagaatgaatagcctcccacacaaacatgagtgattgggaaccttgggaactgtggaagtttcagcttaaattcttctctgaagtttttccaaagcccagctgacactgagcgtgtggatttgaggagaaaaggacttatgggtttcacctgaaacttgcaagcttagtttccttcaaaacgtacaacacataggctggattcctcctccactgctgatccccatcccccaagccaccacggttcagatcgtggaatttaaaagggtagtgtgygcacacacacacacggatatgcaaacacatgtgtgtgctcacaattacacacacgcacacacgtacataacatgtgctcacatacagaggtgctggaagcttgagcttgaagccttctccccagctctgctcctgcctctggccaccgtcctggattctctgctctgctcacctggtcaccagcccctgggcctgtaatttaaagaatttctcattggctgtgtgacgttgggcaactgacttaacctctctgtgcctcagctgtaaaatggacatagtaataataatgccctccctctcaaggctgtg

SEQ ID NO: 38038 - DNA, 1292 bp, Homo sapiens
gaataaaaaccgttttcatttaccttatacattgagaaactgaatcattcaccttccagggccctttgcccttcccagggctcttcttcctgagcccctgccatttattataatgtgttgcttataacaagattttgttattttgtatgatcttagatacatatgaggacatggatctatatgtttggtaatcaaattaatcataattcaattatagattgaaaaattgagctcagtaattattttcctccttcctgattttagtgacagagcagccaatctaaaacaaaacagttgaaactaagtcaaatgtaaaagatacagatttcaataaagagaaattttataggagatcagaaaatcatggttcaagaaagctagcacaaaatcattgtcttggatttgcataattgatttaagtcccaaaaaaatatcatctgcccttactaagacttttgatttagacagctttagttcacatcctgacattgtggctgtctggagtgtacaatcttggacagccttctttgcatcagtagtttatttcgtcctgcgacagaaaaaaataaaataaaataatataagcatagtacttagcataatatctggaacttcaacatgagggaattaggggctagattttaaaatttcaattgaagttaattgactagaaaaggaggaggatactccaggtgaaatgaatcaggtaagaaaggatatatgatgtctgtttcatgttggaacacttatgacagtggtttttaaatatgtagaatatcagaatcaccaaagtatatttttgtttaaagattctgatttgtgagttccaccctcaatgcttttggttcagtagctatgggatgcaacctaggattcaatcttcagcagcatgggtattctgaacgttggctacatttgagracaactggaataaggcctgtgtaaagatatagtgaaatatgtacttgaaaaattgggaggcatggtgagaaaaacagaggaattaaatgccaagttaaaggatgtggagttcacctactaaagtatggcttaccgtgacacatatttttaaaaggcaatccttggtaaaagctctgccttattaagataaattttgacaataataagaaatagattaggacaagagtagatgtgagaaagactactcagtattctacttggtaggctagttgggctagtctatgggactatcccaaaataaaactaagaatgactgggcttcaggaactgatattgagccatgcaagatgacagctaagggtaaatgagat

SEQ ID NO: 38039 - DNA, 1156 bp, Homo sapiens
ttcctgcgttagtttgctgagaatgatggctcccaccttcatccatgtcactgcaaaggacrtgaactcattcatttttatggctgcataatattccatggtgaatatgtgccacattttcattatccaatctatcattgatgggcatttgggttggttccaagtctttgctattgtaaatagtgctgcaataaacatacgtgtgcatgtgtctttatagtagaacgatttataatcctttgggtatatatccattaatgggattgcttggttaaatggtatttctggttctagatccttgaggaatcaccacattgtcttctacaatggctgaactaatttacactcccactaacagtgtaaaagcattcctatttctccacagcctggccagcatctattgtttcctgacattttaataatcgccattctaactggtgtgatgtctttgtttttaattgggtcaacttctattagatgaacagaatcccaaagtccaaattcctaggctttctaataatgtaattcataaagtaatattagaatgctttttacaatagattggtttaaagtatgatattttattgcattagattataaatatgaaattaatatgcataatttaaaaagaagaatacataattagaacaaatttttaaaaatataaatacttagataccattaagcatctttcatgtcagacataaccagttttaggtactgattatgaaatttaatctctgtcagactcagactttcttaatattgtttatttataaaaacactactttattgtatacattgtgttttaagcaacacacttaaataacaaagattatgcgccacttgttcatttttttctaggcagttaattttgaaaatttttgtttgaataggtcaacacatctgtttcttagaataataattgtttttattttcttttcttgctctcctgtctttttatgaactttaaaagaatgtatctgtctatatctaatctatctatctatctatcatctatgtttctatctatcttgcatattaaaaagtattgagataatttgtccagggttcccacaattaaacattcatttggctataaagaagaaaatgccatttatttttcagtttgttgtagtgattataattgtacatg

SEQ ID NO: 38040 - DNA, 645 bp, Homo sapiens
aaaagaacattttagaactctcaaaagaaaccatataagaatatattattttctcacaatagtttaaaatatattaaacaagatcaaaaagaaaaaaaacacagtacataaaatattgctaattcatgtacattcatattcagagtactgttctttaaatcataagaaaaaattatcacaaactaggtaggatatatagaggaaatataagcacaaagtgttaatataccaaatatataaagaaaaacaccagaaactccatgggataatatgacaaagatatcaactgtccataaataaataaggataagccagtgaacaatacgtatatgaaaatatgaagaatctcactagtaagagctcagtaagaggtctaaattttactttcattagtttggcagaaagtaaaaagtgtatcaatatcaggcatttatagacatggagcaataagaaacaccacctgacgttgctagaaattaattatataaaaccaaactgagaataatttgccccaccgtatagaaaaatttatattaactctaagactcaataatcttactcttagttataaactctagagaaactcttgcacacaaacacaaagaaacatacrtaagaattttcttagaagttctggttgtaaaa

SEQ ID NO: 38041 - DNA, 1138 bp, Homo sapiens
tgcatgcctatcaatggttgttcattccaaaagtgacaagcttaacacagaacactttatagaaacgttataaagtttaagcaagtgaataaaacctctgttttagaccttgtgccacagaggtaactatagaaagtttcttgtagtttgggtaccaagsgtgtttcacaagtatccttcttccacatggagttttcagggctgttaggaaatgtaagatataggccgggtgccgtgggtcacgcctgtaatcccaacactttgggaggccgaggtgggcagatcacctgaggtcaagagtttgagaccagcctggccaacatggtgaaaccctgtctctactgaaaatacaaaaattagccaagcatgatggcgcatgcctgtaatcccagctacttgggaggctgaggcaggagaatcacttgaacccaggaagcggaggttgcagtgagccaagattgcgccactgcactccagcctgggtgacagagcgagacaccatctcaaaaaaaaaaaaaaaaagatagaataccattgtacaaatctaatcctaacaatcactctcatttttttaaagtgtcataggctttataaactgttcatttaatccttccattctccttaagtggtgggtcgtaacagctgttcgcagtcatcctcttcaactccaaatgagaaacaaaagctcagtcagtgcttgcatactaaagtataaccaaaaagaaaaaaaagaaaagataagtggttaagtgacttgcccaagggcaagctgattgtggtaaagctggaactacagagaaagaggaagcgtgggaaggggagggacagaggtggtgctgaaggaaatcatacactggtttattctccagctcctgtttatcaccctcacagtccttccctagccccattcttcttcccttacaatcccaaataacaaaagccaggaaacaaaaattaaactaggtcaaaataaatgctccaaggaaagttttcagtttttcactccttcttctgcatataaaacacaggtagtagggggagtctgcaatgcttctaatctaccaaaggaatcccttagctaagaaccataatacatggcaggattaaatgtataacaggtttaaagcaagagagtata

SEQ ID NO: 38042 - DNA, 1028 bp, Homo sapiens
aaaaagaaaagaaaattctagactgggcacagtggctcacgacggctgtaatcccagcactttgtggggctaagccggactgcttgaggccaggagtttgagatccacctgggcaacacagtgagaccctatctctataaaaaattgttcttgaagctagataattatctgtactcatccaaacactgtatcataatataaaaaaatcattaaaactttttaaatacagatagggtgtcactatgctgctcaggctggtcttaaactcctagtctcaagtgatcctcctctgccttggcttcccaaaaaatagaatatttagctgaatcctagcatgargtcaggtaaaatctggctaatagtatttcctagaagaaagtcacccgagtccaccaaccacctaggagtgacaatagataggccaagcccacctgaacattagaagacattaattattgttctcaacctaaacagtatagtgcaagtcatatatatgcaattatcgctaatgaagctttgataatatgtctggaaaagttcaaacaatggtaactaggaaaagattctgataggatagttctgtcaaaaagacttttttttttttttttgagacggagtttcactcttgttgcctaggctggagtgcaatgccatgatctcggctcacagcaacctccacctcctgggttcaagcgattctcctgttgcagcctcccgagtagctgggattacagatgcatgccaccatgcctggctaattttgtatttttattagagacggggtttctccatgttggtcaggctggtctcgaactcccgacctcagctgatccgcccgccctggcctcccaaagtgctgggattacaggcaggagccaccgcgcccagcccaaaaagatttttttttttttacaaaaagttctatcacattgttgatcttattcataaaacaactgttccaaaaaacttactcaataaccaaattgccagtagaatttcaaaaatacttccctaacagaggagaaaaa

SEQ ID NO: 38043 - DNA, 1028 bp, Homo sapiens
aaaaagaaaagaaaattctagactgggcacagtggctcacgacggctgtaatcccagcactttgtggggctaagccggactgcttgaggccaggagtttgagatccacctgggcaacacagtgagaccctatctctataaaaaattgttcttgaagctagataattatctgtactcatccaaacactgtatcataatataaaaaaatcattaaaactttttaaatacagatagggtgtcactatgctgctcaggctggtcttaaactcctagtctcaagtgatcctcctctgccttggcttcccaaaaaatagaatatttagctgaatcctagcatgaggtcaggtaaaatctggctaatagtatttcctagaagaaagtcacccgagtccaccaaccacctaggagtgacaatagataggccaagcccacctgaacattagaagacattaattattgttctcaacctaaacagtatagtgcaagtcatatatatgcaattatcgctaatgaagctttgataatatgtctggaaaagttcaaacaatggtaactaggaaaagattctgataggatagttctgtcaaaaagacttttttttttttttttgagacggagtttcactcttgttgcctaggctggagtgcaatgscatgatctcggctcacagcaacctccacctcctgggttcaagcgattctcctgttgcagcctcccgagtagctgggattacagatgcatgccaccatgcctggctaattttgtatttttattagagacggggtttctccatgttggtcaggctggtctcgaactcccgacctcagctgatccgcccgccctggcctcccaaagtgctgggattacaggcaggagccaccgcgcccagcccaaaaagatttttttttttttacaaaaagttctatcacattgttgatcttattcataaaacaactgttccaaaaaacttactcaataaccaaattgccagtagaatttcaaaaatacttccctaacagaggagaaaaa

SEQ ID NO: 38044 - DNA, 1247 bp, Homo sapiens
ttggactattgtgtacctacgaataataagactattgagaatctagaactaatttgccaggatacactatttggcgagataaggcatctagaaaaatgaaagaaatagaattaacaaatattaattccaattaactaatattaagacaagtgaggttctagaactaatttgctatgatacactatttggccagataaagcatctagagaaactgaagaaatagaattaacaaatatatattgagggcccaaaaaataatcatgcaagaagaaacacaaaatcaggtcacaaagtactaaaggttaatggacatttatgtagatgtagcttgcaagtggatcttaaaatagattcatctttcccaagagtagtttgataatttttacagtctggaccagcgaatctcgagtttggatgactacgccccccagaagacatctgacaatgtctgaagatattttttattgccaaaaaatttttttgagkggtcacatagctaccagcatctagtatgtagaggctagagaagctgcaatgccagggcggcccacacccaaacaaaacaatatttaacctaaaaatttaataatgttaaggttgagaaaccctttttagattgacatatatatactaagaacaaatgtgttactgatggctaaagatgaaatattatttgatatagcacacttaatatatgcacaggacaatgtttctgtttttctcacaatcccaaacgtttctttgatcattttaagaagcacttagtgaaagaattctaataatggacaaactcagatattcagatttaataggttttttaagtatcccatagattggtctcctttcttagccattctctgcaatgcaagcccaactccttgacttccctagatgcaatcagctcatctatccttcgtctaactctccatttctagcccttactttgaatccaaatgtccataaggtgaaatctcaggaaacacttttattaaggtcagattaatagcaacaaatagacaagatcatgggaggtggtaattaagctaggagatggctttctagctttgggaagagaggaaaagcagagacagaagaagaaagatatgtggggagatcatgaaaatcccaccctgagcagagggctcaggcagagaaagggggtgagaaaaacccacaggctggaagttctgggctgtacagtgtcttgaatgagagtagcaaaggagagttctgagttcaaagatgca

SEQ ID NO: 38045 - DNA, 574 bp, Homo sapiens
attttcttccagtgtgctaagattatagcctttagctaatggttttctctctcagttatgctcctaccatttataagcattaattttgctgaactgatatagtaaaaatgttcaaaataacatttggcrgagcattttactctgactactcaagaataacctataatcttttctttttatactacatacacacacaccacacacacacactcatatacacacttacacctgtttttccaggatttacgtctttacctaaaattgtataaatttttccatagtcgagatgtataatttaaccttccctttcccaagggatgacatgtagccatttatttcaataagaaactccaagagcactagtattcacaagccaaatacagataacaccaaaatttttgctaaataaaggtgatgcatccattagcaaatgttgttgcttttaaagtgatggtttatatttaaaatccagtttaagttaaagttaggatatactgatggtttgcacatgatgagtggcagaataaatgagtcaaagttaactcagaggggctttgtttatttttttgttgtt

SEQ ID NO: 38046 - DNA, 529 bp, Homo sapiens
tctgtcgtccttaagtaagtaagataaaggagttataaaatgggcgtactctacttacagtcagtatgagaagtcccacctgagattagcccttggaaactgtaaattaaaatgaaaacattgtgtgcaaacagtcacttggtctcagcccagaggagggcagggagaggtacttctggaaagttagctgcccctcctgggtcagccaccccagcccctttccctgatgcccccagagtgccaaaaatgtcaccctgagrggccgctcctgggctcacactgttgggccttccagccccctgacgcatcagtggtgtccaggcagggacccccacacaggccttggggcctccgtttgtctaaggtgactccacccttcgggcctgtcctgcagagagccccgctgcatgtgaaggtcttcaggaggccagcaaccccggtgatagcctttgggtggtccctgtctcactgaactaggacccttggcttacagccttgccacctcatgcaaccctgaatccccaagaca

SEQ ID NO: 38047 - DNA, 556 bp, Homo sapiens
caaaaagtggcttcctaggtatttgcatttcactgaaaaataggaaatgagcactgaggatcattagggaggtttttatggactatgcccaggaaggtctgacatatgctatttctactggcttccattggctagaactcagacacatggccacacctaactgagagggaagctgggaaatgtagtttttgcatgtccaggaagaataggaattggtttgataatatgttatcactacaatattaaagctctctatttccctgatcatttagtttattcccttttatatacaatcactaaattggcattcaagtccatttggagagtggggccaaatgaatatgaatacactgttcggaaaccaagaggtaactgcctgctatatagtttgcctctaagagagagagagagtaaaaatggaattctcagaaagggattggaaggagttctctaagaacttttggtaagcaggttggtagcagggtagggggtaagaagaggaggagtatataggaatcctatggaccagyctgtaggatagaggagagcttttgaa

SEQ ID NO: 38048 - DNA, 533 bp, Homo sapiens
caagtactttgtgcaaccttacacaggcgtggaagaaggtggtttgaatggggtagctggggctaggtacaccaacctgcagcatttgtaaagtgaagagtagtgatcctggctctacacttcatattttactccaaataaatttcagaaagacaaaccaaaaagtactaaaagaaaacttgatggttaaaaaaamaaaacaaaaaaaacaaaaactgagtgttagagaccttgctaaataaaacacaactaccaggtatcataagaggaaagactgttaaatttaattacataagattctacccacaatacagtaaaagagactggacttatcctcccatctgaaaaactagacatgatctataaatcaacacttttctgaacactagaatcaggcaacaatgtacagtgatcctgagaaataggaaacaaagtagtcaagctaagtttctccaaaggtgaaattagacagtattttaactgcatgaaaataaaaataaaacatattagaatttgtgggaggttgctaaata

SEQ ID NO: 38049 - DNA, 533 bp, Homo sapiens
caagtactttgtgcaaccttacacaggcgtggaagaaggtggtttgaatggggtagctggggctaggtacaccaacctgcagcatttgtaaagtgaagagtagtgatcctggctctacacttcatattttactccaaataaatttcagaaagacaaaccaaaaagtactaaaagaaaacttgatggttaaaaaaaaaaaacaaaaaaaamaaaaactgagtgttagagaccttgctaaataaaacacaactaccaggtatcataagaggaaagactgttaaatttaattacataagattctacccacaatacagtaaaagagactggacttatcctcccatctgaaaaactagacatgatctataaatcaacacttttctgaacactagaatcaggcaacaatgtacagtgatcctgagaaataggaaacaaagtagtcaagctaagtttctccaaaggtgaaattagacagtattttaactgcatgaaaataaaaataaaacatattagaatttgtgggaggttgctaaata

SEQ ID NO: 38050 - DNA, 525 bp, Homo sapiens
ctgaggaattaaatgcttctgggatcttaaagtacattttctacaaacaagtcatagtgttttcttaaaataagctatcaattaaagcaagaatgtggagtagrtggcattggtagatacaatcaactaaaacattgtttttattttcactccagagtacggtgagcttatattcacaattagtaaaaggaagcagagctgattttctacaacttcttctgtttcttctctcaaaatcttcagagagaggaaaaggcaaaggaatgcagtattctcccatttaagtcaacattacaaatgcaattaaagggtgtataatattgctaaataagacctcatcatgatgtgtattctatgacagtttattttgactcctttaactgagcgttgtgtgagtttctttagtttatttgttagccactcggttacgaagatcaggatgtttttagctttttagacacaatatttgtcgaagctcttcttctcatactatacttttctaaaatgaatgtgaaagtattgaaa

SEQ ID NO: 38051 - DNA, 523 bp, Homo sapiens
tagtaaataatttaaaaatcaatgtttaatatataaagtttttcttactaaaaaaaatcacccaattaaaagtgggctaaagatgggaatggacattttgcagaaataaataaaccacaaatgacccataaaawtttttttttttttttgagaccgagtgtcactctgtcacccaggctggagtacagtggcacaagttcggcttactgcaacctccacctcccaggttcaagcaattctcatgcctcaggctctcgagtagctaggactacaggcacacaccaccacacctggctaatttttgtttctgtttttgtttttgtttttagtagagacaggggttccaccatgtcagccaggctggtcttgaactgacctcaagtgatccgctggcctcggcctcccaaagtgctgggattacgagcgtgagccatcagacctggccgacctataaactcttttttttttcttcttattccttgaaactgctcgtattgcaagttttcatggatgaaataggaat

SEQ ID NO: 38052 - DNA, 523 bp, Homo sapiens
tagtaaataatttaaaaatcaatgtttaatatataaagtttttcttactaaaaaaaatcacccaattaaaagtgggctaaagatgggaatggacattttgcagaaataaataaaccacaaatgacccataaaattttttttttttttttgagaccgagtgtcactctgtcacccaggctggagtacagtggcacaagttcggcttactgcaacctccacctcccaggttcaagcaattctcatgcctcaggctctcgagtagctaggactacaggcacacaccaccacacctggctaatttttgtttctgtttttgtttttgtttttagtagagacaggggttccaccatgtcagccaggctggtctygaactgacctcaagtgatccgctggcctcggcctcccaaagtgctgggattacgagcgtgagccatcagacctggccgacctataaactcttttttttttcttcttattccttgaaactgctcgtattgcaagttttcatggatgaaataggaat

SEQ ID NO: 38053 - DNA, 1802 bp, Homo sapiens
  misc_feature (1)...(1802): n = A,T,C or G
gannnnnnnnnnnnnnnnnnnnnnnnnnnnnnnnnnnnnnnnnnnnnnnnnnnnnnnnnnnnnnnnnnnnnnnnnnnnnnnnnnnnnnnnnnnnnnnnnnnngaaactcaccactaggaccattattttgctgttagatctatttttgggggaaatgcctaatgtcaggatttttttttttttgaaagagtctcgctcagtcaccaggctggagtgcagtggcgcgatctcggctcactgcaaccttcacctcccgttttcaagtgattctcctgcctcagcctcccgagtagctaggactacaggcacgtgccactatgcccaactaattattgtatttttagtagagacggggtttcaccatgttggccaggatggtctcgatttcttgacctcgtgatccgcccacttcagcctcccaaagtgctgggattataggcgtgagccactgtgccagaacaatgtcaggattttttggcttatctttactgacctggtctaatccccacagatgaatatttattgatttatttttttctctttttggaggaaggaagccctgttgtcagcatcctaaaagctagaaatgagaaaagctgggaatctcaattttcagtgtgtgctttgttttcaatattgtaccctttcctcaattggtctcagtggtctccagtccagagactctctgttttatcctctacggaaaatgaacattttgtcctttatacagaaatggacatgtggggccgtcttcaaccactcctaaaacactaaaacagacattcaataaatcctgtttccagccccacttaatcctccaagttacataactgcagattgcagcgctcacatagggaaccctgtgagcagcctcctttgaagctggtcatccctccagccttattcccccacactctcaacggtattgtaactaaggacctcagtttttaaaatatacttcagtcatccactctctttatcttccttcctgccgctctcacaccttgattaaaaccattttttccttccacccatccatgtctcttgactctggcttttaggtggcaagctgctggacttaggaccagatacagtatcgtatgtcatgagcctttggggagctcttcagtttacaacttggtggctcaaagatttcctttctactgctttagacagctttttggggggatgtgttttccgaaatcagctgctctttccgtatagaaccatacattgagattacatgagtggctgtgatgtctaatgtaacagaacatttgattctctttgtctatattgtttatagaaaaacatctcttctcattgatatgtttctttccccttccatctctgttactgtrctaaccattaccagatctttaacaataaatttaggattttaaaatatatttgtggcaggaattactgtctgcctctagaggtaacatttgagtgaactgtcttattgtcattggcaacttccttcagatcatgccactgcattacagactggtcgacaagagtaagactgtctcaagaaaaaaattaaaaagattaaaaaaaaaaaagaaacctttctgaggtaataattggagacactggcaaagacatgtgacagagttttcactttcttttattacaaggtcaaagtatagaaatacctaaatattgaaccatggagagatgattgaattgtacaatattcctatgtatggctgattgattcagttagaactttactcacatattgaacttcaaaattttcactcccccgaccaatgctttttagccttctattttac

SEQ ID NO: 38054 - DNA, 1802 bp, Homo sapiens
  misc_feature (1)...(1802): n = A,T,C or G
gannnnnnnnnnnnnnnnnnnnnnnnnnnnnnnnnnnnnnnnnnnnnnnnnnnnnnnnnnnnnnnnnnnnnnnnnnnnnnnnnnnnnnnnnnnnnnnnnnnngaaactcaccactaggaccattattttgctgttagatctatttttgggggaaatgcctaatgtcaggatttttttttttttgaaagagtctcgctcagtcaccaggctggagtgcagtggcgcgatctcggctcactgcaaccttcacctcccgttttcaagtgattctcctgcctcagcctcccgagtagctaggactacaggcacgtgccactatgcccaactaattattgtatttttagtagagacggggtttcaccatgttggccaggatggtctcgatttcttgacctcgtgatccgcccacttcagcctcccaaagtgctgggattataggcgtgagccactgtgccagaacaatgtcaggattttttggcttatctttactgacctggtctaatccccacagatgaatatttattgatttatttttttctctttttggaggaaggaagccctgttgtcagcatcctaaaagctagaaatgagaaaagctgggaatctcaattttcagtgtgtgctttgttttcaatattgtaccctttcctcaattggtctcagtggtctccagtccagagactctctgttttatcctctacggaaaatgaacattttgtcctttatacagaaatggacatgtggggccgtcttcaaccactcctaaaacactaaaacagacattcaataaatcctgtttccagccccacttaatcctccaagttacataactgcagattgcagcgctcacatagggaaccctgtgagcagcctcctttgaagctggtcatccctccagccttattcccccacactctcaacggtattgtaactaaggacctcagtttttaaaatatacttcagtcatccactctctttatcttccttcctgccgctctcacaccttgattaaaaccattttttccttccacccatccatgtctcttgactctggcttttaggtggcaagctgctggacttaggaccagatacagtatcgtatgtcatgagcctttggggagctcttcagtttacaacttggtggctcaaagatttcctttctactgctttagacagctttttggggggatgtgttttccgaaatcagctgctctttccgtatagaaccatacattgagattacatgagtggctgtgatgtctaatgtaacagaacatttgattctctttgtctatattgtttatagaaaaacatctcttctcattgatatgtttctttccccttccatctctgttactgtactaaccattaccagatctttaacaataaatttaggattttaaaatatatttgtggcaggaattactgtctgcctctagaggtaacatttgagtgaactgtcttattgtcattggcaacttccttcagatcatgccactgcattacagactggtcgacaagagtaagactgtctcaagaaaaaaattaaaaagattaaaaaaaaaaaagaaacctttctgaggtaataattggagacactggcaaagacatgtgacagwgttttcactttcttttattacaaggtcaaagtatagaaatacctaaatattgaaccatggagagatgattgaattgtacaatattcctatgtatggctgattgattcagttagaactttactcacatattgaacttcaaaattttcactcccccgaccaatgctttttagccttctattttac

SEQ ID NO: 38055 - DNA, 525 bp, Homo sapiens
ctccttcctctccacaatgtctccaatattttctggttccctggagctcctcttttctgttttctggccagaatgctgggtctttgattacggtactctgctacagtgtttcatggctgcacccatgtttggagccgacaggtggcaaaatgagaaaagactttaaaaagtttgcatcaccctcttgggatcactactgcaccaactggagaggaagatgccctggcctgagggttttgtttctcctaggcactgcctgctgctgycaccacaggaattcttgggggccagatcacaagggctcagagaaaacaaacaacaacaaaacggagggatttctgcattctctcggagtaataggtgtcctctttcctgcccaaacttgtagggcttatccttgatctcagcaattgctgagaaactgttccaccctttacatggaaaacagactttcttgtttgcctcatccctaccagtgtctttctctctacacctaagttcaattaccagctgccctttatcatt

SEQ ID NO: 38056 - DNA, 530 bp, Homo sapiens
aagcttctgccctgaattgaaaggtaattttttgttgaggagggctgagtcacacttatccacaatgcctcctttggcatagaccccagataacccaaagtgtgttctctcaaacagatggagaaaattagaggatagaaaatatcaagagtgttactgaggatgctgccagctgaaccaccatttatgtttttcatagaacaaaacttcaaggggtttaagtagtcagagtgtggccagcttttccttggaagtatttatgcaaggaagatgttttatattctggaagagggcatatgtgaagggcatttcagaatgatgtaaggtgtatgcacaggtcatgtgatggagtggtctggggtagcaggacatgtgacaggcctcgaagttcagcactacaagcatggagcccatatccacaacatcttaaagcgcagaagctgggckgtggggtggagtagttcatgccaaaaatcacaacttggtttggaaaatgagagggaagagaaacttccctaaagagaattaga

SEQ ID NO: 38057 - DNA, 1387 bp, Homo sapiens
  misc_feature (1)...(1387): n = A,T,C or G
gattgcccaggaagcaccatcatttatcwtctctttatttggttctgttgggcatggagtggcctgaaattgaattattctttcttgagaaaggcataagtactttctttctgtatcctcaaggtcaaatgcacatttatggagttgtgacacaggatcatctgcatccaataatgtggtctgcttatcaactttcctaattatcaatcttgggagtgccatgccagtaactgagcacacaagtttgactgtttgtccataatgaatgtagccatctcagactgtgaattcttctccttctgatccatcatcatccaagaataatgtaaaatgctccccattgctgtgaactagcatgaaaattacctctttctacgtgcaagtatctggtactaactctctgggatcgtagtcgattaaacagagccacctttgttcctgaggcaatgcataagtcagcatttttcaatgactgcttctttttggaaggtttggacgacttgctgaggaacacaccaatgtcatcaccgttgccatagaacacctttacagacaacatgaagtgcttttgcttgtctgaatcagatatgtacaatgttttggctgtgcaatagttctttccttccaagtttagctgctgcatttcttggtcactatttcctatcccaatcaatgcacatggatgagagccttgcacagaacaaccatcgcatttcatttgatattttatttcttccatccactgcccataagatatacgcagggggagggcaaaaaaccttttttcatttccatatgacttctgtacannnnnnnnnnnnnnnnnnnnnnnnnnnnnnnnnnnnnnnnnnnnnnnnnnnnnnnnnnnnnnnnnnnnnnnnnnnnnnnnnnnnnnnnnnnnnnnnnnnnctgaaacctcacaggtagcagccctctcagaaaatagatggtaaatgtttctttgagaagtttaaaggtgtcagactagactcagatgaggaagggccccagagaaacctggctgtatcaaggcaattctctatggatgcaaacctccctcctgaggaaagacagcttttcagggctacttctatttgcagaccctctgaacagccatctcaaaagatgtcaaagaaggatatttgggggtgaaatattttgattttcttcacaggcttacattttacatggcagaatcataatacaagtataattaaataaaactaaagtacaagtataattaaaatgaatacctagtcctataacagatacattccacaaaaatgtaattattaacaccaggggcagttatatttcaagctcatgcttctcagcttgtctgttcttgtagcagtgtaggtcaaatcagaagataaaagccatagag

SEQ ID NO: 38058 - DNA, 1387 bp, Homo sapiens
  misc_feature (1)...(1387): n = A,T,C or G
gattgcccaggaagcaccatcatttatcatctctttatttggttctkttgggcatggagtggcctgaaattgaattattctttcttgagaaaggcataagtactttctttctgtatcctcaaggtcaaatgcacatttatggagttgtgacacaggatcatctgcatccaataatgtggtctgcttatcaactttcctaattatcaatcttgggagtgccatgccagtaactgagcacacaagtttgactgtttgtccataatgaatgtagccatctcagactgtgaattcttctccttctgatccatcatcatccaagaataatgtaaaatgctccccattgctgtgaactagcatgaaaattacctctttctacgtgcaagtatctggtactaactctctgggatcgtagtcgattaaacagagccacctttgttcctgaggcaatgcataagtcagcatttttcaatgactgcttctttttggaaggtttggacgacttgctgaggaacacaccaatgtcatcaccgttgccatagaacacctttacagacaacatgaagtgcttttgcttgtctgaatcagatatgtacaatgttttggctgtgcaatagttctttccttccaagtttagctgctgcatttcttggtcactatttcctatcccaatcaatgcacatggatgagagccttgcacagaacaaccatcgcatttcatttgatattttatttcttccatccactgcccataagatatacgcagggggagggcaaaaaaccttttttcatttccatatgacttctgtacannnnnnnnnnnnnnnnnnnnnnnnnnnnnnnnnnnnnnnnnnnnnnnnnnnnnnnnnnnnnnnnnnnnnnnnnnnnnnnnnnnnnnnnnnnnnnnnnnnnctgaaacctcacaggtagcagccctctcagaaaatagatggtaaatgtttctttgagaagtttaaaggtgtcagactagactcagatgaggaagggccccagagaaacctggctgtatcaaggcaattctctatggatgcaaacctccctcctgaggaaagacagcttttcagggctacttctatttgcagaccctctgaacagccatctcaaaagatgtcaaagaaggatatttgggggtgaaatattttgattttcttcacaggcttacattttacatggcagaatcataatacaagtataattaaataaaactaaagtacaagtataattaaaatgaatacctagtcctataacagatacattccacaaaaatgtaattattaacaccaggggcagttatatttcaagctcatgcttctcagcttgtctgttcttgtagcagtgtaggtcaaatcagaagataaaagccatagag

SEQ ID NO: 38059 - DNA, 1387 bp, Homo sapiens
  misc_feature (1)...(1387): n = A,T,C or G
gattgcccaggaagcaccatcatttatcatctctttatttggttctgttgggcatggagtggcctgaaattgaattattctttcttgagaaaggcataagtactttctttctgtatcctcaaggtcaaatgcacatttatggagttgtgacacaggatcatctgcatccaataatgtggtctgcttatcaactttcctaattatcaatcttgggagtgccatgccagtaactgagcacacaagtttgactgtttgtccataatgaatgtagccatctcagactgtgaattcttctccttctgatccatcatcatccaagaataatgtaaaatgctccccattgctgtgaactagcatgaaaattacctctttctacgtgcaagtatctggtactaactctctgggatcgtagtcgattaaacagagccacctttgttcctgaggcaatgcataagtcagcatttttcaatgactgcttctttttggaaggtttggacgacttgctgaggaacacaccaatgtcatcaccgttgccatagaacacctttacagacaacatgaagtgcttttgcttgtctgaatcagatatgtacaatgttttggctgtgcaatagttctttccttccaagtttagctgctgcatttcttggtcactatttcctatcccaatcaatgcacatggatgagagccttgcacagaacaaccatcgcatttcatttgatattttatttcttccatccactgcccataagatatacgcagggggagggcaaaaaaccttttttcatttccatatgacttctgtacannnnnnnnnnnnnnnnnnnnnnnnnnnnnnnnnnnnnnnnnnnnnnnnnnnnnnnnnnnnnnnnnnnnnnnnnnnnnnnnnnnnnnnnnnnnnnnnnnnnctgaaacctcacaggtagcagccctctcagaaaatagatggtaaatgtttctttgagaagtttaaaggtgtcagactagactcagatgaggaagggccccagagaaacctggctgtatcaaggcaattctctatggatgcaaacctccctcctgaggaaagacagcttttcagggctacttctatttgcagaccctctgaacagccatctcaaaagatgtcaaagaaggatatttgggggtgaaatattttgattttcttcacaggcwtacattttacatggcagaatcataatacaagtataattaaataaaactaaagtacaagtataattaaaatgaatacctagtcctataacagatacattccacaaaaatgtaattattaacaccaggggcagttatatttcaagctcatgcttctcagcttgtctgttcttgtagcagtgtaggtcaaatcagaagataaaagccatagag

SEQ ID NO: 38060 - DNA, 1366 bp, Homo sapiens
  misc_feature (1)...(1366): n = A,T,C or G
ctgtaagtgtggctgttggcagatgtcttatttatttttcatatattaatttatattattaataactaattttttatttattattcgtgagccctttcccatgacaacttcttggaaatttctttctctcccactgacctagtattatctctcaggcattcttatttaaagtttttcctctcattattcccttcttcaccatcattcccaggttggttacaaagaactaatttaatgacccatttactctgaagggaggcgcaagaagtgaagcttctttctgaggccttaagggatctcacctccttaaatctctgttttcctacccctacttcagatattattgagacattatgttttcttcctctaccttcagaaacttcagtatcaacaggtccakatctgcctaagccctcagatgagtctgcaaacaatcattgtgtcaacatttgactcatgccttgcagatgatcccaggcaccactgtcttaacctgtgaaaaccataaattcttggcacaaacaacttcttctgcacatccctcctcctcatacatacactaagagacttggccaaattccaacacagtgtctatcagctccgagccacgtccctacgatgccccatacccctctnnnnnnnnnnnnnnnnnnnnnnnnnnnnnnnnnnnnnnnnnnnnnnnnnnnnnnnnnnnnnnnnnnnnnnnnnnnnnnnnnnnnnnnnnnnnnnnnnnnngaaaacagttcattttaatgtagtaaaaccaacagtatacaaatcttttgacacaattatttgaatgttgggtttataccttagagaaaatctaccttttatgtccaggagactcatacaagaaaaggacatctagttttgtaatagaaaaaaatggataaccccaatctaataaaatggaatgctcattatagtattatcctgtgatggaatactctaaatcaatgcacagaaagtacagacaaacatatcataagaatgaattttacaaattaaatattgaactaaaaagcaatttcagaaaaatatattcagtgtgattccatttgtttaaactgaaaaatatgtgaaacaataatgctcaatgtcctttactaatgcatttattttggcaaaattataaagataagaaatgggactcattaacaggacagtgttaaggactctaaaaatacgggtagttttttattcttaggcaggtaatgtgtacatcagtgttcattttattatttcttacactgtcttcatgacttacacataatattttgctagttttaaaacataagatgtgataataatctaaacagaccaaaggaaataaatgaatatgttaaaaaaaagacagagaatg

SEQ ID NO: 38061 - DNA, 763 bp, Homo sapiens
tggcttcccagagccagcactctagtaggggagatggtcattgatgggataatcacccagatcattgtaaatctagcaccaagataaagggaaacaaggaagaatctgagaacataagcggagtagctgggtttcctggcttatgcctgtaatctcagcaattcaggagggcaaggagagagggtcacttgagcccaggaatttaagatcagcctgggcaacaaaggaagactctgtctctacaaaaaaaaaawtttttttaattagccaagcatgatggcacatgcctatagtcccagctacttaaaaggctgaggcaggaggattgagagcaggagttcaaagctgcatgataggccaggcacagtggctcacgcctgtaattccagcactttgggaggccaaggcgggcagatcacctgaggtcaggagtttgagaccagcctggccaacatggtgaaactccatctctaataaaaatacaaaaatttgccatgtatgatggcaggcacttgtaatcccagctacttgggaggctgaggcaggggaatcgctttaacccagaaggcggaggttgcagtgagccaagatcatgccactgcattccagcctgggcaacatatcaagaccccatctcaaaaaaaaaaaaaaaaaaaaagctgcattatagctgagttatagtaatgctactgccctccagcctgggtgacagagtaagaccctgtctcaaaaataataataaaatagaaaaagagaaaaaagt

SEQ ID NO: 38062 - DNA, 763 bp, Homo sapiens
tggcttcccagagccagcactctagtaggggagatggtcattgatgggataatcacccagatcattgtaaatctagcaccaagataaagggaaacaaggaagaatctgagaacataagcggagtagctgggtttcctggcttatgcctgtaatctcagcaattcaggagggcaaggagagagggtcacttgagcccaggaatttaagatcagcctgggcaacaaaggaagactctgtctctacaaaaaaaaaattttttttaattagccaagcatgatggcacatgcctatagtcccagctacttaaaaggctgaggcaggaggattgagagcaggagttcaaagctgcatgataggccaggcacrgtggctcacgcctgtaattccagcactttgggaggccaaggcgggcagatcacctgaggtcaggagtttgagaccagcctggccaacatggtgaaactccatctctaataaaaatacaaaaatttgccatgtatgatggcaggcacttgtaatcccagctacttgggaggctgaggcaggggaatcgctttaacccagaaggcggaggttgcagtgagccaagatcatgccactgcattccagcctgggcaacatatcaagaccccatctcaaaaaaaaaaaaaaaaaaaaagctgcattatagctgagttatagtaatgctactgccctccagcctgggtgacagagtaagaccctgtctcaaaaataataataaaatagaaaaagagaaaaaagt

SEQ ID NO: 38063 - DNA, 1182 bp, Homo sapiens
ttaacttaggcaccacgtttaaaagatgttcacatttaaaggtgcacactgagaaagtgagcagggtagtagatgatctgctggaaagcaggataagcaatgaaatgatcttgggatattaactttgaaaaagacacagcacagtggggagatgacaatgatcttcacatatgcaaaatattatttcagagagaaaagaattttaattttctttcttttttttttttttttgaagtggagtctcgctctgtcgtccaggctagagcgcagtggtacgatctctgctcactgcagcctccacctcccgggttcaagcgattttcctgccttagctcccacaagtagctggcattacaggtgcctgccaccatgcctgactaatttttgtgttttcagtagagatggggtttcmccatggtggccaggctggtctcgaacacctgaactcaggtaatctgcctacctcagcctcccaaagtgctggggttacaggtgtgaaccactgcacccggccttaatattcagagagaaaagtcttttcctgtattcattcctaagactggtagcataggcagtttcttctcttttccaggaggtgttcaaatcttggttggtgtaaccagagaatgcattctttcaaagtagagttcctatatcacctcctcctatgcaggccttgctcatgccagttgctcagaacatgtttgttaagtcgacattgatcaggtgtgtggaggaaacaactgctttgggtacaagcaatctgtactcagtgacttccagaacattttccaaatgtaagatgccaggattttatatgctccacagtgaataattcagcaccatcctctgccaagtttggacttaaagctgtccattggttttcatcagtggttattaaagtatggttcccagacaagcagcatcaacattaacatcagtatcatctggaaacattttagaagtgcaattttcaggccttactgcagatctagtgacagaaactctaggggtaggaagggggctacccagcaacctgtgttgtaacaagccctccagatgattttgagacctgttaaagactgagaaccactgggttggatgtttctggtcatccctgctgggatgcacacaaaagctcaatgaggctgcatgtttcctgaggactgaggcctgccttgt

SEQ ID NO: 38064 - DNA, 1197 bp, Homo sapiens
tgcattctcccttactccaaaatatatataaataacctgtattttagccatcccatactcgtggttcctataaaattacatwctttttatggctgtgattttgcatatgttgccccctcaagttgataccaacaggttcctgcagaggtgctcaactctgacttcctctggatggcctgccctgatccctttgagtaagggtagtcttttactgctcccattacactattgaaatttctgtttgctcaggaatctgccccaccagagagagagagtgttttgaagtaagagtccatgtctttgctttgcagttattcccatgcttgacatattttaggtgctcagaaaataaatgcttgtgcattaatgaaaggctttgattgttctctgtagtaatattttgaagacgctttagtatgttatcctcattcctctaaatcagcaactgacttatgcctagagagaatattggggaatcttagggattccctaactgctaaccgccttcagaaagataaaccatgggtacaaaaagtgcattatctaagcttcctattgttacaatttggctttactaatcatgagaagaacatagtgccttggccaaggagtaatgtgacacgccacctgagcttatagaggaggctcagtgtatgaaaacaaactcctcccacattgcacaaccaagtgggtggctgtcatgagaacccagaaaagctatttggaagtggttctcttcattgagctgagctctttcaacccagcacagcttcaagatggaatgtttacaaattcaacataaggccttaaaccttgaagctcaagccccatattagtgagctggttttatggagacagagggtagaaaacaagagaagaagatgtactgactatgcttcaaaggtccaattaattctgcatctaaatcaccttcagagagaaggatctagctgggacacaatgacccctcctcacttccccacccttcttcaactctcaccctcccaaagcaaagctggttaaaaagccccagacatttcctttccaaaactaccctgagacttggataaaatctaatcgcatgacaaaagaaattgtattgaaaatgaagaacacaatgaaagaagagttttcactatattgatgcaatcatgcaaccggcaagcactaagcatctacttatgtgaacagttcatg

SEQ ID NO: 38065 - DNA, 815 bp, Homo sapiens
tcctctaaatgaaactcctatggaggggtacattaactcaggacttacaacagcaaaaggtaatcatcaaagactcctttccttcccgctcctgcaaatccaatcaattatgggtcctgcagtctcacctcctaaatatttctccactcattcctttcgctcattcttacttttttgctccggtttgtgccttttgtggtgtcaaaagcctcctgcctgctctccctgctccagtcttgacctccaaccaccttacaccctcactctatactgtaatttccccactaaaatccttttagtgcccccacactatgtcctacagaataaaacccaagctccacaygcccacatttgtctccagcctcatttcctagtgtaaaatgcatattccaacatcaggaaaccactcataggtcctctcaccacatggtcgtttcccacctttgtatatttagtatatgttctctttgcatagaaatcctttcccatctttccacgtgtagctaactctttgctcttccttccttgaatagccaggctaatccatgtacactcctccaggctcctaatgagccctgcactcttagcacattgagttaaatgtatgtcctaacaggactgtctaccccatggcatagcacatttcctgagagcagggacaattggggctttattcttctctgtatccatgacatctatatgtgcagtatgcagcatgtaataagcactcaataaatatttgctaaagaatcaaatcaggccaggcatggtggctcatgcctgtaatcctagcactttgggaggccaaggtagga

SEQ ID NO: 38066 - DNA, 636 bp, Homo sapiens
atcacagttaatctgcaaatcaatggtatataccgaaaatcaggacaggggccagagtgtcctcactgttacctgttggattcccttggcattatttagtgcacaacattaccataggaaaatcacaagcacttttatggcaatggtgtaaattaggaggattctgacagtaaagcccagagtcattccaagataaaacgatcagtttgggatctcttggccacctactgacctgtcagtgtattgaggcagtttggggtaggaagtatgtcaaatgatactggaggagggaatacaagaggccgggcagagagtgacttatttattaattatctatttatttatttttggttgaggcagagtctcgctatgttgcctaggctggtctygaactcccaccttggctcccaaagtgctgggattacaggtgtgagccaccatgcccagccccagagagtgactcttgactagtttggagaaataaactgacttcaagggtcttcaaaacacagccacttggaggtcctgactgcccttttctgatctccagcatgagcctctgcagaagcaagtgcctttcactgagtctgaccctagctgagtgagatctttgcagaggaaaggacaacatgctta

SEQ ID NO: 38067 - DNA, 591 bp, Homo sapiens
ttcaggatgtaagtatagcatgagcaaggtatggagttggagatgagcaagaagagattaggaaataggaaatagactagaacggggaattctttttgaggaatattgtagggaaaaggttgaaaatatgagttagaaacaaaaatgttgagagccttttataaaattatcaagagtttagactttatcctgcaagtactgagttcagtggacatttaatccactgaaactgtttgaggcacattaaaatggcacttgtgattttcccattgaaactagggaggattragataggcagaccaattaggaagctctatacgcatgccagtaaagatcctctgaagggaacccagccttgcccctcctgaaacacacccgagctccttagagagaagaggcccttgcttctcagcttccacagggccagctgaaccagatgagcccttttaagactaaaagatagttctggtttggctgattgagaaaggacctcagccagctgttaaaaggtagcacttgctacatcttaaccactttggaattactccctcatccttccacccgcctcctctttagtgacagtgtccgatg

SEQ ID NO: 38068 - DNA, 591 bp, Homo sapiens
ttcaggatgtaagtatagcatgagcaaggtatggagttggagatgagcaagaagagattaggaaataggaaatagactagaacggggaattctttttgaggaatattgtagggaaaaggttgaaaatatgagttagaaacaaaaatgttgagagccttttataaaattatcaagagtttagactttatcctgcaagtactgagttcagtggacatttaatccactgaaactgtttgaggcacattaaaatggcacttgtgattttcccattgaaactagggaggattaagataggcagaccaattaggaagctctatacgcatgccagtaaagatcctctgaagggaacccagccttgcccctcctgaaacacacccgagctccytagagagaagaggcccttgcttctcagcttccacagggccagctgaaccagatgagcccttttaagactaaaagatagttctggtttggctgattgagaaaggacctcagccagctgttaaaaggtagcacttgctacatcttaaccactttggaattactccctcatccttccacccgcctcctctttagtgacagtgtccgatg

SEQ ID NO: 38069 - DNA, 560 bp, Homo sapiens
  misc_feature (1)...(560): n = A,T,C or G
gcactttgggaggccgaggcggttggatcattgaggtcaggagttcgagaccagcctggccaaaatggtgaaaccccgtatctactaaaaatacaaaaattatttgggcgtggcggcgggcacctgtaatcccagctactaaggtggctgaggcaggagaatcagttgaacctggaaggtggagnctgcaatgagcccagatcgccccayctcactccagcctgggcaacagagcgagactccatcaaaaaaaaaaaaaaaggccccaatagtgggtgacagctccaacaaggagactgagaaggaggccccccaaaaagagaggagatggcagggcaggacagctcccaagcaaagggctgacacagcttggactttataactcacagcgttctcattcctctaattctggtctccaagaacctacagtaaatccaaaatttactgaacttcactgtaagttcagctctatggatagaacttagctctaaaaggaaatatttcagctgcttctcctgaaccacagtagtcagtgtggtacacgcttgagccttttaaac

SEQ ID NO: 38070 - DNA, 878 bp, Homo sapiens
gatccaacctttagcctacccttccagcccgtccaatagttgtatgaacactgaatttcctgtactaaatccctttcagtttaaaatagctaaaatcatttctgttttccaccactgagttctgacagatagatttatcaaaggcagcataaaaaaggtgatttcaactcttttttacctcaattaaaaagtgttttgtgactgttgctaataacttcatctcaagagcactgtaaggacttgagttctagtcctgtctctgctgcccatatgtttgtgtgtgtgaccttgaataagtcacttcagccttcaaagttcttttccttatctatcaaactgggcacataatgcctgctttgtatgtgtgcccataagtggagagaatgtgaatgaaagtgggctttgggcaataaaatgtgactgctgtctttttgccttaatrtaatatagtctccctatgaaatcctatctcttcctcaaggaaagtactagttagaaaatgtctattcatcacaaagtgagaaataaataaaataacctgtcttacatgttgttcaggattttctatggctattgtgtttgtccattttgctttgctgtaaaggaatacctgaggctgggtaacttatagggaaaagaggtttatctggtttacggttctgcaggctgcccgggaagcatggtgttcacatctgcttctggtcaggaccttgggaagtttttactcagggtgggagacaaggggagctggcatgtcacatggcaagagaggaagtaagagaaaaggaggagctgtcaggcttttcttaacagtcagatctttcatggactaacagagcaagaactcattaccgtaagggatgtgccaagccattaat

SEQ ID NO: 38071 - DNA, 1034 bp, Homo sapiens
tgttaaggcagaatcaaagcttacgcyagcttctctagggagggctccctccctggcttcatgactccttccaaattctcttccttcttatgtattacaacaaatataatttatccttcagttttaaaggtggatctggtgctacctaaatgtcaagtaatgtcattaatgtcaattaatgatgatgtagagtccttacaccagcacaagaaagccaatgaacaagtaagagttaagaaaactccccacagcacattaattaagaaagccaggctatgtaaaatgttattttgaaagaagccattttctgcagtgacataaaatttcataggctgttctgggcctccagataggacccatgtaataaggcatctctgccaaaccagccagaaaacagggaagtgagacagccatgggtcagaacccatagatataggaatggaaaactccagagagccctcctctaagatgtaaagccaccaatcgacagacagcctgccatatacaggaaagctgtcagtcatctttactaaatagggaggatacaacttccctcccctccaggccatagaaaactcaaattctttacaagtgtttttgagattcacatacaaaattatcaatgacaccatcaaaatggatgcctgcagatcttacaaacaaactagaagctagcctcatggttgctcagaaatgagggcatttaggcaaagctgggaactgaagatttgagcaggtgtgggtcagaccctggtgctcaaaataaatattctgccccagaagctctggactggaagggagggacccaagttctctgaaaggacaacagtgccacagccaaacagctcaagcagtttgctgtcaattaaccaccccctgtgtaatttcaggaaaatttattctgtaaattacagacatttttgacacttaactcagcaaaaaacagttgtccaacaatgattttatgtccaaataaacctgtcatctttattcttggccttttccttccctcgtacagaaaataaaaaggatcc

SEQ ID NO: 38072 - DNA, 1034 bp, Homo sapiens
tgttaaggcagaatcaaagcttacgctagcttctctagggagggctccctccctggcttcatgactccttccaaattctcttccttcttatgtattacaacaaatataatttatcctycagttttaaaggtggatctggtgctacctaaatgtcaagtaatgtcattaatgtcaattaatgatgatgtagagtccttacaccagcacaagaaagccaatgaacaagtaagagttaagaaaactccccacagcacattaattaagaaagccaggctatgtaaaatgttattttgaaagaagccattttctgcagtgacataaaatttcataggctgttctgggcctccagataggacccatgtaataaggcatctctgccaaaccagccagaaaacagggaagtgagacagccatgggtcagaacccatagatataggaatggaaaactccagagagccctcctctaagatgtaaagccaccaatcgacagacagcctgccatatacaggaaagctgtcagtcatctttactaaatagggaggatacaacttccctcccctccaggccatagaaaactcaaattctttacaagtgtttttgagattcacatacaaaattatcaatgacaccatcaaaatggatgcctgcagatcttacaaacaaactagaagctagcctcatggttgctcagaaatgagggcatttaggcaaagctgggaactgaagatttgagcaggtgtgggtcagaccctggtgctcaaaataaatattctgccccagaagctctggactggaagggagggacccaagttctctgaaaggacaacagtgccacagccaaacagctcaagcagtttgctgtcaattaaccaccccctgtgtaatttcaggaaaatttattctgtaaattacagacatttttgacacttaactcagcaaaaaacagttgtccaacaatgattttatgtccaaataaacctgtcatctttattcttggccttttccttccctcgtacagaaaataaaaaggatcc

SEQ ID NO: 38073 - DNA, 1034 bp, Homo sapiens
tgttaaggcagaatcaaagcttacgctagcttctctagggagggctccctccctggcttcatgactccttccaaattctcttccttcttatgtattacaacaaatataatttatccttmagttttaaaggtggatctggtgctacctaaatgtcaagtaatgtcattaatgtcaattaatgatgatgtagagtccttacaccagcacaagaaagccaatgaacaagtaagagttaagaaaactccccacagcacattaattaagaaagccaggctatgtaaaatgttattttgaaagaagccattttctgcagtgacataaaatttcataggctgttctgggcctccagataggacccatgtaataaggcatctctgccaaaccagccagaaaacagggaagtgagacagccatgggtcagaacccatagatataggaatggaaaactccagagagccctcctctaagatgtaaagccaccaatcgacagacagcctgccatatacaggaaagctgtcagtcatctttactaaatagggaggatacaacttccctcccctccaggccatagaaaactcaaattctttacaagtgtttttgagattcacatacaaaattatcaatgacaccatcaaaatggatgcctgcagatcttacaaacaaactagaagctagcctcatggttgctcagaaatgagggcatttaggcaaagctgggaactgaagatttgagcaggtgtgggtcagaccctggtgctcaaaataaatattctgccccagaagctctggactggaagggagggacccaagttctctgaaaggacaacagtgccacagccaaacagctcaagcagtttgctgtcaattaaccaccccctgtgtaatttcaggaaaatttattctgtaaattacagacatttttgacacttaactcagcaaaaaacagttgtccaacaatgattttatgtccaaataaacctgtcatctttattcttggccttttccttccctcgtacagaaaataaaaaggatcc

SEQ ID NO: 38074 - DNA, 1034 bp, Homo sapiens
tgttaaggcagaatcaaagcttacgctagcttctctagggagggctccctccctggcttcatgactccttccaaattctcttccttcttatgtattacaacaaatataatttatccttcrgttttaaaggtggatctggtgctacctaaatgtcaagtaatgtcattaatgtcaattaatgatgatgtagagtccttacaccagcacaagaaagccaatgaacaagtaagagttaagaaaactccccacagcacattaattaagaaagccaggctatgtaaaatgttattttgaaagaagccattttctgcagtgacataaaatttcataggctgttctgggcctccagataggacccatgtaataaggcatctctgccaaaccagccagaaaacagggaagtgagacagccatgggtcagaacccatagatataggaatggaaaactccagagagccctcctctaagatgtaaagccaccaatcgacagacagcctgccatatacaggaaagctgtcagtcatctttactaaatagggaggatacaacttccctcccctccaggccatagaaaactcaaattctttacaagtgtttttgagattcacatacaaaattatcaatgacaccatcaaaatggatgcctgcagatcttacaaacaaactagaagctagcctcatggttgctcagaaatgagggcatttaggcaaagctgggaactgaagatttgagcaggtgtgggtcagaccctggtgctcaaaataaatattctgccccagaagctctggactggaagggagggacccaagttctctgaaaggacaacagtgccacagccaaacagctcaagcagtttgctgtcaattaaccaccccctgtgtaatttcaggaaaatttattctgtaaattacagacatttttgacacttaactcagcaaaaaacagttgtccaacaatgattttatgtccaaataaacctgtcatctttattcttggccttttccttccctcgtacagaaaataaaaaggatcc

SEQ ID NO: 38075 - DNA, 1034 bp, Homo sapiens
tgttaaggcagaatcaaagcttacgctagcttctctagggagggctccctccctggcttcatgactccttccaaattctcttccttcttatgtattacaacaaatataatttatccttcagttttaaaggtggatctggtgctacctaaatgtcaagtaatgtcattaatgtcaattaatgatgatgtagagtccttacaccagcacaagaaagccaatgaacaagtaagagttaagaaaactccccacagcacattaattaagaaagccaggctatgtaaaatgttattttgaaagaagccattttctgcagtgacataaaatttcataggctgttctgggcctccagataggacccatgtaataaggcatctctgccaaaccagccagaaaacagggaagtgagacagccatgggtcagaacccatagatataggaatggaaaactccagagagccctcctctaagatgtaaagccaccaatcgacagacagcctgcyatatacaggaaagctgtcagtcatctttactaaatagggaggatacaacttccctcccctccaggccatagaaaactcaaattctttacaagtgtttttgagattcacatacaaaattatcaatgacaccatcaaaatggatgcctgcagatcttacaaacaaactagaagctagcctcatggttgctcagaaatgagggcatttaggcaaagctgggaactgaagatttgagcaggtgtgggtcagaccctggtgctcaaaataaatattctgccccagaagctctggactggaagggagggacccaagttctctgaaaggacaacagtgccacagccaaacagctcaagcagtttgctgtcaattaaccaccccctgtgtaatttcaggaaaatttattctgtaaattacagacatttttgacacttaactcagcaaaaaacagttgtccaacaatgattttatgtccaaataaacctgtcatctttattcttggccttttccttccctcgtacagaaaataaaaaggatcc

SEQ ID NO: 38076 - DNA, 571 bp, Homo sapiens
atttagaacagcattgtctgatacaaatataatgagaggcacatatgtaattttatatttcatagtatgcacatttaaaaagagaaacaagtaaaactaatcttaatgatatattttatgtagcctaatatatcaagaatatagtttcgacatgtaatcaactatgaagaattattaatatattttctattttttattcagactaaatctgccaaatccagtgtatattttatacttatagcacatattagtttagacacgcaggtttcattagaaatacttaatctgcatttagatttcataactttcataattgaaaaagtagactgacattcccaagttgttccaacatacttagcagtttcccaagaacagaaacaagcatcaattttttaaaaactttaattaccattatataaaatttaaagttcaccctgtcagttacrggcttatcaaatactaagtggctgcatgtggctagtagctagtggctatagtatttggcagcacatttctagaattttaattttctattttaaaagacaagattaaaatttcagtaaaaaattac

SEQ ID NO: 38077 - DNA, 2558 bp, Homo sapiens
cacgtgttgctatacttcctctgaaaagcattatcccaggatctggctcaagtcttattaagatcattcagaatgggatgaacaataaatatttgatggcattcttcctacagtcttttgaaaccaattctgaggagcccccagggtgttaacagtgatcaaattatgaaacaaaccattttttcacttgtaacagaaagttcctggcttcttgaacaggaatgaggtaaaactctgaggtcacatcagactacctcttacaaaaaggctgttgtgtctgtacctcttgtgtgccagaaggcagatgaagagcacagacaaatctgaggataaaatatgcccttgtaccaactaaaattttttttaaaaagtctgcctgaagagatgtggagaacaaaactatccagattctttacaatgtttactcaaatttgtaggtcaaggtgaaatgattgtgggccaaggtagttgagaggaatggtacaaataaggcaattaacatagaaaggctttcaaatagaatctaatcagcaaaattcacaggagtatttagaactaattataacatatctgttagaataattatctgaagtcacaactgatattatagttatttaaatatcaattaccaccacagattttgcagttatcagtaaaagctacaaagtcacatcaaatttcttgaagctaaatttataatcattataaaacttggaacttttactacgccccagagctttataaaatgagagacacaagccacttgttgctgttgctatgagacaaatgtttacatcacacatttctatagaaggaagaaaaatgacaggttcttaccaagtaatcatcaggcttgataccaaaaagttctctgaaatatcggaatgctaatggagcgtatgtcttaaatctaaagtctgggtagtgatgtgctggggtcagattgctcccttcgctgaagtcaaaatattaaaaagagagagaaagaaagaacacattagcaaggacaattttgaccgcaaattgtagctctattagtcctgggccaatgttatctctagaaaaatcatcccctgagagcgggtttctcaaagttcatgtcataaaggccaatgataaccaggcagaataagacgttagttagtgaggtcactccgtgcaggctttccctgtcaatcagtgtcacatgcctgaaaattcatttatccccttgtgccttcttcctgggaagatcactccattatcaccagtgtaaccacattgtaatgctttgggtaaaagatctaggccttagagtgtggagcaatttcaaaaatgcatttttttaaccacgaattttggatatttgacaaacattgttaaccagggataagtgaaataattyttaaaacatcctaccaacagagagaaccatcacatggaataggaccccaatctgaactcttttatttacattttccaaaaaaggagaccttacatatttaaaaaatttaaaacctgatttccattcctcaatatatcattatcttcttttcctttttctgggttcattttgaaaaattatacacaatatttatgatatataaaatgtacaaagaataaaccagtgaatatcaatgaatccaaaatgctgcttaagacataaaacattatccatacagttgaagccccttctgtactttttactgctcagatccatagagggatccactggcctaaatgttgatgtttatcaatctcatcctttttattctttgactccatacaatattacctaatacatgagctcagtcaaaccacctaagccactcattcttaaatttttcagtgtttttgttcttaaaattttcagaaaaattagaacaatgcaatagaattttatgtaaaggttcaaaatccctttgatctacattctaggtgggacattgagagcctatgcaagtttatcatggtctgctttttatggataccacacaaaaaggactgggcaaatgacaaaggctttcagcacagaataaacactttggatctactatagtttaagttgttcagatcaatcagattcttgcatcaatgcctggcacatagcagacactcaataagtatttgttgagtgaaggaatgagtcttcaacataatgttaacagagaagatttgattattacatggaatttacattagaaaatcaatatgtaaggcagaaattcagcatagtcacaggtcacccttgaaaactatttaggaagtatctattcaatataaccaacgcaactagtttttcctcctgcacgattacagatgactgtgtttttttttttttttttttttttttttttgctgagtaccagaggatggagctggcttgtgttgttaggggtcagcaccatataataaatggttatcttgaaaggctaggattacactcaggcagcagcccggctacacactaggagagtgacacagggactaagactgcctgagagaagagcagtcacatagtaaggaatgacccccaaatcatccactcattcaaatggttattgttgaatattcagtat

SEQ ID NO: 38078 - DNA, 2558 bp, Homo sapiens
cacgtgttgctatacttcctctgaaaagcattatcccaggatctggctcaagtcttattaagatcattcagaatgggatgaacaataaatatttgatggcattcttcctacagtcttttgaaaccaattctgaggagcccccagggtgttaacagtgatcaaattatgaaacaaaccattttttcacttgtaacagaaagttcctggcttcttgaacaggaatgaggtaaaactctgaggtcacatcagactacctcttacaaaaaggctgttgtgtctgtacctcttgtgtgccagaaggcagatgaagagcacagacaaatctgaggataaaatatgcccttgtaccaactaaaattttttttaaaaagtctgcctgaagagatgtggagaacaaaactatccagattctttacaatgtttactcaaatttgtaggtcaaggtgaaatgattgtgggccaaggtagttgagaggaatggtacaaataaggcaattaacatagaaaggctttcaaatagaatctaatcagcaaaattcacaggagtatttagaactaattataacatatctgttagaataattatctgaagtcacaactgatattatagttatttaaatatcaattaccaccacagattttgcagttatcagtaaaagctacaaagtcacatcaaatttcttgaagctaaatttataatcattataaaacttggaacttttactacgccccagagctttataaaatgagagacacaagccacttgttgctgttgctatgagacaaatgtttacatcacacatttctatagaaggaagaaaaatgacaggttcttaccaagtaatcatcaggcttgataccaaaaagttctctgaaatatcggaatgctaatggagcgtatgtcttaaatctaaagtctgggtagtgatgtgctggggtcagattgctcccttcgctgaagtcaaaatattaaaaagagagagaaagaaagaacacattagcaaggacaattttgaccgcaaattgtagctctattagtcctgggccaatgttatctctagaaaaatcatcccctgagagcgggtttctcaaagttcatgtcataaaggccaatgataaccaggcagaataagacgttagttagtgaggtcactccgtgcaggctttccctgtcaatcagtgtcacatgcctgaaaattcatttatccccttgtgccttcttcctgggaagatcactccattatcaccagtgtaaccacattgtaatgctttgggtaaaagatctaggccttagagtgtggagcaatttcaaaaatgcatttttttaaccacgaattttggatatttgacaaacattgttaaccagggataagtgaaataattcttaaaacatcctaccaacagagagaaccatcacatggaataggaccccaatctgaactcttttatttacattttccaaaaaaggagaccttacatatttaaaaaatttaaaacctgatttccattcctcaatatatcattatcttcttttcctttttctgggttcattttgaaaaattatacacaatatttatgatatataaaatgtacaaagaataaaccagtgaatatcaatgaatccaaaatgctgcttaagacataaaacattatccatacagttgaagccccttctgtactttttactgctcagatccatagagggatccactggcctaaatgttgatgtttatcaatctcatcctttttattctttgactccatacaatattacctaatacatgagctcagtcaaaccacctaagccactcattcttaaatttttcagtgtttttgttcttaaaattttcagaaaaattagaacaatgcaatagaattttatgtaaaggttcaaaatccctttgatctacattctaggtgggacattgagagcctatgcaagtttatcatggtctgctttttatggataccacacaaaaaggactgggcaaatgacaaaggctttcagcacagaataaacactttggatctactatagtttaagttgttsagatcaatcagattcttgcatcaatgcctggcacatagcagacactcaataagtatttgttgagtgaaggaatgagtcttcaacataatgttaacagagaagatttgattattacatggaatttacattagaaaatcaatatgtaaggcagaaattcagcatagtcacaggtcacccttgaaaactatttaggaagtatctattcaatataaccaacgcaactagtttttcctcctgcacgattacagatgactgtgtttttttttttttttttttttttttttttgctgagtaccagaggatggagctggcttgtgttgttaggggtcagcaccatataataaatggttatcttgaaaggctaggattacactcaggcagcagcccggctacacactaggagagtgacacagggactaagactgcctgagagaagagcagtcacatagtaaggaatgacccccaaatcatccactcattcaaatggttattgttgaatattcagtat

SEQ ID NO: 38079 - DNA, 591 bp, Homo sapiens
aaaggcctttgacaaaattcaaccaccttcatgctaaaaactctcaataaattaggtattgatgggacatatctcaaaataataagagctatctatgacaaacccacagccaatatcatactgaatgggcaaagactagaagcattycctttgaaaactggcacaagacagagatgccctctctcaccactcctattcaacatagtgttagaaattctggccagggcaatcaggcaggagaagcaaataaagggcattcaattaggaaaagagaaatcaaattgtccccgttgcagatgacatgatgtctatctagaaaaccccatcgtctcagcccaaaatctcctattatatttcttgcaagtctacaggtttatttcttgtacctgccagtatcatagtctcaagccagctgagatgttggcctttcctggggtatgcacaccattccaaatcaaattagcctcctccagctgtggagctgctcgtttcagggaatttttctccccttttagaactaccaaggtaatggaagctgaaagaggaggctttgctcaaaattacttcaattagctactttgttattaatga

SEQ ID NO: 38080 - DNA, 591 bp, Homo sapiens
aaaggcctttgacaaaattcaaccaccttcatgctaaaaactctcaataaattaggtattgatgggacatatctcaaaataataagagctatctatgacaaacccacagccaatatcatactgaatgggcaaagactagaagcattccctttgaaaactggcasaagacagagatgccctctctcaccactcctattcaacatagtgttagaaattctggccagggcaatcaggcaggagaagcaaataaagggcattcaattaggaaaagagaaatcaaattgtccccgttgcagatgacatgatgtctatctagaaaaccccatcgtctcagcccaaaatctcctattatatttcttgcaagtctacaggtttatttcttgtacctgccagtatcatagtctcaagccagctgagatgttggcctttcctggggtatgcacaccattccaaatcaaattagcctcctccagctgtggagctgctcgtttcagggaatttttctccccttttagaactaccaaggtaatggaagctgaaagaggaggctttgctcaaaattacttcaattagctactttgttattaatga

SEQ ID NO: 38081 - DNA, 591 bp, Homo sapiens
aaaggcctttgacaaaattcaaccaccttcatgctaaaaactctcaataaattaggtattgatgggacatatctcaaaataataagagctatctatgacaaacccacagccaatatcatactgaatgggcaaagactagaagcattccctttgaaaactggcacaagacagagatgccctctctcaccactcctattcaacatagtgttagaaattctggccagggcaatcaggcaggagaagcaaataaagggcattcaattaggaaaagagaaatcaaattgtccccgttgcagatgacatgatgtctatctagaaaaccccatcgtctcagcccaaaatctcctattatatttcttgcaagtctacaggtttatttcttgtacctgccagtatcatagtctcaagccagctgagatgttggcctttcctggggtatgcacaccattccaaatcaaattagcctcctccagctgtggagctgctcgtttcagggaatttttctccccttttagaactaccaasgtaatggaagctgaaagaggaggctttgctcaaaattacttcaattagctactttgttattaatga

SEQ ID NO: 38082 - DNA, 676 bp, Homo sapiens
ctgctctaacaggcctccaaagcaatattgccttccaatagggagaaagtccaacgaggagccaaaactttatatccacctatcctttaacattccctaaaccagtagattaaaacaagatccaggcctgcacccaaaagaaagctgaggcagtacataattattataatagacatgaaatcgttatcaaggaaaactctggactcccctcagtcaccaaatctatccaagtggcttttaattctatgttcataaatagtttagatgatgatcttacaattctaaataggttcaccttgaatgggaaacaatgcaatgtccacctctgattcagttaacctggccagccaattagcctaaacaatttgtaaggtggataaaktgagggcaaagaaaataatgaacctacagcttcaccatctttctatccctcataataaaacatggtactttaacactataaaactaaatgttaaaggagtctgccactactacaaaaagcctggacacggagtagggggagattgcatacaattaaaacaagataaatgaccccctttaataggccaccctctatgttccttatagactgagggtgctccaaaaaacctacaggcgatctttcaatcttgtctcttaatcatttgggtgcaacccctgtcatgatcagaaagga

SEQ ID NO: 38083 - DNA, 676 bp, Homo sapiens
ctgctctaacaggcctccaaagcaatattgccttccaatagggagaaagtccaacgaggagccaaaactttatatccacctatcctttaacattccctaaaccagtagattaaaacaagatccaggcctgcacccaaaagaaagctgaggcagtacataattattataatagacatgaaatcgttatcaaggaaaactctggactcccctcagtcaccaaatctatccaagtggcttttaattctatgttcataaatagtttagatgatgatcttacaattctaaataggttcaccttgaatgggaaacaatgcaatgtccacctctgattcagttaacctggccagccaattagcctaaacaatttgtaaggtggataaagtgagggcaaagaaaataatgaamctacagcttcaccatctttctatccctcataataaaacatggtactttaacactataaaactaaatgttaaaggagtctgccactactacaaaaagcctggacacggagtagggggagattgcatacaattaaaacaagataaatgaccccctttaataggccaccctctatgttccttatagactgagggtgctccaaaaaacctacaggcgatctttcaatcttgtctcttaatcatttgggtgcaacccctgtcatgatcagaaagga

SEQ ID NO: 38084 - DNA, 595 bp, Homo sapiens
cagttaggtctgccttatggtgtcagaaggaatacagattaagaaaaccttcatattgtctacaatgttgaatatgagattgaaagaagggtaggattttgccaggaggagcagcccaggcaaagaacagcatgagcaaaacaaggaagagtcaaaatgagctgttcacagaagtccagtatggctagatgtcagggaacaagtaagggaatggcaggaggtcaggtttggtcagatcactaggagctacccctgtgtgccttataaagtctggcctttacccttaacacaggtacaagtccaggtcctatttacctttgtatgattagcacccaacataatattgtaaaatatagccagctcgtcttccasgtatgtttgttgaatttattccatctttaaacacacacaagggattctcaggatcagatttgcatttcaggatctggctaaacactgaaatgaaagatactggtgaagataagctggcaagagattactacagagacatgggaggctttgaaatgtaggaatgaaaaaaaaaaggcccactttagaaacactgttggtgtgctcaagagaaagaagggaatgc

SEQ ID NO: 38085 - DNA, 548 bp, Homo sapiens
tctgttcagagattatgcaaaatgaatacatttatgagcactaaaataatcttatgtagctgagtaagctccaaatagagtatattctcaatttggaggaaccaagataataaaataatgctctaaarcagcagtgaaaagcaatacaaaatggtggctatatgcagaaatagtctattctaagaaggtccataaatgtttactgatgagcaccacatttctctattctccatcatgacatcatgatatatttgagaagacaacaccggaaatactaaggtaaagaaaccataaccatctcatctgcattatatctttttttatttttttgagatggagtctcgctctgtcacccagactggtgacaatcttatagagattggcttgcacaaatcaatttttatttatttatttgtttatttttgagatggagtctcactctgttgcctaggctgaagcacagtggcaggatctcggttcactgcaacctccgcctcccaggttcaagtgattctcctgcctcagcctcccaaggagctgggattaca

SEQ ID NO: 38086 - DNA, 1129 bp, Homo sapiens
caattactaagagaaaggcggtgctaattgctttagctgcatgatataattcactcctcacaagatacttgctgcagaggtggaaacagracgggaactacttgaatgtctgtcaattccactagaaagaatgaagtaaaaccaatcaatttccagttttgcataaccccattgtttcaccagaatgagattctgattagccaagcctaggggtatattcctgttctttgactatgctctgatggggagaaggatctggtaggagcctccagggacacagttgtcttcctagcaagagagccatgctgctgatctgtttcacaaaagcttctcccagagtaaaaaggtaacttccttgcagcaactcagagcaccattgaaaaggcaaaatgctgggtgcttaggaaaaatgcgaaacacacccagagaggttaaataagttattatccaagttcatataactacaaaatgttcatctgtagacaagaagacaggatgcctcaagctcggtgtatgttctgttacaacttgaactactgtgcagaaaccaaaagacacacacacaaggtcaatgtgttttaagatgtgagctgggctgggcgcggtggctcatgcctgtaatcccagcgctttgggaggctgaggtgggcggatcacctgagctcaggagttcaagaccagcctgatcaacatgatgaaaccccgtctctactaaaaatacaaaattagccaggcatggtggcgcacacctgtaatcccagggacttgggaggctgaggcaggagaatcgcttgaatccaggaggtggaggttgcagtgagctgcgattgcaccattgcactccagcctgggcaacaagaaccagactccatctcaaaaaaaaaaagagacgtgaactgatcaatttcatccttccttctccccattaagccagaaagtacttcagagaagccagggcttcaaaatgacaaacttgtgtcaagagaatattaattaaataaataacaaatggtaaagactttaacagactcatacaggtctggttttaaacgccccccttctgctacatagaacctgtgagggctgaattatactatgcagccaaagcaactagcttggtgcttttccc

SEQ ID NO: 38087 - DNA, 1129 bp, Homo sapiens
caattactaagagaaaggcggtgctaattgctttagctgcatgatataattcactcctcacaagatacttgctgcagaggtggaaacaggacgggaactacttgaatgtctgtcaattccactagaaagaatgaagtaaaaccaatcaatttccagttttgcataaccccattgtttcaccagaatgagattctgattagccaagcctaggggtatattcctgttctttgactatgctctgatggggagaaggatctggtaggagcctccagggacacagttgtcttcctagcaagagagccatgctgctgatctgtttcacaaaagcytctcccagagtaaaaaggtaacttccttgcagcaactcagagcaccattgaaaaggcaaaatgctgggtgcttaggaaaaatgcgaaacacacccagagaggttaaataagttattatccaagttcatataactacaaaatgttcatctgtagacaagaagacaggatgcctcaagctcggtgtatgttctgttacaacttgaactactgtgcagaaaccaaaagacacacacacaaggtcaatgtgttttaagatgtgagctgggctgggcgcggtggctcatgcctgtaatcccagcgctttgggaggctgaggtgggcggatcacctgagctcaggagttcaagaccagcctgatcaacatgatgaaaccccgtctctactaaaaatacaaaattagccaggcatggtggcgcacacctgtaatcccagggacttgggaggctgaggcaggagaatcgcttgaatccaggaggtggaggttgcagtgagctgcgattgcaccattgcactccagcctgggcaacaagaaccagactccatctcaaaaaaaaaaagagacgtgaactgatcaatttcatccttccttctccccattaagccagaaagtacttcagagaagccagggcttcaaaatgacaaacttgtgtcaagagaatattaattaaataaataacaaatggtaaagactttaacagactcatacaggtctggttttaaacgccccccttctgctacatagaacctgtgagggctgaattatactatgcagccaaagcaactagcttggtgcttttccc

SEQ ID NO: 38088 - DNA, 1129 bp, Homo sapiens
caattactaagagaaaggcggtgctaattgctttagctgcatgatataattcactcctcacaagatacttgctgcagaggtggaaacaggacgggaactacttgaatgtctgtcaattccactagaaagaatgaagtaaaaccaatcaatttccagttttgcataaccccattgtttcaccagaatgagattctgattagccaagcctaggggtatattcctgttctttgactatgctctgatggggagaaggatctggtaggagcctccagggacacagttgtcttcctagcaagagagccatgctgctgatctgtttcacaaaagcttctcccagagtaaaaaggtaacttccttgcagcaactcagagcaccattgaaaaggcaaaatgctgggtgcttaggaaaaatgcgaaacacacccagagaggttaaataagttattatccaagttcatataactacaaaatgttcatctgtagacaagaagacaggatgcctcaagctcggtgtatgttctgttacaacttgaactactgtgcagaaaccaaaagacacayacacaaggtcaatgtgttttaagatgtgagctgggctgggcgcggtggctcatgcctgtaatcccagcgctttgggaggctgaggtgggcggatcacctgagctcaggagttcaagaccagcctgatcaacatgatgaaaccccgtctctactaaaaatacaaaattagccaggcatggtggcgcacacctgtaatcccagggacttgggaggctgaggcaggagaatcgcttgaatccaggaggtggaggttgcagtgagctgcgattgcaccattgcactccagcctgggcaacaagaaccagactccatctcaaaaaaaaaaagagacgtgaactgatcaatttcatccttccttctccccattaagccagaaagtacttcagagaagccagggcttcaaaatgacaaacttgtgtcaagagaatattaattaaataaataacaaatggtaaagactttaacagactcatacaggtctggttttaaacgccccccttctgctacatagaacctgtgagggctgaattatactatgcagccaaagcaactagcttggtgcttttccc

SEQ ID NO: 38089 - DNA, 1129 bp, Homo sapiens
caattactaagagaaaggcggtgctaattgctttagctgcatgatataattcactcctcacaagatacttgctgcagaggtggaaacaggacgggaactacttgaatgtctgtcaattccactagaaagaatgaagtaaaaccaatcaatttccagttttgcataaccccattgtttcaccagaatgagattctgattagccaagcctaggggtatattcctgttctttgactatgctctgatggggagaaggatctggtaggagcctccagggacacagttgtcttcctagcaagagagccatgctgctgatctgtttcacaaaagcttctcccagagtaaaaaggtaacttccttgcagcaactcagagcaccattgaaaaggcaaaatgctgggtgcttaggaaaaatgcgaaacacacccagagaggttaaataagttattatccaagttcatataactacaaaatgttcatctgtagacaagaagacaggatgcctcaagctcggtgtatgttctgttacaacttgaactactgtgcagaaaccaaaagacacacacacaaggtcratgtgttttaagatgtgagctgggctgggcgcggtggctcatgcctgtaatcccagcgctttgggaggctgaggtgggcggatcacctgagctcaggagttcaagaccagcctgatcaacatgatgaaaccccgtctctactaaaaatacaaaattagccaggcatggtggcgcacacctgtaatcccagggacttgggaggctgaggcaggagaatcgcttgaatccaggaggtggaggttgcagtgagctgcgattgcaccattgcactccagcctgggcaacaagaaccagactccatctcaaaaaaaaaaagagacgtgaactgatcaatttcatccttccttctccccattaagccagaaagtacttcagagaagccagggcttcaaaatgacaaacttgtgtcaagagaatattaattaaataaataacaaatggtaaagactttaacagactcatacaggtctggttttaaacgccccccttctgctacatagaacctgtgagggctgaattatactatgcagccaaagcaactagcttggtgcttttccc

SEQ ID NO: 38090 - DNA, 1129 bp, Homo sapiens
caattactaagagaaaggcggtgctaattgctttagctgcatgatataattcactcctcacaagatacttgctgcagaggtggaaacaggacgggaactacttgaatgtctgtcaattccactagaaagaatgaagtaaaaccaatcaatttccagttttgcataaccccattgtttcaccagaatgagattctgattagccaagcctaggggtatattcctgttctttgactatgctctgatggggagaaggatctggtaggagcctccagggacacagttgtcttcctagcaagagagccatgctgctgatctgtttcacaaaagcttctcccagagtaaaaaggtaacttccttgcagcaactcagagcaccattgaaaaggcaaaatgctgggtgcttaggaaaaatgcgaaacacacccagagaggttaaataagttattatccaagttcatataactacaaaatgttcatctgtagacaagaagacaggatgcctcaagctcggtgtatgttctgttacaacttgaactactgtgcagaaaccaaaagacacacacacaaggtcaatgtgttttaagatgtgarctgggctgggcgcggtggctcatgcctgtaatcccagcgctttgggaggctgaggtgggcggatcacctgagctcaggagttcaagaccagcctgatcaacatgatgaaaccccgtctctactaaaaatacaaaattagccaggcatggtggcgcacacctgtaatcccagggacttgggaggctgaggcaggagaatcgcttgaatccaggaggtggaggttgcagtgagctgcgattgcaccattgcactccagcctgggcaacaagaaccagactccatctcaaaaaaaaaaagagacgtgaactgatcaatttcatccttccttctccccattaagccagaaagtacttcagagaagccagggcttcaaaatgacaaacttgtgtcaagagaatattaattaaataaataacaaatggtaaagactttaacagactcatacaggtctggttttaaacgccccccttctgctacatagaacctgtgagggctgaattatactatgcagccaaagcaactagcttggtgcttttccc

SEQ ID NO: 38091 - DNA, 717 bp, Homo sapiens
ttttaataagctcccaaaataaataaataaataaacatacatacatttacaaacagtctctgaaatgcaatgcagtggcctccccagtcttcccttctaggaaagcaagtggatggtggaatgtggcaaaagttgcccctcattctgcctttctcattatgtcattgccctgcatccaacccatcaataacatcttcagttggctcaggcccacctctgcagccctcacctcctgccccctgccacaaaccactgttagctttgcaagagccacttgcactctctcgcacctgcacctgtctkgcataatctgccccctcactatgtctgctgagcacattcctatttcaccatcaaaacccatctcagaattcaccgcattcagaagcgcttccttcacccctcccaccccattaccaccaccgggatgaagcagacctcctctgcactggagtaataccatgtacttgctgccatcataagccttactcgtgtcctattgtagttgatggttattaatctctctcccatgtgagtttttacgagcagggatttttcattcctgtattgcagacgtagtgcagagctagactgtggaagacactcaatgaatacatgctgaatgaaaagagagatactcccgagtttttcagcattagatgtgcctttacctagcctctctcgaacagagcatctgtcattatgccaccaagaggg

SEQ ID NO: 38092 - DNA, 717 bp, Homo sapiens
ttttaataagctcccaaaataaataaataaataaacatacatacatttacaaacagtctctgaaatgcaatgcagtggcctccccagtcttcccttctaggaaagcaagtggatggtggaatgtggcaaaagttgcccctcattctgcctttctcattatgtcattgccctgcatccaacccatcaataacatcttcagttggctcaggcccacctctgcagccctcacctcctgccccctgccacaaaccactgttagctttgcaagagccacttgcactctctcgcacctgcacctgtctggcataatctgccccctcactatgtctgctgagcacattcctatttcaccatcaaaacccatctcagaattcaccgcattcagaagcrcttccttcacccctcccaccccattaccaccaccgggatgaagcagacctcctctgcactggagtaataccatgtacttgctgccatcataagccttactcgtgtcctattgtagttgatggttattaatctctctcccatgtgagtttttacgagcagggatttttcattcctgtattgcagacgtagtgcagagctagactgtggaagacactcaatgaatacatgctgaatgaaaagagagatactcccgagtttttcagcattagatgtgcctttacctagcctctctcgaacagagcatctgtcattatgccaccaagaggg

SEQ ID NO: 38093 - DNA, 717 bp, Homo sapiens
ttttaataagctcccaaaataaataaataaataaacatacatacatttacaaacagtctctgaaatgcaatgcagtggcctccccagtcttcccttctaggaaagcaagtggatggtggaatgtggcaaaagttgcccctcattctgcctttctcattatgtcattgccctgcatccaacccatcaataacatcttcagttggctcaggcccacctctgcagccctcacctcctgccccctgccacaaaccactgttagctttgcaagagccacttgcactctctcgcacctgcacctgtctggcataatctgccccctcactatgtctgctgagcacattcctatttcaccatcaaaacccatctcagaattcaccgcattcagaagcgcttccttcacccctcccaccccattaccaccaccgggatgaagcagacctcctctgcactggagtaataccatgtacttgctgccatyataagccttactcgtgtcctattgtagttgatggttattaatctctctcccatgtgagtttttacgagcagggatttttcattcctgtattgcagacgtagtgcagagctagactgtggaagacactcaatgaatacatgctgaatgaaaagagagatactcccgagtttttcagcattagatgtgcctttacctagcctctctcgaacagagcatctgtcattatgccaccaagaggg

SEQ ID NO: 38094 - DNA, 717 bp, Homo sapiens
ttttaataagctcccaaaataaataaataaataaacatacatacatttacaaacagtctctgaaatgcaatgcagtggcctccccagtcttcccttctaggaaagcaagtggatggtggaatgtggcaaaagttgcccctcattctgcctttctcattatgtcattgccctgcatccaacccatcaataacatcttcagttggctcaggcccacctctgcagccctcacctcctgccccctgccacaaaccactgttagctttgcaagagccacttgcactctctcgcacctgcacctgtctggcataatctgccccctcactatgtctgctgagcacattcctatttcaccatcaaaacccatctcagaattcaccgcattcagaagcgcttccttcacccctcccaccccattaccaccaccgggatgaagcagacctcctctgcactggagtaataccatgtacttgctgccatcataagccttactygtgtcctattgtagttgatggttattaatctctctcccatgtgagtttttacgagcagggatttttcattcctgtattgcagacgtagtgcagagctagactgtggaagacactcaatgaatacatgctgaatgaaaagagagatactcccgagtttttcagcattagatgtgcctttacctagcctctctcgaacagagcatctgtcattatgccaccaagaggg

SEQ ID NO: 38095 - DNA, 551 bp, Homo sapiens
accctacacctaggctggagtatagtggcacaatcatagctcactgcagcctcaaattcctgggctcaagcaatcctcctgcctcagcctctgagtagctgggactacaggctaattagtcatactcagctaatttctctattttttggagggatggggtctcgctgtgttgctcaggctggtctcaaacctcccaaagtgctgggattacacgtatgagccactatgcctggcctatatatatatgtatgtgtgtgtgtgtgtgtgtgtgtgtaatatatatatatatatatatatatwttttttttactatcaaattgctcctcctgagcccagtccattttctgggtacagggctacagacagaccatctttgaaatgccagtggacagatgttatcacagggcatgtttccaccgatgggtccatgcctcgcacctggagcacagcagtgaggtggggaagttggagaatatgagtgctgatgtcttgtcctccttttcacagctgccgcgaatccctcagatgaatcctatcctcatccatgcatc

SEQ ID NO: 38096 - DNA, 551 bp, Homo sapiens
accctacacctaggctggagtatagtggcacaatcatagctcactgcagcctcaaattcctgggctcaagcaatcctcctgcctcagcctctgagtagctgggactacaggctaattagtcatactcagctaatttctctattttttggagggatggggtctcgctgtgttgctcaggctggtctcaaacctcccaaagtgctgggattacacgtatgagccactatgcctggcctatatatatatgtatgtgtgtgtgtgtgtgtgtgtgtgtaatatatatatatatatatatatwttttttttttactatcaaattgctcctcctgagcccagtccattttctgggtacagggctacagacagaccatctttgaaatgccagtggacagatgttatcacagggcatgtttccaccgatgggtccatgcctcgcacctggagcacagcagtgaggtggggaagttggagaatatgagtgctgatgtcttgtcctccttttcacagctgccgcgaatccctcagatgaatcctatcctcatccatgcatc

SEQ ID NO: 38097 - DNA, 516 bp, Homo sapiens
  misc_feature (1)...(516): n = A,T,C or G
tgggaggccaaggtgggcagatcacttgaggtcaggagttcaagatgagcctggccaacatggcgaaatcccgtctctactaaaaatacaaaaattagctgggcatgatggcaggcgcctgtaattccagctactcgggaggctgaggcaggagaatcacttgaaccggagaggaggagattgcagtgagatcgtgccattgcactccagcctaggggacagagcgagattctgtctcaaaaacaaaacaaaacaaaacanaaaacctagagtttaagcatcttgccaaagtcagagagctagaaattggagggctgagattcaacaccgggcttttcccatctccaaaccccatttgcttttgtttttgttctccacccaccactgattaatttttatgccagtattccttcattgttttttcatgtgtgaaaagggggctacaaaaragttagtaaaacaatttttaccttcattaaggtgaaatgaacaaatatgaaaatgttttggaagaaa

SEQ ID NO: 38098 - DNA, 618 bp, Homo sapiens
agaaactatatttcagtggttatccttttttaaaaataagtaataatgaatatttagaaccagaacagttttttaagaaggaaaatacctaaaatctgaactgtaatcttctatgtttttatgacattatgtgaatcaaaggggttttccttttaagtaaaagaaaaggtcaggagtatgaaatcctaagccctcttcctccccctataaaaccccacaggttcacttgtagaaaaaaattgcaaatggggaagaaaaatgcttttagctagaaaagttagttttggatttrtgtattcagtaagagaacatgttgaagtttttattagatgcaagaaaatgtctctaaagtaaaatcctttgtgttgacattagattttttattgtattatagtaactttattccaacttttttttgtttagcatttaacagaagagaaacctgatggccttatcaatgaagctactaggtattcatatttaaagtatatattgattgctggctaattgtaaagagaaaaatcactaagatgaaaaccaaaaacaaactaagaaattttaaaacatagtcaaggaaaatttattttctttttttcccttagttgaattattgctatc

SEQ ID NO: 38099 - DNA, 529 bp, Homo sapiens
caaatgctaaaatatcattggaayattactttagattagaaaatattttattaataattcagacagtgtgatatggtttggctgtgtcccccccaaacctcatcttgaattgtagttcccataatccccacatgttacccagtgggaggtaattgaatcatgggggcggttagcccatgctgctattctcataatagtgagtgagttctcatgagatctgatggttttatccaggacttttcccccttttgctcagcacctctccttgctgctgccatgtgaagaaggatgtgtttgcttcccgttccgccatgattgtaagtttcctgaggcctccccgaactatgagtcaattaaatctctttcgtttataaatagccgagcactgtgagaatggactaataaatacgagtgtcttaatccattttgcattgttataaaggaatatctgaggctgggtaatttaataaaataagacatttatttgactcacggttcttcaggctctgcaagaagcatggcaccagca

SEQ ID NO: 38100 - DNA, 529 bp, Homo sapiens
caaatgctaaaatatcattggaatattactttagattagaaaatattttattaataattcagacagtgtgatatggtttggctgtgtcccccccaaayctcatcttgaattgtagttcccataatccccacatgttacccagtgggaggtaattgaatcatgggggcggttagcccatgctgctattctcataatagtgagtgagttctcatgagatctgatggttttatccaggacttttcccccttttgctcagcacctctccttgctgctgccatgtgaagaaggatgtgtttgcttcccgttccgccatgattgtaagtttcctgaggcctccccgaactatgagtcaattaaatctctttcgtttataaatagccgagcactgtgagaatggactaataaatacgagtgtcttaatccattttgcattgttataaaggaatatctgaggctgggtaatttaataaaataagacatttatttgactcacggttcttcaggctctgcaagaagcatggcaccagca

SEQ ID NO: 38101 - DNA, 529 bp, Homo sapiens
caaatgctaaaatatcattggaatattactttagattagaaaatattttattaataattcagacagtgtgatatggtttggctgtgtcccccccaaacctcatcttgaattgtagttcccataatccccacatgttacccagtgggaggtaattgaatcatgggggcggttagcccatgctgctattctcatratagtgagtgagttctcatgagatctgatggttttatccaggacttttcccccttttgctcagcacctctccttgctgctgccatgtgaagaaggatgtgtttgcttcccgttccgccatgattgtaagtttcctgaggcctccccgaactatgagtcaattaaatctctttcgtttataaatagccgagcactgtgagaatggactaataaatacgagtgtcttaatccattttgcattgttataaaggaatatctgaggctgggtaatttaataaaataagacatttatttgactcacggttcttcaggctctgcaagaagcatggcaccagca

SEQ ID NO: 38102 - DNA, 529 bp, Homo sapiens
caaatgctaaaatatcattggaatattactttagattagaaaatattttattaataattcagacagtgtgatatggtttggctgtgtcccccccaaacctcatcttgaattgtagttcccataatccccacatgttacccagtgggaggtaattgaatcatgggggcggttagcccatgctgctattctcataatagtgagkgagttctcatgagatctgatggttttatccaggacttttcccccttttgctcagcacctctccttgctgctgccatgtgaagaaggatgtgtttgcttcccgttccgccatgattgtaagtttcctgaggcctccccgaactatgagtcaattaaatctctttcgtttataaatagccgagcactgtgagaatggactaataaatacgagtgtcttaatccattttgcattgttataaaggaatatctgaggctgggtaatttaataaaataagacatttatttgactcacggttcttcaggctctgcaagaagcatggcaccagca

SEQ ID NO: 38103 - DNA, 530 bp, Homo sapiens
agaatcacttgaacccaggaggtggaggttgcagtgacccgagatcgtgccactgcactccatcctgggtgacagaatgagactccgtctcaaaaaaaaaaaaaaaaaaaaaaagagagagagaaaagaattccaacccagaattctcaacttcactgtgtcagaggatatgaagtaaacaaatattcatctctacatttgccagtccctgtggacttagrccagatagtataaataatagtcacaaaaggagtatgaatgggataagaagccacttctagtctgagacaattaagagtagtagtgccttctctgcactctcaccccctcattctgacagctgaagtgaaggactcccaacttctggaactgcccaatgaaagtagccttgtgtgagtgttagctggcctgctttggtctgggatgcaagtagaaataaactcctctcatattaagccactaagactttagggatatgttgctgtagcatagcctaatatagcctgattactgaacgagccaccccatca

SEQ ID NO: 38104 - DNA, 530 bp, Homo sapiens
agaatcacttgaacccaggaggtggaggttgcagtgacccgagatcgtgccactgcactccatcctgggtgacagaatgagactccgtctcaaaaaaaaaaaaaaaaaaaaaaagagagagagaaaagaattccaacccagaattctcaacttcactgtgtcagaggatatgaagtaaacaaatattcatctctacatttgccagtccctgtggacttagaccagatagtataaataatagtcacaaaaggagtatgaatgggataagaagccacttctagtctgagacaattaagagtagtagtgccttctctgcactctcaccccctcattctgacagctgaagtgaaggactcccaacttctggaactgcccaatgaaagtagccttgtgtgagtgttagctggcctgctttggtctgggatgcaagtagaaataaactcctctcatattaagccactaagactttagggatatgttgctgtagcatagcctaatrtagcctgattactgaacgagccaccccatca

SEQ ID NO: 38105 - DNA, 674 bp, Homo sapiens
ttgacttattactggaatttaattaaatggcagcactggcaagagaaaaaaacagtacattgttttattgagtagtatttgtgaactgaaataggttagttttaattttcattttgaagtatggttgtacaaatattaataaacattctttttaaaaagtgattaaaatgttttttcctttgtaggtatcataactattgtggattcaaaatatggattaaaagtaagttgaaagattgctatgagtggstcattattgagagctgggaatatggggattgattgtttaattttctttatgtttgtatctgaaattttctttaacaaaaacctttctcaaaaagatatcctgaacaataggtgaaatttgtgttttaattattagtttgtgttaaatatttcttttctattactctgagtttgatttggtgataaaatttggaattataatttgtaataagcatatggggttagggtagagtttggtatgtataactcttcacaaggattcaaccccaatattggtaagtttttctgttccatagaagaagctgagcttgataaagcatctgagatcttatttttcttgttaaattactattaaacacacactggaaatgagtttttaaaaaatattgaagacctaggtgatgggttaataggtgcaggaaacc

SEQ ID NO: 38106 - DNA, 533 bp, Homo sapiens
ttaaaaaatattttgcaaaaattttttcttcatttacttatacaggtggaatagaatgccaaaatttccattttgttttattttataaatgaaagtcatctgacttaatgaccaaatggtatagaatgtattattggagaatgttcttttgaatagaagacattgattttatactttttgcagagtttgacttgggaaggtaggaagtcacatgagggaagtgcagggctgatatctaaagaaaataaatgttaatatgcacttattttttaaatgtttgtatggctttcctatgggcatagaagaggacatttatctcttctgctataatggtatatgattacatataattttaatacagctgtaaatattggcaggctctcatttggggtgattttcatttatttttatakttgatactttctgactgcctggaagtagtaaaacgttagtctaccactgttagctttgagtgaagaattctaatattttggagaggtaaatgcatttaaaacattgcacattaccttgtg

SEQ ID NO: 38107 - DNA, 2360 bp, Homo sapiens
tcgatattgcaatttaaatgcttccttgaatttaccttattcttttatatagaatggtacacttttctaaaacatggactgtatttcatacttctgtttatttcttagcatgatcctttgcatttcatcttttagatttctttatgccatctgttaactgaacaatgaatagttattgaattgargctgtcacatattgagtctttaatgagtaatgcatatagtctttcacatcaaaaccaggactgagggcacctgtgtcaagcttttcaagcagcagcaatcatgacataaggcaacacaaaaaccatagtggaagacattgacaaacatctttgggtatcttctaagtacccagtaaaagctaggcattggggataaaatgtgatataagccttttactccaaagcactaggttcttggaggtactatggttttgatttctaaagtcaatatatgtctgtcctcatatagtctctgaaatgtgttaaaatacatgattacaaaacagtcataaatacacacactgaaactactctgggtacttccataaaaccagagcaatatcatctggccacccacactggtaaattgcctcagatgattctgtacatgtgtagacgctctatgcccaagactttatcatttcaaaggaacaaatgaaaactgataggcaccaaagatagcccagtcttttctgttggccctgtttgttgattgttgatgatgtactacaatgaagacacatatttggcttgtgagctttctttaattgttatctaagaccaaaaaaaatagttgttaattaacaaaatttttcattttattcatacgtcagacaaaatttgcccacttaggaattttgttcaaaagaaatgtagttttgttgaactctgtataaatttagaaaaatctgagtcaagttgtgggtgccccttggataattcttgagtaaatgcatcccctcatgactaggaatttgcaagagatgcatactttcattcagaaaccacccaacatctgatggtctcttttgatttggctttaatcaggaaaaaaaaatcttctcgagcaacttgatacattcgggttaaaactcaaagaaacacttgagatgaaaatgcattctgttttagcccaactaaagatttcacaaactccttgcaaattggttctatgctcatactctggtatctcctgtatctctatgataaactcagcccaatgaatcaagtgctacacacatatgaaatggcatgtaaaagataacagggaaatataactacctaaataattttgtttataatttagtcctaccgtttatagagaaatataaaagacactacatttctaggaagaaacagctgaacaatagattagccattcttcctctggaataattcattgtctacaagctaatacgtttctggacctgggtaggtgtattccataggaccccacgatatgcgctcatatactagcatgctactcagggaattatttcttaatctgacagactcgtaacatataaaatcaagattagagctaggtgtcaaagggcagagctaagtgattaaactaagttccttttgaagacagacatgaggaattccaaactgtccaactctgcttttgttggaaggtgcacaacccatttaagataccacatttttgttccttttggttttactctgtaattatttatatattgtgtcgggtcctctgctaggtataggagttataatgatgaataagacatgagcctatctttgagataaaggtacaactggccatggatacacaacaaagcttatatggtcagcttcagtctgtttttcaggctcagtagctctgtctagaggctgggctcacgaatccccctctaggctactactcctagctcttttgttctcaggatcaattctgatcagatccaaagtgactgaacactccctggttggtaatcaatcctcctaggccagagcaaccacttgctttccaagtactcataaatgccaatgactagacttagctctttacattgtttgcttaaatcctcactataaaccaacagttttattatgcccattttagagaatcagaaactgagagtctgagaggttacattatctttctccaagtcacacagttaagtgaatgacagaggtggatttgagcctagatgtgtacgggacctcaaaacctatttttccaggaattccaggcctgtctctaaaccccagctgggttcagcagcttactctcagttctcactgatgctcaccctctcccttcctactgcctcaccttccaagaaccagtattccagattcccagtggctgtcaaccatctcctccat

SEQ ID NO: 38108 - DNA, 2360 bp, Homo sapiens
tcgatattgcaatttaaatgcttccttgaatttaccttattcttttatatagaatggtacacttttctaaaacatggactgtatttcatacttctgtttatttcttagcatgatcctttgcatttcatcttttagatttctttatgccatctgttaactgaacaatgaatagttattgaattgaagctgtcacatattgagtctttaatgagtaatgcatatagtctttcacatcaaaaccaggactgagggcacctgtgtcaagcttttcaagcagcagcaatcatgacataaggcaacacaaaaaccatagtggaagacattgacaaacatctttgggtatcttctaagtacccagtaaaagctaggcattggggataaaatgtgatataagccttttactccaaagcactaggttcttggaggtactatggttttgatttctaaagtcaatatatgtctgtcctcatatagtctctgaaatgtgttaaaatacatgattacaaaacagtcataaatacacacactgaaactactctgggtacttccataaaaccagagcaatatcatctggccacccacactggtaaattgcctcagatgattctgtacatgtgtagacgctctatgcccaagactttatcatttcaaaggaacaaatgaaaactgataggcaccaaagatagcccagtcttttctgttggccctgtttgttgattgttgatgatgtactacaatgaagacacatatttggcttgtgagctttctttaattgttatctaagaccaaaaaaaatagttgttaattaacaaaatttttcattttattcatacgtcagacaaaatttgcccacttaggaattttgttcaaaagaaatgtagttttgttgaactctgtataaatttagaaaaatctgagtcaagttgtgggtgccccttggataattcttgagtaaatgcatcccctcatgactaggaatttgcaagagatgcatactttcattcagaaaccacccaacatctgatggtctcttttgatttggctttaatcaggaaaaaaaaatcttctcgagcaacttgatacattcgggttaaaactcaaagaaacacttgagatgaaaatgcattctgttttagcccaactaaagatttcacaaactccttgcaaattggttctatgctcatactctggtatctcctgtatctctatgataaactcagcccmatgaatcaagtgctacacacatatgaaatggcatgtaaaagataacagggaaatataactacctaaataattttgtttataatttagtcctaccgtttatagagaaatataaaagacactacatttctaggaagaaacagctgaacaatagattagccattcttcctctggaataattcattgtctacaagctaatacgtttctggacctgggtaggtgtattccataggaccccacgatatgcgctcatatactagcatgctactcagggaattatttcttaatctgacagactcgtaacatataaaatcaagattagagctaggtgtcaaagggcagagctaagtgattaaactaagttccttttgaagacagacatgaggaattccaaactgtccaactctgcttttgttggaaggtgcacaacccatttaagataccacatttttgttccttttggttttactctgtaattatttatatattgtgtcgggtcctctgctaggtataggagttataatgatgaataagacatgagcctatctttgagataaaggtacaactggccatggatacacaacaaagcttatatggtcagcttcagtctgtttttcaggctcagtagctctgtctagaggctgggctcacgaatccccctctaggctactactcctagctcttttgttctcaggatcaattctgatcagatccaaagtgactgaacactccctggttggtaatcaatcctcctaggccagagcaaccacttgctttccaagtactcataaatgccaatgactagacttagctctttacattgtttgcttaaatcctcactataaaccaacagttttattatgcccattttagagaatcagaaactgagagtctgagaggttacattatctttctccaagtcacacagttaagtgaatgacagaggtggatttgagcctagatgtgtacgggacctcaaaacctatttttccaggaattccaggcctgtctctaaaccccagctgggttcagcagcttactctcagttctcactgatgctcaccctctcccttcctactgcctcaccttccaagaaccagtattccagattcccagtggctgtcaaccatctcctccat

SEQ ID NO: 38109 - DNA, 1112 bp, Homo sapiens
tccttttacccactgccaaagaggtaaaggagttctagatcctgactttggagcttcttccctcagtgtaagataatcagtgtcgccgtgaatcttcccatgtttctatacctttaaaataagacacacagtgataatcaaccccgtctctgtcattgccctgttagctacagggtagttctgccagtcacttgccaatcaatttcacagaatgtaggttgtgcctcacccaattcatctcctaattaatgaagtgacaaaattttgacattttgttggcttctctggctctcgtgggaatttggggaaaaggattgaaggaggctgagaaggagaagagtgaacaagaagagaagaagatgcacttaacgggtttttgctaatttttagttaataaaaattttgtaaataaataatattttctgattatgaaagcaatatacgttcagtgagaaaatctttttwaaatactggaaaacataaataataaaataaaaaccactttatttaagtttcatcagtttcattttgatataaaacctcaatgccatctaccttaaatgattaggtaatatgttagctcatcccaaaattggggcaaactttactgttattttgattcagagacttaacagtgttaccagttacaaggtctcattccacctctctactctgcctcctgtgtggcagttcaccctaaggcttgctttcccctgggagacaaaatctctttcaatattacccaggacttcatgcttcctcatccatgtccagggagcaagaatgggtatccctcatccaaaaactgaataaaagactttcaattatctctcattagaccaaataaagttatatgcctgtctccaagccaggcaatcaggccaagatattggggaggtagggaaatgttggtcaaaggatacacaatttcagttctgtaggatggataagttctagagattgaaggtacagcatggggcctacagttaatattgctgtattgtatacttgaacttggttagagagtagattttgtgttctcatcacacacacacaaaaggtaactatgagaagagatgatatattaatcagtttgactgcagtaattagtt

SEQ ID NO: 38110 - DNA, 1282 bp, Homo sapiens
catgtctcgctctgtcacccaggttggagtataatggtgcaatcatggctcactgcagcctcaaacttctgagctcaagcaatccttctccctcagcctccccaatagctgggactatagatgagcactaccacatccaggtaattaaaattttttttttttagaaacaagatctcactatttgtccaggctggccttgaactcctgggctcaggtgatcttccctccccagcctcccaaagtgctgggattacaggtgtgaaccactgtacccagtctgtcttaattcagtgtttaattaygttattgtttcaattcttccttaaaaaggatggtctcaaatataagatcttactatatatttagaacttagaatattttctgatacctattaagtatcagtaaatattttttgaatgaacaaataaaaagacgatgttaaaaagagtagcaaactttggagacctagcaagccagaatatggagtttgaatatttttctaagagcaataaatgaaatgaacaaatataataatttatagtatatctcccactagtgtcttttattgcatttcagagttctgtgtctcaaattttgtaggtaagtcatatttcaggaagtgaaatttcgttgataattcatggtcagtcgtgtgaacataattttcatttgtatgacaattgtggaaggttcacattccgggaaccagagatgggggtggtaaggaaggggtagaagtgagaatctgggaacagtttgatttggtgtggtagccatcctgacactttccacccctgagtacttattttattttaaatctcaagggctcattccattagtgttttgatttttttaaaaggtgcagcgtgtttaacctgttctccatttcagcgatgttctctttgagaacacagagccagcacattacttaaaacagcaaagtgtcatgattcaatagtcataacttttcttcctattaataatagtttcgcccctgaatcatacctacatgtcaatcacatcaatagactagaaaaatgatgtttggcaacattacaaaacacaggcatcttggagtctggttattttctattttgtaaacctttaatactgagctaaaatctataataaatctcaaacataatcaataaggatatattacattctgttaaaaaatttagtgtaaatctttcaatctttacaaattttgaccttatggtggtgtagacagatgaattgtaaattaggtgtttttaaaacacatatatttttaattaatgca

SEQ ID NO: 38111 - DNA, 1282 bp, Homo sapiens
catgtctcgctctgtcacccaggttggagtataatggtgcaatcatggctcactgcagcctcaaacttctgagctcaagcaatccttctccctcagcctccccaatagctgggactatagatgagcactaccacatccaggtaattaaaattttttttttttagaaacaagatctcactatttgtccaggctggccttgaactcctgggctcaggtgatcttccctccccagcctcccaaagtgctgggattacaggtgtgaaccactgtacccagtctgtcttaattcagtgtttaattacgttattgtttcaattcttccttaaaaaggatggtctcaaatataagatcttactatatatttagaacttagaatattttctgatacctattaagtatcagtaaatattttttgaatgaacaaataaaaagacgatgttaaaaagagtagcaaactttggagacctagcaagccagaatatggagtttgaatatttttctaagagcaataaatgaaatgaacaaatataataatttatagtatatctcccactagtgtcttttattgcatttcagagttctgtgtctcaaattttgtaggtaagtcatatttcagkaagtgaaatttcgttgataattcatggtcagtcgtgtgaacataattttcatttgtatgacaattgtggaaggttcacattccgggaaccagagatgggggtggtaaggaaggggtagaagtgagaatctgggaacagtttgatttggtgtggtagccatcctgacactttccacccctgagtacttattttattttaaatctcaagggctcattccattagtgttttgatttttttaaaaggtgcagcgtgtttaacctgttctccatttcagcgatgttctctttgagaacacagagccagcacattacttaaaacagcaaagtgtcatgattcaatagtcataacttttcttcctattaataatagtttcgcccctgaatcatacctacatgtcaatcacatcaatagactagaaaaatgatgtttggcaacattacaaaacacaggcatcttggagtctggttattttctattttgtaaacctttaatactgagctaaaatctataataaatctcaaacataatcaataaggatatattacattctgttaaaaaatttagtgtaaatctttcaatctttacaaattttgaccttatggtggtgtagacagatgaattgtaaattaggtgtttttaaaacacatatatttttaattaatgca

SEQ ID NO: 38112 - DNA, 1282 bp, Homo sapiens
catgtctcgctctgtcacccaggttggagtataatggtgcaatcatggctcactgcagcctcaaacttctgagctcaagcaatccttctccctcagcctccccaatagctgggactatagatgagcactaccacatccaggtaattaaaattttttttttttagaaacaagatctcactatttgtccaggctggccttgaactcctgggctcaggtgatcttccctccccagcctcccaaagtgctgggattacaggtgtgaaccactgtacccagtctgtcttaattcagtgtttaattacgttattgtttcaattcttccttaaaaaggatggtctcaaatataagatcttactatatatttagaacttagaatattttctgatacctattaagtatcagtaaatattttttgaatgaacaaataaaaagacgatgttaaaaagagtagcaaactttggagacctagcaagccagaatatggagtttgaatatttttctaagagcaataaatgaaatgaacaaatataataatttatagtatatctcccactagtgtcttttattgcatttcagagttctgtgtctcaaattttgtaggtaagtcatatttcaggaagtgaaatttcgttgataattcatggtcagtcgtgtgaacataattttcatttgtatgacaattgtggaaggttcacattccgggaaccagagatgggggtggtaaggaaggggtagaagygagaatctgggaacagtttgatttggtgtggtagccatcctgacactttccacccctgagtacttattttattttaaatctcaagggctcattccattagtgttttgatttttttaaaaggtgcagcgtgtttaacctgttctccatttcagcgatgttctctttgagaacacagagccagcacattacttaaaacagcaaagtgtcatgattcaatagtcataacttttcttcctattaataatagtttcgcccctgaatcatacctacatgtcaatcacatcaatagactagaaaaatgatgtttggcaacattacaaaacacaggcatcttggagtctggttattttctattttgtaaacctttaatactgagctaaaatctataataaatctcaaacataatcaataaggatatattacattctgttaaaaaatttagtgtaaatctttcaatctttacaaattttgaccttatggtggtgtagacagatgaattgtaaattaggtgtttttaaaacacatatatttttaattaatgca

SEQ ID NO: 38113 - DNA, 593 bp, Homo sapiens
attttgagtatgattcaagccatcaagtcaatctccctctcactgactttcaaatgcaaatgccaattggttactaattttatatatagattatattcacacaaactcttaagtagttaaaaaaattgcaaaagcaacaaagattttcttagcaaccctatcctttctgtacagttctgatctttaaatatccatcttggataaacctgtgccacactgcagytggtcagaaccttttacttcaaaatccagccaaaataatgtttcccccaattcaacttattctctatacttgctattttctttgaatttcctccattctatatttcaatccatcccccaatcttgctctccggaggattgatttgaagtaaactattaatggccaataatggcagaatatatgccatcccccagatgctatttctttttcaacaattctcattacccaaaagaataggtaatgggagattacacatataactgggccagtgagaagtatattttgtctgaggaagttttttccaatcatatagcataaacatctacttgttctgcataagcataactgatcctgtaaacatacacatatg

SEQ ID NO: 38114 - DNA, 593 bp, Homo sapiens
attttgagtatgattcaagccatcaagtcaatctccctctcactgactttcaaatgcaaatgccaattggttactaattttatatatagattatattcacacaaactcttaagtagttaaaaaaattgcaaaagcaacaaagattttcttagcaaccctatcctttctgtacagttctgatctttaaatatccatcttggataaacctgtgccacactgcagctggtcagaaccttttacttcaaaatccagccaaaataatgtttcccccaattcaacttattctctatacttgctattttctttgaatttcctccrttctatatttcaatccatcccccaatcttgctctccggaggattgatttgaagtaaactattaatggccaataatggcagaatatatgccatcccccagatgctatttctttttcaacaattctcattacccaaaagaataggtaatgggagattacacatataactgggccagtgagaagtatattttgtctgaggaagttttttccaatcatatagcataaacatctacttgttctgcataagcataactgatcctgtaaacatacacatatg

SEQ ID NO: 38115 - DNA, 527 bp, Homo sapiens
gagggaggcatttctggtatatttcgcaggatactgaaaatagatctattgaagatcattttctggtgctgagggtaaacaaaactgtttatattttcaaccatgttgaatatcaccttaaggctccttcagtttgactatgtttcagttgaattatatgctatattctgctgaaaagactaattttagagatattttataaggcactgttacaaacagtcttctgagactgggctccaatatcraataattgataactcgaagaaatgtaattccaaagtttttctagttagagacaacgtttgttggggtgaagtttaacttttggagaaagtgggaatatgggaatcacttaaatgggcctttggtgatagaagtgagaaagaaacattttttaattgaaataaggttttaaaacaataccaaattgttctgcatattaatgtcgaaaattgtttccctctgggcaaaattgcctccttgcagcaagattattattatgataatattgaagtctattttataga

SEQ ID NO: 38116 - DNA, 527 bp, Homo sapiens
gagggaggcatttctggtatatttcgcaggatactgaaaatagatctattgaagatcattttctggtgctgagggtaaacaaaactgtttatattttcaaccatgttgaatatcaccttaaggctccttcagtttgactatgtttcagttgaattatatgctatattctgctgaaaagactaattttagagatattttataaggcactgttacaaacagtcttctgagactgggctccaatatcaaataattgataactcgaagaaatgtaattccaaagtttttctagttagagacaamgtttgttggggtgaagtttaacttttggagaaagtgggaatatgggaatcacttaaatgggcctttggtgatagaagtgagaaagaaacattttttaattgaaataaggttttaaaacaataccaaattgttctgcatattaatgtcgaaaattgtttccctctgggcaaaattgcctccttgcagcaagattattattatgataatattgaagtctattttataga

SEQ ID NO: 38117 - DNA, 1283 bp, Homo sapiens
  misc_feature (1)...(1283): n = A,T,C or G
tgcatatactttttatgtagtagcattttttgtttcctcctagaattgattgctgaaagttaaaagcacttatgacaaattcatttaattcattctcttctttgaaaacttaccaagcagtactgattttaaatgcttcatttacctagatattttatcccttcatgttttcagtgtgtttatgcttctttaaaaaacaggatagacagatagatagatagatagatagatagatagatagatagatagacagatagatacatagaaagatacatggacagatgacagaaatagctatgtagatagagacattgtcaaagtcctaatttatgccatgtcaaaactcataattttgttaaataaatatatttaacagccttattaaaatttaggtttagacattgtctaaagttatacaaaatttttattatttttacaactgcccatttaatattggctttgactatacgcaatataatatatatatgttttcaagataacaattttataatgttatatttggaaaatttatgtatctctgaatacttctactcttctcytatctctcatgactatttaatcaccttattgcagtagtacaatttaattgtaaaacacataattaagcaatctaagtttgaatttctgctctaatatttcaacctgtgatttctgataagttacttacttctctttctctgtgtgtgtttcttataggtaaaattgcataaaaatagcaactacctcctgggaattttatatgattgagtaagatgctttataaaatgagcttgacaaccgagtacttaatgaatgttagctattattcttaaaccaactgtactttgaaagtttttcttacctccataattcaattcagaacttcattattagtttccctgttgtattagtccattttctgttgctataaccgaataccacagactgggtaatttataaagagtagataattatttatgactagagactgcctgcaaagtgacacaagcaatgccagatctaggccagtaggggcctgtagtgtcctattctgtcatatgacagacatctgactataaaaacttttaagacgttttttctaactttataggttatccattccaaaacaaagatgaatnnnnnnnnnnnnnnnnnnnnnnnnnnnnnnnnnnnnnnnnnnnnnnnnnnnnnnnnnnnnnnnnnnnnnnnnnnnnnnnnnnnnnnnnnnnnnnnnnnnnatgattccttttgagtaactttagccttctataatttaactttta

SEQ ID NO: 38118 - DNA, 557 bp, Homo sapiens
taaggaagcttccaaaagattaaatatattaaccctctcctctctggctttcaagatttctcctgagaagatgatatattcaaaggactaaaagaaaagaaaaataaataaattaataaaatctacaaacaagaatgctatgtcttacaaactgaagaaaaattaaaactactccagataaataaaatctgagaaagttcactacaattagacctgttctacgaagttgttgaaaaaaatataaaaacatggacaaaaatagtaaccttatattattgcaactttggtcatttttaattcttaaataaaattaggacaaaatcattgtgaaaaactataaatctgtgctaatggttatataacatgtaaagttataatttgtttcattrataatatacagtatgggatgaagttgtaaaggagtacagtttttctaggtaattaaaattattagcttaacataaagttattattagcttaaaatagaatgttataactttaaaatggttttgtaattgcaatggtaaccacaaaaaatgtcttagccacatatacac

SEQ ID NO: 38119 - DNA, 646 bp, Homo sapiens
gaaaatctaagtattttctttcttttctttttttgagacggagtcttgctgtgttgctcaggctggaatgcagtggcgcaatctcggctcaccgcaacctccgcctcccggattcaagtaattctcttgcctcagccttccgagtagctgggattacaggcgtgcgcctccacgcccggctaattttcatatatttggtagagacggggtttctccctgttggtcaggctggtctcgaactcccaatctcaggtgatccgcctgtctcggcctcccaaagtgctgtgagccacggtgcccggccagtcatttcaatgataggttgggaaagttattttttgttgagcaagtggggatgagagtgcttctttcctttgcttttacatagagggagctcaattagagcaacatccctggcagctttctgctgtgcttcacttatttcttctcatagaggagaaacgacgtgtctcattggtgagtttggagtttgggagaggcacttggactgctcagttaagtctttctcttcttcatttcttccatatctgcctagctacagatcatrctcattctctctgtttttccattatgtaaatttaaaggaaagtatctaattcttagggtgggtattgggaaactcacc

SEQ ID NO: 38120 - DNA, 645 bp, Homo sapiens
attaacatttcactataatctctaagatacagttcaagggcacaattttataattcaaagatatttacggcatgaaattgagwtctaaaactcttgtatctttaacaaccattttgtaattaaataactgttgacatttacaatcattgaagaactatttgaactctgtagagtatagatattgaagtacaaaattaattatgagataatatatggagcctgtcggctttattttttaataagtatgtatgtatgccaataaaggcatttttgtttccttatgtaaaatgtcctatcacccctcagctgattttgctatatccacaaacactacagttagcagttgagttttcttatttgctttttctttaaaaattatttataacttttggtttctgaaaaaattggtaataaaacaggcaacgtaggaaaaagaattatctggtggtagagcagacagaaaaataaacacttcagcatttatttttaatgacctagttaaccccactcactggatttatatagctgacagtttgacctcttttattgctgatatgaattgaaatttattccatgaactacacgattgatcattaagaaaataaagacatgaaaagtggcaagacttaatctgatctctgtgta

SEQ ID NO: 38121 - DNA, 505 bp, Homo sapiens
tctggaatcaaaggtaagagcaaaaagaaaaacaaaagggtaataggagataaatgcactgcaaatgctggtcatacatgctagtaagacaggaaaaatatctcatggggaaaaacaaaagccaattttccataacagcagtaatattcacagrcttgaatgcttccaggtagcttaggaaagcacagggtttggggacgtaaacagttataccctggggatgttctcatggggaaaggtgtcaagcagatcattagtcaatttgatcccccatttacaaagcactgatgttatgtgaatttttatccccttccatacacactggtagaagcatactatagtattaatatagtctacaaatatattattatttttgagaattacatgatttttttgatatatttgagtatatcctgaaatttttaaaaaaacaaagtagaaagcattgtcttgagtaaaaataacttcacatttggctgctgattgctcccctgataccatgcat

SEQ ID NO: 38122 - DNA, 899 bp, Homo sapiens
tctgctgtctgtacttcctttgttgctttcctgtgttgaaatttcattacacgatgtggagatgggccatctgtacmaatgagtatactttccttcggtttctaacgcagcacttcttcatctgaggtagttgggtctaggtgtgtctatatgggcatcagtgggaggcaatatctgcaattaaatatggcatttatgcttgcaaatttgtctagagaggttctcaaagatgttcatgactcaataaaagttacatgccattggggtgcgggccctgcgggacgggacgagggcggggcgccaaccgcgagcacccccgcctccccccgggctctgctggcctctgcgcgctggggccgcctctccttccgcaggggcagcggggtctcctggaagccccggagcctcatggaagcccgggagggcggcggagcggggcccgcagcgcggggcccggaggggcagccggcgcccgaagccagggtgcacttccgagtggcgaggttcatcatgcaggcaagtgtcaagctagggatgcggtccattcccattgccactgcttgcaccatttaccataagttcttctgcgagaccagcctggacgcctgtgacccttacctgattgccatgtcttccatttacttggccggcaaagtggaagagcagcacctgcagactcgtgacatcatcaatgtgtccaacaggtactttaacccaagcggtgagcccctggaattggactcccgcttctgggagctccgggacagcattgtgcagtgtcagcttctcatgctgagagttctgcgcttccaggtctccttccagcatccacacaagtacctgctccactacctgctttccctcaagaagtggctgaaccgccacagctggcagcggat

SEQ ID NO: 38123 - DNA, 899 bp, Homo sapiens
tctgctgtctgtacttcctttgttgctttcctgtgttgaaatttcattacacgatgtggagatgggccatctgtaccaatgagtatactttccttcggtttctaacgcagcacttcttcatctgaggtagttgggtctaggtgtgtctatatgggcatcagtgggaggcaatatctgcaattaaatatggcatttatgcttgcaaatttgtctagagaggttctcaaagatgttcatgactcaataaaagttacatgccattggggtgcgggccctgcgggacgggacgagggcggggcgccaaccgcgagcacccccgcctccccccgggctctgctggcctctgcgcgctggggccgcctctccttccgcaggggcagcggggtctcctggaagccccggagcctcatggaagcccgggagggcggcggagcggggcccgcagcgcggggcccggaggggcagccggcgcccgaagccagggtgcacttccgagtggcgaggttcatcatgcaggcaagtgtcaagctagggatgcggtccattcccatygccactgcttgcaccatttaccataagttcttctgcgagaccagcctggacgcctgtgacccttacctgattgccatgtcttccatttacttggccggcaaagtggaagagcagcacctgcagactcgtgacatcatcaatgtgtccaacaggtactttaacccaagcggtgagcccctggaattggactcccgcttctgggagctccgggacagcattgtgcagtgtcagcttctcatgctgagagttctgcgcttccaggtctccttccagcatccacacaagtacctgctccactacctgctttccctcaagaagtggctgaaccgccacagctggcagcggat

SEQ ID NO: 38124 - DNA, 899 bp, Homo sapiens
tctgctgtctgtacttcctttgttgctttcctgtgttgaaatttcattacacgatgtggagatgggccatctgtaccaatgagtatactttccttcggtttctaacgcagcacttcttcatctgaggtagttgggtctaggtgtgtctatatgggcatcagtgggaggcaatatctgcaattaaatatggcatttatgcttgcaaatttgtctagagaggttctcaaagatgttcatgactcaataaaagttacatgccattggggtgcgggccctgcgggacgggacgagggcggggcgccaaccgcgagcacccccgcctccccccgggctctgctggcctctgcgcgctggggccgcctctccttccgcaggggcagcggggtctcctggaagccccggagcctcatggaagcccgggagggcggcggagcggggcccgcagcgcggggcccggaggggcagccggcgcccgaagccagggtgcacttccgagtggcgaggttcatcatgcaggcaagtgtcaagctagggatgcggtccattcccattgccactgcttgcaccatttaccataagttcttctgcgagaccagcctggacgcctgtgacccttacctgattgccatgtcttccatttacttggccggcaaagtggaagagcagcacctgcagactcgtgacatcatcartgtgtccaacaggtactttaacccaagcggtgagcccctggaattggactcccgcttctgggagctccgggacagcattgtgcagtgtcagcttctcatgctgagagttctgcgcttccaggtctccttccagcatccacacaagtacctgctccactacctgctttccctcaagaagtggctgaaccgccacagctggcagcggat

SEQ ID NO: 38125 - DNA, 628 bp, Homo sapiens
tgcatgctcatagcaaaaattttaaatagtataaaatatcaatatggcattaaaaataaaagtcctcttccctgttattaacatyttcttgtatttgggaagggaaggtttgacactaagtatttacgctatgttgcatttccattccttttgcattagaaagaaaaacaaaatcccttttttttttctttttcacaaagtcatgcaaatgaaaatcaacactagtgtctggtgtggcatcactcgcctatagttccagctacttagggggctgaggcaggtggatctctcgagcccaggagtttgagaccacccgtttgaggccaccctgggcaatatggcaagacctctgtctctaaaatatatagagagatataaatcgacactagccttcaaagtgatgttccatttgtatttttaggtatgttaataaaacataatttgaaaataacatttccctcattgataaagaaaacatgaaaaatggtacggcataaacatatacagatctatttatgggatggtaaaaatacaggagggaaatgtaccaaaatattaatagtgattgtattgctgtcataagtattaggtgattttaattttcttctcgatacttttcggtattttc

SEQ ID NO: 38126 - DNA, 685 bp, Homo sapiens
tatcctgaagtcctaactcccaggacctcaacaatgggactgtgtttggagatagagcccttaaagaggtaattaattaattaagtgagatcatagsggtgggccctgatccaatatgactgctatcctcatgtgaagagatgaggacacagacacccacaggtagaagatcatgtgaggacacagcaagaaggcagccgtctgtaagccaaagagagaggcctcacctcagaagaaatcaaccctgctgcgctttgaccttggcttccagcctttagcactgtgagaaataaatgtctgttgtttaagctccccagcctgttgcatttattaacagcagcctgagctaagacaccaggtaagaagaaaaaggttgggaggctggctggttcattgaaacgagttatgaacagaggtgaataaacacataggactcaatataaacagcattacctgcatgccatcatccaggaggaagtgtgaggatatcaggaaaggacagtccctggagtcctgcgaacactgcagttccacaaccacagcttcctggcctccctccattcccacctggaaaataggatgtgctttcagaagctgcacttgggaaacatcaaactacatgtgccatttgaaaatgttcattataattataaaataatatatgttcatttagagataaatttag

SEQ ID NO: 38127 - DNA, 685 bp, Homo sapiens
tatcctgaagtcctaactcccaggacctcaacaatgggactgtgtttggagatagagcccttaaagaggtaattaattaattaagtgagatcataggggtgggccctgatccaatatgactgctatcctcatgtgaagagatgaggacacagacacccacaggtagaagatcatgtgaggacacagcaagaaggcagccgtctgtaagccaaagagagaggcctcacctcagargaaatcaaccctgctgcgctttgaccttggcttccagcctttagcactgtgagaaataaatgtctgttgtttaagctccccagcctgttgcatttattaacagcagcctgagctaagacaccaggtaagaagaaaaaggttgggaggctggctggttcattgaaacgagttatgaacagaggtgaataaacacataggactcaatataaacagcattacctgcatgccatcatccaggaggaagtgtgaggatatcaggaaaggacagtccctggagtcctgcgaacactgcagttccacaaccacagcttcctggcctccctccattcccacctggaaaataggatgtgctttcagaagctgcacttgggaaacatcaaactacatgtgccatttgaaaatgttcattataattataaaataatatatgttcatttagagataaatttag

SEQ ID NO: 38128 - DNA, 1121 bp, Homo sapiens
ttttatgttgctttggttaaaggaagaacataaatgccctgctgataggtcctctgtttggttgtagcttgtataaggggggtgtraacacaatacacagtttgccacaaaatgattctttaaaagttacaactatggtattatgaagccaagtacagctacactgggactgaattctctatgcttctttattaccttctttgctatctttgttttctggtagctgtgactcacacaggtcacggagagtgtgattccaaaatagaagcgcacctacagtggtcatcttttcttgatctattaagttcttctgccccaagtctgtggatcccaacacagtgttggtcattggtggagatacaaatggacatagatcaccaactttcaaattctcagatctttcatgaagctcattactaaaggtcaaactattaaaatccaaagctgaaaaagctgaaagtaaagttttcattattagaatgtaaatcataatacactttgactaacgtggagaaattccttctaaaacagaagcagtcccatgtcctccactcccccagaaacacaccactcctgcatggcttattgtattctacatgtcccgtacttgccattcactcgcataggttttattaacaatcatctttgacatttttattttttagtgttacttactttgattcactcagcgatattatatattttgttttccatgagagctttgtttattaataataaagattcttcaagaatatcaactttcttttactaacaagacttatgtttaaccattagacacatgatgtgtcataagatcatgggtgcttaatgggccagagttataatgactattggaatgcatggcggtgcatgcttatattttaaattattcagcttcagtttctgatatagtaaatatcaatagatacaatccacttaaacaaaagctctttggaatctgccatcattttttaatgtttttatctttttctcaccatgaagagagtttaattaaatgtagtactgttatagcatgaaatactataggaaatgtaaactcagctagagctccttctgaaaatagcgatgatctctttggtcaaatcaatgggtgtgaacaa

SEQ ID NO: 38129 - DNA, 1121 bp, Homo sapiens
ttttatgttgctttggttaaaggaagaacataaatgccctgctgataggtcctctgtttggttgtagcttgtataaggggggtgtgaacacaatacacastttgccacaaaatgattctttaaaagttacaactatggtattatgaagccaagtacagctacactgggactgaattctctatgcttctttattaccttctttgctatctttgttttctggtagctgtgactcacacaggtcacggagagtgtgattccaaaatagaagcgcacctacagtggtcatcttttcttgatctattaagttcttctgccccaagtctgtggatcccaacacagtgttggtcattggtggagatacaaatggacatagatcaccaactttcaaattctcagatctttcatgaagctcattactaaaggtcaaactattaaaatccaaagctgaaaaagctgaaagtaaagttttcattattagaatgtaaatcataatacactttgactaacgtggagaaattccttctaaaacagaagcagtcccatgtcctccactcccccagaaacacaccactcctgcatggcttattgtattctacatgtcccgtacttgccattcactcgcataggttttattaacaatcatctttgacatttttattttttagtgttacttactttgattcactcagcgatattatatattttgttttccatgagagctttgtttattaataataaagattcttcaagaatatcaactttcttttactaacaagacttatgtttaaccattagacacatgatgtgtcataagatcatgggtgcttaatgggccagagttataatgactattggaatgcatggcggtgcatgcttatattttaaattattcagcttcagtttctgatatagtaaatatcaatagatacaatccacttaaacaaaagctctttggaatctgccatcattttttaatgtttttatctttttctcaccatgaagagagtttaattaaatgtagtactgttatagcatgaaatactataggaaatgtaaactcagctagagctccttctgaaaatagcgatgatctctttggtcaaatcaatgggtgtgaacaa

SEQ ID NO: 38130 - DNA, 1121 bp, Homo sapiens
ttttatgttgctttggttaaaggaagaacataaatgccctgctgataggtcctctgtttggttgtagcttgtataaggggggtgtgaacacaatacacagtttgccacaaaatgattctttaaaagttacaactatggtattatgaagccaagtacagctacactgggactgaattctctatgcttctttattaccttctttgctatctttgttttctggtagctgtgactcacacaggtcacggagagtgtgattccaaaatagaagcgcacctacagtggtcatcttttcttgatctattaagttcttctgccccaagtctgtggatcccaacacagtgttggtcattggtggagatacaaatggacatagatcaccaactttcaaattctcagatctttcatgaagctcattactaaaggtcaaactattaaaatccaaagctgaaaaagctgaaagtaaagttttcattattagaatgtaaatcataatacactttgactaacgtggagaaattccttctaaaacagaagcagtcccatgtcctccactcccccagaaacacaccactcctgcatggcttattgtattctacatgtcccgtacttgccattcactcgcataggttttattaacaatcatctttgacatttttattttttagtgttacttactttgattcactcagcgatattatatattttgttttccatgagagctttgtttattaataataaagattcttcaagaatatcaactttcttttactaacaagacttatgtttaaccattagacacatgatgtgtcataagatcatgggtgcttaatgggccagagttataatgactattggaatgcatggcggtgcatgcttatattttaaattattcagcttcagtttctgrtatagtaaatatcaatagatacaatccacttaaacaaaagctctttggaatctgccatcattttttaatgtttttatctttttctcaccatgaagagagtttaattaaatgtagtactgttatagcatgaaatactataggaaatgtaaactcagctagagctccttctgaaaatagcgatgatctctttggtcaaatcaatgggtgtgaacaa

SEQ ID NO: 38131 - DNA, 716 bp, Homo sapiens
ttttttatttgagtctttttacttcaactagcatagtgatcattattttaaattctcagtattaaatgagattgggtgyaattattagattaattgatttttgaaaagaaaaaccagtgggtttttttttaaaaaaaaaaaaaacatctattttcatcccattactttactgagcagcccttagagtaaagacagtttgttacttttgcctgatattttcaaaaatggaaataacaacagccttcctcaaatggagtatgggagtctaaagttctgtatggcttcttaaagcatatccaaaacatcaggttcattaggcatcacattcaatcttgttatatttgttaataatagtgtttaaagagaagaaaatccaaaatgaaaagtacaaattatgagaagtctgactcctttattttagagaggaatggactgtggtctgagaggagtgacatagcttctaagagtcagatccaaagcaaacacaagtagcccatccccagagtgtgcggcccacttctttctgcctctgccgtgtggagaccatcttccagtgcagatgctacagtcctgggtatctgagctagagattatgcagaggaggcatccagctcatttcaaatgatcttttaacaatttctggaacagctaaggaggccttagggacttaccatgtggacttaccatgtgttttgtaaggaatctatcatgtattt

SEQ ID NO: 38132 - DNA, 716 bp, Homo sapiens
ttttttatttgagtctttttacttcaactagcatagtgatcattattttaaattctcagtattaaatgagattgggtgtaattattagattaattgatttttgaaaagaaaaaccagtgggtttttttttwaaaaaaaaaaaaacatctattttcatcccattactttactgagcagcccttagagtaaagacagtttgttacttttgcctgatattttcaaaaatggaaataacaacagccttcctcaaatggagtatgggagtctaaagttctgtatggcttcttaaagcatatccaaaacatcaggttcattaggcatcacattcaatcttgttatatttgttaataatagtgtttaaagagaagaaaatccaaaatgaaaagtacaaattatgagaagtctgactcctttattttagagaggaatggactgtggtctgagaggagtgacatagcttctaagagtcagatccaaagcaaacacaagtagcccatccccagagtgtgcggcccacttctttctgcctctgccgtgtggagaccatcttccagtgcagatgctacagtcctgggtatctgagctagagattatgcagaggaggcatccagctcatttcaaatgatcttttaacaatttctggaacagctaaggaggccttagggacttaccatgtggacttaccatgtgttttgtaaggaatctatcatgtattt

SEQ ID NO: 38133 - DNA, 1151 bp, Homo sapiens
tactcttttactttgataagttctaattatcttcacaggataatcaggatggaataaggaaaagctatacacttttttggtttaagaaaaatgtaggggttatagatgttgcttcttcttttctccattgtcaatggcagcaaattattgctcttagtaaaagaggacattaactccaagaacttaaactgcagtggctcatgtgattttaatgctgtccctcagtaaggtgaataatctggggaaagattaacttcacaattttattaatttcttaaggtgaatacaatattctgatttatgaagttgtcaagctacatgttaaagcaatgaaagaagaatattgtactaacgtttaaaaataggtttgttgtgaattgatttaggagatgacaacaataataacttatataatttgaaattttaagggttcatacaattctatggatttgttagttaaaatacttacataaatctctcacattctgaattactattactgaacagaggtagataatataaaaaataaatgtttttatatacaaatacaagaacaaagtgtcttagtggtatttagaaaccctgctgaattaaatttttcatgaatgagtttcctccataggccaaaaaataagttaccttttagaaataataatgacaattaaaaacaggagtcattttaacttaaggacctcatgtgttgggaggaatcaggccaattcttatgatcctaattcataattttatttatttatttatttatttatttatttatttaagacagagtgtcactctgtcacccaggccggagtgcagtggtgtgatctcagctcactgagacctccgattcccgggttcaagagataccgcctcaggctcccgagtagctagaattacaggcatgcactaccatgcactgmtttttttttttttttttttttgtatttttagtagcaacagggtttcaccatgttgtccaggctggtctcaaactcctgacctcaagggatcagcctgccttgacctcccaaagtgctgtgattacagacatgagccactgcgcctggtttaattcacaatatcatcacagccatattaaaggccttcaaaagttttcaaggtcttcatggtttaattcatttgattttcaa

SEQ ID NO: 38134 - DNA, 583 bp, Homo sapiens
tctagcagtagatagccgtgtccagttaggagcagaaagatagggaggttagctactacagttaccttaaaaattagtcaaaagatgtttccagggtatcatgtaatgactaagtttggccttggagggctatatctgacttactaagatcctataggaccrttttttagaatcccccaatgtgccctacacacatcctcactctggttcaggaagaagctgattaaatagttgttttcctttgaccaaccacatctttctattactgaattttatcttcttaatgactatcagtttggtctgcctacaaacagccaaacaaaatgaaaagcaaaagtcaataattttttaaacctagagatgtcaacaactttttgttttgttccacagtaaatttatgaagccttggattcattgtgcttcttggagacagaaatccactacacaaattattattatttttaaaaaggaagatggcaggggaaatcatagattcacaggtgcaaactggtccagggttttcagctttttagtagtaatgtcaaacggtacagctgctttaactattttatcaaaggtgact

SEQ ID NO: 38135 - DNA, 926 bp, Homo sapiens
atgttacctgcttcaactttcactgtaggagtcatgcaaggtgactttattttaggcaaatcattaaatagggaatactaagtccaaggcatttattttgcttgaaggaggcttcataggtttctttaaaccagtatgatagtttggattgaccaatgtatataataggcccgttctggaaataatctaggtcactgcactttaagccaagggtactaaggaaagaagtgtggttgaaaaaagaaaatccacaataaacataaatactaaggtcatgtcattgctgtctcttcaggcacataatgtaaaacaagcaaaggaagccacagaccctcaaatagatayacccactcaaccacacacaggatatccccaaacttccatggcttggtaggattttggaaaacacagattttaagataaatcataatctaagaggattttattgagtacaaatgtcagtgcccagtgttagtacgaagcagacgccctagacctagttctgcacagcacactgagaacattccatcaattctctttttctgaactcagtctcccgctctgtcgtgtaactttgaggtggaacatgcagggcttggtaggacccatgatcactttctatttcctacttgtctggctgcctttcagctctgcttttgcctttcactaagctgttttaggtgccaaaacacctggtatgccactgttactcatttaaatatacgtttttttaaaaagctacaagactttacatctagggctgtcatggtgtttggaagtgagaaaataggaagagagggaagaagagtgagcactttttactcccctccttctcagcctaccgactcatcctaggttccagtagagctgggtgagccacaaatgggccacaacctctgcaagtctaaacactgagtattttcaaa

SEQ ID NO: 38136 - DNA, 591 bp, Homo sapiens
agattttaccaaatatataggaaggaaaacactttctctccaaagagagaataagaacagaggtgtgtatttaacacattatataaagggaagtgcaaatgattctttcaacaatattgatgaagttgtgaaccamaagtatctgagataggactcaatcaatttagaagtttattttgccaaggttaaagacacacccatgacacagcctcaggagataaaaaagctacataccttcctcacaatttgcctacaaggaaattctttgtgggcctcaagatgatgacacgtgcccaatgtggctggggtacagcttggttttttatattttagggagacatgagacatcaatcaatatgtgtaagatgtagattggtttggtctggaaaggtgagacaacttgcagtgggtaggaggctttcaggtcatagattggtaagagacaaacagtggcattcttttgagtctttgatcagcctttcactgaatacagaatttacatgtgagagagggggtagaggaagagtcacttttgtcttagtctggctcagtgaatgtacatttttgtataaacaataggtgagaagaagc

SEQ ID NO: 38137 - DNA, 610 bp, Homo sapiens
ctataaaaactagaaaattcagatgaaaaataataatttaaaatcagcaattaatgccactaccgagaaacatccagtgttgaaattttataaccttgaagacttttcccatgagccatctttattgatatatatgcatatgttrtgtgtaatgtgtgtatgtatatgtatgtgtatatattctgagcttatatgttctctctctctatatatataaatatatatggctctgtacgctgccatatatgacatagtctctttatgtcagtaaacagagttccattctgccttgagaagcaatgtgacatagtggataacaatctagggtttgaattcagatggccctaggctgtacatcccattgcttactaattatatgacctgggatgggttactaatcttttctaaacttcaattatatagttatttatagttagttatacatttatatagtatatggaattatgtagttatagaacatatttataatagccatatggtttatttagctatatagtatttcattttatgaatatacctatttacaatgtctttaaattaggtctactttatcctaccattcaatttttgaatcctgaagctgaatttt

SEQ ID NO: 38138 - DNA, 527 bp, Homo sapiens
gtatcatttctgaataacaactgatatacatatatatgaatatattcatatatatttatattcattttcattcttttttttttttaaakggagtttcattcttgtcacccaggctggagtgcagtggcacgatctcagctcactgtgacctccacctcccaggttcaaggtattctcctgccttagcctcctgagtagctgggattacaggtgcctgccactgcccagctaattttttcttttttttgtatttttaatagagagatggggtttcaccatattgcacaggctggtctcaaactcctgacctcaagtgatcctcctgccttggcctcccaaagtgctgggattaaaggcgtgagccaccgcacccagctcattcttctaaattacacatattcattattgaaattaaagaaaaaacacttaacacagctatcttttgtatgatggtattttcctccttcactgaagacatttgaaaatcaaaaaagtgtccctctgcctttaattcatgatttctttta

SEQ ID NO: 38139 - DNA, 527 bp, Homo sapiens
gtatcatttctgaataacaactgatatacatatatatgaatatattcatatatatttatattcattttcattcttttttttttttaaatggagtttcattcttgtcacccaggctggagtgcagtggcacgatctcagctcactgtgacctccacctcccaggttcaaggtattctcctgccttagcctcctgagtagctgggattacaggtgcctgccactgcccagctaattttttcttttttttgtatttttaatagagagatggggtttcaccatrttgcacaggctggtctcaaactcctgacctcaagtgatcctcctgccttggcctcccaaagtgctgggattaaaggcgtgagccaccgcacccagctcattcttctaaattacacatattcattattgaaattaaagaaaaaacacttaacacagctatcttttgtatgatggtattttcctccttcactgaagacatttgaaaatcaaaaaagtgtccctctgcctttaattcatgatttctttta

SEQ ID NO: 38140 - DNA, 527 bp, Homo sapiens
gtatcatttctgaataacaactgatatacatatatatgaatatattcatatatatttatattcattttcattcttttttttttttaaatggagtttcattcttgtcacccaggctggagtgcagtggcacgatctcagctcactgtgacctccacctcccaggttcaaggtattctcctgccttagcctcctgagtagctgggattacaggtgcctgccactgcccagctaattttttcttttttttgtatttttaatagagagatggggtttcaccatattgcacaggctggtctcaaactcctgacctcaagtgatcctcctgccttggcctcccaaagtgctgggattaaaggcgtgagccaccgcacccagctcattcttctaaattacacatattcattmttgaaattaaagaaaaaacacttaacacagctatcttttgtatgatggtattttcctccttcactgaagacatttgaaaatcaaaaaagtgtccctctgcctttaattcatgatttctttta

SEQ ID NO: 38141 - DNA, 527 bp, Homo sapiens
gtatcatttctgaataacaactgatatacatatatatgaatatattcatatatatttatattcattttcattcttttttttttttaaatggagtttcattcttgtcacccaggctggagtgcagtggcacgatctcagctcactgtgacctccacctcccaggttcaaggtattctcctgccttagcctcctgagtagctgggattacaggtgcctgccactgcccagctaattttttcttttttttgtatttttaatagagagatggggtttcaccatattgcacaggctggtctcaaactcctgacctcaagtgatcctcctgccttggcctcccaaagtgctgggattaaaggcgtgagccaccgcacccagctcattcttctaaattacacatattcattattgaaattaaagaaaaaacacttaacacagctatcttttgtatgatggtattttcctccttcactgaagacatttgaaaatcaaaaaagtgtcccyctgcctttaattcatgatttctttta

SEQ ID NO: 38142 - DNA, 529 bp, Homo sapiens
tgcccttatttggtggaaaggacagaatttaaatcctgaaccatggctgtagaggaaggcactatgttttctgcccgctattgaagtggagaggagcaatgaatttgaaytgtgacagtgttcaagaggataatatcagttcaaaacatgagaaaataagaatgagaatgaaaacaaagtgaaaaaaatacaggcagtggaaggaaggaagaggaagaagaggaaaaaaaagtaaaagcatttaaatggccctatacttcttgaaattttatgtatattagttgattgttatttttgtaaaaaacaatgttgtttcttgggtttaaatacgagtctgtgaaattcaagctttactaattaacactttgcatgtatgcaatgaaaaaatctagatgttaaggtctgaatatctttgcctagtaagggaagctatacaaaatttacatggatgtgcattaagaaagtcggataaatgattttttaaatgaaagtggcacaattaacttcccataacaaataaattgtaaag

SEQ ID NO: 38143 - DNA, 529 bp, Homo sapiens
tgcccttatttggtggaaaggacagaatttaaatcctgaaccatggctgtagaggaaggcactatgttttctgcccgctattgaagtggagaggagcaatgaatttgaactgtgacagtgttcaagaggataatatcagttcaaaacatgagaaaataagaatgagaatgaaaacaaagtgaaaaaaatacaggcagtggaaggaaggaagaggaagaagaggaaaaaaaagtaaaagcatttaaatggccctatacttcttgaaattttatgtatattagttgattgttatttttgtaaaaaacaatgttgtttcttgggtttaaatacgagtytgtgaaattcaagctttactaattaacactttgcatgtatgcaatgaaaaaatctagatgttaaggtctgaatatctttgcctagtaagggaagctatacaaaatttacatggatgtgcattaagaaagtcggataaatgattttttaaatgaaagtggcacaattaacttcccataacaaataaattgtaaag

SEQ ID NO: 38144 - DNA, 575 bp, Homo sapiens
ttatgtttgcgaaacatgaatacctactacaggtctttgtgatagacatcagggtggggatgcataggggacaaaaatgtacacaattttgtgtctgctctcagagagattacatagtaggagaggaagacccagtattaaaaaatagaataaaggcaagtgccccaaatctttgtcattaattttractggaagagaggcttaggaaagatgagacatttaagcattgcatggaggaaaaaagaagtagatctcccttggcaggtggataggctaggacattccaaactgagaaaaagcaagaaaaaaattccatgaagcaagagagtatgtaacagccctaaaggagtagcctataggattccctagttggatggaatgggaggcagaaagagatagggcttgagtgttataataataatataggctttattttgagaaaaataagaatccattaaatattaaactgggaagaaaaatggccaggactagacaggcagtcatgtttgaaaataagctccaggaatttgatagaatataggaaaagtggctcttaaatgtatattgggggagga

SEQ ID NO: 38145 - DNA, 1333 bp, Homo sapiens
aaatgattaaaagacaaaggggtttattagaatgagttgtccgggaaagcttctctgcgtttgtgatatttaaactcaaatttcatgataataaaaagcaagccaagaaagtgaaagagggaaaatggggagggaactgtcggtaaaaaggctacagcactgaaaacctaaggggtgtttgaggaaaagaaaaaatgtcagagtggctggagactgttggcaaagtggagggaatcaaaaarttcggccagggttggtgtgtggagagcagctggacaggctaaggagtctgagtattactttttttgcaactggaagccattgcagaggagagacagatcacatgtatgtttcaaaaagattcttctgagtcctcactagagaatagactattgggttggggcaaaggaagaagcagagacttaggttaggaggctaccaacgtggcccatgtgagaaacgacggtgacctggtctacagaggtgggagccagggtggaaagaagaggaaagattcagattaaatttttggaattatttttgtgccatgctgtctacttgaccacacatcagacagacatccaaaagtgctcgatgatagcgattgtcattcataacatttattgcagacccagacactgtactagttatttggaatttaaacttatagttttgtagggaaaatggacatatgaaaattaatgaaacacaacgtgatattaactccagtgaacctaaatagatggaacgagtactcaaaggagctcactcatctggggctttccaaaagaattcgtgggagaaataatatttgattttagcttccattgatgatgggttggagtttggtatgttgagaaatgggaagaaatgcactctggacagaaaatggaggtgcgtggctcagagttataaatgttcatggagtatttagagaaaattacatgaatggctgtgactggaacacggcaaatggacgagacagaatggtgaagagaagaatgagtatgatggagttttattttgcaggaaggcgtgctggggaactggcaaaccaatatgagatataaaaattgttaaaaatttggcaaagattcagaatttaatttcaagaaaaatttcactagacaccaaattaaccaaaaactgtatatcgtaatattaattctgataagtatttaccacaaaaccaagggtaattgactaaatcactccttcacatagcaagatgaaactaataatatctctgtagagcatgtggagtaactagctaatatgaatacagaaactgtgtccttttaaaaccatgttaactgcttattgtataaatgtt

SEQ ID NO: 38146 - DNA, 1333 bp, Homo sapiens
aaatgattaaaagacaaaggggtttattagaatgagttgtccgggaaagcttctctgcgtttgtgatatttaaactcaaatttcatgataataaaaagcaagccaagaaagtgaaagagggaaaatggggagggaactgtcggtaaaaaggctacagcactgaaaacctaaggggtgtttgaggaaaagaaaaaatgtcagagtggctggagactgttggcaaagtggagggaatcaaaaaattcggccagggttggtgtgtggagagcagctggacaggctaaggagtctgagtattactttttttgcaactggaagccattgcagaggagagacagatcacatgtatgtttcaaaaagattcttctgagtcctcastagagaatagactattgggttggggcaaaggaagaagcagagacttaggttaggaggctaccaacgtggcccatgtgagaaacgacggtgacctggtctacagaggtgggagccagggtggaaagaagaggaaagattcagattaaatttttggaattatttttgtgccatgctgtctacttgaccacacatcagacagacatccaaaagtgctcgatgatagcgattgtcattcataacatttattgcagacccagacactgtactagttatttggaatttaaacttatagttttgtagggaaaatggacatatgaaaattaatgaaacacaacgtgatattaactccagtgaacctaaatagatggaacgagtactcaaaggagctcactcatctggggctttccaaaagaattcgtgggagaaataatatttgattttagcttccattgatgatgggttggagtttggtatgttgagaaatgggaagaaatgcactctggacagaaaatggaggtgcgtggctcagagttataaatgttcatggagtatttagagaaaattacatgaatggctgtgactggaacacggcaaatggacgagacagaatggtgaagagaagaatgagtatgatggagttttattttgcaggaaggcgtgctggggaactggcaaaccaatatgagatataaaaattgttaaaaatttggcaaagattcagaatttaatttcaagaaaaatttcactagacaccaaattaaccaaaaactgtatatcgtaatattaattctgataagtatttaccacaaaaccaagggtaattgactaaatcactccttcacatagcaagatgaaactaataatatctctgtagagcatgtggagtaactagctaatatgaatacagaaactgtgtccttttaaaaccatgttaactgcttattgtataaatgtt

SEQ ID NO: 38147 - DNA, 1333 bp, Homo sapiens
aaatgattaaaagacaaaggggtttattagaatgagttgtccgggaaagcttctctgcgtttgtgatatttaaactcaaatttcatgataataaaaagcaagccaagaaagtgaaagagggaaaatggggagggaactgtcggtaaaaaggctacagcactgaaaacctaaggggtgtttgaggaaaagaaaaaatgtcagagtggctggagactgttggcaaagtggagggaatcaaaaaattcggccagggttggtgtgtggagagcagctggacaggctaaggagtctgagtattactttttttgcaactggaagccattgcagaggagagacagatcacatgtatgtttcaaaaagattcttctgagtcctcactagagaatagactattgggttggggcaaaggaagaagcagagacttaggttaggaggctaccaacgtggcccatgtgagaaacgacggtgacctggtctacagaggtgggagccagggtggaaagaagaggaaagattcagattaaatttttggaattatttttgtgccatgctgtctacttgaccacacatcagacagacatccaaaagtgctcgatgatagcgattgtcattcataacatttattgcagacccagacactgtactagttatttggaatttaaacttatagttttgtagggaaaatggacatatgaaaattaatgaaacacaacgtgatattaactccagtgaacctaaatagatggaacgagtactcaaaggagctcactcatctggggctttccaaaagaattcgtgggagaaataatatttgattttagcttccaytgatgatgggttggagtttggtatgttgagaaatgggaagaaatgcactctggacagaaaatggaggtgcgtggctcagagttataaatgttcatggagtatttagagaaaattacatgaatggctgtgactggaacacggcaaatggacgagacagaatggtgaagagaagaatgagtatgatggagttttattttgcaggaaggcgtgctggggaactggcaaaccaatatgagatataaaaattgttaaaaatttggcaaagattcagaatttaatttcaagaaaaatttcactagacaccaaattaaccaaaaactgtatatcgtaatattaattctgataagtatttaccacaaaaccaagggtaattgactaaatcactccttcacatagcaagatgaaactaataatatctctgtagagcatgtggagtaactagctaatatgaatacagaaactgtgtccttttaaaaccatgttaactgcttattgtataaatgtt

SEQ ID NO: 38148 - DNA, 1333 bp, Homo sapiens
aaatgattaaaagacaaaggggtttattagaatgagttgtccgggaaagcttctctgcgtttgtgatatttaaactcaaatttcatgataataaaaagcaagccaagaaagtgaaagagggaaaatggggagggaactgtcggtaaaaaggctacagcactgaaaacctaaggggtgtttgaggaaaagaaaaaatgtcagagtggctggagactgttggcaaagtggagggaatcaaaaaattcggccagggttggtgtgtggagagcagctggacaggctaaggagtctgagtattactttttttgcaactggaagccattgcagaggagagacagatcacatgtatgtttcaaaaagattcttctgagtcctcactagagaatagactattgggttggggcaaaggaagaagcagagacttaggttaggaggctaccaacgtggcccatgtgagaaacgacggtgacctggtctacagaggtgggagccagggtggaaagaagaggaaagattcagattaaatttttggaattatttttgtgccatgctgtctacttgaccacacatcagacagacatccaaaagtgctcgatgatagcgattgtcattcataacatttattgcagacccagacactgtactagttatttggaatttaaacttatagttttgtagggaaaatggacatatgaaaattaatgaaacacaacgtgatattaactccagtgaacctaaatagatggaacgagtactcaaaggagctcactcatctggggctttccaaaagaattcgtgggagaaataatatttgattttagcttccattgatgatgggttggagtttggtatgttgagaaatgggaagaaatgcactctggacagaaaatggaggtgcgtggctcagagttataaatgttcatggagtatttagagaaaattacatgartggctgtgactggaacacggcaaatggacgagacagaatggtgaagagaagaatgagtatgatggagttttattttgcaggaaggcgtgctggggaactggcaaaccaatatgagatataaaaattgttaaaaatttggcaaagattcagaatttaatttcaagaaaaatttcactagacaccaaattaaccaaaaactgtatatcgtaatattaattctgataagtatttaccacaaaaccaagggtaattgactaaatcactccttcacatagcaagatgaaactaataatatctctgtagagcatgtggagtaactagctaatatgaatacagaaactgtgtccttttaaaaccatgttaactgcttattgtataaatgtt

SEQ ID NO: 38149 - DNA, 1333 bp, Homo sapiens
aaatgattaaaagacaaaggggtttattagaatgagttgtccgggaaagcttctctgcgtttgtgatatttaaactcaaatttcatgataataaaaagcaagccaagaaagtgaaagagggaaaatggggagggaactgtcggtaaaaaggctacagcactgaaaacctaaggggtgtttgaggaaaagaaaaaatgtcagagtggctggagactgttggcaaagtggagggaatcaaaaaattcggccagggttggtgtgtggagagcagctggacaggctaaggagtctgagtattactttttttgcaactggaagccattgcagaggagagacagatcacatgtatgtttcaaaaagattcttctgagtcctcactagagaatagactattgggttggggcaaaggaagaagcagagacttaggttaggaggctaccaacgtggcccatgtgagaaacgacggtgacctggtctacagaggtgggagccagggtggaaagaagaggaaagattcagattaaatttttggaattatttttgtgccatgctgtctacttgaccacacatcagacagacatccaaaagtgctcgatgatagcgattgtcattcataacatttattgcagacccagacactgtactagttatttggaatttaaacttatagttttgtagggaaaatggacatatgaaaattaatgaaacacaacgtgatattaactccagtgaacctaaatagatggaacgagtactcaaaggagctcactcatctggggctttccaaaagaattcgtgggagaaataatatttgattttagcttccattgatgatgggttggagtttggtatgttgagaaatgggaagaaatgcactctggacagaaaatggaggtgcgtggctcagagttataaatgttcatggagtatttagagaaaattacatgaatggctgtgactggaacacggcaaatggacgagacagaatggtgaagagaagaatgagtatgatggagttttattttgcaggaaggcgtgctggggaactggcaaaccaatatgagatataaaaattgttaaaaatttggcaaagattcagaatttaatttcaagaaaaatttcactagacaccaaattaaccaaaaactgtatatcgtaatattaattctgataagtatttaccacaaaaccaagggtaattgactaaatcactccttcacatagcaagatgaaactaataatatctctgyagagcatgtggagtaactagctaatatgaatacagaaactgtgtccttttaaaaccatgttaactgcttattgtataaatgtt

SEQ ID NO: 38150 - DNA, 543 bp, Homo sapiens
ggctaaggcaggtaatgcacgtgagtgaggtaggctgggtgttgcacattaggtcttttctcccagctcatcaggtgtttttatgtgttctggtcatagctttataattcgtttcatagtggcagctgttctttttgtcacaattaaacatgtaggaattgtctttaaacatggccatcttggtcttgttttcccacttttaaaagtttttaagctcaaactatgtattgacctttacaagggcctaratacacagcttgatgaattttcaagtgtacacatccatgtaaacagcagccaggtcacagggcagcatcaccagcatgtcagaaccacctcccctgccctgtgttcccttccacccaagggtaaccactcacctgacttctcttccacccaggggtaaccactcacctgacttctcttccacccaagggtaaccactcacctgactacttttttttttgggtttttttttttttttgggagatagagtcttaccctgtaacctaggctggagtgcggtggcatgatcttggctca

SEQ ID NO: 38151 - DNA, 918 bp, Homo sapiens
caaactaaaactataacattctcagaagaaaatatgggaaaagttttgtgacaytgaatttgccaattattttttagatatgacaccatgaacacaggcaacataataaaacaataataaattagactatatcaaaatttaaaactcttgtatatcaaaggatgctaacagcataaagtaaacacaacctatggtttgggagaaaatatttccaaatcatgtatctagtaagggattaacattcagaatatataaagaaatcctaaaactcaagaacaaccccaacaatttcaaaatgggcaaaggaatacacacacacacacacacacacacacacacacacataatgcgtttctgtgagtaaactgagagattcacatgaagaaatcatgaaaaaatgcaacatgaaagaaaggtttagaaataagaaatagaaaaaaaccttttttacattggtttctaatagaagataataaaaagagtggaagagaaatgaactttcatggaaaccttttttttaattattatttttatttttttgagatgaagtctcgctctgtggcccaggctggagtgcagtggggtgatcttggctcactgcaaactccgcctcccaggttcaagcaattctcctgcctcagcctcctgcgtagttggaattacaagcgcccgcctaatttttgtatttctagtagagatggggttttgccatgttggccaggttggtctccaactcctgaccacaggtgatctgcccaccttggcctcccaaaatgctggaattacaggtgtgagccaccgcggctgcccaagaaccctttataattgaccattcttctgggcattactcttgcagtaaatgaatacctagcttcttgtttacggtagcagcttcttgccttcagaagtgaagaattg

SEQ ID NO: 38152 - DNA, 918 bp, Homo sapiens
caaactaaaactataacattctcagaagaaaatatgggaaaagttttgtgacactgaatttgccaattattttttagatatgacaccatgaacacaggcaacataataaaacaataataaattagactatatcaaaatttaaaactcttgtatatcaaaggatgctaacagcataaagtaaacacaacctatggtttgggagaaaatatttccaaatcatgtatctagtaagggattaacattcagaatatataaagaaatcctaaaactcaagaacaaccccaacaatttcaaaatgggcaaaggaatacacacacacacacacacacacacacacacacacataatgcgtttctgtgagtaaactgagagattcacatgaagaaatcatgaaaaaatgcaacatgaaagaaaggtttagaaataagaaatagaaaaaaaccttttttacattggtttctaatagaagataataaaaagagtggaagagaaatgaactttcatggaaaccttttttttaattattatttttatttttttgagatgaagtctcgctctgtggcccaggctggagtgcagtggggtgatcttggctcactgcaaactccgcctcccaggttcaagcaattctcctgcctcagcctcctgcgtagttggaattacaagcgcccgcctaatttttgtatttctagtagagatggggttttgccatgttggccaggttggtctccaactcctgaccacaggtgatctgcccaccttggcctcccaaaatgctggaattacaggtgtgagccaccgcggctgcccaagaaccctttataattgacmattcttctgggcattactcttgcagtaaatgaatacctagcttcttgtttacggtagcagcttcttgccttcagaagtgaagaattg

SEQ ID NO: 38153 - DNA, 1260 bp, Homo sapiens
ttcagcaaggttcaataactgagtgtctgaggaggtgctctcagctttcctgctgtgtcctcagactgcagcaggcccagagaacctacacrtcaagtgtgtattcaggagtctccatctgtcttccttaccgcccccgacctccgcccccccaccacagaaggccacattcttgtactcagacctagagagcctgaaggacctttctccattctccagtcccatttcagccatgggcactcctgcatgcctgcacctcaggttatatctctctcagctcctctgctccttgcccagccaccagcagtggctcttaccgcacaatggaatctcagactacctaaaggattttttttcatttctctgtctgccctcaggattcagcagaaacccttgtgcctctaactcaggaatttttctcagcactcctgccccagcccagctgtagtagcctctgccatgtacccttttggtgtgtaatgtgcctcagaagttttacagccctgccctcagctcgccaagcatggctgcatctcaacgcaggtcactgtgagttctcctgctcttatgccagtctaggtagctgctgccatgagggctggattacccaggcagggagagcttcttgccctgtccccagaattccacctgggcattgatagcctctgggaaagagctggtggttgggtacagactctatggctagtaccccctagaaattctaaattgtcttttacttaccctcatcaatggaggctttttttccttttccctgtgctctaccactgttaaaagcagctttgggtctcttaactcctagaaagtcttctcacttactgggttttgcttatttatgctttttcatggcctcagctcttggaggatttttaagaatctacaattttgtaagttatcttacttccctgattgacagcgagaatgatgttctcttatattgtcttcttccttagcagaagtggaagctttcaaagtgtaaaaaaattaacaatacataaaatgtttaagatattttaaccaaacacagcaggcctgttgaaggaaagcatttctttactaacaaaatcaagcagtctctgctgcataatttttttaatgtgaatttgttgacttttaattatcagagagatctaagcttccatatgctgaaataagcctttatggctatcagtttccagagtctgtccattaccatgaaaccatatttgtaaagcctctgagctaaagatacttttatattac

SEQ ID NO: 38154 - DNA, 1260 bp, Homo sapiens
ttcagcaaggttcaataactgagtgtctgaggaggtgctctcagctttcctgctgtgtcctcagactgcagcaggcccagagaacctacacatcaagtgtgtattyaggagtctccatctgtcttccttaccgcccccgacctccgcccccccaccacagaaggccacattcttgtactcagacctagagagcctgaaggacctttctccattctccagtcccatttcagccatgggcactcctgcatgcctgcacctcaggttatatctctctcagctcctctgctccttgcccagccaccagcagtggctcttaccgcacaatggaatctcagactacctaaaggattttttttcatttctctgtctgccctcaggattcagcagaaacccttgtgcctctaactcaggaatttttctcagcactcctgccccagcccagctgtagtagcctctgccatgtacccttttggtgtgtaatgtgcctcagaagttttacagccctgccctcagctcgccaagcatggctgcatctcaacgcaggtcactgtgagttctcctgctcttatgccagtctaggtagctgctgccatgagggctggattacccaggcagggagagcttcttgccctgtccccagaattccacctgggcattgatagcctctgggaaagagctggtggttgggtacagactctatggctagtaccccctagaaattctaaattgtcttttacttaccctcatcaatggaggctttttttccttttccctgtgctctaccactgttaaaagcagctttgggtctcttaactcctagaaagtcttctcacttactgggttttgcttatttatgctttttcatggcctcagctcttggaggatttttaagaatctacaattttgtaagttatcttacttccctgattgacagcgagaatgatgttctcttatattgtcttcttccttagcagaagtggaagctttcaaagtgtaaaaaaattaacaatacataaaatgtttaagatattttaaccaaacacagcaggcctgttgaaggaaagcatttctttactaacaaaatcaagcagtctctgctgcataatttttttaatgtgaatttgttgacttttaattatcagagagatctaagcttccatatgctgaaataagcctttatggctatcagtttccagagtctgtccattaccatgaaaccatatttgtaaagcctctgagctaaagatacttttatattac

SEQ ID NO: 38155 - DNA, 1260 bp, Homo sapiens
ttcagcaaggttcaataactgagtgtctgaggaggtgctctcagctttcctgctgtgtcctcagactgcagcaggcccagagaacctacacatcaagtgtgtattcaggagtctccatctgtcttccttaccgcccccgacctccgcccccccaccacagaaggccacattcttgtactcagacctagagagcctgaaggacctttctccattctccagtcccatttcagccatgggcactcctgcatgcctgcacctcaggttatatctctctcagctcctctgctccttgcccagccaccagcagtggctcttaccrcacaatggaatctcagactacctaaaggattttttttcatttctctgtctgccctcaggattcagcagaaacccttgtgcctctaactcaggaatttttctcagcactcctgccccagcccagctgtagtagcctctgccatgtacccttttggtgtgtaatgtgcctcagaagttttacagccctgccctcagctcgccaagcatggctgcatctcaacgcaggtcactgtgagttctcctgctcttatgccagtctaggtagctgctgccatgagggctggattacccaggcagggagagcttcttgccctgtccccagaattccacctgggcattgatagcctctgggaaagagctggtggttgggtacagactctatggctagtaccccctagaaattctaaattgtcttttacttaccctcatcaatggaggctttttttccttttccctgtgctctaccactgttaaaagcagctttgggtctcttaactcctagaaagtcttctcacttactgggttttgcttatttatgctttttcatggcctcagctcttggaggatttttaagaatctacaattttgtaagttatcttacttccctgattgacagcgagaatgatgttctcttatattgtcttcttccttagcagaagtggaagctttcaaagtgtaaaaaaattaacaatacataaaatgtttaagatattttaaccaaacacagcaggcctgttgaaggaaagcatttctttactaacaaaatcaagcagtctctgctgcataatttttttaatgtgaatttgttgacttttaattatcagagagatctaagcttccatatgctgaaataagcctttatggctatcagtttccagagtctgtccattaccatgaaaccatatttgtaaagcctctgagctaaagatacttttatattac

SEQ ID NO: 38156 - DNA, 1260 bp, Homo sapiens
ttcagcaaggttcaataactgagtgtctgaggaggtgctctcagctttcctgctgtgtcctcagactgcagcaggcccagagaacctacacatcaagtgtgtattcaggagtctccatctgtcttccttaccgcccccgacctccgcccccccaccacagaaggccacattcttgtactcagacctagagagcctgaaggacctttctccattctccagtcccatttcagccatgggcactcctgcatgcctgcacctcaggttatatctctctcagctcctctgctccttgcccagccaccagcagtggctcttaccgcacaatggaatctcagactacctaaaggattttttttcatttctctgtctgccctcaggattcagcagaaacccttgtgcctctaactcaggaatttttctcagcactcctgccccagcccagctgtagtagcctctgccatgtacccttttggtgtgtaatgtgcctcagaagttttacagccctgccctcagctcgccaagcatggctgcatctcaacgcaggtcactgtgagttctcctgctcttatgccagtctaggtagctgctgccatgagggctggattacccaggcagggagagcttcttgccctgtccccagaattccacctgggcattgatagcctctgggaaagagctggtggttgggtacagactctatggctagtaccccctagaaattctaaattgtcttttacttaccctcatcaatggaggctttttttccttttccctgtgctctaccactgttaaaagcagctttgggtctcttaactcctagaaagkcttctcacttactgggttttgcttatttatgctttttcatggcctcagctcttggaggatttttaagaatctacaattttgtaagttatcttacttccctgattgacagcgagaatgatgttctcttatattgtcttcttccttagcagaagtggaagctttcaaagtgtaaaaaaattaacaatacataaaatgtttaagatattttaaccaaacacagcaggcctgttgaaggaaagcatttctttactaacaaaatcaagcagtctctgctgcataatttttttaatgtgaatttgttgacttttaattatcagagagatctaagcttccatatgctgaaataagcctttatggctatcagtttccagagtctgtccattaccatgaaaccatatttgtaaagcctctgagctaaagatacttttatattac

SEQ ID NO: 38157 - DNA, 1260 bp, Homo sapiens
ttcagcaaggttcaataactgagtgtctgaggaggtgctctcagctttcctgctgtgtcctcagactgcagcaggcccagagaacctacacatcaagtgtgtattcaggagtctccatctgtcttccttaccgcccccgacctccgcccccccaccacagaaggccacattcttgtactcagacctagagagcctgaaggacctttctccattctccagtcccatttcagccatgggcactcctgcatgcctgcacctcaggttatatctctctcagctcctctgctccttgcccagccaccagcagtggctcttaccgcacaatggaatctcagactacctaaaggattttttttcatttctctgtctgccctcaggattcagcagaaacccttgtgcctctaactcaggaatttttctcagcactcctgccccagcccagctgtagtagcctctgccatgtacccttttggtgtgtaatgtgcctcagaagttttacagccctgccctcagctcgccaagcatggctgcatctcaacgcaggtcactgtgagttctcctgctcttatgccagtctaggtagctgctgccatgagggctggattacccaggcagggagagcttcttgccctgtccccagaattccacctgggcattgatagcctctgggaaagagctggtggttgggtacagactctatggctagtaccccctagaaattctaaattgtcttttacttaccctcatcaatggaggctttttttccttttccctgtgctctaccactgttaaaagcagctttgggtctcttaactcctagaaagtcttctcacttactgggttttgcttatttatgctttttcatggcctcagctcttggaggatttttaagaatctacaattttgtaagttatcttacttccctgattgacagcgagaatgatgttctcttatattgtcttcttccttagcagaagtggaagctttcaaagtgtaaaaaaattaacaatacataaaatgtttaagatattttaaccaaacacagcaggcctgttgaaggaaagcatttctttacyaacaaaatcaagcagtctctgctgcataatttttttaatgtgaatttgttgacttttaattatcagagagatctaagcttccatatgctgaaataagcctttatggctatcagtttccagagtctgtccattaccatgaaaccatatttgtaaagcctctgagctaaagatacttttatattac

SEQ ID NO: 38158 - DNA, 1260 bp, Homo sapiens
ttcagcaaggttcaataactgagtgtctgaggaggtgctctcagctttcctgctgtgtcctcagactgcagcaggcccagagaacctacacatcaagtgtgtattcaggagtctccatctgtcttccttaccgcccccgacctccgcccccccaccacagaaggccacattcttgtactcagacctagagagcctgaaggacctttctccattctccagtcccatttcagccatgggcactcctgcatgcctgcacctcaggttatatctctctcagctcctctgctccttgcccagccaccagcagtggctcttaccgcacaatggaatctcagactacctaaaggattttttttcatttctctgtctgccctcaggattcagcagaaacccttgtgcctctaactcaggaatttttctcagcactcctgccccagcccagctgtagtagcctctgccatgtacccttttggtgtgtaatgtgcctcagaagttttacagccctgccctcagctcgccaagcatggctgcatctcaacgcaggtcactgtgagttctcctgctcttatgccagtctaggtagctgctgccatgagggctggattacccaggcagggagagcttcttgccctgtccccagaattccacctgggcattgatagcctctgggaaagagctggtggttgggtacagactctatggctagtaccccctagaaattctaaattgtcttttacttaccctcatcaatggaggctttttttccttttccctgtgctctaccactgttaaaagcagctttgggtctcttaactcctagaaagtcttctcacttactgggttttgcttatttatgctttttcatggcctcagctcttggaggatttttaagaatctacaattttgtaagttatcttacttccctgattgacagcgagaatgatgttctcttatattgtcttcttccttagcagaagtggaagctttcaaagtgtaaaaaaattaacaatacataaaatgtttaagatattttaaccaaacacagcaggcctgttgaaggaaagcatttctttactaacaaaatcaagcagtctctgctgcataatttttttaatgtgaatttgttracttttaattatcagagagatctaagcttccatatgctgaaataagcctttatggctatcagtttccagagtctgtccattaccatgaaaccatatttgtaaagcctctgagctaaagatacttttatattac

SEQ ID NO: 38159 - DNA, 2025 bp, Homo sapiens
ttttctattaaaaattggtagcaaatagtggcataatatacctccttttcttgatatgggttaaaaccaaaagagatctctaaaatgcttgtgataacctgtggagaaaaattattattatttgatataaataagacacacaatgcattctgaaaattaatcaatttaactgaaattgacagatttaagggataaaaacataatttccgacgttatcagtctacaatacaattaataatatatgagtaacwaagtgaactttatattccaacttcaagatgatgtggaaattttttttataaatataatgaaagaaattaagttgttactcacatatggagaccacattaaatatgtatgtgtgtctgggtatatgcataattcatatatcaaaatttatcagtggcaagcttattttcagactctgagtgttttaatgttagaccaggtttgaattccctggtcacaaagaacttaaccatatcaaataagactagttaaatctaaatgtcttcccattcctctataagtatttccacctttcacattaggtaggaaaaaaaaaaacatgatttcattttagtaattgaaggcaactatgaggagtggaaatatttagagtaaatttcaactctattaactaacagttgtatatgcttgcttccattacataatgtaccggaacttcagtcttttcatccacaataaggataaataacaccctacttcactatagttcatgataaaagaaactaaacaattattgagtgccaactatgtgcatagcactgtgccttgcaggcattcaatagaatcatcaaaacttttctttaaaagcatcattagccccactttaacaatgaaacctgcccaaagtcacacagttaagaaacagcagagtaaagaaaatcccattctctaaaccactagcaaagtaagaaaagcatgaaattttcttaatgtgctagaagtgtttgactaatattagttgttattattatacttctttcttttaccttaaaaaattgtactggtgttccttctcctttttatttctttagacagagccttgctgtgttgcccaggctggagtgcagtggtgcaatctcagctcactgcaacctccgcctcccgggttcaagcgattctcatgcctcagcctcccaagtagttgttgggacttgctgcccacacccagctaatttttgtatttttagtagagacagcgtttcaccatgttggccaggctggtctccaactcctcgcctcaagtgatccacgcaccttggcctcccaaagtgctgggattacagaggtgagacaccacgcccagcctcttattccttcttttaaaagcaatggcaagtcattgtagcaaaggatcttgtggtaggaaaagaatgattctgctaaacttgtaaaggtctaaagctgcctcactctaaaggagtgactatgtttgattattgattatatgactttccaattagccttaccattttctgtcatcaaccttacagaacttatttttaaattagaaaaactcagatagtttctttaacctgtgttgttacaaaatataatctcatacaaattatgctatatcaaaacatatattttcaagggctattatgcattttcaaagtggcctaacatatttctaaatgttttatgctgttttgtttttcaaatattattgtatagaccacaaaacaattggaaaacaatattcaaaatgcaagttgtgagaaatccaattgtaaaagcaattcttttctgtttattctatcactaggatttagcaatatcacatgcatatggcttaatatggtagaaattatcattatggaattttgggggggtaaaaagtatctctttaggcaaatgtttaagcacaacgtgcttataatggccatgacagttggacaaatccaagattcagaggaagttgtgattagagagagaaacactcaggccagcatgactgaaaaattagaagcaatccaataagctaaagttcagtta

SEQ ID NO: 38160 - DNA, 2025 bp, Homo sapiens
ttttctattaaaaattggtagcaaatagtggcataatatacctccttttcttgatatgggttaaaaccaaaagagatctctaaaatgcttgtgataacctgtggagaaaaattattattatttgatataaataagacacacaatgcattctgaaaattaatcaatttaactgaaattgacagatttaagggataaaaacataatttccgacgttatcagtctacaatacaattaataatatatgagtaactaagtgaactttatattccaacttcaagatgatgtggaaattttttttataaatataatgaaagaaattaagttgttactcacatatggagaccacattaaatatgtatgtgtgtctgggtatatgcataattcatatatcaaaatttatcagtggcaagcttattttcagactctgagtgttttaatgttagaccaggtttgaattccctggtcacaaagaacttaaccatatcaaataagactagttaaatctaaatgtcttcccattcctctataagtatttccacctttcacattaggtaggaaaaaaaaaaacatgatttcattttagtaattgaaggcaactatgaggagtggaaatatttagagtaaatttcaactctattaactaacagttgtatatgcttgcttccattacataatgtaccggaacttcagtcttttcatccacaataaggataaataacaccctacttcactatagttcatgataaaagaaactaaacaattattgagtgccaactatgtgcatagcactgtgccttgcaggcattcaatagaatcatcaaaacttttctttaaaagcatcattagccccactttaacaatgaaacctgcccaaagtcacacagttaagaaacagcagagtaaagaaaatcccattctctaaaccactagcaaagtaagaaaagcatgaaattttcttaatgtgctagaagtgtttgactaatattagttgttattattatacttctttcttttaccttaaaaaattgtactggtgttccttctcctttttatttctttagacagagccttgctgtgttgcccaggctggagtgcagtggtgcaatctcagctcactgcaacctcygcctcccgggttcaagcgattctcatgcctcagcctcccaagtagttgttgggacttgctgcccacacccagctaatttttgtatttttagtagagacagcgtttcaccatgttggccaggctggtctccaactcctcgcctcaagtgatccacgcaccttggcctcccaaagtgctgggattacagaggtgagacaccacgcccagcctcttattccttcttttaaaagcaatggcaagtcattgtagcaaaggatcttgtggtaggaaaagaatgattctgctaaacttgtaaaggtctaaagctgcctcactctaaaggagtgactatgtttgattattgattatatgactttccaattagccttaccattttctgtcatcaaccttacagaacttatttttaaattagaaaaactcagatagtttctttaacctgtgttgttacaaaatataatctcatacaaattatgctatatcaaaacatatattttcaagggctattatgcattttcaaagtggcctaacatatttctaaatgttttatgctgttttgtttttcaaatattattgtatagaccacaaaacaattggaaaacaatattcaaaatgcaagttgtgagaaatccaattgtaaaagcaattcttttctgtttattctatcactaggatttagcaatatcacatgcatatggcttaatatggtagaaattatcattatggaattttgggggggtaaaaagtatctctttaggcaaatgtttaagcacaacgtgcttataatggccatgacagttggacaaatccaagattcagaggaagttgtgattagagagagaaacactcaggccagcatgactgaaaaattagaagcaatccaataagctaaagttcagtta

SEQ ID NO: 38161 - DNA, 2025 bp, Homo sapiens
ttttctattaaaaattggtagcaaatagtggcataatatacctccttttcttgatatgggttaaaaccaaaagagatctctaaaatgcttgtgataacctgtggagaaaaattattattatttgatataaataagacacacaatgcattctgaaaattaatcaatttaactgaaattgacagatttaagggataaaaacataatttccgacgttatcagtctacaatacaattaataatatatgagtaactaagtgaactttatattccaacttcaagatgatgtggaaattttttttataaatataatgaaagaaattaagttgttactcacatatggagaccacattaaatatgtatgtgtgtctgggtatatgcataattcatatatcaaaatttatcagtggcaagcttattttcagactctgagtgttttaatgttagaccaggtttgaattccctggtcacaaagaacttaaccatatcaaataagactagttaaatctaaatgtcttcccattcctctataagtatttccacctttcacattaggtaggaaaaaaaaaaacatgatttcattttagtaattgaaggcaactatgaggagtggaaatatttagagtaaatttcaactctattaactaacagttgtatatgcttgcttccattacataatgtaccggaacttcagtcttttcatccacaataaggataaataacaccctacttcactatagttcatgataaaagaaactaaacaattattgagtgccaactatgtgcatagcactgtgccttgcaggcattcaatagaatcatcaaaacttttctttaaaagcatcattagccccactttaacaatgaaacctgcccaaagtcacacagttaagaaacagcagagtaaagaaaatcccattctctaaaccactagcaaagtaagaaaagcatgaaattttcttaatgtgctagaagtgtttgactaatattagttgttattattatacttctttcttttaccttaaaaaattgtactggtgttccttctcctttttatttctttagacagagccttgctgtgttgcccaggctggagtgcagtggtgcaatctcagctcactgcaacctccgcctcccgggttcaagcgattctcatgcctcagcctcccaagtagttgttgggacttgctgyccacacccagctaatttttgtatttttagtagagacagcgtttcaccatgttggccaggctggtctccaactcctcgcctcaagtgatccacgcaccttggcctcccaaagtgctgggattacagaggtgagacaccacgcccagcctcttattccttcttttaaaagcaatggcaagtcattgtagcaaaggatcttgtggtaggaaaagaatgattctgctaaacttgtaaaggtctaaagctgcctcactctaaaggagtgactatgtttgattattgattatatgactttccaattagccttaccattttctgtcatcaaccttacagaacttatttttaaattagaaaaactcagatagtttctttaacctgtgttgttacaaaatataatctcatacaaattatgctatatcaaaacatatattttcaagggctattatgcattttcaaagtggcctaacatatttctaaatgttttatgctgttttgtttttcaaatattattgtatagaccacaaaacaattggaaaacaatattcaaaatgcaagttgtgagaaatccaattgtaaaagcaattcttttctgtttattctatcactaggatttagcaatatcacatgcatatggcttaatatggtagaaattatcattatggaattttgggggggtaaaaagtatctctttaggcaaatgtttaagcacaacgtgcttataatggccatgacagttggacaaatccaagattcagaggaagttgtgattagagagagaaacactcaggccagcatgactgaaaaattagaagcaatccaataagctaaagttcagtta

SEQ ID NO: 38162 - DNA, 615 bp, Homo sapiens
gtgtattctgcccttatgggtggagtattctataaatttcagttaggtcaggttggttgatagtattcttcaggtcttctataaccttactggcctactttttcttttcttttttttttttttcctgagatggagtctcacttggtcgcccaggctggagtgaagtggtgcaatcttggctcactgcagcctctgcctcccggattcaagcaattctcctgccttagcctcccgagtagctgggactacagttgcaggctgccatgcctggataatttttgtatttttagtagagacagggtttcaccatgttggccaggatgatcttkatctcctgacctcgtgatcctcccgccttggcctcccaaagtgctgggattacaggcatgagccaccttgccaaggctggttgcctactttttctgtgatcactgtgaaaggagtattgaagtctccaactgtaattgtggatttgtctatttctcctttcagttctatttgttttgcttcgtgtattgtgaaagccactaaagctatggctttctgttgtggtaaaggcattgatgaattggagaattccctcaggcaaaaagatagaaacttgtagtgagatgc

SEQ ID NO: 38163 - DNA, 622 bp, Homo sapiens
cttctgctaatgtaagaccattattcagtctcctttaggttagtcattttatgtcctcaaaatacagtctatatgtgttgtytttgtctcccgttatgacttattcgtttagtccttgcaatctgcattctcttttcactgttcttttgaacagttttctcaagaatcaccaatgactttccagggtataaacacaatacattattattaataatgatcttcttttaattccctagcatttatcctttgataactaattcatacttcttagaaacatttattctttggcctctggaagagtgctcccttcttatcccggattgttttctctctgaaaatgttgatgactcttttttgtccctgccccaatggttggtgttctccaaagtcatcctagtctctcccttttcattctctctctatctaaaactacccatttattttctattttaccaccttcaaggtgatgatggttcatgcacccgttccaagcttctccttcctgggctccagttctgcattattaagagtctggtgaatgtctccactgaacgtcataggcacctcaaactcaccatgcttaaaactgaactaatgacttttcacttacactgtctcttac

SEQ ID NO: 38164 - DNA, 675 bp, Homo sapiens
ctgggagtcagtctatctccttatctgtaaaagagaaaactgagacctagacaggtggctatttattatacaagctaatattccttgaagacatatgggccagcacggtgctaagcagtttacctaggttgtgtcatagtacctaaaaggtagatactgttattattataaccacttcatagatgaagaaactgagtttagtgagtttaacttatttgcccaatatcaagttggcaagttttgttactggaatttcaacacagccagatttactatagagtcaaaaaacctatcattccttttaggagtgattcactcaggcaaggagcagagcccttaacttttasaaaaatgtagaaggtctgagcttcttcctgagaagtcttgtcaatggtgagaagggagactttgctatgaggaggtacaataagcaagattttgagaaaagaagagcacagaccctctgcttggtgaactgtcctaattccttagtgagtttgttatttaaaataacacttcccctaagtctgggggacagaccacctgggcttctgttcacatggatcatgtgaaatgattgtcagttttctctcctggtgctgtgctgactgacaacctcaacactgagattcaaatgtcttcttttagtatgttatagattagaaaatggcatcc

SEQ ID NO: 38165 - DNA, 600 bp, Homo sapiens
cataagagggtacattaaattttgaaggtagctatgctgcacaatactttaaaattaaataattatacagtattgatttatgcttaaaattccagtcttaggctggtgtggtggctcatgcctgtaatctcagcasttttggaagcctaggtggcagatcacctgaggtcaggagttcaagaccagcctgaccaacatggtgaaaccctatctctactgaaaatacaaaaattagctgggcatggtggtgcatgcctgtaatcccaactacttgagaggctgaggcacaataatcgcttgaacccaggaggtggaggttgtagtgaaccgagatagtgtcactgcactccagcctgggcaacaaaacgagactccatctccaaaaaaaaaaaaaaaaaaatccagtcttagaccaagctcgttttagaccagcactgacgtttttgtcatctctcaggactcacagaattagttcgataactgccttggagtctgaatgtatcctaatcctctcatgggagttgttcactttagctgagaagaagctgtcaggatctatgtgctacttggctgctgttccaaagcaagtgttattgtttc

SEQ ID NO: 38166 - DNA, 600 bp, Homo sapiens
cataagagggtacattaaattttgaaggtagctatgctgcacaatactttaaaattaaataattatacagtattgatttatgcttaaaattccagtcttaggctggtgtggtggctcatgcctgtaatctcagcagttttggaagcctaggtggcagatcacctgaggtcaggagttcaagaccagcctgaccaacatggtgaaaccctatctctactgaaaatacaaaaattagctgggcatggtggtgcatgcctgtaatcccaactacttgagaggctgaggcacaataatcgcttgaacccaggaggtggaggttgtagtgaaccgagatagtgtcactgcactccagcctgggcaacaaaacgagactccatctccaaaaaaaaaaaaaaaaaaatccagtcttagaccaagctcgttttagaccagcactgacgtttttgtcatctctcaggactcacagaattagttcgataactgccttggagtctgaatgtatcctaatcctctcaygggagttgttcactttagctgagaagaagctgtcaggatctatgtgctacttggctgctgttccaaagcaagtgttattgtttc

SEQ ID NO: 38167 - DNA, 665 bp, Homo sapiens
ggctgatggatattgagatattagcaattatctcagagttaatggaataaaagtgatttttaattatctttttttatttctcatgtttctaatttttctataatggayacccaaacacacacacaaacacgcaccataggttcttgtggcccttctcagttctaaggggttcaggttcagggtccagattctcagatttcagcacaggcaagtcatatgtatggatgttaagcatgtggaggaaagttaaatggttaagtgacatctcatcatcagatagtttccatctgagaccagagaggtcactggcaacttaaccatcagtccagaccttgaatttctgaaagcctgcagttcccaccagatttagccaagccagaaatatgtaaagtaattcttaacagataaacgtgagtttgaggtggttgtttgtgtggggagtcactgatcggagatatattaagtgcctgtgttgccatgtatactttaatatattcctctggagcaatttactccagagttactattaataaagggagtatgtactatctcccaaggatggttgggtgtaagtaatagctaagagtaatttttcacagctggatgcagtggctcaccactgtactcccagcactttgggaggccaaggctggaggatcacttga

SEQ ID NO: 38168 - DNA, 1295 bp, Homo sapiens
tgcataagtatacatacaaaaatagaaaaatatctagagagctacctgtaaagtttttaacaatagttaacatttgtgttaacttacaggaaagactttaactttttactttatatacctccaaatgtttattaattcataagagtgagtgcctggttattttaaaattcaatacattgcttgagcccaggagtttgagaccagcctgggcaaaayggtgaaatcttgtctctacgtaagacaaaaaatggccaagtttggtggcatgtgcctgtagtcccagctactcagcaggctgaggtgagaggtttgcttgagcctgagaggcaggcgttgcagtgaggcaagattgtgccactgcattccagattgagtgacagagtgagaccctgtctcaatttaaaaaaaaaataattaagatacaggtttcaaaccatattaccacgatttcaaaaattttgtgaataaaagaagacacactgtatttataaagcttctaggggctgtaatagatacataattttggatgtggtataggttggcctatatatacaaaaatacgtcactaaaattaagtggagtcacaataactttttatgtaactttgttttagttctaatttggtaacagtgactcaaaataaatagaatcatattttaggtggaaactcgatgatccatgtaagtagcggggctggagttctgtgctgtctgggcagagaaagcacttggactgaatgatgggcacagctctctctgtgaagtcctgcagagtcactaaccttgagttcatgtgctctaagcttcactgtccctccaacccaagatcccaatttcttttattccatcttgtttcctcttgtaaacagaagagcacaatatgacctgttttcaaaggagccggcaggaatctggttctgataacaaagtccctgtcactcctgtgtctattagttctcctaggtagtttcttcagggctgcgccaacttcacttcacagtagatgaaggaatagtgccatggagaatggcatccagaagaggtatactggaaagctaatgccccaggatctctgaagaacatatcaggcctgaggcttggggtcatggatggttttcaaagagcagaatcttccataaccttacatagcatcttcatagtccacatctgtaatgtttgctttcctcagcctggaatagatgtctaaggaaacctggaagcaaagattaggactagagcagggaagacaagcagaacatgcctccactggtccccttccccagttagcttggatgc

SEQ ID NO: 38169 - DNA, 555 bp, Homo sapiens
ggtctatagctttggaagatatcctagaatcagcgctccagcacatggatttatttagacaaaacaatgtgttagcttatcattatgctataatttttggatagctttccttaaaaatcttaaaatgaagtgtgttttaaaaatatttttctttacacagaacccgccccaaaattctccatttgtcttcccaaaatcaaagttgtacttaaagatgtaaaataaacatttttgcactaagtacttgaaggaaggctgaccaatgtctcattcgaaggaaggctgaccaatgtctcaatctcagtttgtgacgttatgtagactttggagaaagccaacttagtgacattggcagaamtgaggaaagggggtagactctgcatatgtttaacttgatataatatgaatgccagtgtgtcaattgattattttaatatcagtggttatgaggaagcaatgtgttttataatcaaccttactttcaggttaatagctattttttaatatcttacaattttataatacaaaaaatattataatcctataatacaaaaa

SEQ ID NO: 38170 - DNA, 537 bp, Homo sapiens
tttctttggtatctggtargatttagttggccttcctatcttgtggatttcatagatataaaataaggaatgtgtgctgtgttgcccagagctataactttttcatgcagtcaacaggagtaactcaaaagaaaagctaaaaaatcatttttgaattttctgatgtcataaaataattgtgacataaactctctcgatgtgtaattcaatcttgaacttacttgaggatgtaattagtggaaaaccccagataagctggagttcacgtatctctcgtggtacacagactttctaagagacaagtggaaatggggagtcataagggaatctatttctaagttctcaccttctttaggtactctttcctaaaactgacttgcccctggaatgtgtatgttgaagtcattcagtcagggccagcttcatgggcatgtgatctgtgcagcagcacagggtcacaccctggtttaatgttctctgccaccatctggaaattcttaataatttttttaataaaaagggctctacatttctggt

SEQ ID NO: 38171 - DNA, 712 bp, Homo sapiens
caagacttgcattgatttgcctctttgctctaattacatcacagtgggggttatayagtggatcactctgagttgggtactttttcaataagaaggtatggtatggtgttggtttccaggtttctaggtaacatagtagttaagtactgtggtacttaagacacaaagtacacaaaacctattcctacaatagctgaggctaataaggaaaaaaaatgattcagaccagaaagctggtcctggagatagatctttttggctcttgtattggcagtttattactatatattaacatataaactcatcacatacactaccccactactcccactgccctgatagtgatgtaaaaaaaataacactagcttcgacatttctttgactcataaataatgtttgggatttgggactatgccttttacaagatggtgctcaataaaaactcactagttaagagagttataatttctggtcattttcacttgcagcttcctcctggttccctgggctcaaaaattatggattcattttctttctttacagttctcttttctctgagtccatgagagataacccatgattaagttctattatctttttttcaggatgattgtctctgagatacatatctttctatctgagggtgggggttggccctcttataccccagtagcaattaacatgtggaagacctggaagcattcaccatttt

SEQ ID NO: 38172 - DNA, 712 bp, Homo sapiens
caagacttgcattgatttgcctctttgctctaattacatcacagtgggggttatacagtggatcactctgagttgggtactttttcaataagaaggtatggtatggtgttggtttccaggtttctaggtaacatagtagttaagtactgtggtacttaagacacaaagtacacaaaacctattcctacaatagctgaggctaataaggaaaaaaaatgattcagaccagaaagctggtcctggagatagatctttttggctcttgtattggcagtttattacyatatattaacatataaactcatcacatacactaccccactactcccactgccctgatagtgatgtaaaaaaaataacactagcttcgacatttctttgactcataaataatgtttgggatttgggactatgccttttacaagatggtgctcaataaaaactcactagttaagagagttataatttctggtcattttcacttgcagcttcctcctggttccctgggctcaaaaattatggattcattttctttctttacagttctcttttctctgagtccatgagagataacccatgattaagttctattatctttttttcaggatgattgtctctgagatacatatctttctatctgagggtgggggttggccctcttataccccagtagcaattaacatgtggaagacctggaagcattcaccatttt

SEQ ID NO: 38173 - DNA, 2252 bp, Homo sapiens
attgtaggatcagctataggaggcatcactggaaaagcatgacaagtggccaaggcctggggcaggtggggccagcagatatgaggaattcctcaaactgggtctagaacaatgggctataattaatagaccttctaaactaaaagagtagtttcatttttaagaatatgccacagatacactaagaaaatttcaagcaatttctatccattaacaatttctatccatctgttcatatgatgatctcacttgacctttaaataataaataagytcagatctgtgaggttaaataccgtgtcaagctgacacattcagagacagctccctacagaaaacagacactgcacatcaaaataatgccctcctctggacagattacaggaccaattcatgatccacccaccacagcatagatataatccttcagaaaataataaattctaggtagaattcaaaatctaaagactgtcttataatccttccctctgagacatcaaagcaaaagtgttacagttcaggggaactgaaaaagctcaactccatattttatcatggaaatatattatgcttttaaaaagttactatattcattatgtgcttttacatgtatcatgttatttaatcctcataatcaccctaggatgcagggtatattactgcccctgctacagatgagaaaactaaggcacaaatatgtgtaatttgcccacagccagcgtctgagcgctgttggtctgagcccagagccccacacacacacagtcattcaacaggtatgtgagcacctgccagaagctggagatatagaggtgcagacagcacatggccctgcttgcacagagtttatgctctatgggaaagacaggcattaaagaagtaatcacaagtaaataaaggacaagcagagtcctatggaagttcacaccctgtgcctactcaaaaatctatggtgcaaagtttgtggtcatattagtatcaactatcaaggttaaatctgcaagtacacatattcaggagaaaatacaagccagtcagaaatactagtgcattttagtttgtattttctctatatacagtacagtggtcattttccaaacccaaacaggtcctgataaataactttttccagtatgttaactaatttacacgtttactgatttactcatttaatatttttcttacccaggctttaaagttcagtgaaattaattatatattcatttaaccatcttcattttcaaaagaacaaagaacaaaagaacaaaatatataaattctggtactgctcaggaaaatataagagtataactataacatagttaaaataatctctttcacacagataattctatgataaatagataaactgcatcctatagaataaggcttctcagaagtgacttcttggcttgtttgaggagagagtttgacagtcataagcagcccagattctggcatcagatggagcaagactagatttacttcctacctataactggacaaggctcctagcctctataagtcctgattctttcatccgtaaaatataataaagttggcatacctcaaagggttgttgtgaaggttaaaggagataatgcatgtaaagtgtttagcatagttcttgacccacagtaagcacctaatgtatatgagctgtcattcctattatgaatcctctaaatggtttgcatattgaaagaaacagaaaaagaagacatggtaaatggatggtatatgaatgagatgcttgaaatgtgtgagggagcatggcctaaagagccacccgattacaccaagggcagcagagtgagaacaactctatacatcccacatgcagagacctcactggaaaggagaagggcaaatggaagctgacaggtggttagtaattacatagtcaattcatgtttacagaggagagagaacttcaacggggataattaaaacaataatccacctctggctttcgttcctgcctaaacggcacctaaaagaccttgagagagaagagacagttcaaacagacacttgtttccacttctgtatgcctacttgtccttatcccttatcaacaggtatagcctcaggttagaagtcacgtgataaacgccacaggatggaaggggacccagaacttggggttttcaagttttaaagccacaagacctctgcttaaaagtctgaaaaagtagttaaaatgtgcagctactcaaaccctagcagcgatggggtcccacagcccaggca

SEQ ID NO: 38174 - DNA, 772 bp, Homo sapiens
tgcatccataaaaaaggatgagttcatgtcctttgtagggacatgaatgaagctggaagccatcattctgagcaaactattgaaaggacagaaagcgaaacaccgcatgttttcatttataggtgggaattgaacaatgagaacacgtggacacagggtgggtaacatcacacaccagggcctgttgtggagtgggtcaaggggggagggatagccttaggagatgtatctaatgtaaatgatgagtcaatgggtgcagcacaccaacatagcacatgtatacatatgtaacaaacctacacgttgtgcacatgtaccctagaacttaaagtataataataaaaatcataaaataaaaaagtgmatgtaataaatttgtatatttggatatactgatctagcatagataacatatataaaaatgtacataaaacttagcagtatttgactaagaggtaaaagattaaaaggagttaaagatggttacgtttattctacatatatttgccatatttaaatatattatttttctacttttaaatatcttatttctcatatcatttgaacctataattctacttctcagaagtcgtcttaaggaaatgataaaaaagtcagaaaagagtggagaacaaatattgtaatccatattatataaattgactaagttgaaaatacccaaaaaattcagccacagggaactgattaagtaaatcaggttgaagtcttaaatatgacacttgttcacatcaaaagtatgtctttcaaagac

SEQ ID NO: 38175 - DNA, 1252 bp, Homo sapiens
tatatacaaggttgttattgactctccagtagttagcttttctcatttccctaactcgtagataacactaacaaaaaatttagtggctggatcacggtggatgctaaaaaaaaaaaatgacaaatttaacaactattttcacccactattgggtctatgtttaatgctttgttttttgccaatgactagcactttacacattygtgtctgtggaagaaattagcgcatgagagggtaaatggattttctagggttttgagtatttccacacaaagtatattgtttgacatcaacctgctgattgctaattatttttagtaggctaactaggctgtaaatatctttatatcattcctcagatcaataatttcatagttactaaaggagtgccttaaagatcctgataccttaattggaccagttttaccctcactttttagttttagacattgtaacggtggctcttctttcataattttatgtcactgtgaagatgctataaacttcctcttatccaggttataaggacccatagtgtcctctcaatgtattgttgtgcttctgctgggtttcttgaaaaaagcactgctttaacctagttctgacagggtctactaatgctacataaccctacaaccaactgatgcctgtgctctgaaccgggcttgtggcagacagcttgcaaatactagatagttttgacatttgcttatctacttttttgtttggtcctgggttcacaactacagtataagccccatgtagtagggattgttcctgatacatttctgagccatgttctctagaaaaaggtgcaggttaaattgggaatgtgaaacattttttttgttgttgttcttcagggttctttattccatctttcataaaagagatgtcagaaaaactgtttctcagtcacctttaccatggcatttgtcttctgagttgattacgactttaattcaacaatgagaagccaatataaactcatcagttcatggtctgtggaggcatgtgctttacagatgaaagtaaatcatataattatccctgctccacaggaagcaaattatttcaattatctgaaattaactctatatctagatttctcccaggtaaacaattgctgtttgggtacagtggtgcggatattgtcagaaaacatttatattaacacttaaagtgacacagtaacacacctacatagtctcatggatagaaagtaaatatctggctaaatcacacacatgca

SEQ ID NO: 38176 - DNA, 1252 bp, Homo sapiens
tatatacaaggttgttattgactctccagtagttagcttttctcatttccctaactcgtagataacactaacaaaaaatttagtggctggatcacggtggatgctaaaaaaaaaaaatgacaaatttaacaactattttcacccactattgggtctatgtttaatgctttgttttttgccaatgactagcactttacacattcgtgtctgtggaagaaattagcgcatgagagggtaaatggattttctagggttttgagtatttccacacaaagtatattgtttgacatcaacctgctgattgctaattatttttagtaggctaactaggctgtaaatatctttatatcattcctcagatcaataatttcatagttactaaaggagtgccttaaagatcctgataccttaattggaccagttttaccctcactttttagttttagacattgtaacggtggctcttctttcataattttatgtcactgtgragatgctataaacttcctcttatccaggttataaggacccatagtgtcctctcaatgtattgttgtgcttctgctgggtttcttgaaaaaagcactgctttaacctagttctgacagggtctactaatgctacataaccctacaaccaactgatgcctgtgctctgaaccgggcttgtggcagacagcttgcaaatactagatagttttgacatttgcttatctacttttttgtttggtcctgggttcacaactacagtataagccccatgtagtagggattgttcctgatacatttctgagccatgttctctagaaaaaggtgcaggttaaattgggaatgtgaaacattttttttgttgttgttcttcagggttctttattccatctttcataaaagagatgtcagaaaaactgtttctcagtcacctttaccatggcatttgtcttctgagttgattacgactttaattcaacaatgagaagccaatataaactcatcagttcatggtctgtggaggcatgtgctttacagatgaaagtaaatcatataattatccctgctccacaggaagcaaattatttcaattatctgaaattaactctatatctagatttctcccaggtaaacaattgctgtttgggtacagtggtgcggatattgtcagaaaacatttatattaacacttaaagtgacacagtaacacacctacatagtctcatggatagaaagtaaatatctggctaaatcacacacatgca

SEQ ID NO: 38177 - DNA, 1252 bp, Homo sapiens
tatatacaaggttgttattgactctccagtagttagcttttctcatttccctaactcgtagataacactaacaaaaaatttagtggctggatcacggtggatgctaaaaaaaaaaaatgacaaatttaacaactattttcacccactattgggtctatgtttaatgctttgttttttgccaatgactagcactttacacattcgtgtctgtggaagaaattagcgcatgagagggtaaatggattttctagggttttgagtatttccacacaaagtatattgtttgacatcaacctgctgattgctaattatttttagtaggctaactaggctgtaaatatctttatatcattcctcagatcaataatttcatagttactaaaggagtgccttaaagatcctgataccttaattggaccagttttaccctcactttttagttttagacattgtaacggtggctcttctttcataattttatgtcactgtgaagatgctataaacttcctcttatccaggttataaggacccatagtgtcctctcaatgtattgttgtgcttctgctgggtttcttgaaaaaagcactgctttaacctagttctgacagggtctactaatgctacataaccctacaaccaactgatgcctgtgctctgaaccgggcttgtggcagacagcttgcaaatactagatagttttgacatttgcttatctacttttttrtttggtcctgggttcacaactacagtataagccccatgtagtagggattgttcctgatacatttctgagccatgttctctagaaaaaggtgcaggttaaattgggaatgtgaaacattttttttgttgttgttcttcagggttctttattccatctttcataaaagagatgtcagaaaaactgtttctcagtcacctttaccatggcatttgtcttctgagttgattacgactttaattcaacaatgagaagccaatataaactcatcagttcatggtctgtggaggcatgtgctttacagatgaaagtaaatcatataattatccctgctccacaggaagcaaattatttcaattatctgaaattaactctatatctagatttctcccaggtaaacaattgctgtttgggtacagtggtgcggatattgtcagaaaacatttatattaacacttaaagtgacacagtaacacacctacatagtctcatggatagaaagtaaatatctggctaaatcacacacatgca

SEQ ID NO: 38178 - DNA, 1298 bp, Homo sapiens
cattagttttgcctcttacttgttagagggtgggggagtattgtaataatcttcaattctcaaaggtaatagcaaaggaattgaaagactgaaaggcatgacattaacgttcctataaatgaaaggatttaggttattttagaggagaaatttatctattaagaatgtgttggggctcagaaagtgatatcccaaaataaaagcctaagaagcaaccccagaagcaaagtctctctctgaccttattctacctcctgtctcttgcctttcattctccccctaggcaagccatagaaactagatttcctcttccccaaggtaggtcataaaaaccataatrtctttttcccaaagccagccataaagcctaaaaacataataacatcccccgcaccacttctctgtgcaacagctggccataaagaaattaagactctctttccagaaggtcctacaccacacccaggaggaaggaatgcttcacagaaagtccaagaaaaattggaacaggactggctgagttccccaactcagtctgttatcgttagatcagatccttcttatccaactgtatttcaacatggctgtccatatttaattgaacctaagtataaaaatgaacagttatccctgtatctttgtgtcttcattctgaagattctcaagtcacttaaaactacaatgctttacttttgttaacctgctttttttttataggggtgtcagccatgacctttataatggggaagaaaggggtggttttctttccacccctaaaatgaaatgcctctaatcacagaatagctcagatttggttgcttgattacaattgaaatttatttgctcaaattaacatttataaataaaacattaatagctgagtatctttgatatcagttttctcctcaaccatcaccccacatcttaaattatcttattcttgatttctttaaaggactttttaaaggaaagtttataaaaataaatgtttgctcctcttgtttctttgtacatttatttttgtttaagctgtttggttgctaaaaggtccttttcttaagaaagtttccaggttgaataacatatctaaaccttaagtcacattttataacagtcaaacatggaaaataatctcaaatcaaaatgctaaggctattagaaagtactagaaacctgctaggtataaccataacaaatgtatttgaaactttttctagcattacatagcagaatttggttaaaatacaaaaactaccttcttttaatttttttcattttgtttacttgtattaaattta

SEQ ID NO: 38179 - DNA, 1298 bp, Homo sapiens
cattagttttgcctcttacttgttagagggtgggggagtattgtaataatcttcaattctcaaaggtaatagcaaaggaattgaaagactgaaaggcatgacattaacgttcctataaatgaaaggatttaggttattttagaggagaaatttatctattaagaatgtgttggggctcagaaagtgatatcccaaaataaaagcctaagaagcaaccccagaagcaaagtctctctctgaccttattctacctcctgtctcttgcctttcattctccccctaggcaagccatagaaactagatttcctcttccccaaggtaggtcataaaaaccataatatctttttcccaaagccagccataaagcctaaaaacataataacatcccccgcaccacttctctgtgcaacagctggccataaagaaattaagactctctttccagaaggtcctacaccacacccaggaggaaggaatgcttcacagaaagtccaagaaaaattggaacaggactggctgagttccccaactcagtctgttatcgttagatcagatccttcttatccaactgtatttcaacatggctgtccatatttaattgaacctaagtataaaaatgaacagttatccctgtatctttgtgtcttcattctgaagattctcaagtcacttaaaactacaatgctttacttttgttaacctgctttttttttataggggtgtcagccatgacctttataatggggaagaaaggggtggttttctttccacccctaaaatgaaatgcctctaatcacagaatagctcagatttggttgcttgattacaattgaaatttatttgctcaaattaacatttataaataaaacattaatagctgagtatctttgatatcagttttctcctcaaccatcaccccacatcttaaattatcttattcttgatttmtttaaaggactttttaaaggaaagtttataaaaataaatgtttgctcctcttgtttctttgtacatttatttttgtttaagctgtttggttgctaaaaggtccttttcttaagaaagtttccaggttgaataacatatctaaaccttaagtcacattttataacagtcaaacatggaaaataatctcaaatcaaaatgctaaggctattagaaagtactagaaacctgctaggtataaccataacaaatgtatttgaaactttttctagcattacatagcagaatttggttaaaatacaaaaactaccttcttttaatttttttcattttgtttacttgtattaaattta

SEQ ID NO: 38180 - DNA, 577 bp, Homo sapiens
ttgaaggaggtgagggaatgagttgtgcaagcgagtaggtaagagtgagccaagcagataagcagccagccaaagtccaggtgagagtatctggagttctggagttgggggcttccacttcccacttccaaccaagatggaggagtaatagggaccagatttaccctcctgctgtaaacaagttaaagaaaaaaaaaaaacagtccaaatactatgtgaaatgacagttttcagacatgggctacaagcagcagaggacagtgacccctgagaggaggagcacaaaggaagtgaatcttacaatcgcccagatgaccatctggagggtttccagcacaggaagggggaacccaaacagagcctggcagtcttgctgagttgcagagacagagatgagaattcagagacaaaggaggcagaagtttgcargcagagcactggagaagagagagctgcatggagagggagaactatgcaggtctgctcacaccctcagctgagtacttactggcacatgtacagaggaaagcacttgagaccagggaaagaaccagcagaaaggaaaagacaggcagaa

SEQ ID NO: 38181 - DNA, 831 bp, Homo sapiens
cagctctgccactcaaagtcatagctgtgaccttgtgactcaatgactcacctgtctgagcctcatttttgtcaaccaggaaatgggaaggtggtaatatccaccaggcctgtggcccacctggtttgcccaggtttggagcctttgaacaccagtggagaccaattaggcacttggccttgcagtaggaccagagccatggaatgcctgtttgctctgcgtgttatacctagagcccagcacagtgcgtggcccagaagagactgatcmcaaaaatgtgatgaaagaatgagtgcacaaatgactaattgaatgaacaaacacatgtgtaccaagcacagacctcctcaactctggttggtttcccctgcccttaaggtaaagtctaggttcaattttacttcgtttaacctccttcaggtacagagaatttagttgctttcagtcatcagttcgtgacagttaacatcactgcttcagggaaggctcggctctgttacattcattcattcattcattcattcacccattcattccttttcatccccatttctcactgccattccctatgtctgtccaattgtaccttttttggtatatggttttgcaaaatgtgtgttattatttgtatttatgtaaatgtattatatatataatatatatcctcttttttcttccttttcattaagcagtgtgcttttgttcttttggcttaggattgacttggcgatgcgggctcttttttggttccatatgaactttaaagtagttttttccaattctgtgaagacagtcattggtagcttgatggggatggcattgaatctataa

SEQ ID NO: 38182 - DNA, 1281 bp, Homo sapiens
ctttctaatctcccatgaccgcttccctaaatggaaaccagctggcaggcgattctgggaaatgtrgtttcagggcttccagtccctgccacaaggaggagagtgtagaagagtgagtgtgaactgtgagccaccagacagttatcagcccccaccccggccagagttaccaaactcccttgccttagaatttaactcatcacctggattggtctcaaatgaatgtgatgattctgttacagccctggaattgcacaagacgaaagcttaaggagagtcatgatatttatctctacataaagactacatgtgctgggagaagtgcaacctttgtgggagggaaaccaaaaaaaaaaattccagctcaagctggggtgttaggaattgaagctggcctggctcccctggctgaactgcaggccacggtggctctgaaagcatctagtggcagcattgccccatctgttcccaccatgccctgttgctcagctccttcaggtggcaagaaagagccagccccagcgacctttgatgacagggtgtctgagacagggttacccagaaaacaggctctgagacaaagatttgcatacaggaagtttatcaggatatgttttcaggaacagaagctggaagggaggaagccaagtagcgctgggcagcgggagaagtcaaaatgtgatgcagtggcaatcatgagctcagccaatcccaggggacctcgggattccatggtccttcacgggtgtcctgaattgaggcagcagggctagatccatgacccttcacactgactgctagctgcaggttgcccccagggagggggcataacctgaactaacatagctctgattgggtgcaaggcatctcaacaggagccagatgctagccgctggggaggagggcctccatcctgggtggggtgtctgggcgcacccctggcatccaccacacaggataagaggagtcaaacggaagacaggcactgccctgggctcggtgcttagctacatttgccatgcagtctgagctgtggagggacagagtctggccaccagcctcactgaaaccaccatcttctcacacctggattactgagccagagcttccagagtctctgcttccacgtttgccacactaccatccattctgtaccccacagacagtgcaatcttctccaacctgaaatcacatcacaggctgctccgcttcacctccccaccctcatcgctgttcattagagtcatgtccagaccctttgtcatggtctctgggggcaat

SEQ ID NO: 38183 - DNA, 1281 bp, Homo sapiens
ctttctaatctcccatgaccgcttccctaaatggaaaccagctggcaggcgattctgggaaatgtagtttcagggcttccagtccctgccacaaggaggagagtgtagaagagtgagtgtgaactgtgagccaccagacagttatcagcccccaccccggccagagttaccaaactcccttgccttagaatttaactcatcacctggattggtctcaaatgaatgtgatgattctgttacagccctggaattgcacaagacgaaagcttaaggagagtcatgatatttatctctacataaagactacatgtgctgggagaagtgcaacctttgtgggagggaaaccaaaaaaaaaaattccagctcaagctggggtgttaggaattgaagctggcctggctcccctggctgaactgcaggccacggtggctctgaaagcatctagtggcagcattgccccatctgttcccaccatgccctgttgctcagctccttcaggtggcaagaaagagccagccccagcgayctttgatgacagggtgtctgagacagggttacccagaaaacaggctctgagacaaagatttgcatacaggaagtttatcaggatatgttttcaggaacagaagctggaagggaggaagccaagtagcgctgggcagcgggagaagtcaaaatgtgatgcagtggcaatcatgagctcagccaatcccaggggacctcgggattccatggtccttcacgggtgtcctgaattgaggcagcagggctagatccatgacccttcacactgactgctagctgcaggttgcccccagggagggggcataacctgaactaacatagctctgattgggtgcaaggcatctcaacaggagccagatgctagccgctggggaggagggcctccatcctgggtggggtgtctgggcgcacccctggcatccaccacacaggataagaggagtcaaacggaagacaggcactgccctgggctcggtgcttagctacatttgccatgcagtctgagctgtggagggacagagtctggccaccagcctcactgaaaccaccatcttctcacacctggattactgagccagagcttccagagtctctgcttccacgtttgccacactaccatccattctgtaccccacagacagtgcaatcttctccaacctgaaatcacatcacaggctgctccgcttcacctccccaccctcatcgctgttcattagagtcatgtccagaccctttgtcatggtctctgggggcaat

SEQ ID NO: 38184 - DNA, 511 bp, Homo sapiens
ggtcagcaaaagtgttgaaaatcatggcatacaacctttacatacgttccttagaagaacgaccattatggtaaagcagagattctcaaagtgtggctcccagactagcggcattgctttcctaaatttcctgggaacatgttagaaatgcatattactgagccccatcctagatctactgaatcagaaactctgggagtggtgtccagcaatttgtgttttaactagcgctcttgaagatcctgcaggctgcagattgagaagcactaaagaaacagcattagagagtttcctgtaacaaccactaggtgcctctgttgctcaggacagactagtttaatgagggaagttaggggytcatagcacagaattaatgcctctcttaagcagttatgtggatgaggatgacttatctgttgcctcaatttttttaaagtagtcagtaagaaactagaaataaatacacaatcctaactggccaacaaaatttacaggacatttccaagtttgt

SEQ ID NO: 38185 - DNA, 511 bp, Homo sapiens
ggtcagcaaaagtgttgaaaatcatggcatacaacctttacatacgttccttagaagaacgaccattatggtaaagcagagattctcaaagtgtggctcccagactagcggcattgctttcctaaatttcctgggaacatgttagaaatgcatattactgagccccatcctagatctactgaatcagaaactctgggagtggtgtccagcaatttgtgttttaactagcgctcttgaagatcctgcaggctgcagattgagaagcactaaagaaacagcattagagagtttcctgtaacaaccactaggtgcctctgttgctcaggacagactagtttaatgagggaagttaggggttcatagcacagaattaatgcctctcttaagcagttatgtggatgaggatgacttatctgttgcctcaatttttttaaagtagtcagtaagaaactagaaataaatacacwatcctaactggccaacaaaatttacaggacatttccaagtttgt

SEQ ID NO: 38186 - DNA, 1196 bp, Homo sapiens
ctaaaaatatcagagaactaatagttactggaaaagtttgtggctaacagggtgggtagaaacaggcacacacattctgggtatggagtcaagctacatttctaaaactggcaaccaagaaatgtagaaatggcttccctcccctttcttgcctccctgtctgcaccgcttttctttgtgtatccccagacatggtggacaacaagaaaaggacctgatataaggtgttagcaccattcagctgcacctgtgccaaagcattagttaatgtctcattgaagcgttccacatgtttcttttacctcaagccagattagtgacggcattctcacacgctcccttaatcctggcccccataaatcctttatgagtccctccctccattgtccttcccatccatcaagaacttagtgaaattatttggcatgtacagtacatcttttccctgagcccattcacaaagaagccctgtcattgctatattttcagccaccattctttccccctacctttgagtgtgtgtgtgtgtgtgtgtgtctgtgtattagtgtgtgtttgcagtagatggctagtgagagggggtagacagttctacaaatggtgaggatttgataatgatatgggaaaacttaggctagggtaagggtgaaagggagaggttatccaatgtagaaaacttagatcctaatagctttcatgcagtcttattatgtgtctatagacataaactaggctgaattttatcagtaatagtgactaagatcaatgtctccaaataataatgtaatcttccaaacctgtcccttttcttatatctagaataactgtaattgaaaaaaaattgaatcactatctggagagataaactagtactaaattctctactacctccttgaaggggattaagcacccctcatttagtttatatagtctgatatttttcaatttctttatcagcattgtgccctaaggaaaaaatttaaattttattgctataaataatgtaactaattaaaataatttacatttggagagtgayatcaccaagatggtagcacaggagtatccagggcttatctcctcacagaagcattaatttgaacaaacatccatgcttaaaaatacgttcacaagagttaaggaatccaggtgacaaattacagcacctggctgaagcacagaaataagaaaatatg

SEQ ID NO: 38187 - DNA, 1196 bp, Homo sapiens
ctaaaaatatcagagaactaatagttactggaaaagtttgtggctaacagggtgggtagaaacaggcacacacattctgggtatggagtcaagctacatttctaaaactggcaaccaagaaatgtagaaatggcttccctcccctttcttgcctccctgtctgcaccgcttttctttgtgtatccccagacatggtggacaacaagaaaaggacctgatataaggtgttagcaccattcagctgcacctgtgccaaagcattagttaatgtctcattgaagcgttccacatgtttcttttacctcaagccagattagtgacggcattctcacacgctcccttaatcctggcccccataaatcctttatgagtccctccctccattgtccttcccatccatcaagaacttagtgaaattatttggcatgtacagtacatcttttccctgagcccattcacaaagaagccctgtcattgctatattttcagccaccattctttccccctacctttgagtgtgtgtgtgtgtgtgtgtgtctgtgtattagtgtgtgtttgcagtagatggctagtgagagggggtagacagttctacaaatggtgaggatttgataatgatatgggaaaacttaggctagggtaagggtgaaagggagaggttatccaatgtagaaaacttagatcctaatagctttcatgcagtcttattatgtgtctatagacataaactaggctgaattttatcagtaatagtgactaagatcaatgtctccaaataataatgtaatcttccaaacctgtcccttttcttatatctagaataactgtaattgaaaaaaaattgaatcactatctggagagataaactagtactaaattctctactacctccttgaaggggattaagcacccctcatttagtttatatagtctgatatttttcaatttctttatcagcattgtgccctaaggaaaaaatttaaattttattgctataaataatgtaactaattaaaataatttacatttggagagtgacrtcaccaagatggtagcacaggagtatccagggcttatctcctcacagaagcattaatttgaacaaacatccatgcttaaaaatacgttcacaagagttaaggaatccaggtgacaaattacagcacctggctgaagcacagaaataagaaaatatg

SEQ ID NO: 38188 - DNA, 1145 bp, Homo sapiens
gtagtaaatcttaaaaaaagttatcaactttgccaatctctgcctcataattagtgaatttagactatttaaatttaaggtaattatttatatggtagagctaacatctgccattttgctagttgcttttcatttgtctctgatttgtcttcccatgcttctttcttcttgccttcctgtgttactcgaacaattttgagaatcccatcttactttttaatagaattttaatagtatctctttgggtagtttccttwgtggttgttcaatagtttacggttttaaagggtcacaagctgctggtgtaaaatgggtttgaagttggaaatattagagaaagagagaccagttgaaaggctattgaagttattataccagtttgagatgattactgtaagtgttaccattggcacaagtctccagggaggcacatcagtcattctcaaacagggatatagcagtgtacactgaggagtgcctgaattctggggtccagtagtcacaacactgctagaattatctcagatatagcatgaagacacttgtcctatttgaaggttgagcacttccatcttgaacaagatcttctctgatccctgatcatcttttagctatcatcatccctccatcctgtctcaaccaaactttgtgaaagatctatctgcaatttctttctctacttttaccttttatttacaatacctgtcactaattcaccgtaaacttgattctacctttggggccccttgcaactgatatccatgtggctatcaataagctctatgttgctggatccactacgcacttttttttttttggagatggggtctcactctgttgcccagactggagtgcagtggtacgatcacccaataggcactttttatcctcatcttattaaacgtttctacatcacttaataatgttggccacttccctctttctgaaaacccccctttccttagcttttataacactattctcttctggttttccttttcctggaagtttcctctgtgctttcctttgacaatgtcaaaatcctaattatagactttagctatcctctcttaatcttttcacatactcccttggtgacctcacccattcccaagttaccatctatatctagaagactctcaagt

SEQ ID NO: 38189 - DNA, 1145 bp, Homo sapiens
gtagtaaatcttaaaaaaagttatcaactttgccaatctctgcctcataattagtgaatttagactatttaaatttaaggtaattatttatatggtagagctaacatctgccattttgctagttgcttttcatttgtctctgatttgtcttcccatgcttctttcttcttgccttcctgtgttactcgaacaattttgagaatcccatcttactttttaatagaattttaatagtatctctttgggtagtttcctttgtggttgttcaatagtttacggttttaaagggtcacaagctgctggtgtaaaatgggtttgaagttggaaatattagagaaagagagaccagttgaaaggctattgaagttattataccagtttgagatgattactgtaagtgttaccattggcacaagtctccagggaggcacatcagtcattctcaaacagggatatagcagtstacactgaggagtgcctgaattctggggtccagtagtcacaacactgctagaattatctcagatatagcatgaagacacttgtcctatttgaaggttgagcacttccatcttgaacaagatcttctctgatccctgatcatcttttagctatcatcatccctccatcctgtctcaaccaaactttgtgaaagatctatctgcaatttctttctctacttttaccttttatttacaatacctgtcactaattcaccgtaaacttgattctacctttggggccccttgcaactgatatccatgtggctatcaataagctctatgttgctggatccactacgcacttttttttttttggagatggggtctcactctgttgcccagactggagtgcagtggtacgatcacccaataggcactttttatcctcatcttattaaacgtttctacatcacttaataatgttggccacttccctctttctgaaaacccccctttccttagcttttataacactattctcttctggttttccttttcctggaagtttcctctgtgctttcctttgacaatgtcaaaatcctaattatagactttagctatcctctcttaatcttttcacatactcccttggtgacctcacccattcccaagttaccatctatatctagaagactctcaagt

SEQ ID NO: 38190 - DNA, 1145 bp, Homo sapiens
gtagtaaatcttaaaaaaagttatcaactttgccaatctctgcctcataattagtgaatttagactatttaaatttaaggtaattatttatatggtagagctaacatctgccattttgctagttgcttttcatttgtctctgatttgtcttcccatgcttctttcttcttgccttcctgtgttactcgaacaattttgagaatcccatcttactttttaatagaattttaatagtatctctttgggtagtttcctttgtggttgttcaatagtttacggttttaaagggtcacaagctgctggtgtaaaatgggtttgaagttggaaatattagagaaagagagaccagttgaaaggctattgaagttattataccagtttgagatgattactgtaagtgttaccattggcacaagtctccagggaggcacatcagtcattctcaaacagggatatagcagtgtacactgaggagtgcctgaattctggggtccagtagtcacaacactgctagaattatctcagatatagcatgaagacacttgtcctatttgaaggttgagcacttccatcttgaacaagatcttctctgatccctgatcatcttttagctatcatcatccctccatcctgtctcaaccaaactttgtgaaagatctatctgcaatttctttctctacttttaccttttatttacaatacctgtcactaattcaccgtaaacttgattctacctttggggccccttgcaactgatatccatgtggctatcwataagctctatgttgctggatccactacgcacttttttttttttggagatggggtctcactctgttgcccagactggagtgcagtggtacgatcacccaataggcactttttatcctcatcttattaaacgtttctacatcacttaataatgttggccacttccctctttctgaaaacccccctttccttagcttttataacactattctcttctggttttccttttcctggaagtttcctctgtgctttcctttgacaatgtcaaaatcctaattatagactttagctatcctctcttaatcttttcacatactcccttggtgacctcacccattcccaagttaccatctatatctagaagactctcaagt

SEQ ID NO: 38191 - DNA, 1145 bp, Homo sapiens
gtagtaaatcttaaaaaaagttatcaactttgccaatctctgcctcataattagtgaatttagactatttaaatttaaggtaattatttatatggtagagctaacatctgccattttgctagttgcttttcatttgtctctgatttgtcttcccatgcttctttcttcttgccttcctgtgttactcgaacaattttgagaatcccatcttactttttaatagaattttaatagtatctctttgggtagtttcctttgtggttgttcaatagtttacggttttaaagggtcacaagctgctggtgtaaaatgggtttgaagttggaaatattagagaaagagagaccagttgaaaggctattgaagttattataccagtttgagatgattactgtaagtgttaccattggcacaagtctccagggaggcacatcagtcattctcaaacagggatatagcagtgtacactgaggagtgcctgaattctggggtccagtagtcacaacactgctagaattatctcagatatagcatgaagacacttgtcctatttgaaggttgagcacttccatcttgaacaagatcttctctgatccctgatcatcttttagctatcatcatccctccatcctgtctcaaccaaactttgtgaaagatctatctgcaatttctttctctacttttaccttttatttacaatacctgtcactaattcaccgtaaacttgattctacctttggggccccttgcaactgatatccatgtggctatcaataagctctatgttgctggatccactacgcacttttttttttttggagatggggtctcactctgttgcccagactggagtgcagtggtacgatcacccaataggcactttttatcctcatcttattaaacgtttctacatcayttaataatgttggccacttccctctttctgaaaacccccctttccttagcttttataacactattctcttctggttttccttttcctggaagtttcctctgtgctttcctttgacaatgtcaaaatcctaattatagactttagctatcctctcttaatcttttcacatactcccttggtgacctcacccattcccaagttaccatctatatctagaagactctcaagt

SEQ ID NO: 38192 - DNA, 618 bp, Homo sapiens
ctcccgtgtttccttccagggcttgtgtctttgggtaaatgggtgtcagcaatacctttatgatcttaaatatccattttccataaaccaataccttatcccagctagggctgcagaagctgggtctcagggttgaatggagaggagaattatggctccatctttcctcacagaagaaaccttgaaaaagacgtaggaagcatcaacacctcagtttaccttataagctttccttattttccagaggttgagagatctaagagactgtcagtcacaaaggtcctactaaatcaatgttccacacttgtagctctgctgtgtcaaaagtcctggctgtttccaggagaaaaaaaaaaaaaagcatgcccaatgttactcacacatacaattgttttgaatccacttgtctgcctaacttcaaagaaagtctttgttgacaaattagtcctcagtagtttttcacttggcctataaagtsattctagctgtggagacactgaaaaggtggcgtcagggcattctccacacatctttcatctccatcgagagtggatactcgagcttcctgttttagagtctgagacataattgctggggggaagtgacggatggattgca

SEQ ID NO: 38193 - DNA, 484 bp, Homo sapiens
tatcattggtattttgatagggattgcatttaattggtagattgatttgggtagtatggtcattttaacaatattaaatctttctgtcggtgaacatgggatctcttttcatttgtttgtgtcctcttyagtttctttcttcagtgttttgtagttttctttgtagagctctttcactttttggttaaatttactcctagattttttttatagctgttgtaaatggcattcattattggtgtacagaaatccagatatccatatgcagaagaatgaaactagaccctatctctcaccatatacaagtctatctaatgtatgctactgatttttgtatgctgattgttgacttttcttcctgctttcccattttccctgagttactgaaagattagatggctcttggagttctaggaatgctgtggtccccttttccacagatttgtgttaatagaagtttcccttagtttttagagccaaaagt

SEQ ID NO: 38194 - DNA, 945 bp, Homo sapiens
tgatatctgctaggatacacttagctttgaaatcactgaaataacgatacataaagctgatgcctgtcaatctcaaactcatgggatcattatgaggataaactgagttagcaggcatgaatggattgtgaaatctatttattttttattttttgagacggggtcttgctctgtcgcccaggctggagtgcaatggcatgatctcggctcactgcaagctccgcctcccgggttcacsgcattctcttgcttcagcctcccgagtagctgggactacaggcgcccgccaccacgcccggctaatgttttgtatttttagtagagacagggtttcactgtgttaaccaggatggtcttgatctcctgaccttgtgatttgcccgcctcagtctcccaaagtgctgggattacaggaatgagccaccgcgcccagccgtgaaatctattatatactaaatggtaagtcacaaaaataaaaaagacagtcttttaaacacaatcttttttcacaataaatactacatcaatatatacactgatttcctcaattatgatgagctaaaatgatcactcatattaatgcatcaaagaacatttttgctgttaaaatgaaaaaataatttcatttcaaaatatttcaaaaaagaataatttacttcataaacaaataatttcccagtaggaagtggttaaaacatacatgattagattaggctaaatgttatcttattgctgcttccctagttatttaaaatatatatcaatatccagtaataaaagattaaaagctaaccatttctctgttaataaatggtcaagagtatgggtcatcaggtacgtttatttaggtaattttagagtttttctctttgctttgtttttgtcaatatccagcaagagaaattaaacacttcacatagtgtagtaacattgtactagttttct

SEQ ID NO: 38195 - DNA, 945 bp, Homo sapiens
tgatatctgctaggatacacttagctttgaaatcactgaaataacgatacataaagctgatgcctgtcaatctcaaactcatgggatcattatgaggataaactgagttagcaggcatgaatggattgtgaaatctatttattttttattttttgagacggggtcttgctctgtcgcccaggctggagtgcaatggcatgatctcggctcactgcaagctccgcctcccgggttcaccgcattctcttgcttcagcctcccgagtagctgggactacaggcgcccgccaccacgcccggctaatgttttgtatttttagtagagacagggtttcactgtgttaaccaggatggtcttgatctcctgaccttgtgatttgcccgcctcagtctcccaaagtgctgggattacaggaatgagccaccgcgcccagccgtgaaatctattatatactaaatggtaagtcacaaaaataaaaaagacagtcttttaaacacaaycttttttcacaataaatactacatcaatatatacactgatttcctcaattatgatgagctaaaatgatcactcatattaatgcatcaaagaacatttttgctgttaaaatgaaaaaataatttcatttcaaaatatttcaaaaaagaataatttacttcataaacaaataatttcccagtaggaagtggttaaaacatacatgattagattaggctaaatgttatcttattgctgcttccctagttatttaaaatatatatcaatatccagtaataaaagattaaaagctaaccatttctctgttaataaatggtcaagagtatgggtcatcaggtacgtttatttaggtaattttagagtttttctctttgctttgtttttgtcaatatccagcaagagaaattaaacacttcacatagtgtagtaacattgtactagttttct

SEQ ID NO: 38196 - DNA, 1300 bp, Homo sapiens
tgcatctctcaggtatagttttcaatcctttaatggatagggctccagatgtgaagcactatacttgttttggtgtaaatatctgctttcatatgcttctgaattcatgatccccagtttgttatttaaaacaaaatgaccttaaggacagataatctgtcttctacattatgtgattattgtcatagcatataatatagtgaatcgaacatagtgtcttcaygatattcttcatttcaaccaacatttattgtcatgcctagtttgggtaggccattatcaagagtctgagacacaaagatgataaatgcaaggataatgcccaaaatgagttaatatcatatgatttttgaaaaggtgagtttgagaaagaacaaaacagaccttttagaaatgacatttaattctatctaagaactcaaagaatgagttataatagttcgaagttatctgtctgatactgactttggtatgccacttttggtttcaatgtttttctggtacaaatttccaccactttgctttcaacagttcattcaacacgtatctacaaagcttttttcagtgttacgtctttttttttccattgggacttttaaaagtttctttacttttagtgttttccagattcagaatgatttcatttcataaatttgaattaatttattctgttcatgagtcagtgtctgttttcaattgaacttgtcttcagttatagaaaactcttggcaattgcttatttaaccattgtctttcctatattttctccggttacttccactggggcttcaattaagatatatttagacctcctcattcaccagtcatgttttttaaacttagctttatatttccacagatttatcactctgtggtgttttctaagatctaccttccaatatactaattctctttgcagctgtatgcaatctgtcagataagagagtaagccatctttctaatcttcatgggagattcacctgagtgttagcgatggcattctacctgccttgggtaaggtcctttccgttcacagggcttgctgactgagggcttagcaaacctcttatagcacttatgatgtcaatctgaaaactcctgaaaaattactttccacagtttcaaaaactgtctttcataagccatgtcacctagctctaatatccagatagataatttcttactaggtaacaagcaccatcatggtgcatcgtccctccaaatgacaaggtaacccacgtgagaagtcaattacaacgatgtgactaggtgaccgtgaccagtatcagttatgtgcaca

SEQ ID NO: 38197 - DNA, 570 bp, Homo sapiens
agatgggtagacagagataagtgtccaccacaatcaggaattagatgaaatccaaactccttttttaaaaaacttaaatcctcaagattgctcaaatccgatttttatttttacttttatatccgatacactacctactcctgcttatatttctcaaatcaagctctcctttcaatacccattttcaccatcttatccaaagataccactaccctaataacacgttacaaggatggaatattaccttaaaaaggtttaacttcttcaacccttctaatctgccctacttactgccgccggatctatcttcttggaatgcattcttgaccatgttatttttattctcaaaactttttaatggcttcttaggaccaaagtaattggttgcaagttatgtttgcaatccactccacttttgtaagtaaaatcttagacayagaactccaacgactaaagtacattaaaatgtaatttatttgcagaagaattgtctccagccctgtgggccttggggattgggaaaacatcgtttttaaacacaaaggatcaagaagtactccttggagcagc

SEQ ID NO: 38198 - DNA, 573 bp, Homo sapiens
ataggcatgatggaaaaagtactcgaaaataagagaaagaaagcaccatgccgaaggcctggaagtagaacagatctatgcccctccttccctgcaggagccagagaaagatttcagaaagtgatttttgtactaaggggttctggaagaccactatgaaagaggaaccccactgaaaatacaagctgagatgaacagaacacagggacgtgtcttaaattatattctaccggcttgaaagagcaaatgctttatctcaaaacttcattgacctccagtcactgtggatcagtgaggggccccacagagaytggaagggatgaagtataactcaagatggggaacacagcagtgctcattagcagacgtggttatggcacgaagattggaaaatgaagaggtggaaagaggcatgtcaggcaactgctataaaaatgaaaattggcttggaaaaatgtacatagaacaaaattgaatgcaaggtcaaagtatttactgtgatgaggaccaatgccttatattgacgacaatgcactttgtcaggaagttgacaaaattaaagactaaacaacg

SEQ ID NO: 38199 - DNA, 536 bp, Homo sapiens
ttctagtatattattacatatgtacatacatagtatatattatatatgtttatagtacacatacatataatctcaatgaacttaaatgaaatgaattcttttgtatggatattataatgtccctccaaaaagtaatatttttgaaataaacccaaaaagacacctttcaggatatttatataaaggagagtattaaaaagtgttcattttcgggtttccaatcwttttcactcttacaaaaagacccaattgagaattcagaagatttagttggaaatgagacagttgctgccaattggaattaagttacacattcatgacaattggagattaaaatgaatttatggggggagtaattttaaaactgccttctgtaaagcactatttataggagacgttaaaacatgcacgtaatttttttttctgtagtcaaatatagtttgaaaagcctgcatactctaaccccttttgagggtcacaatgctcattagcatcttcaaggtctaagatgttaactcccagggtcttctaaagta

SEQ ID NO: 38200 - DNA, 602 bp, Homo sapiens
tgcattatttcaaggggtctaattttttgtgttttcttttaatttaaatctgcccccaattggtttacttgtgccttcaaaaatgtatgcagaaaaataytcatactttctgtgttccatagaatatttttaaatataatagtctacacagatagtctatatttatgtaatgaaactatgtatccatattcattccataaggaaatagtggcaatggatatttaaaagctcatttttttttgttattatccatcctcttatttctgattacataaaacctaagtcaaataaacatgtttttacaaaatctacctttgaatattttttataacctctctaaatcttttaaaaaattaatttcattcagtaacacattagtccagtaacagaaggactaatgtttatttgcatcctacgaattagaaaaacacaatttttaaacctaattatatgaatattatagaaacctactccaataggaattaaaatatcaaaagtatttgatttctatgaataataatgaagtgtatatataatatataaaatatcactattaagtttactaatatttatatttgcattccaaatgtatatcatcatgt

SEQ ID NO: 38201 - DNA, 532 bp, Homo sapiens
tcaggtttgtgcctaaagagatgctaactgaggaaacagaagaactataaacaatctaatgcaaatatatttaagggagatatttgaaaagacaatttcacagtaattgtgggtgctgaatatatatttgtcagagggtcacatacacatgaaaatattacaaatccatagaacatcagacacaagcagataagtatctgtatcagaaaacatatactatgatcgttttttaaatttaatttaattttattattattatactttaagttttagggtacatgtgcacaatgtgcaggttagytacatatgtatacatgtgccatgctggtgtgctgcacccattaattcatcacttagcattaggtatatctcctaaagctatccctccccctccccccaccccacaacagtccccagagtgtgatgttccccttcctgtgtccatgtgttctcattgttcaattcccatctatgagtgagaatatgcagtgtttggttttttgttcttgcgatagtttactgagaatgatga

SEQ ID NO: 38202 - DNA, 536 bp, Homo sapiens
gtgagcttctatagcatcttaacaaaagaacaacacatttgtagaaaagtaatcggacaaaagaaaagggctttatggcttttaggggccacgaactgtggagtggtaaatatagggggcaaatataatgggttattttagcaaggtccatttgtgcaagtccatctccgtgccatcttgttttcagtgatgttatcttcttggtatgcgaagagagtgggaaaacaccttcataaagggaaattatgttccatttttaggcagattgggaaagggtagaaatctcatcgrcttttcctcaactgcctttaactcaaaataattctaatgccagggtagcctactttggtataatatgctctgaatgtctttaacttcaataatttttaatgttccatattttaaaaaaaattatattcaaatatgttccatttgataacttcaactgtcttctgagatgtatttcataagaagttctttttttgtttcagtaatactaccttcatgatcagacatattttggcggtgaaatttgc

SEQ ID NO: 38203 - DNA, 1362 bp, Homo sapiens
tgcatgacaatggctcctaggagtctgtaccatatctatgaagtagaacctgtcaggattcttagacattatggtgatttttcaaagaagttggctaggctgactggtggaatctatctgtgatgcaaaatggttccctagataattcacatataactcccattacttggtattttaatgtaattagaggtaagaatttggagaaaaaattttactcagagggagtggagggtgacgatcaagaaactaacccagcccatggagagttgggagtgggttgttgagggaaacttcactcttatattacggataagaggactgtaatgctatttcagcttgttttcctccttggcaagacaaataagacagaaagaaaataacttttgtactaaagcagaatcttaataaaagccacaataacaataaattggaagcagagtttaattattgtttttctctgcatgattcgctccttgccttctttgtaaacttcctaccacttagttttgattcttcttttatccttcatctgctgatgttatttacaaacagaattgtgatgtatttaccatattattaaaatagaactagattttaattaaatatcaattcaggatcacagcttcaagctagttgccaacactgatggtgatcaatagaagatgttgaacaaagaagataattacgttttctgagaactcaaatattttttcatttccctctcttcttccttctccagtttccctgcttttctgctcccgctaggcttgttcactcattccccttccctgttcctccacctgctaaatttttcatacagtgcatatatttaatttcctgtgtgttttttctatagcgtgctttaaacactgaaaaccggagatgttgagtgccagatcatcacgtttgctaattcgcaaatctacttccagttgccagttcctttgaattaggcatctttgaaatggtttccattatatgcttgattcagaattataaaatgttatttgcttgattgtgtatttattttacaacaattaattcaccctgagcttttatttggaaaaataattgcctgcaagaagtaaacagttctaagtattctagaatattatacttaattatccctttatttttgtactgtataccattttcttccaagtttagcattttgattgatttaacttttgcaaaaattaaaactctttttgaaaaatgttgtttagaaaaattcagtattgtgaatttgaaagggctaggctgaattagacatatgcttcmtggaatgagagttttgcctatacactatagtaatgaagtcataataaatgtgttcattctgcattaattaacttattttac

SEQ ID NO: 38204 - DNA, 593 bp, Homo sapiens
ttcctatctacagattgtctctttacccaactctcaaccttacaacctattaacagaactcttgtgggattcatttagattggttttaaatggcaacagtattcacaacacactaaaatccacatttcctaaaagcaattcaaaatccttcttgaaatctgtggtttaagaaatgtaaatactataggtaacccttagatattcaataatcctaatgaaagattcaaaagctccttccagtcctccaacaattttgttttcaagyaatatttaggaactccttcctgaatgctatcccagaagtgtttattttgcacccaattcacttggaatgtctcttctttgtggattttattcccaccaagtaactttcagtggcctatttgcctttcttattattatgatggggtcagagggccagttttgaacttctgtttttactattttctaggcaatgtcaagctgagttgaaatactcttttttccctccagacatcacaggttataaaactaaacagtgaaaatctcagacgtggagttacttctctcatctcattcctttgttgcaaatcacattatattaagtctatgca

SEQ ID NO: 38205 - DNA, 1022 bp, Homo sapiens
tgcataatgattcatttaattctcattaaatgatgtttaatgagaatccaccttaacagatgttattattagtcctgctttacagtaaccacagtagagagatattaaggaaattattaaggatattaaggaaatatctcacagtagagagatattaagtaaaggttacaagactaaaaagtgactcagcttgaatttttcccctgagaattttgtgctagagttcatatttttaatcactctactccactaccaagactctaccactcactagccatataactcattgtcaaaatcaggatccttttgaggaaagatggtactataatgataacactgaggcaataacatgtacagagatttctccccaaggaaaccaaaacataagagcaccctaatgataacgtgaacttcaataccgcrcataggccttgatttccaaaacagaaaataagtaacctaacatgacccagaaagtaatcctcagtcatatttgtttcactgtatcctacagatggtgaggttttcatcaagaaagtaataaaaacaaaattaagccacatcttcgtacatacttatggtcaactaccatatcaagtttttcttccactttcaacctgcaatcaccctctcccaccctgttctcttttatcaaataccttctgtggagaaggtctttctcagcatctttgcaaatgacaccactagtctacccataagaaatcaatcgaggtcttcactgaaagaaattggtcagaccccactgccaaagtctttcccattgaagattcccctttatttctcccctaaagaattatttatcatctaactgggaagtccctccctctcggtaatcagagtcttgtggcagatgggacaaataaggctgcacagtgagaggctgaatgatgttttttggttctcattgttgtattgctattttacaggcacagctcacatttatttaagctacattgtaacactgatgactcacaatctgtctggcattcaaaatacatcaa

SEQ ID NO: 38206 - DNA, 1022 bp, Homo sapiens
tgcataatgattcatttaattctcattaaatgatgtttaatgagaatccaccttaacagatgttattattagtcctgctttacagtaaccacagtagagagatattaaggaaattattaaggatattaaggaaatatctcacagtagagagatattaagtaaaggttacaagactaaaaagtgactcagcttgaatttttcccctgagaattttgtgctagagttcatatttttaatcactctactccactaccaagactctaccactcactagccatataactcattgtcaaaatcaggatccttttgaggaaagatggtactataatgataacactgaggcaataacatgtacagagatttctccccaaggaaaccaaaacataagagcaccctaatgataacgtgaacttcaataccgcacataggccttgatttccaaaacagaaaataagtaacctaacatgacccagaaagtaatcctcagtcatatttgtttcactgtatcctacagatggtgaggttttyatcaagaaagtaataaaaacaaaattaagccacatcttcgtacatacttatggtcaactaccatatcaagtttttcttccactttcaacctgcaatcaccctctcccaccctgttctcttttatcaaataccttctgtggagaaggtctttctcagcatctttgcaaatgacaccactagtctacccataagaaatcaatcgaggtcttcactgaaagaaattggtcagaccccactgccaaagtctttcccattgaagattcccctttatttctcccctaaagaattatttatcatctaactgggaagtccctccctctcggtaatcagagtcttgtggcagatgggacaaataaggctgcacagtgagaggctgaatgatgttttttggttctcattgttgtattgctattttacaggcacagctcacatttatttaagctacattgtaacactgatgactcacaatctgtctggcattcaaaatacatcaa

SEQ ID NO: 38207 - DNA, 1022 bp, Homo sapiens
tgcataatgattcatttaattctcattaaatgatgtttaatgagaatccaccttaacagatgttattattagtcctgctttacagtaaccacagtagagagatattaaggaaattattaaggatattaaggaaatatctcacagtagagagatattaagtaaaggttacaagactaaaaagtgactcagcttgaatttttcccctgagaattttgtgctagagttcatatttttaatcactctactccactaccaagactctaccactcactagccatataactcattgtcaaaatcaggatccttttgaggaaagatggtactataatgataacactgaggcaataacatgtacagagatttctccccaaggaaaccaaaacataagagcaccctaatgataacgtgaacttcaataccgcacataggccttgatttccaaaacagaaaataagtaacctaacatgacccagaaagtaatcctcagtcatatttgtttcactgtatcctacagatggtgaggttttcatcaagaaagtaataaaaacaaaattaagccacatcttcgtacatacttatggtcaactaccatatcaagtttttcttccactttcaacctgcaatcaccctctcccaccctgttctcttttatcaaataccttctgtggagaaggtctttctcagcatctttgcaaatgacaccactagtctacccataagaaatcaatcgaggtcttcactgaaagaaattggtcagrccccactgccaaagtctttcccattgaagattcccctttatttctcccctaaagaattatttatcatctaactgggaagtccctccctctcggtaatcagagtcttgtggcagatgggacaaataaggctgcacagtgagaggctgaatgatgttttttggttctcattgttgtattgctattttacaggcacagctcacatttatttaagctacattgtaacactgatgactcacaatctgtctggcattcaaaatacatcaa

SEQ ID NO: 38208 - DNA, 953 bp, Homo sapiens
catgccatatagaaaggtaaattgttacagagtcttaaaatcattattacagcaaattcaaattagtttcatattcaatttaacatcattgtaaagggaaggaagactttaattagtggattagcaactctactaaattggtgggttttttttttttttttttgagacggagtctcgctctgttgcccaggatggagtgcagtggcatgatctcagctcactgcaagctctgcctcccgggttcacaccattctcctgcctcagcctcctgagtagctgagactacaggcgcccaccaccacacccggctaatttttttgtattttaggtagagacgcggtttcaccgtgttagccaggatggtcttgaactgctgaccttgtgatccgcccgcctcggcctcccaaagtgctgggattacaggtgtgagccaccgcgccyggcctaaatgggtggtttttaaagaaattactaaatatgtaaaagcaaaagtcgaatcctatcaccttcttaaaaaatacatttttatattgcattttttcttctaggaaaattcttagaattacacgtaccatacagaaaacaagaacaagcaaacgaaaaaccagataacactttataattattgaaataaaatagtagatgtcacatgctctttatcacatgtcacttttatctagtactttttaatgggtcactttaaatgagaagttcagtattatattgcaaacttaaattgaaagtattacacttctccaaatgagaaccagataaattggggcacatgtatattaagcagcaagtgtagcaaaattttaatattattaatttatggtaacaaattaaaaataagttatcatagaaaatatagtgaaagagcttaatgtatttattgaatatacagttttcgccttgttgcaaactgttctgtttcttatgttctgaaatgacag

SEQ ID NO: 38209 - DNA, 1205 bp, Homo sapiens
  misc_feature (1)...(1205): n = A,T,C or G
ttatgtaagtgggatattgaactgctgttgctacacaagaacctatgaaagcataaaagtcaaagataatttataggaagatacaaaatactataatacgttawtgatagtctgtgaatcactattaattttagtagaaaacaaaggtataaagcaaatgngtagttacaaaaatgtaaatagatgcacactacaaaatatgtaaattgtgaaatgtaacataaaagtttgagggtggagaagtaaaatgtaacttttttatgcaattgaagttaagttgttattattattattttttattctccaatttaaaacttttaattaaaaagtaaactttaatgtcaaaaatgcaaacttggggaagacagaaaagatcacacacaaggctgtcacttcacacttggaaggttgcacagcagccaggcagaggcgctcctcacttcccagacaggacagcggccaggcagagctggtcctcacatcccagatgggggcagcagctgggcagaagcgctcctcacttcccagatggggtggcagctgggcagaggtgctcctcaattcccagacagggcaacagccaggcagaggcgatcgctcctgaggaactcctgttacaattataagatgtattatgtaagctcatgataaccacaaagtaaatgcttttatgcacaaaagaaggtactcaaagtacacgagaaaggaattaaagcataacactaaaaatttaacgtaatataaagacagacagaagaaaaggaaaacangggaaaagaacagacagaaaacaacaatgtaataatctttcctatcaataattattttaaacaaaaagaaattaaactcaccaatgaaaaacatagattggctgaaagaatatttaaaaaagaccctactatatgccgtctacaagagacttacatatatacctacatactgttttataagagacttacgtatacacttacatacggtctataagaggcttattttatatttaaatgtacacaaaagcagaaagtaaaagaataggggaaagacagtctctgcaacagataaacaaaagagagaagaggtggatatacttttaccagacaaaatagacttcaagtcaaaaactatcatgagtcaaaaaatgtcattatataatgatgaaagaatcaatatatcaggaaagcataacaattataaatatatatgca

SEQ ID NO: 38210 - DNA, 1205 bp, Homo sapiens
  misc_feature (1)...(1205): n = A,T,C or G
ttatgtaagtgggatattgaactgctgttgctacacaagaacctatgaaagcataaaagtcaaagataatttataggaagatacaaaatactataatacgttaatgatagtctgtgaatcactattaattttagtagaaaacaaaggtataaagcaaatgngtagttacaaaaatgtaaatagatgcacactacaaaatatgtaaattgtgaaatgtaacataaaagtttgagggtggagaagtaaaatgtaacttttttatgcaattgaagttaagttgttattattattattttttattctccaatttaaaacttttaattaaaaagtaaactttaatgtcaaaaatgcaaacttggggaagacagaaaagatcacacacaaggctgtcacttcacacttggaaggttgcacagcagccaggcagaggcgctcctcacttcccagacaggacagcggccaggcagagctggtcctcacatcccagatgggggcagcagctgggcagaagcgctcctcacttcccagatggggtggcagctgggcagaggtgctcctcaattcccagacagggcaacagccaggcagaggcgatcgctcctgaggaactcctgttacaattataagatgtattatgtaagctcatgataaccacaaagtaaatgcttttatgcacaaaagaaggtactcaaagtacacgagaaaggaattaaagcataacactaaaaatttaacgtaatataaagacagacagaagaaaaggaaaacangggaaaagaacagacagaaaacaacaatgtaataatctttcctatcaataattattttaaacaaaaagaaattaaactcaccaatgaaaaacatagattggctgaaagaatatttaaaaaagaccctactatatgccgtctacaagagacttacatatatacctacatactgttttataagagacttacgtatacacttacatacggtctataagaggcttattttatatttaaatgtacacaaaagcagaaagtraaagaataggggaaagacagtctctgcaacagataaacaaaagagagaagaggtggatatacttttaccagacaaaatagacttcaagtcaaaaactatcatgagtcaaaaaatgtcattatataatgatgaaagaatcaatatatcaggaaagcataacaattataaatatatatgca

SEQ ID NO: 38211 - DNA, 400 bp, Homo sapiens
  misc_feature (1)...(400): n = A,T,C or G
tgcatcttttatttgccaaaagaaagactacaattcactgggatgtgagaaacccatcaaaacaagttaagtgccaaacatatgtggaacaaaattgttccttttagactttctaagtagagccacatttcagctactgtatctgggttttgctcctagtcaaggcagagaagtcccgcaaggtytcagtgctaaaaacttggaggcacaaatttcttccaaaaacgatatataccactgacatttcagaacatataacacagaacagtttgcaacaaggcgaaaactgtatattcaatnnnnnnnnnnnnnnnnnnnnnnnnnnnnnnnnnnnnnnnnnnnnnnnnnnnnnnnnnnnnnnnnnnnnnnnnnnnnnnnnnnnnnnnnnnnnnnnnnnnnt

SEQ ID NO: 38212 - DNA, 865 bp, Homo sapiens
tctcccttcatcctgggggaaaaaaaaacacactgttgtgcaccttttctcaatctcacagaattgtgcctgttatagtaggtggccacctctatttttgttttcagcgttgcccagaaatttgaactatgccagttgcaacaatatgccatgtgacccaagacagaaactggttcctagagcacactgaaaggctggaacttgcatacatgctctattctctcattccagaaagtgagaaattgccggagagaacaatatctgtcagtactgagctgtacaggctttggggaggtgctgataccagtaaagtgaaattgctgattttaccaatttcaatgtgattggtcacagttttatttacgtctaaggtattacaacttcattattggaatctaggccactcataaaggtattttggtctgtgtattgttattaaatctatgtttgtayggggggacaagggctgacacctgctattccatcatcttgctgacattattctcccagatcttgctaaaattttatttttagtttgttggttgattcttaaaattttctacaattatgccatctgcaagtcaagactgtttctattctttgtttctaattggactttcaattaaatgttatttgtattgttcagaataatatttattaaaattgctgaagatggacatccttgccttgtttccaataatagagaaaatgtgtttaatataaaaggacatgctgataaacttgaataaatacattccattaaaagtaggtaaataaacatgccaaaaattattgcttcaaaagaaaatgcaaaatttcttttttaaactttaataccaccactgtataaataactttttcaaat

SEQ ID NO: 38213 - DNA, 865 bp, Homo sapiens
tctcccttcatcctgggggaaaaaaaaacacactgttgtgcaccttttctcaatctcacagaattgtgcctgttatagtaggtggccacctctatttttgttttcagcgttgcccagaaatttgaactatgccagttgcaacaatatgccatgtgacccaagacagaaactggttcctagagcacactgaaaggctggaacttgcatacatgctctattctctcattccagaaagtgagaaattgccggagagaacaatatctgtcagtactgagctgtacaggctttggggaggtgctgataccagtaaagtgaaattgctgattttaccaatttcaatgtgattggtcacagttttatttacgtctaaggtattacaacttcattattggaatctaggccactcataaaggtattttggtctgtgtattgttattaaatctatgtttgtacggggggacaagggctgacacctgctattccatcatcttgctgacattattctcccagatcttgctaaaattttatttttagtttgttggttgattcttaaaattttctacaattatgccatctgcaagtcaagactgtttctattctttgtttctaattggactttcaattaaatgttatttgtattgttcagaataatatttattaaaattgctgaagatggacatccttgccttgtttccaataawagagaaaatgtgtttaatataaaaggacatgctgataaacttgaataaatacattccattaaaagtaggtaaataaacatgccaaaaattattgcttcaaaagaaaatgcaaaatttcttttttaaactttaataccaccactgtataaataactttttcaaat

SEQ ID NO: 38214 - DNA, 380 bp, Homo sapiens
tgccctaaagagttctggtcagtgccttaaagaggtacagaagtagagagtagtgagtagtgaagactagcagagatttgcagggacagacaggaacattctgaattatggaaattagctatggctcaaagtccaatcaaaatctgagagggcaaatataaaaggaatagagaggaggaggcaaggaaggataaagatgctctttcttttctctccgacaggaccttttggattcaaagttgcgctagcaataggaaatgttactcttgatataaatacacattttattacatgcccygaatgtcgcttgtttacctgcattaattcaacctttgataaaaatcaaattatcttgataattaaagccagggaaggagttt

SEQ ID NO: 38215 - DNA, 1552 bp, Homo sapiens
ccaataattaaatggccttgtcagattatttaaatttatgctagtaggaaaggaagcaactttgcaacatttagaaatgaaattcgctttgtaagataattctaatgccagtggcattatatactagaagttttgaaaatgtgttacaagcaagactttgaaaacatgttacaaatgttaaaatatgttctagataatattcttttctatttcattgatgtttgtcaagaaataaaagcaaaaatatctatatcatctttttcttctatattactcttgtgtttttacttgggcaatgaagaagaagatagcagttactaacagtgaaatggttttaccaaaacattgatcaagggactgttccacagtgttcattttgcttctttcttttttagaaaacctgtccaaagttttgaaggaatatacaagataccagtaggtctgtaagttgggacaatagagagtttttcttttattaaaactgaatagacatcacttcaaatccactctgacaaacttctgcaaaaaattatgtaaggtaaagtctgcaagaaaaagtgatactgcctcctgcttccagtgctggtagggcagaaaagaaaaaaacctattttgctattatttacagttttaaatattcactgatattttaatatggcaaatgaaaccatcgataaactaataataacaaaaaattctatacagtaaaatccaccgtaatcaaagtcaaaatacaaatggaaaatcacaggaaaaggtatttgaaactcctattgtagacaaaggaataatttcctttttaatgacctcagaagaatcaataacacagacaaaccaaggaagaatgtacaaagaacaggaacatataagctacaaaaactataaataactcttaaatacaggaaaagatgcccaatctgaggcagaaaaaaggagaagtaatatttaaatgaaaattaaatgccattctttatcaaattggcaagtatcaaaaagttttatagtcctccacactggtgaaactgaaggaaacaaaccacctcatatgttgctgatgggagtatagagacaaagggagatagtacagacaacatgaagatcagctggaaaatgtctatcaaatgtacaattgttcaaggatatttgctgccatattatttgcaatagaaaaaggtacccatcaatggttagattatggaaacatacatagagtggaacatgatactggaaatgataaggaagtttcatatgtaatgaccttggggggaaacttcagcctttaaaggctctgaacccttgatctcctacccaggatcaggtcttagagcatggggaaagatgtaaaaattcttctcttcagataattctggcattcagagagcaaaggagtactaggttcatttccaattggaccctataaagagaggcaaaatccttttcttagcttgaaaaaaaaagyggcaggggggaagcagagtcttaaaaaggtctacttgctactactttctagggagtgaaaagaagcaagagtgagggactaggggagtaaggc

SEQ ID NO: 38216 - DNA, 1239 bp, Homo sapiens
tcttctattagagcagcacttattcagaaaagcaataagcactgtagatattcacacaggacaggctttaatttaagaatctgtgtacttacaaaactaatacaatggctggatctcaggtacactgctggtctacagagaatctgaatgttactattgccactgaggtcaggaactgcacaaaaatgtcagtgatggtggtaggtgcctaaaatacaaaagaagctgattctcacaaaaagccctggtccgtgtatcttttcactcttaataaagagaaygatggattttccttatcttctcaggtccattcatctgttagagaatatttgagtcatttccagttttttggcaattaggaggcaagctgctataaatattcaagtataggttttcatgaagatgtaagttttcattacttgagagtaactactcagtggtgggattgctgggtcattaagtaagtgtatatttagctttataaaaagttacttttcaagttgtaccattctgtatttccactagcaatgtatgagagctccaagagcttcataccctcgtcagtatactagtattgctaatattttttttaatttaaccactctaataagtgtatagtggtatcagtttttttcatcatataactccgaataattcatagtatattatctctgcatttttaacttacaatgctttacaaagatggctttcttcttaaaatataattatttgctatagtccatacatctaaatatgttataaaatcacattaacttctatttttggaactgaagggagaaggcagctaagataactgtaaatatcaaatggcatggaaatgactttatcaacttttaggaaataatcagaatttactcccacaaggttttcttgaaattaagtttactttgagattgaatatatatgcacatttttcggttacaaagaataaactaacaaacaccaaatatcatccaagtttgtaatgacatgtcaccatgtatcatgggttgagttacaaaacaatgaaatttaaatgctcaaaatcatattagatttatattcctttgcgttttaatccagacattgaacattctatagagataaccttacagataagtatataatttgatactagtaaatagttctaaagtgtatctttctttgcctccaaaagggccatttaaaagtagtcattcagaaccaaaaaatctaaattgaaattaggtgatggatgca

SEQ ID NO: 38217 - DNA, 1239 bp, Homo sapiens
tcttctattagagcagcacttattcagaaaagcaataagcactgtagatattcacacaggacaggctttaatttaagaatctgtgtacttacaaaactaatacaatggctggatctcaggtacactgctggtctacagagaatctgaatgttactattgccactgaggtcaggaactgcacaaaaatgtcagtgatggtggtaggtgcctaaaatacaaaagaagctgattctcacaaaaagccctggtccgtgtatcttttcactcttaataaagagaatgatggattttccttatcttctcaggtccattcatctgttagagaatatttgagtcatttccagttttttggcaattaggaggcaagctgctataaatattcaagtataggttttcatgaagatgtaagttttcattacttgagagtaactactcagtggtgggattgctgggtcattaagtaagtgtatatttagctttataaaaagttacttttcaagttgtaccattctgtatttccactagcaatgtatgagagctccaagagcttcataccctcgtcagtatactagtattgctaatattttttttaatttaaccactctaataagtgtatagtggtatcagtttttttcatcatataactccgaataattcatagtatattatctctgcatttttaacttacaatgctttacaaagatggctttcttcttaaaatataattatttgctatagtccatacatctaaatatgttataaaatcacattaacttctatttttggaactgaagggagaaggcagctaagataactgtaaatatcaaatggcatggaaatgactttatcaacttttaggaaataatcagaatttactcccacaaggttttcttgaaattaagtttactttgagattgaatatataygcacatttttcggttacaaagaataaactaacaaacaccaaatatcatccaagtttgtaatgacatgtcaccatgtatcatgggttgagttacaaaacaatgaaatttaaatgctcaaaatcatattagatttatattcctttgcgttttaatccagacattgaacattctatagagataaccttacagataagtatataatttgatactagtaaatagttctaaagtgtatctttctttgcctccaaaagggccatttaaaagtagtcattcagaaccaaaaaatctaaattgaaattaggtgatggatgca

SEQ ID NO: 38218 - DNA, 1239 bp, Homo sapiens
tcttctattagagcagcacttattcagaaaagcaataagcactgtagatattcacacaggacaggctttaatttaagaatctgtgtacttacaaaactaatacaatggctggatctcaggtacactgctggtctacagagaatctgaatgttactattgccactgaggtcaggaactgcacaaaaatgtcagtgatggtggtaggtgcctaaaatacaaaagaagctgattctcacaaaaagccctggtccgtgtatcttttcactcttaataaagagaatgatggattttccttatcttctcaggtccattcatctgttagagaatatttgagtcatttccagttttttggcaattaggaggcaagctgctataaatattcaagtataggttttcatgaagatgtaagttttcattacttgagagtaactactcagtggtgggattgctgggtcattaagtaagtgtatatttagctttataaaaagttacttttcaagttgtaccattctgtatttccactagcaatgtatgagagctccaagagcttcataccctcgtcagtatactagtattgctaatattttttttaatttaaccactctaataagtgtatagtggtatcagtttttttcatcatataactccgaataattcatagtatattatctctgcatttttaacttacaatgctttacaaagatggctttcttcttaaaatataattatttgctatagtccatacatctaaatatgttataaaatcacattaacttctatttttggaactgaagggagaaggcagctaagataactgtaaatatcaaatggcatggaaatgactttatcaacttttaggaaataatcagaatttactcccacaaggttttcttgaaattaagtttactttgagattgaatatatatgcacatttttcggttacaaagaataaactaacaaacaccaaatatcatccaagtttgtaatgacatgtcaccatgtatcatgggttgagttacaaaacaatgaaatttaaatgytcaaaatcatattagatttatattcctttgcgttttaatccagacattgaacattctatagagataaccttacagataagtatataatttgatactagtaaatagttctaaagtgtatctttctttgcctccaaaagggccatttaaaagtagtcattcagaaccaaaaaatctaaattgaaattaggtgatggatgca

SEQ ID NO: 38219 - DNA, 1288 bp, Homo sapiens
ttctgtttgttccagctctaatacttgatttgactttcacaggttgttacctttatataatcttcattgtggtgtcctatttaaggaaaggaagtcagactggtgggagcaggggaaagcagaaagaagaagcagattagctacaagtctgccttacttcacggtcccggacacatagccctcctgcgcaaataattcacaatctttctgcgcccagttatcaccagacccttggctgatacaaaaaaaaaattcaggttagctcactacaaccttggagttatcagtattgcacaaagccctccacagcatgcggcataaatagtatcctgtaaaatctccagcaagcctttgtttcctcatagtcagctcctcttctgctgatcctgcccgttgctcccttgtaacatactttcatactttcatactttctctaataaacctctctttatctacaactgtcttggtaagttgttttaccctcatgccatgggctcaaatagacatagctcccctgtgacattcatcatgattttataataattcagaaacatactgtagaattaatttttaagtgtttacaatagaccaagagctgaatggattcaaattaaatatatattagtatcaagctttcacctactgataaaaaaataaaggagtctaagatttcttttaaaaaaaaacaaagcttagctcattaaatatttccaagcatcaaaaccagagataaggtattcatgtaggaaaagtattaaatatagtatcaaaagttctggtttttctattttgggaaaagccagcttaacatctctaaaatacctaaaatgagctccatacctaaaaatggagataatatactcacctcacagtagtattttaaggattaaatgagaaatgcagtcaatgattattattaaactataaagatctttataaatgtataataatatcatactttagttacattatatatctttcttgtacatctgttatatagcaataatagctgagagcctacagataatttcatcttagttgaaattttatttaaaaatttatagtaaaaaatctaaaattaatagtctactcaatttaaaagacccaaatgttttggaaggctcacatgagtctaattttgtatctcaagattgacttaatagagtagatgccackaagaacatagatttgtaaataattcatatttctgagagtagttgttatataataaatacttaatcatcttacacatttttccttattttattagttagtttttattttatct

SEQ ID NO: 38220 - DNA, 575 bp, Homo sapiens
ggaagcactattctctctcaaatttttctaaagttttaaaggtaaaaatctccttagtttttgatgtctgacttgacttaggatttaggggctgacctgagccagatatttaattttcattttcaaaattaaartcagcatcttaaatcccaggagaagtcatgtggtacagatgaacactcccttaggtatataccatgaccaaaatgaaataaagaaaatatggtacatatacaccatggaataccacatagccataaaaaagaatgcagtcatgcccttgcaggaacatgagtgtagctgggggccttatcctatgtcagaaaacaaaggaacaaaaagtcatatacatcatgttctcacttataagttggagccaaaatgttgagtacacatggacatgaagatggaagcaacagacactggggactaccagagtaaggaggaaaggatgggaacaagtaaccattgaatactatgctcactacctgggtgatgggattatttgtaccccaaacctcagtgtcatgcaatatacccatgtaacaagctgtgcatgtaccccggaacctaaa

SEQ ID NO: 38221 - DNA, 575 bp, Homo sapiens
ggaagcactattctctctcaaatttttctaaagttttaaaggtaaaaatctccttagtttttgatgtctgacttgacttaggatttaggggctgacctgagccagatatttaattttcattttcaaaattaaagtcagcatcttaaatcccaggagaagtcatgtggtacagatgaacactcccttaggtatataccatgaccaaaatgaaataaagaaaatatggtacatatacaccatggaatacyacatagccataaaaaagaatgcagtcatgcccttgcaggaacatgagtgtagctgggggccttatcctatgtcagaaaacaaaggaacaaaaagtcatatacatcatgttctcacttataagttggagccaaaatgttgagtacacatggacatgaagatggaagcaacagacactggggactaccagagtaaggaggaaaggatgggaacaagtaaccattgaatactatgctcactacctgggtgatgggattatttgtaccccaaacctcagtgtcatgcaatatacccatgtaacaagctgtgcatgtaccccggaacctaaa

SEQ ID NO: 38222 - DNA, 668 bp, Homo sapiens
aaaagattacaaccagaacaagttttgatgttatcatcagctctgaccctaagaacccaggccaaattaagacctttggcatcctcagtgctgaaaatgttatggccttcatcaacccctatgtaaatacatatttagaaaacaagtgtgaggacattttacaaatttctggtgctcccgtgaggattttgtttgtttgttttttgtttttttgttgttgttgttgttttaattccaaatttcagaataatttcaaaacrctccctcatgttttcggtgccctttctgttgctggtgtcctaagcgtatgcttagtgcctaatgaataatcgggccctcatttggaccacccacttaataaggttaccccaagcactggaaacccctgtgagctgagtctaaactgtcactttagcactttccttacagaaagactagcaggggattgaaaaacaagttagttaaggtcccgctcaggccttcctttgggagcgggtcatttcctgatgagggaacctcatcccagccagactgagagctcctgggggcagctctgcagctctatctttgcatcctctgctttagtccagcaagaagcacacagcttccaactaagaaaaaaaaattacctacactctgcagtgtttatggaattactttatttaaaa

SEQ ID NO: 38223 - DNA, 668 bp, Homo sapiens
aaaagattacaaccagaacaagttttgatgttatcatcagctctgaccctaagaacccaggccaaattaagacctttggcatcctcagtgctgaaaatgttatggccttcatcaacccctatgtaaatacatatttagaaaacaagtgtgaggacattttacaaatttctggtgctcccgtgaggattttgtttgtttgttttttgtttttttgttgttgttgttgttttaattccaaatttcagaataatttcaaaacactccctcatgttttcrgtgccctttctgttgctggtgtcctaagcgtatgcttagtgcctaatgaataatcgggccctcatttggaccacccacttaataaggttaccccaagcactggaaacccctgtgagctgagtctaaactgtcactttagcactttccttacagaaagactagcaggggattgaaaaacaagttagttaaggtcccgctcaggccttcctttgggagcgggtcatttcctgatgagggaacctcatcccagccagactgagagctcctgggggcagctctgcagctctatctttgcatcctctgctttagtccagcaagaagcacacagcttccaactaagaaaaaaaaattacctacactctgcagtgtttatggaattactttatttaaaa

SEQ ID NO: 38224 - DNA, 668 bp, Homo sapiens
aaaagattacaaccagaacaagttttgatgttatcatcagctctgaccctaagaacccaggccaaattaagacctttggcatcctcagtgctgaaaatgttatggccttcatcaacccctatgtaaatacatatttagaaaacaagtgtgaggacattttacaaatttctggtgctcccgtgaggattttgtttgtttgttttttgtttttttgttgttgttgttgttttaattccaaatttcagaataatttcaaaacactccctcatgttttcggtgcccttyctgttgctggtgtcctaagcgtatgcttagtgcctaatgaataatcgggccctcatttggaccacccacttaataaggttaccccaagcactggaaacccctgtgagctgagtctaaactgtcactttagcactttccttacagaaagactagcaggggattgaaaaacaagttagttaaggtcccgctcaggccttcctttgggagcgggtcatttcctgatgagggaacctcatcccagccagactgagagctcctgggggcagctctgcagctctatctttgcatcctctgctttagtccagcaagaagcacacagcttccaactaagaaaaaaaaattacctacactctgcagtgtttatggaattactttatttaaaa

SEQ ID NO: 38225 - DNA, 960 bp, Homo sapiens
caaaactgtatacagtctgatagatatttatgtcgtgaacacctgtgtaaccactgccaaagtgaagatgtagaatattggcaacacttcacagcctcattcctgccttttctcagccattacctcccaaacatagcagtttttctgagtttcatcacctttgattcattttgcctgtttttgaactttatataaatggatttatacattatgcacttgtgtgtgtggattatttacctgacagttataaggttaatccacaaattgtgtgtaccattagttcatccattgtcattgctgtattctgttgtataaacataccacaatttattttgatatttggcacagtttctggccactacatataatgctaaaatgagcacattgtatatgtcattaaaatgaggttgaactaatcattaagggctcattaaaatcaaaactaattttcaaccaaaatttcactgtatttagcagctgggtagtacctctgattattctttttatagtttgtaactaggtgaaataggttgaattattaattctaaaacctattcctaaaatggtaaagtactaaaacagtaattgtaacagcaattttgaaaatgacaaaaatgttagagaaaaaaaatggtatacattaatgatcrtcaaacttgcttaagccctaaaataactttttaaaattacatatctcatccctgcacatttttaacttcacatttgttattttttaaccataaatgtaagtattataaaagatataacttctggcatattgtatagttcatgtgctttaagtgtattttccatcataaccttgaagccacataattagctcaatcagtttgtggaggatgtctgcctgtccattttgaggtacaaagccagttcttattgtcaaactaatgagccaaatcaaacttatacagtcacagatcatttaatgatggggataca

SEQ ID NO: 38226 - DNA, 1833 bp, Homo sapiens
cattggaggcaacagctcccttgtggcagggagggtaggggtgcactttgataaagcatgctgctccagtggataggatgggctgatggctgtctagtcagggctagcactgccaaaggcctgagggagaaaatagcttcctgctcttcatttaaggagctgaactgagaaccagcgcccatgttgcaaagtctcagcagggcaagaacgtttgaaaaatgacgaggacatattgcattatgagaaggataaaattgcatttgtgataatggactgacctaagagcactgtgccaataagaaaaagaattgtaggttaaacttacgttttctttcaggcacatttacctgaaggggtaaattgagagttgctggggttatcaattaagttggggtatgatagaatttcaattaaatgtaggtaaggacttaggggttgggtgatagttaatataataataactaatacttactgggtttttactatgtgccaggcactatttgaggggaaacacatatctgcaacaataggaagtaggtactgttattattcgctagacatgagtacaaggaattgtactattcccagtacaataggaagtagtcacaatcattattctctaaattaaagtctagttaagctacttaacctagggtgagaggttaagtaactcacccaaggtcacatagaaagcagatggtagaattgggagttgtgaagttggggtctaaaaacaccagacagtttagaccccatgcagttggggtctgaaaagctcagctcttaaccactatattctactgcgtttaggacgctatgacatatcatcttcaagtagcctcaagtttttcctgtatttagtgattgttaattggatacctggtgtatacctgacatacascaggtgctggggatttattcatgatgaaaaccagtcatagcctcgatcctccataagctaagagcatggggcatccactcacgttctgtagtctttgagacgttatgatccaggattcttttcgggaagtagacttttcaaaacccccaaagctaactcattcgttaggagttaattgaaaacatttagaggaaacattttttgaaatcagatgaacatttttaggcaataggtggagtgctggttgtcatggtttaaataccgtaaaaaatgcatttacagaaatctgtatctaaagagacaaacgcttaggattctccttatcatggacattggtgagttgtatttgtgtgtgtgggtgtatgtgatggacatttatacagacacacatgtatctgcttctgcttctacatctatatcataagctatacttatacctgaaactggataatctcattcagtgtctctgctttgtcttcaaattttgaggcaaattctgttatataaggatgcaataaaactgtggagctacttccctgtgaaaaccaggatgcttgccccagtggtatgattaaacaaaaaatttatgtgtacatgacaaaatgatgaaattgtgtaaagttcagtaatagtgaaataaggcactgacttaaaaatagagctaaaatgatagtcattttgcaaataatttgggctcctttctttttataataatttcttctctcacctggaaaatgcttctctctatttaaaagttgtcctcttttctcccaaatcagaaactgttttagttagattgtgtgtgtgcacttgctaacttgctgtatttcaccctaacatttaagttgcctgaattcaattggaacaaaatttgaattgtctgaccttgatttattattaaaacttccctgtagccaacttgtttgtatttt

SEQ ID NO: 38227 - DNA, 1833 bp, Homo sapiens
cattggaggcaacagctcccttgtggcagggagggtaggggtgcactttgataaagcatgctgctccagtggataggatgggctgatggctgtctagtcagggctagcactgccaaaggcctgagggagaaaatagcttcctgctcttcatttaaggagctgaactgagaaccagcgcccatgttgcaaagtctcagcagggcaagaacgtttgaaaaatgacgaggacatattgcattatgagaaggataaaattgcatttgtgataatggactgacctaagagcactgtgccaataagaaaaagaattgtaggttaaacttacgttttctttcaggcacatttacctgaaggggtaaattgagagttgctggggttatcaattaagttggggtatgatagaatttcaattaaatgtaggtaaggacttaggggttgggtgatagttaatataataataactaatacttactgggtttttactatgtgccaggcactatttgaggggaaacacatatctgcaacaataggaagtaggtactgttattattcgctagacatgagtacaaggaattgtactattcccagtacaataggaagtagtcacaatcattattctctaaattaaagtctagttaagctacttaacctagggtgagaggttaagtaactcacccaaggtcacatagaaagcagatggtagaattgggagttgtgaagttggggtctaaaaacaccagacagtttagaccccatgcagttggggtctgaaaagctcagctcttaaccactatattctactgcgtttaggacgctatgacatatcatcttcaagtagcctcaagtttttcctgtatttagtgattgttaattggatacctggtgtatacctgacatacaccaggtgctggggatttattcatgatgaaaaccagtcatagcctcgatcctccataagctaagagcatggggcatccactcacgttctgtagtctttgagacgttatgatccaggattcttttcgggaagtagacttttcaaaacccccaaagctaactcattcgttaggagttaattgaaaacatttagaggaaacattttttgaaatcagatgaacatttttaggcaataggtggagtgctggttgtcatggtttaaataccgtaaaaaatgcatttacagaaatctgtatctaaagagacaaacgcttaggattctccttatcatggacattggtgagttgtatttgtgtgtgtgggtgtatgtgatggacatttatacagacacacatgtatctgcttctgcttctacatctatatcataagctatacttatacctgaaactggataatctcattcagtgtctctgctttgtcttcaaattttgaggcaaattctgttatataaggatgcaataaaactgtggagctacttccctgtgaaaaccaggatgcttgccccagtggtatgattaaacaaaaaatttatgtgtacatracaaaatgatgaaattgtgtaaagttcagtaatagtgaaataaggcactgacttaaaaatagagctaaaatgatagtcattttgcaaataatttgggctcctttctttttataataatttcttctctcacctggaaaatgcttctctctatttaaaagttgtcctcttttctcccaaatcagaaactgttttagttagattgtgtgtgtgcacttgctaacttgctgtatttcaccctaacatttaagttgcctgaattcaattggaacaaaatttgaattgtctgaccttgatttattattaaaacttccctgtagccaacttgtttgtatttt

SEQ ID NO: 38228 - DNA, 1833 bp, Homo sapiens
cattggaggcaacagctcccttgtggcagggagggtaggggtgcactttgataaagcatgctgctccagtggataggatgggctgatggctgtctagtcagggctagcactgccaaaggcctgagggagaaaatagcttcctgctcttcatttaaggagctgaactgagaaccagcgcccatgttgcaaagtctcagcagggcaagaacgtttgaaaaatgacgaggacatattgcattatgagaaggataaaattgcatttgtgataatggactgacctaagagcactgtgccaataagaaaaagaattgtaggttaaacttacgttttctttcaggcacatttacctgaaggggtaaattgagagttgctggggttatcaattaagttggggtatgatagaatttcaattaaatgtaggtaaggacttaggggttgggtgatagttaatataataataactaatacttactgggtttttactatgtgccaggcactatttgaggggaaacacatatctgcaacaataggaagtaggtactgttattattcgctagacatgagtacaaggaattgtactattcccagtacaataggaagtagtcacaatcattattctctaaattaaagtctagttaagctacttaacctagggtgagaggttaagtaactcacccaaggtcacatagaaagcagatggtagaattgggagttgtgaagttggggtctaaaaacaccagacagtttagaccccatgcagttggggtctgaaaagctcagctcttaaccactatattctactgcgtttaggacgctatgacatatcatcttcaagtagcctcaagtttttcctgtatttagtgattgttaattggatacctggtgtatacctgacatacaccaggtgctggggatttattcatgatgaaaaccagtcatagcctcgatcctccataagctaagagcatggggcatccactcacgttctgtagtctttgagacgttatgatccaggattcttttcgggaagtagacttttcaaaacccccaaagctaactcattcgttaggagttaattgaaaacatttagaggaaacattttttgaaatcagatgaacatttttaggcaataggtggagtgctggttgtcatggtttaaataccgtaaaaaatgcatttacagaaatctgtatctaaagagacaaacgcttaggattctccttatcatggacattggtgagttgtatttgtgtgtgtgggtgtatgtgatggacatttatacagacacacatgtatctgcttctgcttctacatctatatcataagctatacttatacctgaaactggataatctcattcagtgtctctgctttgtcttcaaattttgaggcaaattctgttatataaggatgcaataaaactgtggagctacttccctgtgaaaaccaggatgcttgccccagtggtatgattaaacaaaaaatttatgtgtacatgacaaaatgatgaaattgtgtaaagttcagtaatagtgaaataaggcactgacttaaaaatagagctaaaatgatagtcattttgcaaataatttgggctcctttctttttataataatttcttctctcacctggaaaaygcttctctctatttaaaagttgtcctcttttctcccaaatcagaaactgttttagttagattgtgtgtgtgcacttgctaacttgctgtatttcaccctaacatttaagttgcctgaattcaattggaacaaaatttgaattgtctgaccttgatttattattaaaacttccctgtagccaacttgtttgtatttt

SEQ ID NO: 38229 - DNA, 1068 bp, Homo sapiens
ctcccaatcagcaagaaaagccgaatggctcatgctacgttcatacagggataaaacatcatagaactctgctcacrctttattttagggaaggaaagaaacgaaaccttcttggatcagcatgaagaaaaagacacagcacaggtggcggcagtcgctgcattccccgcgccctcctctcttggaagggccgctgcccagtgtggctgctggacttagacagagactcctggtcagaggccttctcccatttcaggtggtgctggcaacctgctgtgagctgacggaagagatgggacaaaagtcccgaacaggcaacacttccccagaaagtggggtgaggggaaggccccaaacaatctcactcagtacgtcccgcatttgggcctcaatctcgttcagtacatcccgcgtgcagacctgtgtgtgaactctaagtacctatgcgtgtatgctgcttcacagatgaaaaagttcagcaatgaataaaggagtctggaagagccacaaagccttctagagaagggcagagtcaagtcccaccggatatccaggaagaggtgtgccagctcccaccaccatctgcctgacctgacttccatgcccttcctagtgctgctgagatgggccgggcactcgtaacacttccgatcattttagagattgggaagcagaggctctgagaagtcggtgcttgctggggtcacaaaggtaggcagcagtggccccaaagctctggatagtacaggctacttgacctccccagtaaagtcccgaagcccactcttcacctgtcatggtcctcacttcccactctctgcccacatccatctcttccacagcttctcttgcctgctagacagacagcagggtccacagcagagtcctctctgcacgcccaggtactgtgcacaggccctggcaattgctcccctgcagaacccactcaccattcattccccagactttctgcctctgatgttttaaagaccttattagtatttgggagtgaagaactgcctctcactggtgacagttgtttctatctacatgtcactgtatgtctag

SEQ ID NO: 38230 - DNA, 1068 bp, Homo sapiens
ctcccaatcagcaagaaaagccgaatggctcatgctacgttcatacagggataaaacatcatagaactctgctcacactttattttagggaaggaaagaaacgaaaccttcttggatcagcatgaagaaaaagacacagcacaggtggcggcagtcgctgcattccccgcgccctcctctcttggaagggccgctgcccagtgtggctgctggacttagacagagactcctggtcagaggscttctcccatttcaggtggtgctggcaacctgctgtgagctgacggaagagatgggacaaaagtcccgaacaggcaacacttccccagaaagtggggtgaggggaaggccccaaacaatctcactcagtacgtcccgcatttgggcctcaatctcgttcagtacatcccgcgtgcagacctgtgtgtgaactctaagtacctatgcgtgtatgctgcttcacagatgaaaaagttcagcaatgaataaaggagtctggaagagccacaaagccttctagagaagggcagagtcaagtcccaccggatatccaggaagaggtgtgccagctcccaccaccatctgcctgacctgacttccatgcccttcctagtgctgctgagatgggccgggcactcgtaacacttccgatcattttagagattgggaagcagaggctctgagaagtcggtgcttgctggggtcacaaaggtaggcagcagtggccccaaagctctggatagtacaggctacttgacctccccagtaaagtcccgaagcccactcttcacctgtcatggtcctcacttcccactctctgcccacatccatctcttccacagcttctcttgcctgctagacagacagcagggtccacagcagagtcctctctgcacgcccaggtactgtgcacaggccctggcaattgctcccctgcagaacccactcaccattcattccccagactttctgcctctgatgttttaaagaccttattagtatttgggagtgaagaactgcctctcactggtgacagttgtttctatctacatgtcactgtatgtctag

SEQ ID NO: 38231 - DNA, 1068 bp, Homo sapiens
ctcccaatcagcaagaaaagccgaatggctcatgctacgttcatacagggataaaacatcatagaactctgctcacactttattttagggaaggaaagaaacgaaaccttcttggatcagcatgaagaaaaagacacagcacaggtggcggcagtcgctgcattccccgcgccctcctctcttggaagggccgctgcccagtgtggctgctggacttagacagagactcctggtcagaggccttctcccatttcaggtggtgctggcaacctgctgtgagctgacggaagagatgggacaaaagtcccgaacaggcaacacttccccagaaagtggggtgaggggaaggccccaaacaatctcaytcagtacgtcccgcatttgggcctcaatctcgttcagtacatcccgcgtgcagacctgtgtgtgaactctaagtacctatgcgtgtatgctgcttcacagatgaaaaagttcagcaatgaataaaggagtctggaagagccacaaagccttctagagaagggcagagtcaagtcccaccggatatccaggaagaggtgtgccagctcccaccaccatctgcctgacctgacttccatgcccttcctagtgctgctgagatgggccgggcactcgtaacacttccgatcattttagagattgggaagcagaggctctgagaagtcggtgcttgctggggtcacaaaggtaggcagcagtggccccaaagctctggatagtacaggctacttgacctccccagtaaagtcccgaagcccactcttcacctgtcatggtcctcacttcccactctctgcccacatccatctcttccacagcttctcttgcctgctagacagacagcagggtccacagcagagtcctctctgcacgcccaggtactgtgcacaggccctggcaattgctcccctgcagaacccactcaccattcattccccagactttctgcctctgatgttttaaagaccttattagtatttgggagtgaagaactgcctctcactggtgacagttgtttctatctacatgtcactgtatgtctag

SEQ ID NO: 38232 - DNA, 1068 bp, Homo sapiens
ctcccaatcagcaagaaaagccgaatggctcatgctacgttcatacagggataaaacatcatagaactctgctcacactttattttagggaaggaaagaaacgaaaccttcttggatcagcatgaagaaaaagacacagcacaggtggcggcagtcgctgcattccccgcgccctcctctcttggaagggccgctgcccagtgtggctgctggacttagacagagactcctggtcagaggccttctcccatttcaggtggtgctggcaacctgctgtgagctgacggaagagatgggacaaaagtcccgaacaggcaacacttccccagaaagtggggtgaggggaaggccccaaacaatctcactcagtacgtcccgcatttgggcctcaatctcgttcagtacatcccgcgtgcagacctgtgtgtgaactctaagtacctatgcgtgtatgctgcttcacagatgaaaaagttcagcaatgaataaaggagtctggaagagccacaaagccttctagagaagggcagagtcaagtcccaccggatatccaggaagaggtgtgccagctcccaccaccatctgcctgacctgacttccatgcccttcctagtgctgctgagatgggccgggcactcgtaacacttccgatcattttagagattgggaagyagaggctctgagaagtcggtgcttgctggggtcacaaaggtaggcagcagtggccccaaagctctggatagtacaggctacttgacctccccagtaaagtcccgaagcccactcttcacctgtcatggtcctcacttcccactctctgcccacatccatctcttccacagcttctcttgcctgctagacagacagcagggtccacagcagagtcctctctgcacgcccaggtactgtgcacaggccctggcaattgctcccctgcagaacccactcaccattcattccccagactttctgcctctgatgttttaaagaccttattagtatttgggagtgaagaactgcctctcactggtgacagttgtttctatctacatgtcactgtatgtctag

SEQ ID NO: 38233 - DNA, 1800 bp, Homo sapiens
cacttaagtaaattcagaatgaagagttctttctaattttcatccaatgagcagcaatagacaaagcataggcactgagtactagcaaaggaggggcattaaaagaaataagaaaagtaatttttatacaaaagtgagccgggcatggtggtaggcacctgtaatcccaactactcaggaggctgaggcaagaggatcccttgaactgggaggtggaggtttcagtgagctgagattgtgccaccrcactccagcctgggtgacagagcaagactttgtctaataaatcaataagtacataaaataattttcagagcatttaatatttattaaaaaaaacaacaaaatagtcagaaatcagaactttcttacctaaattagaccttcttaaattatggtttagtaccatttatttttaattacataagggagagaaattccaattttttaaaggatttagggcctctcttggttttaatccagccttgtggacaagtaccattctttacaaactagtactgttttcacataatattgtctggctggcttaaatatctttagggttacactgaaaacagtgcatctttggggggcagaggtgattgaggtaaatgtggatgaggagtcaaagggagaagaccatccacttttcaacaggggtgctgttagcatttgcgtgagaccattcatcagtgcagaaatgtcccatgcattgagtttaacaactctggcttacttccacatgaatgcctgtagctatcgtttttccctccccattatcaagacaccccaactgtttcaaatgtgtcctagagaggcagtattgccatgccagaaaccatagatggctaacccagcgggtcctctttcagtgtctcccacaggaaccagacactacatctagtcccctccttttacatagatatttgtgttttgtatgaacatcagttccatctttaagtccaggaactgtgattccatgccttgatagtcaaattgaaactctgaagttttgacttctgaggttcataacctttgatacaatgatcactatagcacaaggtagccaggaactcctctgatctgttaggaagattgttctgcccaagaaaacagtgcaggtatggccttctgaattggccatggaaaccctgggttagctctattgaaatataaagtaaaaatgggtttctggctttataaaagaggttcaaaaccagggccttctattaaaatacaaatttaaatatttgcatcaaaacttagggccagacgcggtggctcatgcccataatcctagcactttgggaagcaaaggcaggtggatcacttgagccctgaagtttgagactggcctgggctcttctttcttctctttacgttttctctttttgtcccagttagagtctcccgaggaacaaagctcttctgatgcctgtgtttattccatagactcattttggacttacgatctccagcactttaaaataataaatttgtcctgttttaagccactaaagttgtggtaatttgtttcaacagcaataagaaactgatatacatatattctagcttaaacactaaatttttatattattattacgatgatttctctcttttagagttcaattgtaaatggtggtataacagttttcttttgttgttgttgttgttgttttttgagacagggtctcaatctgtagcccaggcaggagtgcacactggtgcgatctcctctcactgcagcctcacctcccgggttcaagcgattctcccacctctagtctcctgactagctgg

SEQ ID NO: 38234 - DNA, 1520 bp, Homo sapiens
tgcatagactaatctgtaggatagatttaggcaaatttgattaagcttttactgattttataatattctgaattttaccaaccctttcaggtgccattactttgaatggcaaaaaccgcagttacttttgcrccaacctaatacctgaaggatccaattctgatgatcagagaagcaaagctgtactttcctaagaaggacccctgaggaaggtctgttccttcttgggtatgccacctgatatacatccgcaaaaatatttgtaaaatgtaaccatagtgccatgtcattttatcaaaaatgaaaatgtgtccaagatttccatcatctaaatatcagccaccaactggtgttctgcagcgtcaaagctgcagggcatgctggggaaggctaaggagatactaaactagcttcaattatttgaacaccttaaatacagtaaagagcctctaattatttttcctgttattctttttttattattattattattatactttaagttttagggtacatgtgcacaatgtgcaggttagttacatatgtatacatgtgccatgctggtgcgctgcacccactaactcgtcatctagcattaagtatatctcccaatgaagagcctctaatttataaacataattttaatagatcagcaggaccatattgtcctatgtaatggaactcacaggaatattctggttttatgtttggttttctttttttttttttttttttttgagacagagtccagtcgccatgctggagtgcagtggcatgatctcggctcactgcaacctctgcctcccgtgttcaagcaattctcctgcctcagcctcttgagtagctgggactacaggcacgcaccaccacacccagctaatttctgtggttttagtagagacagagtgtcaccatgttggccaggattgtcttgatctcttgacctcctgatccgcctgccttggcctcccaaagtgctgggattacaggcgtgagccactgcgtccggccttatgtttggttttctagaccatgtagtagattttgagaagtttattgttattactcccaagttgctagtaatttttattttaactcattgtgatgacaagaacactggaaagagactaggagaggcaccttttcatgcttaactctgccagcaaatcagtgtgagaccctgggtgagtcactgcctgtcctcacccccagcttcctctccttcttctttttttttttttttttttttgagacggagtctcactctgtcacccagtctggagttcagtggcgcgatcttggctcactgcaacctccgcctcctgggttcacgccattctcctgcctcagcctcccgagtagctgggactacaggcacccgccaccatgcccggctaatttttggtatttttagaagagatggggtttcaccgtgttagccaggatgattttgatctcctgacctcatgatccgcccaccttggcctcccaaagtgctgggattacaggcgtgagccacc

SEQ ID NO: 38235 - DNA, 1520 bp, Homo sapiens
tgcatagactaatctgtaggatagatttaggcaaatttgattaagcttttactgattttataatattctgaattttaccaaccctttcaggtgccattactttgaatggcaaaaaccgcagttacttttgcaccaacctaatacctgaaggatccaattctgatgatcagagaagcaaagctgtactttcctaagaaggacccctgaggaaggtctgttccttcttgggtatgccacctgatatacatccgcaaaaatatttgtaaaatgtaaccatagtgccatgtcattttatcaaaaatgaaaatgtgtccaagatttccatcatctaaatatcagccaccaactggtgttctgcagcgtcaaagctgcagggcatgctggggaaggctaaggagatactaamctagcttcaattatttgaacaccttaaatacagtaaagagcctctaattatttttcctgttattctttttttattattattattattatactttaagttttagggtacatgtgcacaatgtgcaggttagttacatatgtatacatgtgccatgctggtgcgctgcacccactaactcgtcatctagcattaagtatatctcccaatgaagagcctctaatttataaacataattttaatagatcagcaggaccatattgtcctatgtaatggaactcacaggaatattctggttttatgtttggttttctttttttttttttttttttttgagacagagtccagtcgccatgctggagtgcagtggcatgatctcggctcactgcaacctctgcctcccgtgttcaagcaattctcctgcctcagcctcttgagtagctgggactacaggcacgcaccaccacacccagctaatttctgtggttttagtagagacagagtgtcaccatgttggccaggattgtcttgatctcttgacctcctgatccgcctgccttggcctcccaaagtgctgggattacaggcgtgagccactgcgtccggccttatgtttggttttctagaccatgtagtagattttgagaagtttattgttattactcccaagttgctagtaatttttattttaactcattgtgatgacaagaacactggaaagagactaggagaggcaccttttcatgcttaactctgccagcaaatcagtgtgagaccctgggtgagtcactgcctgtcctcacccccagcttcctctccttcttctttttttttttttttttttttgagacggagtctcactctgtcacccagtctggagttcagtggcgcgatcttggctcactgcaacctccgcctcctgggttcacgccattctcctgcctcagcctcccgagtagctgggactacaggcacccgccaccatgcccggctaatttttggtatttttagaagagatggggtttcaccgtgttagccaggatgattttgatctcctgacctcatgatccgcccaccttggcctcccaaagtgctgggattacaggcgtgagccacc

SEQ ID NO: 38236 - DNA, 585 bp, Homo sapiens
gttacagacatagtttatttttgtttttttaaaaaaggctttagaaagtttcactaagcagattgtgtgtggacaatgacaatccagtaaagtcttagatttttgaactgcctctcccagcaaatcctgaatcaggcaggggtgtgctgacttcccagaagggtctttgacccartccttgccatacacttggcttctcctgtctgctttagggcacagttgattgctgcttccctgcacacttctttaatgccttctccagcagtctctgtagtattagtatactttgtaaacatactatgtcccttagtgtaattttaagctccttttctttcacctcctggagaacagatggtcatctttagcacactctttccaataccatttttattgtctttcacttttttttgaaacatggtagaatatttacttgtgtgagaaaaatatctgtctttcagtattcctagagatgggtctaagaacttgcataggataattatttcttcaaaccaaaatatggatatttatttttagattagccccatttctatgaggcccgctgtcaatgtacctaagcatgaaata

SEQ ID NO: 38237 - DNA, 1821 bp, Homo sapiens
  misc_feature (1)...(1821): n = A,T,C or G
gaaaatagagacagatgcacactgaggtctagagcaaagaggaagcataaatatatagcattaagaaagtcctctggcaaacaagctcacattctaacataagataatgctagaataatttaaaatctgtgctgccccaagggtaaagagaacaacaaatatcaaatacaagccacttcttgaaaaaattaactcaaactactgcaataaagagctattagaagtaagggtgtactaatttttggcattaaatggatttaccttgttccgtactttcctacacaggatatccagctttcaataaaaaattccaaggtatatgagaaggtaagaaagaacaacattgtgctaagtgacaaaacaatcacaaatcagacttaaatatgacataaattctgaaattgacccgattgtcctatagattgactgttttttaaatrtaaacatagaaattgacccttttgatcttaaaaagcttgaaatttatatttgtttcatctaagtttcttcctcaggaaatgacctttaggcctctcacaaaaaatatcaaagaactgaaaccagctcgccacaccaggtgtcaccaaatataggaccactcattcaccatgattccttctgtgcctctcccaagttcctgttttcttacacattgttacatttcttgcctgctatataaacccttggttttagtcagtcagggatatggatttgagacggagctcccatctcctcagctggcagcgccctattaaagccttcttccttggcaatacttggcacctcagtgattggctctctgtgcagcaagcagcaggactgagtccggaatccctggtgttttagtaacaatactgtaagtatatggtaaggaatttaagataacggtgttattttaaatctaacattaaatataacgttaaaaactctaatgaaaaaagtggacaataagcaagattagataggtaattttatcagagagatagtaactttaagaaaaggatcaaatggaaatgctagacatgaaacataataaaagagatgaaacactttcagaggctcattagtaaacaatacaactgagaagacagtcatctagaagataaaacaacaaacatttacctaatcaagatgggtaggggatgggaagaaagagtgagagagaaatacatataaaaataatttttaaagttcaaaacatcagtgcattccagagctgtgagataatatcaaaccaaatgtttattaccaggaaaattttgatgttcgaaattgtgagatattcattcaaggaatatgatatggtataaaatgaacaaataatcaacttattcaacaagctggatggatctcaaatttgatacaaaatgatatacgaccttacacatgttagaacggctattaacaaaaagatnngaggtaacaaatattgacaagaatgtgcttaaaggggaaccttgttgcactgttggtgtgaatgtaaattattacagtcatttttaaaaacagtatggagggccctcaaaaaattttaactaaaaccaccataagacccagtaatctcacttacggatatacatccaatttttatgaaatcaatgtgtcaaagagaaatctttattcccacatatattgccccattattcacagccgcaaaaatatggaatcaacctttgcccatcaacaaataaaagaatgataaaatgtggtatgtatacacaatgaaatactatatagccccaaaaagaaaattctgtcatctgcaacaacatagatgaacctggaggacattattctaagtaaaataagggcagcacaata

SEQ ID NO: 38238 - DNA, 1821 bp, Homo sapiens
  misc_feature (1)...(1821): n = A,T,C or G
gaaaatagagacagatgcacactgaggtctagagcaaagaggaagcataaatatatagcattaagaaagtcctctggcaaacaagctcacattctaacataagataatgctagaataatttaaaatctgtgctgccccaagggtaaagagaacaacaaatatcaaatacaagccacttcttgaaaaaattaactcaaactactgcaataaagagctattagaagtaagggtgtactaatttttggcattaaatggatttaccttgttccgtactttcctacacaggatatccagctttcaataaaaaattccaaggtatatgagaaggtaagaaagaacaacattgtgctaagtgacaaaacaatcacaaatcagacttaaatatgacataaattctgaaattgacccgattgtcctatagattgactgttttttaaatataaacatagaaattgacccttttgatcttaaaaagcttgaaatttatatttgtttcatctaagtttcttcctcaggaaatgacctttaggcctctcacaaaaaatatcaaagaactgaaaccagctcgccacaccaggtgtcaccaaatataggaccactcattcaccatgattccttctgtgcctctcccaagttcctgttttcttacacattgttacatttcttgcctgctatataaacccttggttttagtcagtcagggatatggatttgagacggagctcccatctcctcagctggcagcgccctattaaagccttcttccttggcaatacttggcacctcagtgattggctctctgtgcagcaagcagcaggactgagtccggaatccctggtgttttagtaacaatactgtaagtatatggtaaggaatttaagataacggtgttattttaaatctaacattaaatataacgttaaaaactctaatgaaaaaagtggacaataagcaagattagataggtaattttatcagagagatagtaactttaagaaaaggatcaaatggaaatgctagacatgaaacataataaaagagatgaaacactttcagaggctcattagtaaacaatacaactgagaagacagtcatctagaagataaaacaacaaacatttacctaatcaagatgggtaggggatgggaagaaagagtgagagagaaatacatataaaaataatttttaaagttcaaaacatcagtgcattccagagctgtgagataatatcaaaccaaatgtttattaccaggraaattttgatgttcgaaattgtgagatattcattcaaggaatatgatatggtataaaatgaacaaataatcaacttattcaacaagctggatggatctcaaatttgatacaaaatgatatacgaccttacacatgttagaacggctattaacaaaaagatnngaggtaacaaatattgacaagaatgtgcttaaaggggaaccttgttgcactgttggtgtgaatgtaaattattacagtcatttttaaaaacagtatggagggccctcaaaaaattttaactaaaaccaccataagacccagtaatctcacttacggatatacatccaatttttatgaaatcaatgtgtcaaagagaaatctttattcccacatatattgccccattattcacagccgcaaaaatatggaatcaacctttgcccatcaacaaataaaagaatgataaaatgtggtatgtatacacaatgaaatactatatagccccaaaaagaaaattctgtcatctgcaacaacatagatgaacctggaggacattattctaagtaaaataagggcagcacaata

SEQ ID NO: 38239 - DNA, 1821 bp, Homo sapiens
  misc_feature (1)...(1821): n = A,T,C or G
gaaaatagagacagatgcacactgaggtctagagcaaagaggaagcataaatatatagcattaagaaagtcctctggcaaacaagctcacattctaacataagataatgctagaataatttaaaatctgtgctgccccaagggtaaagagaacaacaaatatcaaatacaagccacttcttgaaaaaattaactcaaactactgcaataaagagctattagaagtaagggtgtactaatttttggcattaaatggatttaccttgttccgtactttcctacacaggatatccagctttcaataaaaaattccaaggtatatgagaaggtaagaaagaacaacattgtgctaagtgacaaaacaatcacaaatcagacttaaatatgacataaattctgaaattgacccgattgtcctatagattgactgttttttaaatataaacatagaaattgacccttttgatcttaaaaagcttgaaatttatatttgtttcatctaagtttcttcctcaggaaatgacctttaggcctctcacaaaaaatatcaaagaactgaaaccagctcgccacaccaggtgtcaccaaatataggaccactcattcaccatgattccttctgtgcctctcccaagttcctgttttcttacacattgttacatttcttgcctgctatataaacccttggttttagtcagtcagggatatggatttgagacggagctcccatctcctcagctggcagcgccctattaaagccttcttccttggcaatacttggcacctcagtgattggctctctgtgcagcaagcagcaggactgagtccggaatccctggtgttttagtaacaatactgtaagtatatggtaaggaatttaagataacggtgttattttaaatctaacattaaatataacgttaaaaactctaatgaaaaaagtggacaataagcaagattagataggtaattttatcagagagatagtaactttaagaaaaggatcaaatggaaatgctagacatgaaacataataaaagagatgaaacactttcagaggctcattagtaaacaatacaactgagaagacagtcatctagaagataaaacaacaaacatttacctaatcaagatgggtaggggatgggaagaaagagtgagagagaaatacatataaaaataatttttaaagttcaaaacatcagtgcattccagagctgtgagataatatcaaaccaaatgtttattaccaggaaaattttgatgttcgaaattgtgagatattcattcaaggaatatgatatggtataaaatgaacaaataatcaacwtattcaacaagctggatggatctcaaatttgatacaaaatgatatacgaccttacacatgttagaacggctattaacaaaaagatnngaggtaacaaatattgacaagaatgtgcttaaaggggaaccttgttgcactgttggtgtgaatgtaaattattacagtcatttttaaaaacagtatggagggccctcaaaaaattttaactaaaaccaccataagacccagtaatctcacttacggatatacatccaatttttatgaaatcaatgtgtcaaagagaaatctttattcccacatatattgccccattattcacagccgcaaaaatatggaatcaacctttgcccatcaacaaataaaagaatgataaaatgtggtatgtatacacaatgaaatactatatagccccaaaaagaaaattctgtcatctgcaacaacatagatgaacctggaggacattattctaagtaaaataagggcagcacaata

SEQ ID NO: 38240 - DNA, 856 bp, Homo sapiens
gaaaaaaagaaattggcatgtacaactttcagaatttgcaatttgggaggtacgagattaactaaaaatgtcaaaattagcaagtcaaagtcagatcttaaatatatgtaggtactattttgtatgcttatttacatttttatttctaaaggggcagtatacttcactaaaaactttccaaacataaataccaaacattaagaagtagaaatgctttcatttcactgaaaaatttctcatgtagatacgttttattttctgtaactgcaggtataattttaaatgataatataagtcctctaatgcttgccagaaaaaaaattttaataggacttctatatttatattaaaggattgtacaaatggtaataaagacttaaaatttgataaatgaatggttttgacatagaatgtcacacaagaagattaaataatattattgcttttttcattgaataaatggttgtaaaaaagtatttgtactcaagtgttttctacccaataaactataatatctcctggaaaaatattcagtgccttgccactattaaacatcaatcaatttcttttaatatggctggtatattggaacatattagtagacaggcaaataattgttgctttcataaagactgtattctgttgggasacacttgaatctaattatgcacaaatcataataaatgcatgattaccaactgagatttttgactattaaagaaaccattcatgtaaatgaaaataaataaatcttaattaggatagggattggggtagggctttagcggctattctgtagaaataactgtttattttagatttgaaaggtaagtaattttaaagaggctcgagaaga

SEQ ID NO: 38241 - DNA, 752 bp, Homo sapiens
atttagagaaatttacggccaggcgctgtggctcacgcctgtaatcccagcactttgggaggccgaggcgggcggatcaggaggtcaggagatcgagaccttcctggctaacacggtgaaaacctgtctctactaaaaatacaaaaaattagctgggcgtggtggcaggcgcctgtagtcccagctatgcgggaggctgaggcaggagaatggcatgaacccgggaggcagagcttgcagtgagccaagatcgtgtcactgcactccagcctgataacagagcaagactacatctcaaaataaataaataaataaataaataaataaataaataaataaatttacttatgtactgtagttgttcaagatgaaggttacacacagagaactgggtatgttatttatgagcatatttgcattcatgtagcatcttaaatgtagttggcaaccctcttctagcacaatggacacctgctggactaacaatatgtttatacaaggaaagtgaaaaatatctacgtttgcacactggctgatgaaatgaaaatagtttaaaccagtgatttttgtgtatagctttcttttaacttttttatttgggctgagaaccatgtgtgcaatgrtatgatgtttataaacatttgaatgataaatttctctatgcacagagttacccaacagtgtaggtttacaagaagacactacattattgaaaacaaagtaattaaattttcgaggtcaaagttcaagga

SEQ ID NO: 38242 - DNA, 1174 bp, Homo sapiens
aagaataaaatctagtttcacacttaaaaaaaactctgatttagcatttgaaatctgtggcttataactttagtcttttcatgcaaatatttttagggaaatggtttcgaagagcaacactgcaccagcttgtctgctgtcaactgcacatcaccatacatcctcggggagaaggccgggccctacgcttcctggggtcccttgccagctacattccaatatgaattatgccaaagagagtcgtttccaggagatctggaaagcagaagaaaagcagccttcaatctccagcagcagccaggtgaacagtgacagatgcctatggaagattttgccaggggctttctaggtgagtgcctgcgagttacttacttaggtgttgcaggcaattaagataatcagctatagcttctgtgtatttcctgcgttttcagagttcttgaaacttgaagcatttttttccccgacctttgtttctatagcccatccaacagttatatcagcctctaattgtctgtattacagtcttttatgctcgaggttctttgagagacgaaaaaaaagtggcaatcacattcttctttttcctgtgatactcctctgccaatagcagacaaaagttttaaacagcttagggacacttgttggaggctgtttccatgttaaagaagagattacagaaagactgaaggctattctttgatcttatttagttcccttgtctcatccaattatttttattttcatttatacttcatgttcctgtcttcagatatycttctctgttccacatgactgtataacatcagtagaagttaccatgtctctagttctgaatgcttttaagttcatgtttatatacattatctcacttgattttcacggcaattttataactcaagtggattgacattatttttattttacaggtagggaatttgagacccagatatttaagtggtttattcaaggtcacatggaaaatcaaggaaagcgctagaactagaatccaaaatttttgaccactattccagagtgtctgatagtattacattagctctccaagtaagatagcaactgcctgcttataatacttttgatctgggcaaattacctacagtataagccccatgaactccaggtaattatctctttccctgtgggatagaatcca

SEQ ID NO: 38243 - DNA, 1174 bp, Homo sapiens
aagaataaaatctagtttcacacttaaaaaaaactctgatttagcatttgaaatctgtggcttataactttagtcttttcatgcaaatatttttagggaaatggtttcgaagagcaacactgcaccagcttgtctgctgtcaactgcacatcaccatacatcctcggggagaaggccgggccctacgcttcctggggtcccttgccagctacattccaatatgaattatgccaaagagagtcgtttccaggagatctggaaagcagaagaaaagcagccttcaatctccagcagcagccaggtgaacagtgacagatgcctatggaagattttgccaggggctttctaggtgagtgcctgcgagttacttacttaggtgttgcaggcaattaagataatcagctatagcttctgtgtatttcctgcgttttcagagttcttgaaacttgaagcatttttttccccgacctttgtttctatagcccatccaacagttatatcagcctctaattgtctgtattacagtcttttatgctcgaggttctttgagagacgaaaaaaaagtggcaatcacattcttctttttcctgtgatactcctctgccaatagcagacaaaagttttaaacagcttagggacacttgttggaggctgtttccatgttaaagaagagattacagaaagactgaaggctattctttgatcttatttagttcccttgtctcatccaattatttttattttcatttatacttcatgttcctgtcttcagatatccttctctgttccacatgactgtataacatcagtagaagttamcatgtctctagttctgaatgcttttaagttcatgtttatatacattatctcacttgattttcacggcaattttataactcaagtggattgacattatttttattttacaggtagggaatttgagacccagatatttaagtggtttattcaaggtcacatggaaaatcaaggaaagcgctagaactagaatccaaaatttttgaccactattccagagtgtctgatagtattacattagctctccaagtaagatagcaactgcctgcttataatacttttgatctgggcaaattacctacagtataagccccatgaactccaggtaattatctctttccctgtgggatagaatcca

SEQ ID NO: 38244 - DNA, 981 bp, Homo sapiens
  misc_feature (1)...(981): n = A,T,C or G
acaattcgctttcaaatcattaacattggaatcaacagtgggataagatacatacacacaaatatgtgataagatatatacacattgtggcctcaagycaagtcagtatttaatgttaatgtgcacatcagtgtgtcatgtggcattcaaaaaagtaaagagaaaaaaataattgttcaaacaaaagagccatattattatttggggatccaactagtacaatagtatataatataccatcaccagtggtgacagttttaatgaataatcataaatagtgttatatatagcttcccagagccaggaatttcatgggagtgtgtgtgtgtgtgtgtgtgtgtgttttatgattttctctttgcacttaggtcgccaacggaaaacaaggtatcatttaccagaaagaagttagttttctactaaatattggagaaaggacctaagatctcttgcaaacgtagagtttaaatggataaatgaannnnnnnnnnnnnnnnnnnnnnnnnnnnnnnnnnnnnnnnnnnnnnnnnnnnnnnnnnnnnnnnnnnnnnnnnnnnnnnnnnnnnnnnnnnnnnnnnnnnatttgaaaatcaaatttccagtaatccctcccccaactcccatcccaggttatgaatatttgtgtcactttaaagaagcaataaccagattaaagactaacttataacatgatatttttacccttctatcttttttatttggagcagttgaggatctaaaataatgttgacgtggctggaggtagtgagctgagtcgacttggcatagacagtttggagaagtgagctaggatgtgacatgtaaggccggtgagatccagtaacgaacctgggctctattttgaaagtaatatgaaatcattgaatgattgtggagtgtgggagatgaaatgccatgagctaattcgtcattttaaaagaccattaataaaactatttgttatgatattaatgatggata

SEQ ID NO: 38245 - DNA, 981 bp, Homo sapiens
  misc_feature (1)...(981): n = A,T,C or G
acaattcgctttcaaatcattaacattggaatcaacagtgggataagatacatacacacaaatatgtgataagatatatacacattgtggcctcaagtcaagtcagtatttaatgttaatgtgcacatcagtgtgtcatgtggcattcaaaaaagtaaagagaaaaaaataattgttcaaacaaaagagccatattattatttggggatccaactagtacaatagtatataatataccatcaccagtggtgacagttttaatgaataatcataaatagtgttatatatagcwtcccagagccaggaatttcatgggagtgtgtgtgtgtgtgtgtgtgtgtgttttatgattttctctttgcacttaggtcgccaacggaaaacaaggtatcatttaccagaaagaagttagttttctactaaatattggagaaaggacctaagatctcttgcaaacgtagagtttaaatggataaatgaannnnnnnnnnnnnnnnnnnnnnnnnnnnnnnnnnnnnnnnnnnnnnnnnnnnnnnnnnnnnnnnnnnnnnnnnnnnnnnnnnnnnnnnnnnnnnnnnnnnatttgaaaatcaaatttccagtaatccctcccccaactcccatcccaggttatgaatatttgtgtcactttaaagaagcaataaccagattaaagactaacttataacatgatatttttacccttctatcttttttatttggagcagttgaggatctaaaataatgttgacgtggctggaggtagtgagctgagtcgacttggcatagacagtttggagaagtgagctaggatgtgacatgtaaggccggtgagatccagtaacgaacctgggctctattttgaaagtaatatgaaatcattgaatgattgtggagtgtgggagatgaaatgccatgagctaattcgtcattttaaaagaccattaataaaactatttgttatgatattaatgatggata

SEQ ID NO: 38246 - DNA, 773 bp, Homo sapiens
tcctgcctcagcctcccaagtaactgggaatacaggcacacgccaccaaacccggcctgaatggcagcttttaagagagccatcaatacactagagcaaatatttataaatgcagcatggtttaattctactatactacaagatttctttttgcaagaagacataaaaaattttttcagggaaataaagtgaatcgaggaatggttgacagcgttgaatatatttagctacttagggtggaaaagaccatgataggggcatttagaacaaggcaaatcaacaagcaattaacaccagaaggaatactatgagttgtggggcccgagaataccaaccggaacacagtgtattcttaaagcaggggatgataaataagagagtcccacaaaaagtgatgctgatgtttgcagtgataattgtaacatgaattggagtcaggcaagatacctgtaacatggaaagagtctaaatcagttatattgaagagmtagtttgagtttgtttctttgctcttgcaagggtttaaaaaaattgtttttgtttcttttttaactggagaaaatgcagttgcggagaaatcatgcgtgattataaataggtattcaataaatgtacaaataacgtgtaagatcctcattatctacctttattgtgcattttgtataatgttagttaagaataacatatagcatgttgcatcaatgtttgagtctaaccaagtgacttttaagccataaatcagacatagcttattcaacacaatcttgatttaa

SEQ ID NO: 38247 - DNA, 585 bp, Homo sapiens
cctcccaagtatctgggattacaggcacgtgccaccacacctggataatttttgtatttttagtaaaaatggggttttgccatgttggccaggtgggtcttgaacacttggcctcaggtgatctgcctgccttggcctcccaagttactgggtttacagacatgagccattgtgccctgcccttgtaatttttgattgacttcctgccattatatataagagaacagtagatactgagataaataattattatggtaagaagttgatgtattattattgtcttccttttatttgtttctttttctcctttagttttctcttcacgtgtttggtctcctggatctttcaagtactacatcttttctttcattattttttctctttgtagtctttgttcttgggaagaggtctgtgtttgtgtgtgcacatgagcatgtgcagcttcctrtcttaacagacttgcaccctcttacaattaagatgttggaaaggttgatttgtaaattgggttttggcgggggtgataatatatcacagggactggtttaattccattttcgtatcagttttgaaactttttgacca

SEQ ID NO: 38248 - DNA, 524 bp, Homo sapiens
taaataaataaataaataaaatagggcagaaatgagaaaatcagagggcctgtctaggaagtgtaatatttcagtttcaagagttccagaaaaagcagaggaaacagagggaaggaaatcctcaaagaaaactcaagaagtttaaagaacattggtttccataggatctactaagttcctagaaaattggatgaaaatcggttcatgccaaggtaacctggcaaaaatttcagaacaaagagacaaaaagaagatgttacaagattacagagagaaaaacaagttttccaatcctgtgtacagaagaaaatatgctgatgtaaacygcacaagcatgcacacacagaatctggccattgatgttaaatctttgtaaacaaaagacacccattctgttactagacaaaaaacagtatgggcaagaattttttttttttttttttttttttttttggatgtaagtgaagttacagtgaattctattgttttatctgcccagaaactacacctcactcttctgggga

SEQ ID NO: 38249 - DNA, 1148 bp, Homo sapiens
caccttgtagattctagaaggtacaagaactgcagagaaggtgatattgatgtttatcagtaaagaggagatgaacttctcctgagagaccatactgaaaaaagaagtaatagaataagaaaggcccagagatgtgatcgactgagaaatgctgtgacccagcaagtcaaacatccagagcaagcagcaggaggggaggcaagaagtggtgaaagtttatctgggaagtttgaactttacttctgagtgatagtctttagagacagacactaacaacagagatatattggaaagatttttcccataactgtctttaaaatttacaactacatttttattctcaactacggttgagtagaaaatagatgagaggagatgattcaagaccttccttcttctgtaccatgtgatcctatttcccttcagatgtaatgaccatatgtctcatgtttttccaagaatctttgaatttcaaataatctatcttgggctgcccaaagtattctcagacttgtcagtctatgtgtcctgattttttttttttccagaaaaggtagtcactgggcctccaatcacacaagtattgcagtatcacataagtggttctttcatcatgtttttttcaggtctatctagggagtgagcagatctgcagtgtgatttagagagccaaagaacaccatgcttgccattctttgtatttaatgacaacgagaaattccggtaatgaaaggggtaagcaacagcacagcctgtaagcttgtatttttagcctgtgtacaagaggctcacaaccttaattttcacagcaacataaatattatgagtataattaaccatgaatatttgatgaagtttgagagcattatctrcacttgcttaatatcgctggatgtcattctaaattctggatgctttttaagtatggaaatattctctttgtgctgccaaatttctaaacaaatgcctggtggaaaattacaccttagccagaataataacccaagtaaataggtaataatgggtttgtattttgcatattagcttgacatacagcgttaaaatgtcccaggacattaaatactgagtttttataaagagaattgaaataggcctaatagccatgatttatccaagagactgatgca

SEQ ID NO: 38250 - DNA, 1148 bp, Homo sapiens
caccttgtagattctagaaggtacaagaactgcagagaaggtgatattgatgtttatcagtaaagaggagatgaacttctcctgagagaccatactgaaaaaagaagtaatagaataagaaaggcccagagatgtgatcgactgagaaatgctgtgacccagcaagtcaaacatccagagcaagcagcaggaggggaggcaagaagtggtgaaagtttatctgggaagtttgaactttacttctgagtgatagtctttagagacagacactaacaacagagatatattggaaagatttttcccataactgtctttaaaatttacaactacatttttattctcaactacggttgagtagaaaatagatgagaggagatgattcaagaccttccttcttctgtaccatgtgatcctatttcccttcagatgtaatgaccatatgtctcatgtttttccaagaatctttgaatttcaaataatctatcttgggctgcccaaagtattctcagacttgtcagtctatgtgtcctgattttttttttttccagaaaaggtagtcactgggcctccaatcacacaagtattgcagtatcacataagtggttctttcatcatgtttttttcaggtctatctagggagtgagcagatctgcagtgtgatttagagagccaaagaacaccatgcttgccattctttgtatttaatgacaacgagaaattccggtaatgaaaggggtaagcaacagcacagcctgtaagcttgtatttttagcctgtgtacaagaggctcacaaccttaattttcacagcaacataaatattatgagtataattaaccatgaatatttgatgaagtttgagagcattatctgcacttgcttaatatcgctggatgtcattctaaattctggatgctttttaagtatggaaatattctctttgtgctgccaaatttctaaacaaatgcctggtggaaaattacaccttagccagaataataacccaagtaaataggtaataatgggtttgtattttgcatattagcttgacatacrgcgttaaaatgtcccaggacattaaatactgagtttttataaagagaattgaaataggcctaatagccatgatttatccaagagactgatgca

SEQ ID NO: 38251 - DNA, 1148 bp, Homo sapiens
caccttgtagattctagaaggtacaagaactgcagagaaggtgatattgatgtttatcagtaaagaggagatgaacttctcctgagagaccatactgaaaaaagaagtaatagaataagaaaggcccagagatgtgatcgactgagaaatgctgtgacccagcaagtcaaacatccagagcaagcagcaggaggggaggcaagaagtggtgaaagtttatctgggaagtttgaactttacttctgagtgatagtctttagagacagacactaacaacagagatatattggaaagatttttcccataactgtctttaaaatttacaactacatttttattctcaactacggttgagtagaaaatagatgagaggagatgattcaagaccttccttcttctgtaccatgtgatcctatttcccttcagatgtaatgaccatatgtctcatgtttttccaagaatctttgaatttcaaataatctatcttgggctgcccaaagtattctcagacttgtcagtctatgtgtcctgattttttttttttccagaaaaggtagtcactgggcctccaatcacacaagtattgcagtatcacataagtggttctttcatcatgtttttttcaggtctatctagggagtgagcagatctgcagtgtgatttagagagccaaagaacaccatgcttgccattctttgtatttaatgacaacgagaaattccggtaatgaaaggggtaagcaacagcacagcctgtaagcttgtatttttagcctgtgtacaagaggctcacaaccttaattttcacagcaacataaatattatgagtataattaaccatgaatatttgatgaagtttgagagcattatctgcacttgcttaatatcgctggatgtcattctaaattctggatgctttttaagtatggaaatattctctttgtgctgccaaatttctaaacaaatgcctggtggaaaattacaccttagccagaataataacccaagtaaataggtaataatgggtttgtattttgcatattagcttgacatacagcgttaaaatgtcccaggacattaaatactgagtttttataaagagaattgaaataggcmtaatagccatgatttatccaagagactgatgca

SEQ ID NO: 38252 - DNA, 1148 bp, Homo sapiens
caccttgtagattctagaaggtacaagaactgcagagaaggtgatattgatgtttatcagtaaagaggagatgaacttctcctgagagaccatactgaaaaaagaagtaatagaataagaaaggcccagagatgtgatcgactgagaaatgctgtgacccagcaagtcaaacatccagagcaagcagcaggaggggaggcaagaagtggtgaaagtttatctgggaagtttgaactttacttctgagtgatagtctttagagacagacactaacaacagagatatattggaaagatttttcccataactgtctttaaaatttacaactacatttttattctcaactacggttgagtagaaaatagatgagaggagatgattcaagaccttccttcttctgtaccatgtgatcctatttcccttcagatgtaatgaccatatgtctcatgtttttccaagaatctttgaatttcaaataatctatcttgggctgcccaaagtattctcagacttgtcagtctatgtgtcctgattttttttttttccagaaaaggtagtcactgggcctccaatcacacaagtattgcagtatcacataagtggttctttcatcatgtttttttcaggtctatctagggagtgagcagatctgcagtgtgatttagagagccaaagaacaccatgcttgccattctttgtatttaatgacaacgagaaattccggtaatgaaaggggtaagcaacagcacagcctgtaagcttgtatttttagcctgtgtacaagaggctcacaaccttaattttcacagcaacataaatattatgagtataattaaccatgaatatttgatgaagtttgagagcattatctgcacttgcttaatatcgctggatgtcattctaaattctggatgctttttaagtatggaaatattctctttgtgctgccaaatttctaaacaaatgcctggtggaaaattacaccttagccagaataataacccaagtaaataggtaataatgggtttgtattttgcatattagcttgacatacagcgttaaaatgtcccaggacattaaatactgagtttttataaagagaattgaaataggcctaatarccatgatttatccaagagactgatgca

SEQ ID NO: 38253 - DNA, 1908 bp, Homo sapiens
tgctgaaatggcttagaaacaatgaccaatcaaatagcaatgagtgtgtccagcacacagattctgttctgaactgttttctcctagcaaaagaaagcaatattttctggagaaatagattattccagatttggaggaggaaatgcgcaaaatgagcctgaaacatgttcccatgacatacaacaacgaatgcatcaaaaacgttgagttgtgcctgaaaaactcagaagaaaacctgaagaggtttgcagtagtcaaagatatggcaatttgagctttcaaatggattttaactgcagtacatagaaacacatcaaatatgtttcacagaaatacatcgaattatgtttaatatacaagtagttcctgagtagtttaaaaatctacttattctctttgcatgatctcttttgtagctcatggaatctgtgttgtaggagggggagatattatacttgttatttgaggctacaaaaagatgtctagggaacaggcctgaagttcttctgtgaattttagtctttctagatagctcgattggggaaaaataaataaattaacttaggggagcagtgaagctctacaagaacacatatatctctggatgagaaagaaaagggatgtggagctgcagatatgtccttggataatgacagggccactgggcacggaggctcatgcctgtaatctcagcactttgggagggtgaggcaggcagattgcctgaactcaggagtttgagaccagtctggccaacatggtgaaaccccacctctactagaaacacaaaaaattagccaggcgtggcggtgcaggcctgtagtctcagctactcaagaggctgaggcacgagaactgcttgaacccaggaggtggaggttgcagtgagctgagatcatgccactgcgttccaccctgggcaacagagtggtaatgggctctgaacttatggatgagacctgaaggggaattgaacttactcctctttttggagcatctttaaaactggattttgaaattttgaaaataatgcctctaacactatcccgagtggccatggttctgtgctgtggaaggactcttgtcctggggacagaaacgtggtcagaatccaaaggaaaggctgccgccccctcaacacacacacaccccattttacttcctatgtattttcctctaccttctgtttttgcttcacttcatttcgatccccacactgtttatcccccattcttagacagcttcatgaagaacctctggacatatactgarggcttaaccttgaatatggataaaatcaagatgatcaacaaacatgatctttggtgccataatgctttctatatcagttcctcttctgtgcacattttaatgcagtttatatctctatttctatatcagttcctctttaattcaaattttaatatagtttatatctctatgagcatttcttaatgcataaataattcagatttctaaaataccaaaataatggcatgaaatcaacaaaaaggccaatattgtacgcctaaaattagcagagaacagaaaatattgaaaacttgtgtaacaagcagaagtaagtgatgaaaacattaaatttgagaattatctgctttggtgcaagggatctaccaaattagagaaatgtttagagaagatagaagttgtctgaggaaataaccgcttaccattatttgttgtatggccttggaaaaaatattccttgaagctccggaagaatttggaggatatactgacacagaaattaaattaaatgaaaatcataagatgaaaatgaaagtcaacagtgttatgcattcagaaaattcagggagaaggaccggaaagagaactctagattgagtcaattaaagatgacaagtgagagatgaataagggatttta

SEQ ID NO: 38254 - DNA, 813 bp, Homo sapiens
gggcagttaagaccaaagtagaaaggataggggcttgctgcagctggcagagctctgtgagactgagagaaggtgagaacctgaggtttctcccacaggaaggatggaaaggagtagagcatgtccatgtctatgatcttacaatgcactgtttagaggcctgtttctaccttgcctcacatgaagcattgacagaactagcatacatcaaacacctaggggtagttaagaacaaagaagaggaggtagacagcttacggtggcaagcacagctctgtgagactgatgaaacgcacagaatccaagacgtcttcccccagagaggagggaggagcggaacatgtctttaacatctctggcctttccacgcactgcccaaaaagctggcctctgtctcatctaatccagtgtgccaacagaattctcatagtttggtgggggcaactaagaacaaagggaaaagggcaagtgaactgtagtactcaccacagcttaacaaaattggaagaagacacagactcaaggcttctccataargaataagggagagaaatgggattatgccacatcccagcctgtggttcaaacaccagaagtcagacaccagaagaagcaagagattatgagctcttggaaaagaaataaaaagaaaaaagaaaaggaagaaaccagtaaatcccctctaatttggaatctacatgcacatgtcaaaggagacatattcataacaaataattaaaagactttcagaatctctagctgtgttgactgtgaaggtctttccctgatgaaaccagacagaacaagaaatac

SEQ ID NO: 38255 - DNA, 509 bp, Homo sapiens
aagacctttttgccactaacatacaaagactctgtgtggagtggaggtgtttcatccataggatcatagggttgattgttttttagatggtgaagtggaaatctagagagctggagtgacttgctccttcaggactgccatgtttagtggcaaggtgtcttgatacttagtgtagtacttgcttctacttttttattccagtggaagagatgcccacttatgtgaactacctgggactgattttcttcyctctcttttatattttcatggaataagggttctgctaccccaagatacaattaacactcagagaggcttcaacttatacaagttcactcagatagtcagtagcagagttgagatttcaacctaggtttacctgatttcaaactccatggactttcaactacacatattaactctaagaataaccgtggtcctggtgacctgcctgcaagcgtctcagggtgggatggcagtcatggtgatgtacaggcactgcccacttg

SEQ ID NO: 38256 - DNA, 563 bp, Homo sapiens
tattatataatatataatgatatatatcatatatattagatatgatatatatattatataatatataatgatatatatattatatgtaatgatgtaacatatatcataacatgtatcagatataaattatatattatcatatatactcattgccagtttttctggcaaggtgttatttcattgtttttctgaatgaaattgtttattttcccttagcttttcaacttaattttattggatataaaattctaggtcaacaatttttttcctttttaaccagttttatcatggtataattaacaaacacaagtggtatatatttaatgtgcattatgatgttctgatattgatacattatgaaatgcttgcataaatcaagctaattcatataattracatatcaattaccctacatagttattgtgtgtgtgtgtgtgtgtgtgtggtgagaacatttaagatctactctgttagcaaatttcaagtatacaatccagtattattctgatcctgaataggtggaattaagatcaatgagtatatatatatatatacatatatat

SEQ ID NO: 38257 - DNA, 277 bp, Homo sapiens
cacacacacacacacacacayacacacacacacaaaatgtatatgttgatttataatttatataactgaattaataccataatatagatagaggaaaaggaaaatacaaaacaattacttgttttgggcagaaaatttacattaattttataaccaggtaaagtaaacaaaataatatttttgaaaacgcaggataagcctgtttgtgaagcaaaccaaaaaaataacatgttagaaatgtgttccattacttggaaaatatgctgttttgtgaaaa

SEQ ID NO: 38258 - DNA, 277 bp, Homo sapiens
cacacacacacacacacacacacacacacacacaaaatgtatatgttgatttataatttatataactgaattaataccataatatagatagaggaaaaggaaaatacaaaacaattacttgttttgggcagaaaatttacattaattttataaccaggtaaagtaaacaaaataatatttttgaaaacgcaggataagcctgtttgtgaagcaaaccaaaaaaataacatgttagaaatgtgttccattmcttggaaaatatgctgttttgtgaaaa

SEQ ID NO: 38259 - DNA, 750 bp, Homo sapiens
gggtgggttggtcgtcatgtgtccagtgatgctttcaggaggggcctccaagccctggccctgtccaggtgggtgccctcctaagggctggagggctgagtctggcttgaggtggccgtgcctggggcccctgacattcagtccacccatgtggggacactgggctggcaggtctgacacagagctgcagagcatgctcggtcagtcccaggatagacaggtgacatggggtcggggtcagggtttggggttgagggctcttgactcgatatgggctgggctgggccagggcggggtgtgagggaagccttgtgaagtgagcccagcagcagcagcaggtgagccagcagccagctggggggagggggcacccagtggggtggagccgggttcctggagcagttgaggttggggatgcgtcctcagtgctgggtactggtgcaaggcctcgtgtaaagatggagggtggtgttcatcagctcagaggcccccaggggtggcctatggggatgggttagctggggtctgtcctgcaaaggaggatgtccagatttggtgaggtgagaggggtagrgtgtcagagaaccaagagctgcttcccagtgccacacccaggcactgaggtggggagaccccagctggaacctggggacatatgcgtagactgcaggagtgctgggaagctgcagggggccacaggactgtagacatcccagcaggtcatggcagagggtagggggacctcaggcg

SEQ ID NO: 38260 - DNA, 686 bp, Homo sapiens
atacaacacacgcttacacacattgaccacgccagcacacacgcactcacaacactcacaacatacgcacacgtatgcacactgaccacgccagcacacacactctcacaacacacacacacactacaccctcaaaccaagccaggtcagtgcaggtcaccctgtccccagcacacacaacagcagggccataaagcayggcgttccatggccagatgcgagcccaagactgcctccaccggcatctgtcccaatctgtcccccagtgacacaaagcaagcagcttcctcatgacatgacatgaaccaatcaaagggctgccctgccccctcaccatgcccgcccctctccaccacccccagctcgagaatctgcactgagctgcctggaggccgggcgtctgcccacagggtgcagggcaggggccgccggctggcccaccacgtggcagtggctggctggcatggggctgggggagctggcttccagaagccccaagggctgtggccagacgcagctcactgtatttccttaactacacacatctatctcgatttagtggtttcaaacaactaagcagatcagaggcagggttaggagggaatatgtcagggacggaaggcggggccctcccagactggggcttggccgagagcggggagctgcagccggggaggtggcaggga

SEQ ID NO: 38261 - DNA, 571 bp, Homo sapiens
tttaattctttattatataataaagttaaaatatayatatatatatatatatatatatatatatatatatatatagtaatggccctcaaacttttgcaggcaccaggatgacctgaaggactttaagcagctcactgctgggccccacccttggagtttttgattcagttctagggtgggtccaaaaatctgcatttcaaacaaaagagcatcacatgatgccgatgctgctggtccacaaccatcctttgagagccagtgttttgactcactccctaacacaggctcttaacttgtggtccagaaattcctgacactatagatacataatttttttttttctgttcccagaaaaaaaaaagtcagtaacatctgacaggagggtgtgtgacccactgttataagtaaaatgtttgtttagagacagaacgcttgtacctctgtactgtaaggaaaaattagcatttggacaaaaagttttcttagcaagacaattttactttctgaagaaagggtgctcctcgcagatggaacaatggcgagagcagagcacacctgaacaaaggaggga

SEQ ID NO: 38262 - DNA, 641 bp, Homo sapiens
tgccaggtcgggtcggcagcggttctggtcggaacctgtgggtcagcgggctgtcctccacaacacgygctacggatctcaagaaccttttcagcaagtatgggaaggtatgccttcccttgcctcataccatccactgtgattcagagttaaaaaggaagctctgctgggcacggtggttcacgtctataatcccagcagtttgggaggctgaggcaggaggattgcttgagcccaggagttcaagaccagcctgggcaacatagcaagatgttgtgtttactaaaaaatggaacgacagcagcgaagctcgcccagtcttgtgcagtgcaccttgtttcctgactcacagtaactagggtgcggagcagggcaggtggttggtcatatcacaacagtgctcagaacagctgtataaacagcttctctctcaatgttcttggggttctttctaactggtctcaaagagactggtggtcttttgtcttgtgcaaaacttaaagcttacatgatgagatttttcccttaagaataatttgggaggccgaggcgggcgtatcacctaaagtcaggagttggagaccagcctggccaacatggcgaaaccctgtctctgctaaaaatacaaaaatcagccagcc

SEQ ID NO: 38263 - DNA, 1204 bp, Homo sapiens
ctctatctctgtctcatgtcccctcacaggcgwgatgatgcctattggccggaagccaagcgggccgccctggatgagcgctaccattctgactttaaccgccaggaccgcttccacgactttgaccacagggaccgcggccgctaccccgaccactcggtggacaggtcagttgggcccctgctgggcgtgcgggttttctttttcctggctcattctgactgagaacaaggactcctgggctctctgaacccactccgttcatcagatgtatgctgagtcagacccgcaggtctcctgccttcagttagggaaattatgcttttcattgggggcctgatggtcctctctttgtgaacaagcctcttcttcctcttacggtttgatttaaattgccttttcatgagagaaggtgcaaggtcaatgatgggagaacgagaaggacaggtaagtctgaagctacagtggcagccacagaattttccatagaatgggttcttttcccttcagcgtgccttcttcctgccctttctttgagcaagaggcaaaatgaggaaagagaaaagtaaagcactagaaagtctaggtttgtggaatggaaatttggaattatttggggttagtcttggctgtcagtccaaacagttactctgaagctgtttttagccttgaccctggggttctgtgtgccacactcaccacacatgtgcaacagtgccagggaaccttgggatgtgacctggctctgctgggaagtgtctagtgagccgcacagctgactcagacaggtgcatctggggaggctgtggttgctgtgtctgtcctcgagtgcctgccctcttttgaaagtaaggacatccttcatcaccccagggcccagcttagccttggaaaacaactagatctgtggtctgtgctcattctcttcgggggctagcacattagaacaataagctccattttctccttccatcttacattgagactgagacttcccaggagagccttggacctctagtggctttccctataaacttgggggcagcacattgctgtgtggaagatgcctcctctctgaggactccactcatgagcccttcctcctcctgccagcattttctggactccaccataagcttcccgcttctgtcccccttggttccttaatgtggctgagcatagccaagtactcagctctgtctcg

SEQ ID NO: 38264 - DNA, 1204 bp, Homo sapiens
ctctatctctgtctcatgtcccctcacaggcgagatgatgcctattggccggaagccaagcgggccgccctggatgagcgctaccattctgactttaaccgccaggaccgcttccacgactttgaccacagggaccgcggccgctaccccgaccactcggtggacaggtcagttgggcccctgctgggcgtgcgggttttctttttcctggctcattctgactgagaacaaggactcctgggctctctgaacccactccgttcatcagatgtatgctgagtcagacccgcaggtctcctgccttcagttagggaaattatgcttttcattgggggcctgatggtcctctctttgtgaacaagcctcttcttcctcttacggtttgatttaaattgccttttcatgagagaaggtgcaaggtcaatgatgggagaacgagaaggacaggtaagtctgaagctacagtggcagccacagaattttccatagaatgggttcttttcccttcagcgtgccttcttcctgccctttctttgagcaagaggcaaaatgaggaaagagaaaagtaaagcactagaaagtctaggtttgtggaatggaaatttggrattatttggggttagtcttggctgtcagtccaaacagttactctgaagctgtttttagccttgaccctggggttctgtgtgccacactcaccacacatgtgcaacagtgccagggaaccttgggatgtgacctggctctgctgggaagtgtctagtgagccgcacagctgactcagacaggtgcatctggggaggctgtggttgctgtgtctgtcctcgagtgcctgccctcttttgaaagtaaggacatccttcatcaccccagggcccagcttagccttggaaaacaactagatctgtggtctgtgctcattctcttcgggggctagcacattagaacaataagctccattttctccttccatcttacattgagactgagacttcccaggagagccttggacctctagtggctttccctataaacttgggggcagcacattgctgtgtggaagatgcctcctctctgaggactccactcatgagcccttcctcctcctgccagcattttctggactccaccataagcttcccgcttctgtcccccttggttccttaatgtggctgagcatagccaagtactcagctctgtctcg

SEQ ID NO: 38265 - DNA, 2043 bp, Homo sapiens
cttggtagcccaaccagataagagtcatgaattgattccacattagcatgcagcaggcatgggaaaatgataaactcctattaccactgtcatggcaactgaaaaaatggctgctttggggggaacaaggtccacaggagaagaaaagcgaagccccgtctctttcttctgtttgacatctgttgtttaacatacaaaattgtattatcgtgacgcaagcgagtcagccagggctaaagcctggctaggaattgtcaaaaccatactgccccaactcccattcccctctctctaccatgagagtatataatttgaccccggacatttccacgaagggcagtaaattcccctcccttttcatcccaggtacaaaaagcgtgaagtgccttgggaaggtggaatagagggaggagggtctttttggggggtagtggagaagggagacatgctatcaattatgaagcaaaaataaagctcttctccgtttgcagttgcttctctaaatgattcattcctccctcctcccttcccccaaccttccctcaagaacattttagatttttcttttatttatttatttatttatttttgagacagagtctcactctgtcacccaggctggagtgcaatggcccagtctcggctcagtgcaacctccgcctcccaggttcaagcgattctcctgcctcagcctccctagtatctgggattacaggcacatgactggctgatttttgtatttttagtagagatggggtttcaccatgttggccaggctggtctcaaactcctgaccttgtgatccgcccacctcagcctcccaaagtgctgggattacaggcgtgagtcatcgcagccagccctagatttttctaaaacagcaatttgagcggggcttgtgaacacagacaaaacatgagcagataggctacaagcagggatggcagccttaggcgcagggctgaaggttgaaaatcctgattgcaggtcattgagaaaaggctagaaggaaacacacctgagtgctaaccaggagttggacaagaggtggatttttatttccttcttaatatagcccttttcaaaatgtttaataaagtacctgtgtcagtcactctcatactcagcagaaatatccaataagctttyggaggtccaggaatgggtctcaaaggagctttcaaagggtctcaaagatctcaaagtttctctcaaaggaggattgaggtgtagatgctcacacaaaaattctgttcggcaaatttccatatgatccaaacatatcacttgaagcaaatcctttgcatataaatataaatatatacaaatttatttgtatattatatataatatttatatatcatgcattatatttatacattatatattatattatattatatttatatatttatattatatattatatattatatttatatatttataatatataatatataatatataatatattatattatatttatatattttatattatatattatatattatatattatatttatatattatatttatatattatatattatatttatatattatatatatttatatagtatatacatattatagatttatattatatataaatttatatatttcatgaaatttatataaatatataaatataaataaatatatatatttcatgaggacatttaaatgagtgactttcaaacacgcttcacttcccacctccccacagttgtgtaaccagaacaaacctagtaccattttgggttgttttcacaacacagcctttaaacagctgtgaaagattggggccatcctaaaatggactaaattgtaatttccagtaagagtgagattaagccccttgataggacaagatcagataagtgcaaacaaaagcaagaacatttatataatcaatctcggccattagcaaagttagcattttaaggtggtaaaacaaaaaaggaacctcttggccaaacccgcaccccatgtgcagtttggaacttcccagtttaaagactatcatctttaaata

SEQ ID NO: 38266 - DNA, 529 bp, Homo sapiens
tgcagcctctggaaaatcccactgtacttgtgattgactacaagtgaaaatgataaataaaggcttagtattattattatgaaagagtcttaatcttgtgaacttcctgaaaaagatgttcctgaatagtctgctgaccgcaattctagcattctctcctaaaagatatagagaagatggtagaagaagatgggaggagatggatctccaatccagtgtctccccgtattcatcatttgtgtaccaccttcacaatttctgccaaatctaaggagtcaatgttttacttaatacgcatataggtaaaacaatttaactcatgtcctttcctttatacaaatgtattttcacaggaaactttatatattactattatgaatggagaacttggtattcattattaaacrgcaggtaatggcacaaattaatttccagaaaagaaaaaaaattctaggccagatatggtggctcatgcctgtaatcccagcccttttctgggaggctgaggtgggaggaccgtgtgagccca

SEQ ID NO: 38267 - DNA, 601 bp, Homo sapiens
aaaatattcattaattcatttagtcattcaattgcttaattcaataaatatttatttatttttgagacagagtctcgctctgtygcccaggctggagtgcagtagcatgatcttggctcactgcaacctccgcctcccgggttcaagcaattctcctgcctcagcctcctgagaagctgggactacaggtgcaccactgcacctggctaatttttgtatttgtagtagagatggtgttgtgccatgttagccaggcgggtcttaacctcctgacctcaggtgatccacccacctcagcctcccaaagtgctgcgattacaggtgtgagccactgcgcccggccaataaatatttattgagtacctagtatgtgccaggcactgttctatgggctgagatatactggtaaataaaacaaagtcccctgtcctcttggggcttacatcctagcaggaagggaaaaacaataaataataaatataagtagttacattactgctgtggactaaatgtttgtgcccctccaaaatcatatgctgaaattctaacccccagtgtgatggaattaggaggtgggccctttgagaggtgattacatcat

SEQ ID NO: 38268 - DNA, 642 bp, Homo sapiens
ggaggctgaggcaggacaatcacttgaacccaggaggcaaaggttgcagtgagctaagattgggccactgcactccagcctgggtgatggagtaagactccaactcaaaaaaaaaaaaaaaaaatgaggcagaaagtttatgtaatgacatagaaagttatgtagaccagtgctagaaagtgctacccaatagaactttctgcaatgatggaatgttctatgctgtgctgtccaatacagtagccactagtcacatgtagtacttgaaaygtggcaagtgcaatggagaaactgagtgtgtaatgtaactaaagtaattatttattttatgttattcattaatttatttttagagacagggtcttgcaatcttgcccaggctggtcttgaacttctggcctcgagcaattctccttcctcagcctcccaagaagctgggatgttaggtgtgtgccactgcaccccgctatttatttgaatttaaattcccacatgtggcctatgatattgtactggacctcacatattttaaatgtgttttgaggacaggctagttgaaaaatgaagagtatgattcctctaaaagataataaataatatatgttaatttagaaatttttagaagtcagacagaaaatacac

SEQ ID NO: 38269 - DNA, 374 bp, Homo sapiens
ggaaacaaattcacattgcatgcgacatgcccaagggcagcgggctctggcttcaatcatgactatattacaggaatggaaatgacaaatgggtttgggagtggcagacatctaacgatgattacagagaacaggaaccgcagaattaggatgcacccacagtcacttttttttttttttttttttttttttcagagacaggatcttgttctgtcgcccagcgtggagtagcataatcatagctcactgcagccttgaactcctatgctcaagtgatcctcctgyctcagcatcccaaaatgctgggattacaagcgtgcaccactatgcctggctaatttattttatttcattttttgtagagattgagtctc

SEQ ID NO: 38270 - DNA, 632 bp, Homo sapiens
tttgtatttttagtagagatggggtttcaccatgttggccaggatggtctcaatttcttgacctcgtgatccacctgcctcggcctcccaaagtactgggattacaggcgtgagccactgttcctggcctgtgttaattttctttttcttggtcacatatttagcctacaacttaactgtatggtatggtgactgtatcaatcacatatcttcatatgtaaatgtcttacaaaacatcttttatgtaggtaattgtgtaagagtaagatgagggtaaatctgacattatgatagtactgatgtcataataaggaaaaaatttgatatttaaatcttccaatcagaattttttaatcttatattttcattttgaaaatattctaaaagtcagatgtaaggtattctagaacatatagaatacttcagtgagatttaaaagtgctcatttacatgtgcatttatgattatgttgtcacccagtgatccctaagtgacagtgcttgatttttaatgtattgrtaataaagtttgatatatcctaatgtcaaagtggcaattgacccatgactgttattgtggtcatgttaaattcttttaatagtttaaggacaaaacttttcttctgcaatgat

SEQ ID NO: 38271 - DNA, 471 bp, Homo sapiens
  misc_feature (1)...(471): n = A,T,C or G
tgcattcagccctgaaatccatattttacctcctctgggaggctttgtccaggagtcactttatccctttttataactttctccctaagtggcccccctcagcaccatttactcctttstcattgttctccttttcatcctaagttcagagttggcaagcctacctcagaacagctgaagttgtaacacaaacctctgtttcactgtgttagtatggctctattaatttcctatgctgctgtaacaaattatttaataatacaaacttagcggcttaacacaaacttacagttctggaggtcagagtccaaaatggggctaaaatcaaggagttggcagggctgcgttccttntggaggttntagaggannnnnnnnnnnnnnnnnnnnnnnnnnnnnnnnnnnnnnnnnnnnnnnnnnnnnnnnnnnnnnnnnnnnnnnnnnnnnnnnnnnnnnnnnnnnnnnnnnnntg

SEQ ID NO: 38272 - DNA, 532 bp, Homo sapiens
aaaaaaaacaaaacaaaacaaaacaaaaaaaaacaaaaaaaccccagctattcgcccactgggccagaaaatagctactattaagtatttggtacacatcttcttcgggtggactgagtgtgtctcccccaaatacatacgttgaaactctaacccccaatgggatgatatcaagaggtggtaattagacttggattaggtcatgagggtggggccctcatgatgggattagtgtccttagaagaagtgaaagagagtcaagttcactctcttggctgtgtgaggacacagtgagaagactgccatttgcaaaccaagaagcaggccctcaccagacactggatctgtttgttgacaccttgattttggatgttccagcctccagaacttgagaagtaaatgtttgttgtttaagccattagtttatgacactttcgttatagcaacccgagcagactgacactgtttcagattttcagattgtaattgttgcaaaaatggartgcttttaacaaaaatgaaatgttatgca

SEQ ID NO: 38273 - DNA, 996 bp, Homo sapiens
ggagagagctggggtttttttgtttttttttgttttgttttgttttgttttttttcttcatcttttcaaaacactttatacaatatatatgagtcaggctttacattaaaaaaaacagaaattactgtttaacaataattaaatgcactgtggaaacatctcacagggttaaacacccatctgtgggatgatcacaacattccagaaccaaatgcaatgacattaggatttctgccagtgacatgyattataacgtggtgccaaccagaatgttgcttcactgagtgtttcttaaggtcttaaataaatggtgctgaatatagatccatcacaccaggaataccccatcttgatgccataattacaagtgttattttaacatttacaaaaaatatataagtaaacaaaagttaagcaaagcaactacgaaggaggaggagaaggaagactttgcttttctaacctccaggcagcatcttatcaggcttagccccttctaggacctcctcctaaagtttgagaataatctcagaacctcagtaactccttatgtgacaaggattcagaattaaaatatgattccagaggagggagagtgcatacatcctttctttctggaatttgcatgcatagggttttgtttttcctccaccacaaatcctcattccaaatattataataacattcctcattattatatttggctttaatattgtaagtacatatgtaaaaatgcaactttagaaactgcattactatcctataagtgattatagcaaccctagacagtaggtgagaatgctcattcctacggaatatcagaggtagaagcctatgcaatctgtcctaatgcacatggcaagttaataggagagcccagctttgaggacacagctgctgactcagcagtctcctcacattccagtcctttgcataactggctgttcagataacccccatcaagacttgagttcttcaaggcatcagattattgac

SEQ ID NO: 38274 - DNA, 996 bp, Homo sapiens
ggagagagctggggtttttttgtttttttttgttttgttttgttttgttttttttcttcatcttttcaaaacactttatacaatatatatgagtcaggctttacattaaaaaaaacagaaattactgtttaacaataattaaatgcactgtggaaacatctcacagggttaaacacccatctgtgggatgatcacaacattccagaaccaaatgcaatgacattaggatttctgccagtgacatgcattataaygtggtgccaaccagaatgttgcttcactgagtgtttcttaaggtcttaaataaatggtgctgaatatagatccatcacaccaggaataccccatcttgatgccataattacaagtgttattttaacatttacaaaaaatatataagtaaacaaaagttaagcaaagcaactacgaaggaggaggagaaggaagactttgcttttctaacctccaggcagcatcttatcaggcttagccccttctaggacctcctcctaaagtttgagaataatctcagaacctcagtaactccttatgtgacaaggattcagaattaaaatatgattccagaggagggagagtgcatacatcctttctttctggaatttgcatgcatagggttttgtttttcctccaccacaaatcctcattccaaatattataataacattcctcattattatatttggctttaatattgtaagtacatatgtaaaaatgcaactttagaaactgcattactatcctataagtgattatagcaaccctagacagtaggtgagaatgctcattcctacggaatatcagaggtagaagcctatgcaatctgtcctaatgcacatggcaagttaataggagagcccagctttgaggacacagctgctgactcagcagtctcctcacattccagtcctttgcataactggctgttcagataacccccatcaagacttgagttcttcaaggcatcagattattgac

SEQ ID NO: 38275 - DNA, 996 bp, Homo sapiens
ggagagagctggggtttttttgtttttttttgttttgttttgttttgttttttttcttcatcttttcaaaacactttatacaatatatatgagtcaggctttacattaaaaaaaacagaaattactgtttaacaataattaaatgcactgtggaaacatctcacagggttaaacacccatctgtgggatgatcacaacattccagaaccaaatgcaatgacattaggatttctgccagtgacatgcattataacgtggtgccaaccagaatgttgcttcactgagtgtttcttaaggtcttaaataaatggtgctgaatatagatccatcacaccaggaataccccatcttgatgccataattacaagtgttattttaacatttacaaaaaatatataagtaaacaaaagttaagcaaagcaactaygaaggaggaggagaaggaagactttgcttttctaacctccaggcagcatcttatcaggcttagccccttctaggacctcctcctaaagtttgagaataatctcagaacctcagtaactccttatgtgacaaggattcagaattaaaatatgattccagaggagggagagtgcatacatcctttctttctggaatttgcatgcatagggttttgtttttcctccaccacaaatcctcattccaaatattataataacattcctcattattatatttggctttaatattgtaagtacatatgtaaaaatgcaactttagaaactgcattactatcctataagtgattatagcaaccctagacagtaggtgagaatgctcattcctacggaatatcagaggtagaagcctatgcaatctgtcctaatgcacatggcaagttaataggagagcccagctttgaggacacagctgctgactcagcagtctcctcacattccagtcctttgcataactggctgttcagataacccccatcaagacttgagttcttcaaggcatcagattattgac

SEQ ID NO: 38276 - DNA, 996 bp, Homo sapiens
ggagagagctggggtttttttgtttttttttgttttgttttgttttgttttttttcttcatcttttcaaaacactttatacaatatatatgagtcaggctttacattaaaaaaaacagaaattactgtttaacaataattaaatgcactgtggaaacatctcacagggttaaacacccatctgtgggatgatcacaacattccagaaccaaatgcaatgacattaggatttctgccagtgacatgcattataacgtggtgccaaccagaatgttgcttcactgagtgtttcttaaggtcttaaataaatggtgctgaatatagatccatcacaccaggaataccccatcttgatgccataattacaagtgttattttaacatttacaaaaaatatataagtaaacaaaagttaagcaaagcaactacgaaggaggaggagaaggaagactttgcttttctaacctccaggcagcatcttatcaggcttagccccttctaggacctcctcctaaagtttgagaataatctcagaacctcagtaactccttatgtgacaaggattcagaattaaaatatgattccagaggagggagagtgcatacatcctttctttctggaatttgcatgcatagggttttgtttttcctccaccacaaatcctcattcyaaatattataataacattcctcattattatatttggctttaatattgtaagtacatatgtaaaaatgcaactttagaaactgcattactatcctataagtgattatagcaaccctagacagtaggtgagaatgctcattcctacggaatatcagaggtagaagcctatgcaatctgtcctaatgcacatggcaagttaataggagagcccagctttgaggacacagctgctgactcagcagtctcctcacattccagtcctttgcataactggctgttcagataacccccatcaagacttgagttcttcaaggcatcagattattgac

SEQ ID NO: 38277 - DNA, 996 bp, Homo sapiens
ggagagagctggggtttttttgtttttttttgttttgttttgttttgttttttttcttcatcttttcaaaacactttatacaatatatatgagtcaggctttacattaaaaaaaacagaaattactgtttaacaataattaaatgcactgtggaaacatctcacagggttaaacacccatctgtgggatgatcacaacattccagaaccaaatgcaatgacattaggatttctgccagtgacatgcattataacgtggtgccaaccagaatgttgcttcactgagtgtttcttaaggtcttaaataaatggtgctgaatatagatccatcacaccaggaataccccatcttgatgccataattacaagtgttattttaacatttacaaaaaatatataagtaaacaaaagttaagcaaagcaactacgaaggaggaggagaaggaagactttgcttttctaacctccaggcagcatcttatcaggcttagccccttctaggacctcctcctaaagtttgagaataatctcagaacctcagtaactccttatgtgacaaggattcagaattaaaatatgattccagaggagggagagtgcatacatcctttctttctggaatttgcatgcatagggttttgtttttcctccaccacaaatcctcattccaaatattataataacattcctcattattatatttggctttaatattgtaagtacatatgtaaaaatgcaactttagaaactgcattactatcctataagtgattatagcaaccctagacagtaggtgagaatgctcattcctacggaatatcagaggtagaagcctatgcaatctgtccyaatgcacatggcaagttaataggagagcccagctttgaggacacagctgctgactcagcagtctcctcacattccagtcctttgcataactggctgttcagataacccccatcaagacttgagttcttcaaggcatcagattattgac

SEQ ID NO: 38278 - DNA, 1016 bp, Homo sapiens
atggtgggacaggcatagaatagacatttccatttcaaaagaaagaaaagaatagaaagaaagaaaagaagaaaggataggtccctagcaaagtccaaaattttgtctggagaataatcttctttggctcaatgctctgtcccccaggcccactagggctgtggtcctgctttcccaacccacgggcgtggtggccctccccaaaggttgctctgtgcccttgtggctccaagagctagaatcgtgtctatgactctacaggtctggggctgctggggtggtcctaccactcggctatcctggatgttgctctagtaagggctctctgtggaggtcccatgcttgcctgctcaagcttttgcacattggagctgtgatggaggtggcagccccaattacttctgaatcaccttgagcaacaggttccacttggttgactaatctccttatcagatggtcatttggccgcacccttggtgttctttcccaatgtgccttctcatttatttatttattcttttttaagagatggactctcactatgttactcagacaagtctcaaactcctgggtttaagggatcctcctgcctccacttctctaacagttaggactacaggcatgaaccactgtacccgttatctcattcttcataatatggctagggtgagaattttccaaatctttaagtgctgcttctctttgattaacaattctgtctttaaatcttttctctcttttcacattttaatgtaggctgtcaagagaagccaagccacaactttcacactttgcctagaaatttccttatccaaatatgtaatttcagtgttcaccgctctaccttctgcaaaacactagaatacaggcacaattcagccaagttctctgacgctttttaaraaaatttgttttcttttactttaagttctgggatatatgtgctgaacgtgcaggtttgttacacaggtatacatgtggtttactgcatctatcaacctgtcatctaagtttta

SEQ ID NO: 38279 - DNA, 1016 bp, Homo sapiens
atggtgggacaggcatagaatagacatttccatttcaaaagaaagaaaagaatagaaagaaagaaaagaagaaaggataggtccctagcaaagtccaaaattttgtctggagaataatcttctttggctcaatgctctgtcccccaggcccactagggctgtggtcctgctttcccaacccacgggcgtggtggccctccccaaaggttgctctgtgcccttgtggctccaagagctagaatcgtgtctatgactctacaggtctggggctgctggggtggtcctaccactcggctatcctggatgttgctctagtaagggctctctgtggaggtcccatgcttgcctgctcaagcttttgcacattggagctgtgatggaggtggcagccccaattacttctgaatcaccttgagcaacaggttccacttggttgactaatctccttatcagatggtcatttggccgcacccttggtgttctttcccaatgtgccttctcatttatttatttattcttttttaagagatggactctcactatgttactcagacaagtctcaaactcctgggtttaagggatcctcctgcctccacttctctaacagttaggactacaggcatgaaccactgtacccgttatctcattcttcataatatggctagggtgagaattttccaaatctttaagtgctgcttctctttgattaacaattctgtctttaaatcttttctctcttttcacattttaatgtaggctgtcaagagaagccaagccacaactttcacactttgcctagaaatttccttatccaaatatgtaatttcagtgttcaccgctctaccttctgcaaaacactagaatacaggcacaattcagccaagttctctgacgctttttaaaaaaatttgttttcttttactttaagttctgggatatatgtgctgaacgtgcargtttgttacacaggtatacatgtggtttactgcatctatcaacctgtcatctaagtttta

SEQ ID NO: 38280 - DNA, 585 bp, Homo sapiens
tcatgtgaattcccaagttttggacacaaggggaactatcaaagagagggccctactccttccatcagtttggttcaaataacttgccaaccacacctgattctgcttgggaccttggttatctgacaacataagcctatgatcagcctctgtatcattttatgactgctctggctcagttcccagcctctttctctataatcaggcacagctgccccatccttttcacagacaggaactgctgtaggtcatgaaagtttcacgtcccctcaagaaacatctttaagagcatgccctatgsgaaaggaatggaatgggatgtatcatccctggagatcttgatgacttaggcttcttccaccccaactcgtgtcctcccaaacaccatccctccctatcagctccctctgctgatagctagtccagtgagttttaacacccataggttatcatgaataaaacggggggtgtggagtcacattttaggacatcatgaaagagggtattatattaaattctgcaaaagtgatgtgtatgtggcagaacttataaaatctgtcattggggagtcttgggaagggagaa

SEQ ID NO: 38281 - DNA, 554 bp, Homo sapiens
gctgtgaccacactctggaagaagggaaacatctacatgcgttttctggagaattttgtctatatgttctgagcatattttgaatccccaacatcagaaatgctgtgtggcccatcagttgaagcaggggctttggaggtctggggacaggagctgccttggccrcaggttaagcttgtccagtggaaccatggcctcctcctgtggttactctccagttccagaatggataatgggaataggtagatttagcaactggtagaatctccacatttttttttctgatcccaaaaattttgcttattaagaaaggaaggcccaagtagaggtccctagaactacaccttcctgagaggaaactgaacgcagcacatcatccatggaggagaccgaggggtgagcagtgtcatcaaccccttgagaaatgcaagttggtaatgcccactgttccttattttccttgcctctctggctactggaaaagccaagtggtgactgggcatggtgcctcatgcctgtaatcacggcactttgggaggctgaggcaggcggat

SEQ ID NO: 38282 - DNA, 554 bp, Homo sapiens
gctgtgaccacactctggaagaagggaaacatctacatgcgttttctggagaattttgtctatatgttctgagcatattttgaatccccaacatcagaaatgctgtgtggcccatcagttgaagcaggggctttggaggtctggggacaggagctgccttggccgcaggttaagcttgtccagtggaacsatggcctcctcctgtggttactctccagttccagaatggataatgggaataggtagatttagcaactggtagaatctccacatttttttttctgatcccaaaaattttgcttattaagaaaggaaggcccaagtagaggtccctagaactacaccttcctgagaggaaactgaacgcagcacatcatccatggaggagaccgaggggtgagcagtgtcatcaaccccttgagaaatgcaagttggtaatgcccactgttccttattttccttgcctctctggctactggaaaagccaagtggtgactgggcatggtgcctcatgcctgtaatcacggcactttgggaggctgaggcaggcggat

SEQ ID NO: 38283 - DNA, 554 bp, Homo sapiens
gctgtgaccacactctggaagaagggaaacatctacatgcgttttctggagaattttgtctatatgttctgagcatattttgaatccccaacatcagaaatgctgtgtggcccatcagttgaagcaggggctttggaggtctggggacaggagctgccttggccgcaggttaagcttgtccagtggaaccatggcctcctcctgtggttactctccagttccagaatggataatgggaataggtagatttagcaactggtagaatctccacatttttttttctgatcccaaaaattttgcttattaagaaaggaaggcccaagtagaggtccctagaactacamcttcctgagaggaaactgaacgcagcacatcatccatggaggagaccgaggggtgagcagtgtcatcaaccccttgagaaatgcaagttggtaatgcccactgttccttattttccttgcctctctggctactggaaaagccaagtggtgactgggcatggtgcctcatgcctgtaatcacggcactttgggaggctgaggcaggcggat

SEQ ID NO: 38284 - DNA, 554 bp, Homo sapiens
gctgtgaccacactctggaagaagggaaacatctacatgcgttttctggagaattttgtctatatgttctgagcatattttgaatccccaacatcagaaatgctgtgtggcccatcagttgaagcaggggctttggaggtctggggacaggagctgccttggccgcaggttaagcttgtccagtggaaccatggcctcctcctgtggttactctccagttccagaatggataatgggaataggtagatttagcaactggtagaatctccacatttttttttctgatcccaaaaattttgcttattaagaaaggaaggcccaagtagaggtccctagaactacaccttcctgagaggaaactgaacgcagcacatcatccatggaggagaccgaggggtgagcagtgtcatcaaccccttgagaaatgcaagttggtaatgcccactgttccttattttccttgcctctctggctactggaaaagccaagtggtgactgggcatggtgcctcatgcctgtaatcayggcactttgggaggctgaggcaggcggat

SEQ ID NO: 38285 - DNA, 1085 bp, Homo sapiens
tttcttttcctttagatagatactctgcagtgggattgctgggttccatagtagttctatttttgtttttttgagaaatctccatgctggttttcatagaggttgtattaatttacattcctaccagcagtgtataagcatttgcttttctctgcatctttgccaacatctgttgttttttgacttaataatagcccttcttactggtataacagggtatctcgttgtggttttaatttgtatttctctgacaattagtgatgttgagcactttttcatgtttgttggctacttgtttgtcttcttttgagaaaagtctgttcatgtcaaactgagtctgatgttctgatttcacaaaatgaagaaatggatgtccagggagaaaaagtaactttacacattgccattaaatctttattagttggttgaaatattcacaagtatagaaaacaaggctccttgaggagcaaagaactgggtacaaaagagtagtagccatggtgaccagaaaccttggaatcatttttcacagttcagcttcccagtcctctacgtaagccccactaggcactatttttcttaccattatttaccagtggggaaacagagatgacttttctcagggttacttgtggattgttgttgtcgagagcaaattggagacttctaacatctggtccagcactttgccaccacttcacttttgttctggaaaagagccaaaattagctcattgtaaagaagtcaccaagctctgatttttgtgcaaataaactttatggtttgccattkaaaaaactattactccaagatcaactttcagaattcaacaaaacgaggacccctgtctctcaacacactatcatgccccacagatgactaaagaacacagtgggctcgtgctttacatgaggtaatgccacatggatcacaccctgtctgttagaaggaaacactagaggatgagagccgatcaggttgcaggctccagagacctcccattcttctctgtcgaaagccaaagaaatggcaaatttaacccaatttgaaaatgatttgagtcctcgctgacctggggaatttca

SEQ ID NO: 38286 - DNA, 585 bp, Homo sapiens
aaaataaaaataaacaaatgggattacattaaactgaaaaccatctgcaggctgggtatggtggctcatgcctataatcctagcattttgggaggtcaagactgcagtgagctgtgattataccattgcattccagcctgggtgacagagaggaaggaaggaaggaaggaagaaaggaaggaggaaagcttctgcacagcaaattaaactatcaacaaaatgaagagacaacctatggaatgggaaaaatatttgcaaaccatacatctggataagggattaatagccaaaatatattaggaactcatatgactctacagtaacaaaataaataatcccactaaaaatgggcaaagtatctgaataaacatatttcaaaagattatatacaaatggccatatgaatatgttttaaaatgctcaacatcactaatcatcagggaaacacaaattaaaaccactaygagatatcacctcatacctgttagaatgactattatcaaaaagaggaaagataacaagtattagaaaggatgtgggtaaaagggaactctgcacactgttgggaatgtaaattatacagcc

SEQ ID NO: 38287 - DNA, 543 bp, Homo sapiens
ggaacygcatgagctgttatgcccttctgcaacgcagaactttcccaaccatatatggtggccctgagatgtgtagttttgccctttacacctttattttctattagtacatttactttttaaaaaagtatgaactatcatttgcaatttgaaaaacatcaaatacagaacatttaaaaaatatatcgctagacctcaaaatgaatcttaatggcaatcacagatttcaaccctttcaaccagatttctgagtgtctgaacatagatgtaggctctgagactatgatttctagcttgtttttcctaaatattcactgtgtaattgggacactatcacttagcccctttgttccttattatatcatttataaattttataactatattttaataaaggtacttaatatctagataatagataaatggtttgtctataatccctaatttatatacaataagtctaccaacttttatggtagaacttcataagttttaaactagtataatatttaatttttagtatataaacatctgatgtggttt

SEQ ID NO: 38288 - DNA, 1147 bp, Homo sapiens
gtttaggactttccttagaagttagagaagatgttttaaaaaactaaaacaaaacaaaaactatacctgtatcaatctatctgccaaggaagcactttcctacaaaaggaaaaattcagatagaaatataagagaaagaaataaaagtgataaaattaggaaaaaagaaacaaatatacccaaattccatctacttttcattgctaattaaaatggacatttaaagtttaaaaccattttttactgaatgtttttatttttaaaccttaagaaaaatatataaaaacaaggataggtggttgaaaatcatgtgtttccagaagataccaaacacaaattccaagtgggttttcattacctggaacaagcaaatttttttgtttgtttgttttgtttttttaaaatagagacagggtctcactctgtcacccaggctagaatgcaatggcatsatcatgtagctcattgtaactgccaactcctcggctcaaggagttggtccttctgcttcagcctcctgagcagctaggactacaggtgtgtgccaccacatgtagctagttttaaaattttttgtagagatacagtcttgctatgttacccaggccaatcttgaactcctggccttacgcaatcctcttgtctcagcctcccgaagtgcggggatcataggcgtgagccactgcactcagtcaaatatttcctcttcctcttttggtatatttacatcttttagacttaatccatattgtcaacccacttacatgaaagggagaaggaatttgagtaagcaattccaattataaagtgtgacagcaatttgtgcaaccacaactttcaaagaaacaaagcaaggaaaatatgacaaataaaattaatgagctaaacttaaactttagcaataactgagaaagtatacttttttattacagaattcaattgatacatagtatttatagaattctaagtgctaagtgacacatctgggccatctaagccaataaaaaaaggaacttaattttctagaagcaaaatccaaacttaacactttcttacagcatcattctcattccgaaagttcaatgaaatattataatcctttcccagtttaaatgtcttactccaaagatttaaaaaaaaaaaaaaa

SEQ ID NO: 38289 - DNA, 428 bp, Homo sapiens
acatgtctttataattatcacttgccccatgaaatgttttgtgtatatgtctgggatttatatttwaaaagtatgtttttttgcccaccaagaaccaatttttacccccttgggaatgatagctcccctcttgagaatacatgctgaatggcaaggcctccgattatattaaacttacacattgattttagaacctatctttatcccccttcttgtttaattctcatgcaacacaaataattaatatatattatagagcttaatatttaatcacaatgaagtaatatttcaggcaaatagaaccaattgagtattttctatccatgcttcattcatccctggtgatttgattattaccttaaagacagaatgcttttaaatgtgctagtgtctgtatatccactttctttgttctgcattctatagtc

SEQ ID NO: 38290 - DNA, 746 bp, Homo sapiens
ctaatggctgactttgtcattgttacttgatctttcaggtcaacagtccttcacaaactttcaactttccaaaagaaggaatctaattgatttagctgtttgaacaaggccactcaaatcacagtttaccagcttaagtggtcaagtcacctgtgtcccaaatcaaagtcactcatctgggtctgygggtgggatgaaattttctgaacagaagccaacacaagtccagtgcattaattctgacagcaacaagcccagttgcttcaaaaccttgggaaacccttggtactcgtacttagaccctcccatggtcatatctagtgtgcttaaaatttacacattccatataagagtttatgtaaactatttcacaactgagttacagcaaactagtatacaatgttacaatgaaattatgtgcggtttcttttttctgtaattcagagctaagaatttcattttcagaacataaacattttatagcctcattaaaaacttataggcacaaggcatggcccagaaaccaaccattatccctgcaaaaagaagtagctcgttgattactgtcaaatacttaaatgtattggcttttaaagaattgttaggccgggcgcggtggctcacgcctgtaatcccagcactttgggaggccgaggcgggcggatcacgaggtcaggagatcgagaccatcccggctaaaacggtgaaaccccgtctctactaaaaatacaaaaaaattagccggg

SEQ ID NO: 38291 - DNA, 526 bp, Homo sapiens
catttatgcagccacattggattacaatcaaagaaagtaaaaacgaaagcaagtcagttgaagaaaaagcatcacctcctctccacacacacgcaccagaatggagtagaccacacttctttgtggcaatgtagtgctatttttattttccctatcatagcctgctgccttcatatggcaggaaatgacaagtccctgcccaccatagctaaaggacttggcaagtacccaaaaatatgttgaacagacactggcctccaaaactgcagttgagaaaaagtaatatttttaaattaaatttacctgctggtttgttcccttttatttgtgccatgggctaattgtttaccccctacatcattatttactcagagagtaaggctagactcctgaacaccagtggccctatggaattaatttgggstagggtgactttatatgtaagttaagcattggcttgctatttatttatttctaacttccttcccttaaatgtatggtgtgaaaatctaaacagagaaagtat

SEQ ID NO: 38292 - DNA, 632 bp, Homo sapiens
tagatagttgtactgtgaccatagttaaatctcctatgcacacagacatacctatatcattcacttttcaggctttctgggaaaccggagaagcatattttttagattgcctataaacctgaaattacagtagcatctttcattgctctttccctttaactgtacagtgcctctactcagactgctattttcttgctacaaagatatagctgtctttaaacagggtgaaatagaaataactacagaaaaggagtgctgagctgggacaacagctctctcactaactcattgtgtaacccatttacccctccctccatccatttaggcctgtttcttcctctataaaaagaaggtgttagattggatgacctctaaggtcacttccaactccacaratttctgaagtctaagagtaaatctttggaagttgtttttctttgtttttttttgtttgtttgtttgtttggtttttttttcagctgcatcctctgggttggttttgtttagaagagctttccacctgggaaaaatttttttgcagtggtatatagagcctaaagcatacatttcccatgcttcactcccatcacccacattgggccacaacctcagcaaatttggccccagtgttg

SEQ ID NO: 38293 - DNA, 451 bp, Homo sapiens
  misc_feature (1)...(451): n = A,T,C or G
aaaaatctatgcccagtaagatgtctaagaatccttttacttccaatattccacaagtctctaatgtggtcagcatgtttgacttaagacaaaattgtgtggtaaatacttttccatactcttctcatttctctttagtattcctttcttgttaattgtactgaaattgccagggtctctactgagagtggatttacctgataaagttacactaactcctaataaaataaaaccttaatgaggaatttgaggctacacatttacccttcccmacagagtttacttctgcaaaaagggcacagaaggggaatagccaaaaagaacacacttgaaatattagcttttcnnnnnnnnnnnnnnnnnnnnnnnnnnnnnnnnnnnnnnnnnnnnnnnnnnnnnnnnnnnnnnnnnnnnnnnnnnnnnnnnnnnnnnnnnnnnnnnnnnnnaccag

SEQ ID NO: 38294 - DNA, 612 bp, Homo sapiens
aattcatgcaaattttgtcttgattaaatgaggcaaatattttatgattctaataaaatgaccaaaggcctgttctctaaatatatgtattccaaaataaaataatataagctagactagaagcaagcaaacctctatcgagggaaatgatgattatgctaaaataaaaggggacactgacatggcaataaaccttgatcttgtctgccaaaacataactgaatgtcttctttattcaacagaccttgcatgagaaaaaaaaatgcagtgattggtgctggggtcagcggattagatgccattaagagctgcttggaggagggactcgagcctgtatgttttgaaaaaagcaatgagattggaggactgtggagatacgaggtaattaataaacattctcataaactctgatgtatctgtatactatgagagaagtgttttctttctaactaggaaacagaactctgatgacgtataacttagatattctttaagtgttcttttcaaagtagtgatatcttacattcatataaacctgaaattttttgaagtgcttacacaatcctattaacttttatccccccaacaacccyatatggaatacttagggta

SEQ ID NO: 38295 - DNA, 760 bp, Homo sapiens
  misc_feature (1)...(760): n = A,T,C or G
annnnnnnnnnnnnnnnnnnnnnnnnnnnnnnnnnnnnnnnnnnnnnnnnnnnnnnnnnnnnnnnnnnnnnnnnnnnnnnnnnnnnnnnnnnnnnnnnnnncctttgttggttctagacctcaaatcaatcaaacaaccaaatatgtgtaatcatatatatacacacacacatatatatacatatatacacgcatatacayacacacacacacatagacacatatgtatacgcacacatataatgtatgtatatgacttaagcactctaatttgctctgtgagaaatatgaagggtgtaaaatctcatttctcctctgagaaatatgtggtaccacaaacctcactaaatcagaatgtcttctgggaaagtaatacttccctgctgctttctgaaggacttcagcaattaaatttgcagggagtaaattcaaacgaagaacaagactgccatacagctcctgactggagccctatttaaagcattaagctgcccaagtttgcagtgacttctacccctctacctctcagcctgcatcctctttcttatctgcagcttctagtccacccattccattcaatgtggttccacaaatggtcactgagggccctgggccaggagctgaacaaatataaagtgagtcataatcctgctcccttcactctggtgctcaatggaatctactatatatgtcttcgtatcactcgccatcaccagattgtgcattcctcaaaggcaagtattatgtcatattcacctct

SEQ ID NO: 38296 - DNA, 522 bp, Homo sapiens
caatgagaataaaatatctaaagtagctacgttaatattagaaaagtgaacttcagaacaagaattatattatgaatgaagaacaagaattatattatgaactttgccaagaasacagtacatcctaaatgtctatgcatctagtaacagaacttcaaaatacctaaagtaaatacatgaagtaaaaactgggtacatctattcttaggtataagctagagtaatacacttcactatgtggctttttgcatcaggaaatatacacaagcatatttattacaacactgttcataacagaacaagtaacctaaaaaaaattgttgtggtagcatattaacaaaattttttaaagttttaataaaaataaagaaatgatagctacttatattaacagaaatataatccatagaaatatgacgtaatgtgaaaaagtaggtgacaagattatgtaaataggttttaattttaataaatcccctgagcaagtaaaattaaataatgtattgtgtgtatatacatata

SEQ ID NO: 38297 - DNA, 522 bp, Homo sapiens
caatgagaataaaatatctaaagtagctacgttaatattagaaaagtgaacttcagaacaagaattatattatgaatgaagaacaagaattatattatgaactttgccaagaagacagtacatcctaaatgtctatgcatctagtaacagaacttcaaaatacctaaagtaaatacatgaagtaaaaactgggtacatctattcttaggtataarctagagtaatacacttcactatgtggctttttgcatcaggaaatatacacaagcatatttattacaacactgttcataacagaacaagtaacctaaaaaaaattgttgtggtagcatattaacaaaattttttaaagttttaataaaaataaagaaatgatagctacttatattaacagaaatataatccatagaaatatgacgtaatgtgaaaaagtaggtgacaagattatgtaaataggttttaattttaataaatcccctgagcaagtaaaattaaataatgtattgtgtgtatatacatata

SEQ ID NO: 38298 - DNA, 552 bp, Homo sapiens
tcattacacattgtattcatgtatcaaaacaacatactgtaacccataaatatgtacaattattatgttcaatgaaaaataaaactttaaaatgcggctctagaattaagtacaatactctaaatattacacaagagggaacactcatccccactaagtgggacacaattccccctttattttattttatttatttattttgagatggagtctcactctgtcacccaggctggagtgcagtggcatgatctcagctcactgcaaccttcgcctcctgggttcaagcaattcttctgcctccacctgccaagtagctgggattacaagcacccaccaccacgcctggctaatttttgtatttttagtagagaccgggtttcactttgttggccaggctgatcttgaactcctgacctcaggtgatccgcccgcctcggcctcccaaagtgctgggattacaggcgtgagcctccgcgcctggcccacagtgcccctcttactgctgccaaagaayggcttcctgtttgggaaactccactgcactctggagta

SEQ ID NO: 38299 - DNA, 1056 bp, Homo sapiens
agcttaacaaaaaaaaaataaaaaaaagtgttcctgggtccctgaatccagccttctcaagaaagcccaacctaatttgcaatctcttatcccagcgtcagagtagaaaccagagaatcacaggaaggaatcatttttagacttacggagcttcagagaccaagcttttaagtgagtcaactcattcattatttcttcaggataaatttctgggaggaaaaaaaataactgtttcaagaggaaccacttggtgctagatcagtaggacagaaacatataacatccttatctaagctccatatattcctaacaatcacaagtagagatctgtgcttatggaacatggacttttctgtcttgctagaaatgtcattctcccccactaggtggcattttctgaggctgcagtgtgggtacttatggtctgatagagcagggttctactttgcatgcagtcctggtatctcaggtctttctattctcttccccatttctactttcatagatttctgtgtaagagctgcagaaaatgatcagcttccaggtaaggtatccatctattcatccagttgtttaaatctcccaaaaatccatatgataaaaaggaaatgtatggtcaggaaaaatgtaaaccaaataaaagatcaagtctaaaaggaaatttagaagattggtaagttgatattcaagtcatagggtttgcagatggttggaacaaatttgagctgcaaatgtgtactcagtcttcctggaaatcatagtaaatggataaccagccagttaaaaagtattggcattgctgtgaagataaagcaaaattattctccttgtaagtaaagtttttcctgacacagttctttgaagaaaatcttttctaatgagttttcacatagataacattagaaataacattcacagcagcagcctgcgataaatacagcatcaggtttcctatgactttcttagagtattccctagagtaagaacatagtgccaagcagcactaaatgaactcaatttataagtccaggtatgtggcctttttaatgmccacct

SEQ ID NO: 38300 - DNA, 606 bp, Homo sapiens
aacaacacaaatgtwtgtcaatagaggactggcttagtaaactagatatccacatagtggaatagtatgcagctccaatgaagagtaagcaaaatttcctcattgaaatggaaatatctccaagatatgttattaaatgaaaaaatgcaagataaagaacaatgtatgtatgtatgtatatataaatatattaaatatgtacacagagtattttgtgtaagggagaatgagaattatatccatatttgcttatatttgcatagtgtcacactggaagcctaaataggaactaataaagtcatttaataatcaaaactatatttaaaagttgtctggggaagcaagggtaagagtgaggctttcctgtacttctttttcacttttaaatatagttttgattgttgaataactggaacacattacccattttttaaatataaacaacagaaatgtatttctcacagttccagaggctagaaggtagggatcagaacctcgccagagtcaggttctgctgagggccctcttctggttacagattgtagcctcccatagcagagaaggctacaaggaccctggtttgttttgtttgtttgtttgtttgtt

SEQ ID NO: 38301 - DNA, 597 bp, Homo sapiens
tagaaaacaaaacaaagcaaagcaaacgaaacacccacaaaactgtgacaactttacaaagtctaagatatgcaaaattggactccctgaaaaagagagtgagaataaaaagttttgaagaaataatgcccaaacttctctaaaaaggatgaaaactatgaatacataggttaaaaaaaaaaaaaaaaacttgaatttccagccaacagcatgtggagagtgatccatgtagagcctaatgtttgaggagacccggacagatgaaattctygggacagagtacctgagaggagagctgcaacgggacagaccagagacagaccaaaaaaacaaaagcaaaacaaaacaaaacaaaaaacaaatcccaagtacaagaaacacacacacaaaaccatacccattttctttcttaattatatctcttacttttctctcattctgtcaataagcaggaaatgttttcctgaaatataattatcttctctaattcttgaataatattttgtttttgaaaatattttgtctgtcttttttcttctatggaaaattgtgctctcatttcactctaattttggttcctctgcaggtgctccctat

SEQ ID NO: 38302 - DNA, 569 bp, Homo sapiens
atgtaaactttaattatggtttatagataattaactttttattatattaacaaatataactctttacaaatgcctaagagaatacaagtttctaatagtttaacattatttcatggatttctatatattcctgccatataagagaacatcttggaagaaaagagcatcttccagtgaatttttctccatgaagatcatgctgaatttcatctttccattgatttttcccttctattcctctagagggttatgatcattgggcagcttggtaacctacttcagacaacatttagtatagcagtaaataygtgtgagcactgaagaataaaactaaacaatattagctagaagaaattgatttaaaacatttaacaacaataatttttcatttcatttgctataagcgatatgtgtattctaaacaaatgaaaaataattggtggaaggtattttgtcactcaccaggccagcagtgacaagtgtaattgtcaacactgtcctcacatgtagcattattgtgacaaggttttgaccaacaaagaggcatcaaggtctcacagtgtgtccct

SEQ ID NO: 38303 - DNA, 552 bp, Homo sapiens
aatactataatctgtttagaaagatcttccagagcagctgaatagattaaaagtttaaaatgtaacgcagaatcaccaaaaaattggttttgcttcaagtgggatattgccatagtgttgagagaaatgaaattgaaaatagttaatagggaggcataacaaattttaagtttttgttgatttttagccttatatttagctacaattggacactgtcagtgatgagtttaaccctcttgaataaagtagacatactcagatgcaattattattatttattattatttttgaactatgaaccaagaagccagtcttgagagctcagtcccacaagattacccctcacctgtagatgctgaccacaagcctaaaactatgacccatgcttctggttaaacagctaaaaattggggttcccrtggccccttcctcagttttgattaatttgcaagagtggctcaacagagctcaggaaaacactttaatttacacacttattatacaggatattataaaggatacagataaacagccagaaggaagaaatgcaca

SEQ ID NO: 38304 - DNA, 727 bp, Homo sapiens
cagacttaaaatctcattaattcatgaatagatcaggaccccaggaggagaaccatgcagcaccatatggagaaaataaaatattgaaaatattaaaaatatttataccttggaaaccaaagtcaaggattcctcctgcccccctttaagggtgggagtatataggagctaggtggtatatggatatgtggcccaggtctgaatccccctgaaagcactctggtagccagttactccatccttgaacatgtaattgtaatgtatatacttgatccttggcacaacctccatataggttccttattctgtggtacaagagctgttatagtaggaaaagtcaagcccaagactaggaaactaataccctcacagtcaagattataaaacaaaagcaatatcgcatcttggtcatggggctgaggtggttgtagatgtcccaaagcatgcagttagatcttggagaaggatacaaacgcaggctgcaastgctgtttcagataggcatttttgttacagtagattagtgtgaacctcagatacatggtatgcagtcattgattttgtgaattcattttttccatccctatcaggaagaggattaggaacatttcaaattcattttggacagaaagtaatatatatttacagcctagacctagggctttatgaactctcataacttctgtcataatatagccagccagatgatgctgtaaaatctgaccat

SEQ ID NO: 38305 - DNA, 1173 bp, Homo sapiens
ggtgcactgcacccactgtcctgcacccactgtctggcacaccccagtgagatgaacccggtacctcagttggaaatgcagaaatcacctgtcttctgcatcgctcacgctgggagctgtagactggagctgttcccattyggccatcttggctcctccctatatcaatattcttattacacttcttttagctaataacaatctcacattaactgtgtgtttactataaaactcaagaagtatagaaaagatggtgaaatgattctttggctcaggatagttccacagccttttactagtttaaagcatggtttaaaacacatagttcataagtaatatgaaagatagttaaagtcctctacattcagctcaaatttaaacagtttgtatatgtaaaaagtaaatatcacctatttgttacctatgtgctaaaggccaaaaatattaagttcctccctcccattacctctcatatcctaacagtccccaagacctaccagttctattccatattgaaaataagacccttttctccatttattctgctatggccttgtctctactctaagtaccttttatttgaaccaatattcaacaattcatgttttcttttttttaagtcagattcttccaattctaaactagctccttcactgtcacaaaaagaattctaaaaaaaaccttaatgtttaattcctctacttaaggaatgttctcatagcctatagtttaaagttcaaccaccttagtatggtataaaagacaaatgggcttttacacactaacccaggtctcctcccaaatgcccccaaaccacattacatttctcagaactgctgggcttattacaaatcttcatcttttacatgtgttctcacctttaaatgtccttttatttttactactctaggtttagttattattccccccttgaatatttttatgtctttattatgtaacacaagtcttttattacaactatgtttctatatcccttacttaagcacaacaattgacacataatgtttattttatttcaacagagaataatcaacttaagtgaacacctagcttttgaataacatatgctatcttacagctttcccaaccctttattctccctgatacttctaacaaagccttagccatttctgggtaaagcattcattcatg

SEQ ID NO: 38306 - DNA, 1173 bp, Homo sapiens
ggtgcactgcacccactgtcctgcacccactgtctggcacaccccagtgagatgaacccggtacctcagttggaaatgcagaaatcacctgtcttctgcatcgctcacgctgggagctgtagactggagctgttcccatttggccatcttggctcctccctatatcaatattcttattacacttcttttagctaataacaatctcacattaactgtgtgtttactataaaactcaagaagtatagaaaagatggtgaaatgattctttggctcaggatagtyccacagccttttactagtttaaagcatggtttaaaacacatagttcataagtaatatgaaagatagttaaagtcctctacattcagctcaaatttaaacagtttgtatatgtaaaaagtaaatatcacctatttgttacctatgtgctaaaggccaaaaatattaagttcctccctcccattacctctcatatcctaacagtccccaagacctaccagttctattccatattgaaaataagacccttttctccatttattctgctatggccttgtctctactctaagtaccttttatttgaaccaatattcaacaattcatgttttcttttttttaagtcagattcttccaattctaaactagctccttcactgtcacaaaaagaattctaaaaaaaaccttaatgtttaattcctctacttaaggaatgttctcatagcctatagtttaaagttcaaccaccttagtatggtataaaagacaaatgggcttttacacactaacccaggtctcctcccaaatgcccccaaaccacattacatttctcagaactgctgggcttattacaaatcttcatcttttacatgtgttctcacctttaaatgtccttttatttttactactctaggtttagttattattccccccttgaatatttttatgtctttattatgtaacacaagtcttttattacaactatgtttctatatcccttacttaagcacaacaattgacacataatgtttattttatttcaacagagaataatcaacttaagtgaacacctagcttttgaataacatatgctatcttacagctttcccaaccctttattctccctgatacttctaacaaagccttagccatttctgggtaaagcattcattcatg

SEQ ID NO: 38307 - DNA, 1173 bp, Homo sapiens
ggtgcactgcacccactgtcctgcacccactgtctggcacaccccagtgagatgaacccggtacctcagttggaaatgcagaaatcacctgtcttctgcatcgctcacgctgggagctgtagactggagctgttcccatttggccatcttggctcctccctatatcaatattcttattacacttcttttagctaataacaatctcacattaactgtgtgtttactataaaactcaagaagtatagaaaagatggtgaaatgattctttggctcaggatagttccacagccttttactagtttaaagcatggtttaaaacacatagttcataagtaatatgaaagatagttaaagtcctctacattcagctcaaatttaaacagtttgtatatgtaaaaagtaaatatcacctatttgttacctatgtgctaaaggccaaaaatattaagttcctccctcccattacctctcatatcctaacagtccccaagacctaccagttctattccatattgaaaataagacccttttctccatttattctgctatggccttrtctctactctaagtaccttttatttgaaccaatattcaacaattcatgttttcttttttttaagtcagattcttccaattctaaactagctccttcactgtcacaaaaagaattctaaaaaaaaccttaatgtttaattcctctacttaaggaatgttctcatagcctatagtttaaagttcaaccaccttagtatggtataaaagacaaatgggcttttacacactaacccaggtctcctcccaaatgcccccaaaccacattacatttctcagaactgctgggcttattacaaatcttcatcttttacatgtgttctcacctttaaatgtccttttatttttactactctaggtttagttattattccccccttgaatatttttatgtctttattatgtaacacaagtcttttattacaactatgtttctatatcccttacttaagcacaacaattgacacataatgtttattttatttcaacagagaataatcaacttaagtgaacacctagcttttgaataacatatgctatcttacagctttcccaaccctttattctccctgatacttctaacaaagccttagccatttctgggtaaagcattcattcatg

SEQ ID NO: 38308 - DNA, 1173 bp, Homo sapiens
ggtgcactgcacccactgtcctgcacccactgtctggcacaccccagtgagatgaacccggtacctcagttggaaatgcagaaatcacctgtcttctgcatcgctcacgctgggagctgtagactggagctgttcccatttggccatcttggctcctccctatatcaatattcttattacacttcttttagctaataacaatctcacattaactgtgtgtttactataaaactcaagaagtatagaaaagatggtgaaatgattctttggctcaggatagttccacagccttttactagtttaaagcatggtttaaaacacatagttcataagtaatatgaaagatagttaaagtcctctacattcagctcaaatttaaacagtttgtatatgtaaaaagtaaatatcacctatttgttacctatgtgctaaaggccaaaaatattaagttcctccctcccattacctctcatatcctaacagtccccaagacctaccagttctattccatattgaaaataagacccttttctccatttattctgctatggccttgtctctactctaagtaccttttatttgaaccaatattcaacaattcatgttttcttttttttaagtcagattcttccaattctaaactagctccttcactgtcacaaaaagaattctaaaaaaaaccttaatgtttaattcctctacttaaggaatgttctcatagcctatagtttaaagttcaaccaccttagtatggtataaaagacaaatgggcttttacacactaacccaggtctcctcccaaatgcccccaaaccacattacatttctcagaactgctgggcttattacaaatcttcatcttttacatgtgttctcacctttaaatgtccttttatttttactactctaggtttagttattattccccccttgaatatttttatgtctttattatgtaacacaagtcttttattacaactatgtttctatatcccttacttaagcacaacaattgacacataatrtttattttatttcaacagagaataatcaacttaagtgaacacctagcttttgaataacatatgctatcttacagctttcccaaccctttattctccctgatacttctaacaaagccttagccatttctgggtaaagcattcattcatg

SEQ ID NO: 38309 - DNA, 645 bp, Homo sapiens
aaagtctttatcaaatattagcagtagaaaaaaaccatatccttgtagattagttggtaaaattatagtatgtaaatgagtagcactttcaatttattacacgtataagtggtaattcatctatttcagggtccccctggtccacaaggtcctattggatacccgggcccccggggagtaaaggtaacgttaaattgttttcacattatttactttcaawgtgaaatgttatattcacttaatacttctaatttattccacagggagcagatggtgtcagaggtctcaagggatctaaaggtgaaaaggtaaaatttaattgtttagatggtattaatttctgtgtattatgttaacatttaaatttattcaacagacattttatttcttgaatatatgagtgattactacatactacgcaatgctagtataattttgtattctttatcctcacaacttaaaaacaatgtcttatatcttgtgataagggttaaataccagaacagaaactaaattatgttacctaagagaattaattctgcatcctttttctttttttttttttacatgtgcttaagttttgttaatcatagggttggccttacgaatggatttgctgcaggatttagatgttatctagttaga

SEQ ID NO: 38310 - DNA, 1766 bp, Homo sapiens
ttattttcatgagatggtggagatgaggaggagacctacatttaatacatcctatcaacagaattgatccttaagttttcaactgtgacttagtaaaatattgcaatgaactccaccccatgaaatatgtcaaactttgtcttgatagtttcacaggtggtatagatgtttagtcttccttctaaattggtagaagccccatggtattaccagtaacatcctggagtttcaatccaagcttgggtcttaggtacatagtaattcatatctgaagatctaatgctttaaaatgatggacaaaatcattttaattggcacttttgtgttttaaatataaatgaaaattaaagtgagcaactaagataaatgttaccaaattcatatggagcacaataagaaggggaaaccaagacattgaaaatatagtatagaatgaggatttctgctctcaaagaatttatggtatacaaaaacagttatgtaatacttgatatgttttccaatttagagagttatgctttgcaatagaagtccctgcttagtacttacggctttcaagatgttcatgtatttacaaaatattgatataattatgattttatttcacctctttaacacattgaattccttttttttctttttcttcttggaaaataaaacatgactttgggttaattccagcagtattttatctttggaaatgcatataaagctataaartgattttaaaatcctaagagaaagagaaacctgaggtttggcatcaggataaaaattgctcattattatttatcttttttattcataaaaattcatccacagatataactcgatattttgaaagctttaggtacaatcaatggcattatcttttaattttaagctttatttaagagatttaaagagatttcattcattttaatatttaacttataaaaatataaatcaaattctaaaatgcataatttataagagcagaattaataatgagagcagatgtgtaaaaatataaatgttttcacatataaaatctgtttcggtattcctagtttgaactttaagtatcccagacctcaacattaaaatgaaatcattaaaattgctacattcctatctcatgaagatgttatgaagactaacaaaaaaccattaagtattttaaataaaaggaattttcctatgctggaaaatgcattttgtttttaacaaaatactcttatactaaatgtttttttttggaacccaaccatttatattcatatgtaattttccagtctttgtaaattagactgtgaaagcttttgaaatagtatctattgtttgtccagcatttgaaagtgcaataatttcaccataccactactggcaaaaagcataatattgggagggttactaaacactgaaaatctgcaaaacaaattaagttgaagttatttaatacagatgttttaaaaatcagatctatttcaatatttaaccatatttgccggccttaaatcttgtatttggcatttgttgtggaatgtataagactcatataaaaataacagaaatattgcatatgtttcagaaaagtatctggtgtgagtcttcagatttttgatgcagatgcatttggtttcagacttaaatgattaggtgcgaatggtggaggcataaaacaattacatacgatcactagaaataatattcacttcaagtcaagaatactgtcaaatggtatcagggtggatcaatctgtgaagaaatgatagaggtgagaaaga

SEQ ID NO: 38311 - DNA, 1766 bp, Homo sapiens
ttattttcatgagatggtggagatgaggaggagacctacatttaatacatcctatcaacagaattgatccttaagttttcaactgtgacttagtaaaatattgcaatgaactccaccccatgaaatatgtcaaactttgtcttgatagtttcacaggtggtatagatgtttagtcttccttctaaattggtagaagccccatggtattaccagtaacatcctggagtttcaatccaagcttgggtcttaggtacatagtaattcatatctgaagatctaatgctttaaaatgatggacaaaatcattttaattggcacttttgtgttttaaatataaatgaaaattaaagtgagcaactaagataaatgttaccaaattcatatggagcacaataagaaggggaaaccaagacattgaaaatatagtatagaatgaggatttctgctctcaaagaatttatggtatacaaaaacagttatgtaatacttgatatgttttccaatttagagagttatgctttgcaatagaagtccctgcttagtacttacggctttcaagatgttcatgtatttacaaaatattgatataattatgattttatttcacctctttaacacattgaattccttttttttctttttcttcttggaaaataaaacatgactttgggttaattccagcagtattttatctttggaaatgcatataaagctataaagtgattttaaaatcctaagagaaagagaaacctgaggtttggcatcaggataaaaattgctcattattatttatcttttttattcataaaaattcatccacagatataactcgatattttgaaagctttaggtacaatcaatggcattatcttttaattttaagctttatttaagagatttaaagagatttcattcattttaatatttaacttataaaaatataaatcaaattctaaaatgcataatttataagagcagaattaataatgagagcagatgtgtaaaaatataaatgttttcacatataaaatctgtttcggtattcctagtttgaactttaagtatcccagacctcaacattaaaatgaaatcattaaaattgctacattcctatctcatgaagatgttatgaagactaacaaaaaaccattaagtattttaaataaaaggaattttcctatgctggaaaatgcattttgtttttaacaaaatactcttatactaaatgtttttttttggaacccaaccatttatattcatatgtaattttccagtctttgtaaattagactgtgaaagcttttgaaatagtatctattgtttgtccagcatttgaaagtgcaataatttcaccataccactactggcaaaaagcataatattgggagggttactaaacactgaaaatctgcaaaacaaattaagttgaagttatttaatacagatgttttaaaaatcagatctatttcaatatttaaccatatttgccggccttaaatcttgtatttggcatttgttgtggaatgtataagactcatataaaaataacagaaatattgcatatgtttcagaaaagtatctggtgtgagtcttcagatttttgatgcasatgcatttggtttcagacttaaatgattaggtgcgaatggtggaggcataaaacaattacatacgatcactagaaataatattcacttcaagtcaagaatactgtcaaatggtatcagggtggatcaatctgtgaagaaatgatagaggtgagaaaga

SEQ ID NO: 38312 - DNA, 1766 bp, Homo sapiens
ttattttcatgagatggtggagatgaggaggagacctacatttaatacatcctatcaacagaattgatccttaagttttcaactgtgacttagtaaaatattgcaatgaactccaccccatgaaatatgtcaaactttgtcttgatagtttcacaggtggtatagatgtttagtcttccttctaaattggtagaagccccatggtattaccagtaacatcctggagtttcaatccaagcttgggtcttaggtacatagtaattcatatctgaagatctaatgctttaaaatgatggacaaaatcattttaattggcacttttgtgttttaaatataaatgaaaattaaagtgagcaactaagataaatgttaccaaattcatatggagcacaataagaaggggaaaccaagacattgaaaatatagtatagaatgaggatttctgctctcaaagaatttatggtatacaaaaacagttatgtaatacttgatatgttttccaatttagagagttatgctttgcaatagaagtccctgcttagtacttacggctttcaagatgttcatgtatttacaaaatattgatataattatgattttatttcacctctttaacacattgaattccttttttttctttttcttcttggaaaataaaacatgactttgggttaattccagcagtattttatctttggaaatgcatataaagctataaagtgattttaaaatcctaagagaaagagaaacctgaggtttggcatcaggataaaaattgctcattattatttatcttttttattcataaaaattcatccacagatataactcgatattttgaaagctttaggtacaatcaatggcattatcttttaattttaagctttatttaagagatttaaagagatttcattcattttaatatttaacttataaaaatataaatcaaattctaaaatgcataatttataagagcagaattaataatgagagcagatgtgtaaaaatataaatgttttcacatataaaatctgtttcggtattcctagtttgaactttaagtatcccagacctcaacattaaaatgaaatcattaaaattgctacattcctatctcatgaagatgttatgaagactaacaaaaaaccattaagtattttaaataaaaggaattttcctatgctggaaaatgcattttgtttttaacaaaatactcttatactaaatgtttttttttggaacccaaccatttatattcatatgtaattttccagtctttgtaaattagactgtgaaagcttttgaaatagtatctattgtttgtccagcatttgaaagtgcaataatttcaccataccactactggcaaaaagcataatattgggagggttactaaacactgaaaatctgcaaaacaaattaagttgaagttatttaatacagatgttttaaaaatcagatctatttcaatatttaaccatatttgccggccttaaatcttgtatttggcatttgttgtggaatgtataagactcatataaaaataacagaaatattgcatatgtttcagaaaagtatctggtgtgagtcttcagatttttgatgcagatgcatttggtttcagacttaaatgattaggtgcgaatggtggaggcataaaacaattacatacgatsactagaaataatattcacttcaagtcaagaatactgtcaaatggtatcagggtggatcaatctgtgaagaaatgatagaggtgagaaaga

SEQ ID NO: 38313 - DNA, 1766 bp, Homo sapiens
ttattttcatgagatggtggagatgaggaggagacctacatttaatacatcctatcaacagaattgatccttaagttttcaactgtgacttagtaaaatattgcaatgaactccaccccatgaaatatgtcaaactttgtcttgatagtttcacaggtggtatagatgtttagtcttccttctaaattggtagaagccccatggtattaccagtaacatcctggagtttcaatccaagcttgggtcttaggtacatagtaattcatatctgaagatctaatgctttaaaatgatggacaaaatcattttaattggcacttttgtgttttaaatataaatgaaaattaaagtgagcaactaagataaatgttaccaaattcatatggagcacaataagaaggggaaaccaagacattgaaaatatagtatagaatgaggatttctgctctcaaagaatttatggtatacaaaaacagttatgtaatacttgatatgttttccaatttagagagttatgctttgcaatagaagtccctgcttagtacttacggctttcaagatgttcatgtatttacaaaatattgatataattatgattttatttcacctctttaacacattgaattccttttttttctttttcttcttggaaaataaaacatgactttgggttaattccagcagtattttatctttggaaatgcatataaagctataaagtgattttaaaatcctaagagaaagagaaacctgaggtttggcatcaggataaaaattgctcattattatttatcttttttattcataaaaattcatccacagatataactcgatattttgaaagctttaggtacaatcaatggcattatcttttaattttaagctttatttaagagatttaaagagatttcattcattttaatatttaacttataaaaatataaatcaaattctaaaatgcataatttataagagcagaattaataatgagagcagatgtgtaaaaatataaatgttttcacatataaaatctgtttcggtattcctagtttgaactttaagtatcccagacctcaacattaaaatgaaatcattaaaattgctacattcctatctcatgaagatgttatgaagactaacaaaaaaccattaagtattttaaataaaaggaattttcctatgctggaaaatgcattttgtttttaacaaaatactcttatactaaatgtttttttttggaacccaaccatttatattcatatgtaattttccagtctttgtaaattagactgtgaaagcttttgaaatagtatctattgtttgtccagcatttgaaagtgcaataatttcaccataccactactggcaaaaagcataatattgggagggttactaaacactgaaaatctgcaaaacaaattaagttgaagttatttaatacagatgttttaaaaatcagatctatttcaatatttaaccatatttgccggccttaaatcttgtatttggcatttgttgtggaatgtataagactcatataaaaataacagaaatattgcatatgtttcagaaaagtatctggtgtgagtcttcagatttttgatgcagatgcatttggtttcagacttaaatgattaggtgcgaatggtggaggcataaaacaattacatacgatcwctagaaataatattcacttcaagtcaagaatactgtcaaatggtatcagggtggatcaatctgtgaagaaatgatagaggtgagaaaga

SEQ ID NO: 38314 - DNA, 1133 bp, Homo sapiens
aactgaggctcagagagtttaagtaatttgcctaagttcgtatagttggaaagtgatagagatggggtttgaactcaggaagtcaggcttgcactgcgctcttttgcaaatcatgtcgaattctgaattatgtattgtggttgtttcctttcacttatggagcagctaaatagaaattaatgcttattaaatttactcaatattttatcactgaatccagacctctaaaaacagctttatccaaaatagcacatttggttatagctataagaaggaagtagcagtgatcattgacactcattatatttttgtcaggaccacagagaaactctcaagtctcagttttactgagactttacaactttaggcttttacaactaatttacattattatcctataaacaaattagatataatagcacgttgtgtttctttttttgactgttagcaaactccatgctaaggttttaatctatatttggtaaatgtagaaaatattttgaattcatcttattattcacaccttatttttccttaatcctgctttcctaactgaagaaaaaaaaacaaaaacatcaatttattgcagcccagcccacatcctattcaaaactagcaggtagtgtttactatgaatgtatccttaaagtaaaacatgaaaaaataaaaataaaaaaatggagaatgttcaataaatatttttaattgattatcaaacagaagttatatttacatatatcacagtagtaaaatattatcttgataatatgttgaatacagttaatacctagtagtattaatttttttcatttgtatattccttcaataacaatttattaaatgcttactgtgtgctaggtaggtcctatacttttacttgagacagttaaaamgtgacatacttgttgagctcaactgccataataatttagatgcaaaaatattggtatttaagcacactgtgatgtttttaaagaacaatcatgacattcatcatgagtgaacattcattccataagtatttatctattagccaccgcttggctggcagtctgtagagcacagcagttgtagcaatgaacaacccaggtgaagttcctccactcctggagcttaaatatgcgaagtgctga

SEQ ID NO: 38315 - DNA, 1133 bp, Homo sapiens
aactgaggctcagagagtttaagtaatttgcctaagttcgtatagttggaaagtgatagagatggggtttgaactcaggaagtcaggcttgcactgcgctcttttgcaaatcatgtcgaattctgaattatgtattgtggttgtttcctttcacttatggagcagctaaatagaaattaatgcttattaaatttactcaatattttatcactgaatccagacctctaaaaacagctttatccaaaatagcacatttggttatagctataagaaggaagtagcagtgatcattgacactcattatatttttgtcaggaccacagagaaactctcaagtctcagttttactgagactttacaactttaggcttttacaactaatttacattattatcctataaacaaattagatataatagcacgttgtgtttctttttttgactgttagcaaactccatgctaaggttttaatctatatttggtaaatgtagaaaatattttgaattcatcttattattcacaccttatttttccttaatcctgctttcctaactgaagaaaaaaaaacaaaaacatcaatttattgcagcccagcccacatcctattcaaaactagcaggtagtgtttactatgaatgtatccttaaagtaaaacatgaaaaaataaaaataaaaaaatggagaatgttcaataaatatttttaattgattatcaaacagaagttatatttacatatatcacagtagtaaaatattatcttgataatatgttgaatacagttaatacctagtagtattaatttttttcatttgtatattccttcaataacaatttattaaatgcttactgtgtgctaggtaggtcctatacttttacttgagacagttaaaaagtgacatacttgttgagctcaactgccataataatttagatgcaaaaatattggtatttaagcacactstgatgtttttaaagaacaatcatgacattcatcatgagtgaacattcattccataagtatttatctattagccaccgcttggctggcagtctgtagagcacagcagttgtagcaatgaacaacccaggtgaagttcctccactcctggagcttaaatatgcgaagtgctga

SEQ ID NO: 38316 - DNA, 391 bp, Homo sapiens
tcctgggctcaagagattctcccatctcagcctcctggaaagctgggactacaggaatgtgtcaccaygcccaggtaattctattttttgtagagacagggtttcatcatgtggcccaggctggtctcaaacttctgggctcaagcaactctcctgccttggcctcccaaaaagtgctgggattaaaggtgtgagccactgtgcctcgctaaaaaaattctttttacaaagattttaacattaggtacttgcagatattttcctgtggatgtggtaaaaataaataaataaagatttttttttttttttgagacggagtctcactctgttgcccaggctggagtgcagtggcgccatctgagctcactggaagctccgcctcctgggttca

SEQ ID NO: 38317 - DNA, 1725 bp, Homo sapiens
aacgtcagtcaaaagtttgcayttcagagatatcttcagatatcattttctctgactaccactggaggcataacaaacgtgagaaatgtgctttcattggcaacattactggcatccaaataaataggctgattaaaatattctaggaagacagagctttaacattttgatgaacaagctttgaaaagttagtaatctcttcttttgtatctttccttaaatagcgcatggtaactgacatgtttggggaatttagattgccctatgctgaatgtataattacaatatttcatagatataatattcaatattataatgaatgctgccactggaatattgttagttttgtttttagttagggtcagagaaacagatcctaaaaaaaaaaaaaaaaaaaaagagtgagagagagatctggaaagtcaccgagatcacagaaaagcaattttgtgctgctactaagtgatatttaagaaacgatagtatttatggtggcctcctgtctgagacttgattttatcacaccatggtagcaaagttgtggtagaagagacctattctcactatctgctacatttatgccaaaatcactaccaaaaatatcttaataattgtgtatgttcaattgcttggtcactttgtataataacaaagatcatacaaaggaatcaaagagttggagagcagagcaagtcaggtgggaagactctgatacagcctaggtgaacttgaggtcggttggaaagaaagcctaagtaagagtgagagaaactatttctgagtaagggagaccgtggctgcagtctgttttatttttattgcatcttcatggccttgggcttgaatggatggaagccatttgtctggaaatttgattaggcaataccttcaggctattgtaagatcccccatatatacggtatatacagtagtcacgcttattcatggtttcaatttccaaggtttcagttacctgtggtcaaccacagcatgaaaataaatgagtacagcacaataagatatttgagggaaaaaaagaaagagagagagagaacacatttgcataacttttgttaaagtatattgttatagttgatcttttattattatttattgctgttattctcttactgtgtctaatttataaattaactttatcttaactatgtatgcataggaaaaacatagtgtttaagattcagtactattcatggtttcaggcatccacgggggttcacagaacatattccccaaggataaggaggcactgttggatatagcaaatgcgtttgtcaacaaatatttcctagacaagaaaaaaagcagaaaaattagaaaaagataaattatgggaatatcaaaaggtatgaagaaaataaaaccacgacctgctaaaaaagttgtaattttggctgggcacagtagctcatgactgtaatcccagcactttgagagaccaaggcgggcggatcacgaggtcaggagattgagaccatactgactaatatggtgaaatcccatctctactaaaaatacaaaaacaaaattagccaggtgtggtggcaggcacccgtagtcccagctactcaggaggctgaggcgtgaacccaggaggcagagcttgcagtgagccgagatcgcgccactgaattccagcctggcagcctgggtgacagagcaagactatcttaaaaaaaaaaaaaaaaaaaaaaaaaattattttaa

SEQ ID NO: 38318 - DNA, 1725 bp, Homo sapiens
aacgtcagtcaaaagtttgcatttcagagatatcttcagatatcattttctctgactaccacyggaggcataacaaacgtgagaaatgtgctttcattggcaacattactggcatccaaataaataggctgattaaaatattctaggaagacagagctttaacattttgatgaacaagctttgaaaagttagtaatctcttcttttgtatctttccttaaatagcgcatggtaactgacatgtttggggaatttagattgccctatgctgaatgtataattacaatatttcatagatataatattcaatattataatgaatgctgccactggaatattgttagttttgtttttagttagggtcagagaaacagatcctaaaaaaaaaaaaaaaaaaaaagagtgagagagagatctggaaagtcaccgagatcacagaaaagcaattttgtgctgctactaagtgatatttaagaaacgatagtatttatggtggcctcctgtctgagacttgattttatcacaccatggtagcaaagttgtggtagaagagacctattctcactatctgctacatttatgccaaaatcactaccaaaaatatcttaataattgtgtatgttcaattgcttggtcactttgtataataacaaagatcatacaaaggaatcaaagagttggagagcagagcaagtcaggtgggaagactctgatacagcctaggtgaacttgaggtcggttggaaagaaagcctaagtaagagtgagagaaactatttctgagtaagggagaccgtggctgcagtctgttttatttttattgcatcttcatggccttgggcttgaatggatggaagccatttgtctggaaatttgattaggcaataccttcaggctattgtaagatcccccatatatacggtatatacagtagtcacgcttattcatggtttcaatttccaaggtttcagttacctgtggtcaaccacagcatgaaaataaatgagtacagcacaataagatatttgagggaaaaaaagaaagagagagagagaacacatttgcataacttttgttaaagtatattgttatagttgatcttttattattatttattgctgttattctcttactgtgtctaatttataaattaactttatcttaactatgtatgcataggaaaaacatagtgtttaagattcagtactattcatggtttcaggcatccacgggggttcacagaacatattccccaaggataaggaggcactgttggatatagcaaatgcgtttgtcaacaaatatttcctagacaagaaaaaaagcagaaaaattagaaaaagataaattatgggaatatcaaaaggtatgaagaaaataaaaccacgacctgctaaaaaagttgtaattttggctgggcacagtagctcatgactgtaatcccagcactttgagagaccaaggcgggcggatcacgaggtcaggagattgagaccatactgactaatatggtgaaatcccatctctactaaaaatacaaaaacaaaattagccaggtgtggtggcaggcacccgtagtcccagctactcaggaggctgaggcgtgaacccaggaggcagagcttgcagtgagccgagatcgcgccactgaattccagcctggcagcctgggtgacagagcaagactatcttaaaaaaaaaaaaaaaaaaaaaaaaaattattttaa

SEQ ID NO: 38319 - DNA, 1725 bp, Homo sapiens
aacgtcagtcaaaagtttgcatttcagagatatcttcagatatcattttctctgactaccactggaggcataacaaacgtgagaaatgtgctttcattggcaacattactggcatccaaataaataggctgattaaaatattctaggaagacagagctttaacattttgatgaacaagctttgaaaagttagtaatctcttcttttgtatctttccttaaatagcgcatggtaactgacatgtttggggaatttagattgccckatgctgaatgtataattacaatatttcatagatataatattcaatattataatgaatgctgccactggaatattgttagttttgtttttagttagggtcagagaaacagatcctaaaaaaaaaaaaaaaaaaaaagagtgagagagagatctggaaagtcaccgagatcacagaaaagcaattttgtgctgctactaagtgatatttaagaaacgatagtatttatggtggcctcctgtctgagacttgattttatcacaccatggtagcaaagttgtggtagaagagacctattctcactatctgctacatttatgccaaaatcactaccaaaaatatcttaataattgtgtatgttcaattgcttggtcactttgtataataacaaagatcatacaaaggaatcaaagagttggagagcagagcaagtcaggtgggaagactctgatacagcctaggtgaacttgaggtcggttggaaagaaagcctaagtaagagtgagagaaactatttctgagtaagggagaccgtggctgcagtctgttttatttttattgcatcttcatggccttgggcttgaatggatggaagccatttgtctggaaatttgattaggcaataccttcaggctattgtaagatcccccatatatacggtatatacagtagtcacgcttattcatggtttcaatttccaaggtttcagttacctgtggtcaaccacagcatgaaaataaatgagtacagcacaataagatatttgagggaaaaaaagaaagagagagagagaacacatttgcataacttttgttaaagtatattgttatagttgatcttttattattatttattgctgttattctcttactgtgtctaatttataaattaactttatcttaactatgtatgcataggaaaaacatagtgtttaagattcagtactattcatggtttcaggcatccacgggggttcacagaacatattccccaaggataaggaggcactgttggatatagcaaatgcgtttgtcaacaaatatttcctagacaagaaaaaaagcagaaaaattagaaaaagataaattatgggaatatcaaaaggtatgaagaaaataaaaccacgacctgctaaaaaagttgtaattttggctgggcacagtagctcatgactgtaatcccagcactttgagagaccaaggcgggcggatcacgaggtcaggagattgagaccatactgactaatatggtgaaatcccatctctactaaaaatacaaaaacaaaattagccaggtgtggtggcaggcacccgtagtcccagctactcaggaggctgaggcgtgaacccaggaggcagagcttgcagtgagccgagatcgcgccactgaattccagcctggcagcctgggtgacagagcaagactatcttaaaaaaaaaaaaaaaaaaaaaaaaaattattttaa

SEQ ID NO: 38320 - DNA, 1725 bp, Homo sapiens
aacgtcagtcaaaagtttgcatttcagagatatcttcagatatcattttctctgactaccactggaggcataacaaacgtgagaaatgtgctttcattggcaacattactggcatccaaataaataggctgattaaaatattctaggaagacagagctttaacattttgatgaacaagctttgaaaagttagtaatctcttcttttgtatctttccttaaatagcgcatggtaactgacatgtttggggaatttagattgccctatgctgaatgtataattacaatatttcatagatataatattcaatattataatgaatgctgccactggaatattgttagttttgtttttagttagggtcagagaaacagatcctaaaaaaaaaaaaaaaaaaaaagagtgagagagagatctggaaagtcaccgagatcacagaaaagcaattttgtgctgctactaagtgatatttaagaaacgatagtatttatggtggcctcctgtctgagacttgattttatcacaccatggtagcaaagttgtggtagaagagacctattctcactatctgctacatttatgccaaaatcactaccaaaaatatcttaataattgtgtatgttcaattgcttggtcactttgtataataacaaagatcatacaaaggaatcaaagagttggagagcagagcaagtcaggtgggaagactctgatacagcctaggtgaacttgaggtcggttggaaagaaagcctaagtaagagtgagagaaactatttctgagtaagggagaccgtggctgcagtctgttttatttttattgcatcttcatggccttgggcttgaatggatggaagccatttgtctggaaatttgattaggcaataccttcaggctatygtaagatcccccatatatacggtatatacagtagtcacgcttattcatggtttcaatttccaaggtttcagttacctgtggtcaaccacagcatgaaaataaatgagtacagcacaataagatatttgagggaaaaaaagaaagagagagagagaacacatttgcataacttttgttaaagtatattgttatagttgatcttttattattatttattgctgttattctcttactgtgtctaatttataaattaactttatcttaactatgtatgcataggaaaaacatagtgtttaagattcagtactattcatggtttcaggcatccacgggggttcacagaacatattccccaaggataaggaggcactgttggatatagcaaatgcgtttgtcaacaaatatttcctagacaagaaaaaaagcagaaaaattagaaaaagataaattatgggaatatcaaaaggtatgaagaaaataaaaccacgacctgctaaaaaagttgtaattttggctgggcacagtagctcatgactgtaatcccagcactttgagagaccaaggcgggcggatcacgaggtcaggagattgagaccatactgactaatatggtgaaatcccatctctactaaaaatacaaaaacaaaattagccaggtgtggtggcaggcacccgtagtcccagctactcaggaggctgaggcgtgaacccaggaggcagagcttgcagtgagccgagatcgcgccactgaattccagcctggcagcctgggtgacagagcaagactatcttaaaaaaaaaaaaaaaaaaaaaaaaaattattttaa

SEQ ID NO: 38321 - DNA, 1725 bp, Homo sapiens
aacgtcagtcaaaagtttgcatttcagagatatcttcagatatcattttctctgactaccactggaggcataacaaacgtgagaaatgtgctttcattggcaacattactggcatccaaataaataggctgattaaaatattctaggaagacagagctttaacattttgatgaacaagctttgaaaagttagtaatctcttcttttgtatctttccttaaatagcgcatggtaactgacatgtttggggaatttagattgccctatgctgaatgtataattacaatatttcatagatataatattcaatattataatgaatgctgccactggaatattgttagttttgtttttagttagggtcagagaaacagatcctaaaaaaaaaaaaaaaaaaaaagagtgagagagagatctggaaagtcaccgagatcacagaaaagcaattttgtgctgctactaagtgatatttaagaaacgatagtatttatggtggcctcctgtctgagacttgattttatcacaccatggtagcaaagttgtggtagaagagacctattctcactatctgctacatttatgccaaaatcactaccaaaaatatcttaataattgtgtatgttcaattgcttggtcactttgtataataacaaagatcatacaaaggaatcaaagagttggagagcagagcaagtcaggtgggaagactctgatacagcctaggtgaacttgaggtcggttggaaagaaagcctaagtaagagtgagagaaactatttctgagtaagggagaccgtggctgcagtctgttttatttttattgcatcttcatggccttgggcttgaatggatggaagccatttgtctggaaatttgattaggcaataccttcaggctattgtaagatcccccatatatacggtatatacagtagtcaygcttattcatggtttcaatttccaaggtttcagttacctgtggtcaaccacagcatgaaaataaatgagtacagcacaataagatatttgagggaaaaaaagaaagagagagagagaacacatttgcataacttttgttaaagtatattgttatagttgatcttttattattatttattgctgttattctcttactgtgtctaatttataaattaactttatcttaactatgtatgcataggaaaaacatagtgtttaagattcagtactattcatggtttcaggcatccacgggggttcacagaacatattccccaaggataaggaggcactgttggatatagcaaatgcgtttgtcaacaaatatttcctagacaagaaaaaaagcagaaaaattagaaaaagataaattatgggaatatcaaaaggtatgaagaaaataaaaccacgacctgctaaaaaagttgtaattttggctgggcacagtagctcatgactgtaatcccagcactttgagagaccaaggcgggcggatcacgaggtcaggagattgagaccatactgactaatatggtgaaatcccatctctactaaaaatacaaaaacaaaattagccaggtgtggtggcaggcacccgtagtcccagctactcaggaggctgaggcgtgaacccaggaggcagagcttgcagtgagccgagatcgcgccactgaattccagcctggcagcctgggtgacagagcaagactatcttaaaaaaaaaaaaaaaaaaaaaaaaaattattttaa

SEQ ID NO: 38322 - DNA, 1222 bp, Homo sapiens
gtcgctcaaactgttttactttttcattgtggaagacaaatgtaagtagttttgttataggaaaaacaggttcattttcctgctgtgtggcaacagactgattatactgagacagcagggtttgcagctgagaaagagtttaatgatcacaacactgtgagtgaggagatgaaaagagactctcgctgcagtctttaaagggattagagagggcaaaaagctggaagattgagasagttgactggtcagggtcaaggggataaaatcatcaggagtgtggaaactgtattttttggcgagtcagcctcttgcggagtgttcagatctgctgacgtcagtggggtctgtcaggccagctgacctcagtggggttccacagacccactgagtcagtaattttatcagtatgcaagacctaaagaaatagctcaaagggaaaacaatgttttatcaggttggtgcaaaagtagttgtggtttttgcgaagggtgattggaaaaaccacagttttgcaccaacctaatgtttacactatccgtcaaagaattaaggggaactatgatcttgtaacagggtctacatgattctaagacaatagataccaaacagctgagagaaagcaggtgcgagagtaagctggtttaatcattaatactgaatgtactgtagctttattttttctctccctgtctcttccctgattaattctataaaatttgtaggagtggtttcagttttcttcttgtaaatacaagaagttgggtttggaatattgggaatatgcctgatatggccaggataacatgttgaattttacataatatatactaacaggaaatcagtttatgtgctagacagaaaaataagatacagtctgaataatagctatcaaaatacttttattatttaagaatattaatacaatttctgctaattattctcaaatacattattttcttttcttgtgaaagcatatttttgtggtgattgttattctggccaacttggtaaaatattttatttctaatagtttgcatattggtttttaacagtttttccaatatttttaggtacatacataaagatttatgtcttcacttttcaatctttggacattttttatcttgtttaccttagtttgattagtacttagagaaagtatttcttaaacataattattctatttatattttgaaaaaaaacacatatatttccatattta

SEQ ID NO: 38323 - DNA, 1222 bp, Homo sapiens
gtcgctcaaactgttttactttttcattgtggaagacaaatgtaagtagttttgttataggaaaaacaggttcattttcctgctgtgtggcaacagactgattatactgagacagcagggtttgcagctgagaaagagtttaatgatcacaacactgtgagtgaggagatgaaaagagactctcgctgcagtctttaaagggattagagagggcaaaaagctggaagattgagagagttgactggtcagggtcaaggggataaaatcatcaggagtgtggaaactgtattttttggcgagtcagcctcttgcggagtgttcagatctgctgaygtcagtggggtctgtcaggccagctgacctcagtggggttccacagacccactgagtcagtaattttatcagtatgcaagacctaaagaaatagctcaaagggaaaacaatgttttatcaggttggtgcaaaagtagttgtggtttttgcgaagggtgattggaaaaaccacagttttgcaccaacctaatgtttacactatccgtcaaagaattaaggggaactatgatcttgtaacagggtctacatgattctaagacaatagataccaaacagctgagagaaagcaggtgcgagagtaagctggtttaatcattaatactgaatgtactgtagctttattttttctctccctgtctcttccctgattaattctataaaatttgtaggagtggtttcagttttcttcttgtaaatacaagaagttgggtttggaatattgggaatatgcctgatatggccaggataacatgttgaattttacataatatatactaacaggaaatcagtttatgtgctagacagaaaaataagatacagtctgaataatagctatcaaaatacttttattatttaagaatattaatacaatttctgctaattattctcaaatacattattttcttttcttgtgaaagcatatttttgtggtgattgttattctggccaacttggtaaaatattttatttctaatagtttgcatattggtttttaacagtttttccaatatttttaggtacatacataaagatttatgtcttcacttttcaatctttggacattttttatcttgtttaccttagtttgattagtacttagagaaagtatttcttaaacataattattctatttatattttgaaaaaaaacacatatatttccatattta

SEQ ID NO: 38324 - DNA, 1222 bp, Homo sapiens
gtcgctcaaactgttttactttttcattgtggaagacaaatgtaagtagttttgttataggaaaaacaggttcattttcctgctgtgtggcaacagactgattatactgagacagcagggtttgcagctgagaaagagtttaatgatcacaacactgtgagtgaggagatgaaaagagactctcgctgcagtctttaaagggattagagagggcaaaaagctggaagattgagagagttgactggtcagggtcaaggggataaaatcatcaggagtgtggaaactgtattttttggcgagtcagcctcttgcggagtgttcagatctgctgacgtcagtggggtctgtcaggccagctgacctcagtggggttccacagacccactgagtcagtaattttatcagtatgcaagacctaaagaaatagctcaaagggaaaacaatgttttatcaggttggtgcaaaagtagttgtggtttttgcgaagggtgattggaaaaaccacagttttgcaccaacctaatgtttacactatcygtcaaagaattaaggggaactatgatcttgtaacagggtctacatgattctaagacaatagataccaaacagctgagagaaagcaggtgcgagagtaagctggtttaatcattaatactgaatgtactgtagctttattttttctctccctgtctcttccctgattaattctataaaatttgtaggagtggtttcagttttcttcttgtaaatacaagaagttgggtttggaatattgggaatatgcctgatatggccaggataacatgttgaattttacataatatatactaacaggaaatcagtttatgtgctagacagaaaaataagatacagtctgaataatagctatcaaaatacttttattatttaagaatattaatacaatttctgctaattattctcaaatacattattttcttttcttgtgaaagcatatttttgtggtgattgttattctggccaacttggtaaaatattttatttctaatagtttgcatattggtttttaacagtttttccaatatttttaggtacatacataaagatttatgtcttcacttttcaatctttggacattttttatcttgtttaccttagtttgattagtacttagagaaagtatttcttaaacataattattctatttatattttgaaaaaaaacacatatatttccatattta

SEQ ID NO: 38325 - DNA, 1222 bp, Homo sapiens
gtcgctcaaactgttttactttttcattgtggaagacaaatgtaagtagttttgttataggaaaaacaggttcattttcctgctgtgtggcaacagactgattatactgagacagcagggtttgcagctgagaaagagtttaatgatcacaacactgtgagtgaggagatgaaaagagactctcgctgcagtctttaaagggattagagagggcaaaaagctggaagattgagagagttgactggtcagggtcaaggggataaaatcatcaggagtgtggaaactgtattttttggcgagtcagcctcttgcggagtgttcagatctgctgacgtcagtggggtctgtcaggccagctgacctcagtggggttccacagacccactgagtcagtaattttatcagtatgcaagacctaaagaaatagctcaaagggaaaacaatgttttatcaggttggtgcaaaagtagttgtggtttttgcgaagggtgattggaaaaaccacagttttgcaccaacctaatgtttacactatccgtcaaagaattaaggggaactatgatcttgtaacagggtctacatgattctaagacaatagataccaaacagctgagagaaagcaggtgcgagagtaagctggtttaatcattaatactgaatgtactgtagctttattttttctctccctgtctcttccctgattaattctataaaatttgtaggagtggtttcagttttcttcttgtaaatacaagaagttgggtttggaatattgggaatatgcctgatatggccaggataacatgtygaattttacataatatatactaacaggaaatcagtttatgtgctagacagaaaaataagatacagtctgaataatagctatcaaaatacttttattatttaagaatattaatacaatttctgctaattattctcaaatacattattttcttttcttgtgaaagcatatttttgtggtgattgttattctggccaacttggtaaaatattttatttctaatagtttgcatattggtttttaacagtttttccaatatttttaggtacatacataaagatttatgtcttcacttttcaatctttggacattttttatcttgtttaccttagtttgattagtacttagagaaagtatttcttaaacataattattctatttatattttgaaaaaaaacacatatatttccatattta

SEQ ID NO: 38326 - DNA, 1222 bp, Homo sapiens
gtcgctcaaactgttttactttttcattgtggaagacaaatgtaagtagttttgttataggaaaaacaggttcattttcctgctgtgtggcaacagactgattatactgagacagcagggtttgcagctgagaaagagtttaatgatcacaacactgtgagtgaggagatgaaaagagactctcgctgcagtctttaaagggattagagagggcaaaaagctggaagattgagagagttgactggtcagggtcaaggggataaaatcatcaggagtgtggaaactgtattttttggcgagtcagcctcttgcggagtgttcagatctgctgacgtcagtggggtctgtcaggccagctgacctcagtggggttccacagacccactgagtcagtaattttatcagtatgcaagacctaaagaaatagctcaaagggaaaacaatgttttatcaggttggtgcaaaagtagttgtggtttttgcgaagggtgattggaaaaaccacagttttgcaccaacctaatgtttacactatccgtcaaagaattaaggggaactatgatcttgtaacagggtctacatgattctaagacaatagataccaaacagctgagagaaagcaggtgcgagagtaagctggtttaatcattaatactgaatgtactgtagctttattttttctctccctgtctcttccctgattaattctataaaatttgtaggagtggtttcagttttcttcttgtaaatacaagaagttgggtttggaatattgggaatatgcctgatatggccaggataacatgttgaattttacataatatatactaacaggaaatcagtttatgtgctagacagaaaaataagatacagtctgaataatagctatcaaaatacttttattatttaagaatattaatacaatttctgctaattattctcaaatacattattttcttttcttgtgaaagcatatttttgtggtgattgttattctggccaacttggtaaaatattttatttctaatagtttgcatattggyttttaacagtttttccaatatttttaggtacatacataaagatttatgtcttcacttttcaatctttggacattttttatcttgtttaccttagtttgattagtacttagagaaagtatttcttaaacataattattctatttatattttgaaaaaaaacacatatatttccatattta

SEQ ID NO: 38327 - DNA, 2769 bp, Homo sapiens
gttacatccccagaactagaacatatgagcataaaacataaagagcataaaatttgttatatggattatatttgaatacaatatagacccttttcaagttaaaagaaaaaacaacatgttggaagctcattagaataattttctacaagctggttagctcctgctgtcacttctccttaggtgtcttgaagattttagagtaaatgttcttactttctacaggtgatcttaagtatctgttcaggtggaatgtttaatgaacaacagactgggatattaatagtcaaagacacaatctatcaggcctaaaatattccctgatggtaaatgggctccagcagatatcaatttaattttgtcagaaagttacacttatttttctaaagttgtgactgatttctatatctatttctatttttttataatctttttaatctatctgaaatcatacgaagacatcattttaaagcataccttattttaggcaacatgatataattgaaacgaagtaaaactatatatgtataatatatatttgttatatatgtgacagtattttcataaatgtagaattacacatatacacacatataatgcatatatacatatataaatatacacacatatataacatcctgaacataaaatgagttatacagaaatatataaatgagttatatataaagcagtgagttacatataaagtagtgaaatatgtatctatataaagtggttcatataaattacaaagtaacaacactttaatcaactttgatatctagaaactctcaacttggtaaataatttgcgaaaggtgttcccgatagtaggaacagcatctaaaaaggtcgaagacaaattatgtgagatgaaggactttctcttctggaatatatgatttgattacaaaagaccaacatatttgtctaaaaacaacaagaaaagctgtttgactacaaagacggtgaggattcgaggggctcagtgaatggatatagaaagaagactttgaggtgagctttatcttgtattctgctttcttcctgaagtcatctgtctactagtaagccacacagagcaataacttaatgtgattagaggggtgtgtaaaaagtactaggtaaggtgagctttcaacagtctcatgggctcagaggatacaagtactggaataaatggtcagaaaggcatttagaacttcataygctaaaattctgaggaaaagggacatataaaggtcaacccaatattctatattccttcttgccttgaggcatatactgatttcaaatcaacactaggttagaggtaaaaggttttttagagagtgttgtctaagaggctgagaagagaaatgcaaagtttgttaggatcaaagtgaaaagaaaagaataattgcaattcaaggagcattaaggatgagaagcactggaaaatacctaggatctgagttggatccactgaattgctataccctaggaataagggtaaattggaaataaatgtactagaatttaatacagcaactaattttaaaaactgaaaagataagcttaacaaatttagatgcatagagttgaaagctgtactggaagataaattagtagaaattatacagatggaagcacaacagggaaaagatattttcaataaatgtaaaaagttcagcatttacacacaagaacatatggaaacaacaaaaataaccctggggcagaccagagtggctacttttggaaacaaaagatggaaagggaaattgagattaaacaaaaaatataataagaggattaaatttcaaccctcaaatgaataaatttgctgaaactcaaaatcaaaatacttctaagataataattaataaattctactgaacgcagtggagaaaacaatgaattgtatctggaaatgtaagtaaaatcttaccagttgagcgttcctaaagaaaggtcatatactagttaaattccaccatcttgtctcttagagtgctgagatcttatctggaagctgctgatcaccagcttcccgtgttttctaaagctgctgatcaccagcttcaggtgttttctatctgttgggagactgcctttcaccggtaccagctggaatcaattattatgttagagaggcagtttaacagctgcctgaccatcacctgatgctctcttgacattcctggtatgtgtgggtgggcttctcctgccctgctcatgtctgcctacctactctaacagaaagaatggttttacaatcaactgtatatgaggctataccatcaatattgaaatatgctacataaataatatataaatgtccagctttgagggaattatttcgtcttgcaagtctagactgattcattgtttttcaatgagcaggcacaggacttcatagaaaaggaagttctggaactcttgttatccatagccttttcagttcatcaaaattgagtcaatcattattctagttttttatggctttaatcttgctgcttattctcactttttcttcaaaggagccacacgatcttctttgttataactctgactctcctaactcctgatgcaatacctaaggcctcctctgtttcctggattaactggaatgtcaattttaatattatcctcagttcagacctgctaatttgaagtcagatggcaaaatgttttatatacaaattttttagtgtatatgttattgaagctaaggttggttaaaaatgtatttatttggcatataattaaaatgtttaaaaataataatgca

SEQ ID NO: 38328 - DNA, 2769 bp, Homo sapiens
gttacatccccagaactagaacatatgagcataaaacataaagagcataaaatttgttatatggattatatttgaatacaatatagacccttttcaagttaaaagaaaaaacaacatgttggaagctcattagaataattttctacaagctggttagctcctgctgtcacttctccttaggtgtcttgaagattttagagtaaatgttcttactttctacaggtgatcttaagtatctgttcaggtggaatgtttaatgaacaacagactgggatattaatagtcaaagacacaatctatcaggcctaaaatattccctgatggtaaatgggctccagcagatatcaatttaattttgtcagaaagttacacttatttttctaaagttgtgactgatttctatatctatttctatttttttataatctttttaatctatctgaaatcatacgaagacatcattttaaagcataccttattttaggcaacatgatataattgaaacgaagtaaaactatatatgtataatatatatttgttatatatgtgacagtattttcataaatgtagaattacacatatacacacatataatgcatatatacatatataaatatacacacatatataacatcctgaacataaaatgagttatacagaaatatataaatgagttatatataaagcagtgagttacatataaagtagtgaaatatgtatctatataaagtggttcatataaattacaaagtaacaacactttaatcaactttgatatctagaaactctcaacttggtaaataatttgcgaaaggtgttcccgatagtaggaacagcatctaaaaaggtcgaagacaaattatgtgagatgaaggactttctcttctggaatatatgatttgattacaaaagaccaacatatttgtctaaaaacaacaagaaaagctgtttgactacaaagacggtgaggattcgaggggctcagtgaatggatatagaaagaagactttgaggtgagctttatcttgtattctgctttcttcctgaagtcatctgtctactagtaagccacacagagcaataacttaatgtgattagaggggtgtgtaaaaagtactaggtaaggtgagctttcaacagtctcatgggctcagaggatacaagtactggaataaatggtcagaaaggcatttagaacttcatacgctaaaattctgaggaaaagggacatataaaggtcaacccaatattctatattccttcttgccttgaggcatatactgatttcaaatcaacactaggttagaggtaaaaggttttttagagagtgttgtctaagaggctgagaagagaaatgcaaagtttgttaggatcaaagtgaaaagaaaagaataattgcaattcaaggagcattaaggatgagaagcactggaaaatacctaggatctgagttggatccactgaattgctataccctaggaataagggtaaattggaaataaatgtactagaatttaatacagcaactaattttaaaaactgaaaagataagcttaacaaatttagatgcatagagttgaaagctgtactggaagataaattagtagaaattatacagatggaagcacaacagggaaaagatattttcaataaatgtaaaaagttcagcatttacacacaagaacatatggaaacaacaaaaataaccctggggcagaccagagtggctacttttggaaacaaaagatggaaagggaaattgagattaaacaaaaaatataataagaggattaaatttcaaccctcaaatgaataaatttgctgaaactcaaaatcaaaatacttctaagataataattaataaattctactgaacgcagtggagaaaacaatgaattgtatctggaaatgtaagtaaaatcttaccagttgagcrttcctaaagaaaggtcatatactagttaaattccaccatcttgtctcttagagtgctgagatcttatctggaagctgctgatcaccagcttcccgtgttttctaaagctgctgatcaccagcttcaggtgttttctatctgttgggagactgcctttcaccggtaccagctggaatcaattattatgttagagaggcagtttaacagctgcctgaccatcacctgatgctctcttgacattcctggtatgtgtgggtgggcttctcctgccctgctcatgtctgcctacctactctaacagaaagaatggttttacaatcaactgtatatgaggctataccatcaatattgaaatatgctacataaataatatataaatgtccagctttgagggaattatttcgtcttgcaagtctagactgattcattgtttttcaatgagcaggcacaggacttcatagaaaaggaagttctggaactcttgttatccatagccttttcagttcatcaaaattgagtcaatcattattctagttttttatggctttaatcttgctgcttattctcactttttcttcaaaggagccacacgatcttctttgttataactctgactctcctaactcctgatgcaatacctaaggcctcctctgtttcctggattaactggaatgtcaattttaatattatcctcagttcagacctgctaatttgaagtcagatggcaaaatgttttatatacaaattttttagtgtatatgttattgaagctaaggttggttaaaaatgtatttatttggcatataattaaaatgtttaaaaataataatgca

SEQ ID NO: 38329 - DNA, 2769 bp, Homo sapiens
gttacatccccagaactagaacatatgagcataaaacataaagagcataaaatttgttatatggattatatttgaatacaatatagacccttttcaagttaaaagaaaaaacaacatgttggaagctcattagaataattttctacaagctggttagctcctgctgtcacttctccttaggtgtcttgaagattttagagtaaatgttcttactttctacaggtgatcttaagtatctgttcaggtggaatgtttaatgaacaacagactgggatattaatagtcaaagacacaatctatcaggcctaaaatattccctgatggtaaatgggctccagcagatatcaatttaattttgtcagaaagttacacttatttttctaaagttgtgactgatttctatatctatttctatttttttataatctttttaatctatctgaaatcatacgaagacatcattttaaagcataccttattttaggcaacatgatataattgaaacgaagtaaaactatatatgtataatatatatttgttatatatgtgacagtattttcataaatgtagaattacacatatacacacatataatgcatatatacatatataaatatacacacatatataacatcctgaacataaaatgagttatacagaaatatataaatgagttatatataaagcagtgagttacatataaagtagtgaaatatgtatctatataaagtggttcatataaattacaaagtaacaacactttaatcaactttgatatctagaaactctcaacttggtaaataatttgcgaaaggtgttcccgatagtaggaacagcatctaaaaaggtcgaagacaaattatgtgagatgaaggactttctcttctggaatatatgatttgattacaaaagaccaacatatttgtctaaaaacaacaagaaaagctgtttgactacaaagacggtgaggattcgaggggctcagtgaatggatatagaaagaagactttgaggtgagctttatcttgtattctgctttcttcctgaagtcatctgtctactagtaagccacacagagcaataacttaatgtgattagaggggtgtgtaaaaagtactaggtaaggtgagctttcaacagtctcatgggctcagaggatacaagtactggaataaatggtcagaaaggcatttagaacttcatacgctaaaattctgaggaaaagggacatataaaggtcaacccaatattctatattccttcttgccttgaggcatatactgatttcaaatcaacactaggttagaggtaaaaggttttttagagagtgttgtctaagaggctgagaagagaaatgcaaagtttgttaggatcaaagtgaaaagaaaagaataattgcaattcaaggagcattaaggatgagaagcactggaaaatacctaggatctgagttggatccactgaattgctataccctaggaataagggtaaattggaaataaatgtactagaatttaatacagcaactaattttaaaaactgaaaagataagcttaacaaatttagatgcatagagttgaaagctgtactggaagataaattagtagaaattatacagatggaagcacaacagggaaaagatattttcaataaatgtaaaaagttcagcatttacacacaagaacatatggaaacaacaaaaataaccctggggcagaccagagtggctacttttggaaacaaaagatggaaagggaaattgagattaaacaaaaaatataataagaggattaaatttcaaccctcaaatgaataaatttgctgaaactcaaaatcaaaatacttctaagataataattaataaattctactgaacgcagtggagaaaacaatgaattgtatctggaaatgtaagtaaaatcttaccagttgagcgttcctaaagaaaggtcatatactagttaaattccaccatcttgtctcttagagtgctgagatcttatctggaagctgctgatcaccagcttcccgtgttttctaaagctgctgatcaccagcttcaggtgttttctatctgttgggagactgcctttcaccggtaccagctggaatcaattaktatgttagagaggcagtttaacagctgcctgaccatcacctgatgctctcttgacattcctggtatgtgtgggtgggcttctcctgccctgctcatgtctgcctacctactctaacagaaagaatggttttacaatcaactgtatatgaggctataccatcaatattgaaatatgctacataaataatatataaatgtccagctttgagggaattatttcgtcttgcaagtctagactgattcattgtttttcaatgagcaggcacaggacttcatagaaaaggaagttctggaactcttgttatccatagccttttcagttcatcaaaattgagtcaatcattattctagttttttatggctttaatcttgctgcttattctcactttttcttcaaaggagccacacgatcttctttgttataactctgactctcctaactcctgatgcaatacctaaggcctcctctgtttcctggattaactggaatgtcaattttaatattatcctcagttcagacctgctaatttgaagtcagatggcaaaatgttttatatacaaattttttagtgtatatgttattgaagctaaggttggttaaaaatgtatttatttggcatataattaaaatgtttaaaaataataatgca

SEQ ID NO: 38330 - DNA, 2769 bp, Homo sapiens
gttacatccccagaactagaacatatgagcataaaacataaagagcataaaatttgttatatggattatatttgaatacaatatagacccttttcaagttaaaagaaaaaacaacatgttggaagctcattagaataattttctacaagctggttagctcctgctgtcacttctccttaggtgtcttgaagattttagagtaaatgttcttactttctacaggtgatcttaagtatctgttcaggtggaatgtttaatgaacaacagactgggatattaatagtcaaagacacaatctatcaggcctaaaatattccctgatggtaaatgggctccagcagatatcaatttaattttgtcagaaagttacacttatttttctaaagttgtgactgatttctatatctatttctatttttttataatctttttaatctatctgaaatcatacgaagacatcattttaaagcataccttattttaggcaacatgatataattgaaacgaagtaaaactatatatgtataatatatatttgttatatatgtgacagtattttcataaatgtagaattacacatatacacacatataatgcatatatacatatataaatatacacacatatataacatcctgaacataaaatgagttatacagaaatatataaatgagttatatataaagcagtgagttacatataaagtagtgaaatatgtatctatataaagtggttcatataaattacaaagtaacaacactttaatcaactttgatatctagaaactctcaacttggtaaataatttgcgaaaggtgttcccgatagtaggaacagcatctaaaaaggtcgaagacaaattatgtgagatgaaggactttctcttctggaatatatgatttgattacaaaagaccaacatatttgtctaaaaacaacaagaaaagctgtttgactacaaagacggtgaggattcgaggggctcagtgaatggatatagaaagaagactttgaggtgagctttatcttgtattctgctttcttcctgaagtcatctgtctactagtaagccacacagagcaataacttaatgtgattagaggggtgtgtaaaaagtactaggtaaggtgagctttcaacagtctcatgggctcagaggatacaagtactggaataaatggtcagaaaggcatttagaacttcatacgctaaaattctgaggaaaagggacatataaaggtcaacccaatattctatattccttcttgccttgaggcatatactgatttcaaatcaacactaggttagaggtaaaaggttttttagagagtgttgtctaagaggctgagaagagaaatgcaaagtttgttaggatcaaagtgaaaagaaaagaataattgcaattcaaggagcattaaggatgagaagcactggaaaatacctaggatctgagttggatccactgaattgctataccctaggaataagggtaaattggaaataaatgtactagaatttaatacagcaactaattttaaaaactgaaaagataagcttaacaaatttagatgcatagagttgaaagctgtactggaagataaattagtagaaattatacagatggaagcacaacagggaaaagatattttcaataaatgtaaaaagttcagcatttacacacaagaacatatggaaacaacaaaaataaccctggggcagaccagagtggctacttttggaaacaaaagatggaaagggaaattgagattaaacaaaaaatataataagaggattaaatttcaaccctcaaatgaataaatttgctgaaactcaaaatcaaaatacttctaagataataattaataaattctactgaacgcagtggagaaaacaatgaattgtatctggaaatgtaagtaaaatcttaccagttgagcgttcctaaagaaaggtcatatactagttaaattccaccatcttgtctcttagagtgctgagatcttatctggaagctgctgatcaccagcttcccgtgttttctaaagctgctgatcaccagcttcaggtgttttctatctgttgggagactgcctttcaccggtaccagctggaatcaattattatgttagagaggcagtttaacagctgcctgaccatcacctgatgctctcttgacattcctggtatgtgtgggtgggcttctcctgccctgytcatgtctgcctacctactctaacagaaagaatggttttacaatcaactgtatatgaggctataccatcaatattgaaatatgctacataaataatatataaatgtccagctttgagggaattatttcgtcttgcaagtctagactgattcattgtttttcaatgagcaggcacaggacttcatagaaaaggaagttctggaactcttgttatccatagccttttcagttcatcaaaattgagtcaatcattattctagttttttatggctttaatcttgctgcttattctcactttttcttcaaaggagccacacgatcttctttgttataactctgactctcctaactcctgatgcaatacctaaggcctcctctgtttcctggattaactggaatgtcaattttaatattatcctcagttcagacctgctaatttgaagtcagatggcaaaatgttttatatacaaattttttagtgtatatgttattgaagctaaggttggttaaaaatgtatttatttggcatataattaaaatgtttaaaaataataatgca

SEQ ID NO: 38331 - DNA, 2769 bp, Homo sapiens
gttacatccccagaactagaacatatgagcataaaacataaagagcataaaatttgttatatggattatatttgaatacaatatagacccttttcaagttaaaagaaaaaacaacatgttggaagctcattagaataattttctacaagctggttagctcctgctgtcacttctccttaggtgtcttgaagattttagagtaaatgttcttactttctacaggtgatcttaagtatctgttcaggtggaatgtttaatgaacaacagactgggatattaatagtcaaagacacaatctatcaggcctaaaatattccctgatggtaaatgggctccagcagatatcaatttaattttgtcagaaagttacacttatttttctaaagttgtgactgatttctatatctatttctatttttttataatctttttaatctatctgaaatcatacgaagacatcattttaaagcataccttattttaggcaacatgatataattgaaacgaagtaaaactatatatgtataatatatatttgttatatatgtgacagtattttcataaatgtagaattacacatatacacacatataatgcatatatacatatataaatatacacacatatataacatcctgaacataaaatgagttatacagaaatatataaatgagttatatataaagcagtgagttacatataaagtagtgaaatatgtatctatataaagtggttcatataaattacaaagtaacaacactttaatcaactttgatatctagaaactctcaacttggtaaataatttgcgaaaggtgttcccgatagtaggaacagcatctaaaaaggtcgaagacaaattatgtgagatgaaggactttctcttctggaatatatgatttgattacaaaagaccaacatatttgtctaaaaacaacaagaaaagctgtttgactacaaagacggtgaggattcgaggggctcagtgaatggatatagaaagaagactttgaggtgagctttatcttgtattctgctttcttcctgaagtcatctgtctactagtaagccacacagagcaataacttaatgtgattagaggggtgtgtaaaaagtactaggtaaggtgagctttcaacagtctcatgggctcagaggatacaagtactggaataaatggtcagaaaggcatttagaacttcatacgctaaaattctgaggaaaagggacatataaaggtcaacccaatattctatattccttcttgccttgaggcatatactgatttcaaatcaacactaggttagaggtaaaaggttttttagagagtgttgtctaagaggctgagaagagaaatgcaaagtttgttaggatcaaagtgaaaagaaaagaataattgcaattcaaggagcattaaggatgagaagcactggaaaatacctaggatctgagttggatccactgaattgctataccctaggaataagggtaaattggaaataaatgtactagaatttaatacagcaactaattttaaaaactgaaaagataagcttaacaaatttagatgcatagagttgaaagctgtactggaagataaattagtagaaattatacagatggaagcacaacagggaaaagatattttcaataaatgtaaaaagttcagcatttacacacaagaacatatggaaacaacaaaaataaccctggggcagaccagagtggctacttttggaaacaaaagatggaaagggaaattgagattaaacaaaaaatataataagaggattaaatttcaaccctcaaatgaataaatttgctgaaactcaaaatcaaaatacttctaagataataattaataaattctactgaacgcagtggagaaaacaatgaattgtatctggaaatgtaagtaaaatcttaccagttgagcgttcctaaagaaaggtcatatactagttaaattccaccatcttgtctcttagagtgctgagatcttatctggaagctgctgatcaccagcttcccgtgttttctaaagctgctgatcaccagcttcaggtgttttctatctgttgggagactgcctttcaccggtaccagctggaatcaattattatgttagagaggcagtttaacagctgcctgaccatcacctgatgctctcttgacattcctggtatgtgtgggtgggcttctcctgccctgctcatgtctgcctacctactcyaacagaaagaatggttttacaatcaactgtatatgaggctataccatcaatattgaaatatgctacataaataatatataaatgtccagctttgagggaattatttcgtcttgcaagtctagactgattcattgtttttcaatgagcaggcacaggacttcatagaaaaggaagttctggaactcttgttatccatagccttttcagttcatcaaaattgagtcaatcattattctagttttttatggctttaatcttgctgcttattctcactttttcttcaaaggagccacacgatcttctttgttataactctgactctcctaactcctgatgcaatacctaaggcctcctctgtttcctggattaactggaatgtcaattttaatattatcctcagttcagacctgctaatttgaagtcagatggcaaaatgttttatatacaaattttttagtgtatatgttattgaagctaaggttggttaaaaatgtatttatttggcatataattaaaatgtttaaaaataataatgca

SEQ ID NO: 38332 - DNA, 2769 bp, Homo sapiens
gttacatccccagaactagaacatatgagcataaaacataaagagcataaaatttgttatatggattatatttgaatacaatatagacccttttcaagttaaaagaaaaaacaacatgttggaagctcattagaataattttctacaagctggttagctcctgctgtcacttctccttaggtgtcttgaagattttagagtaaatgttcttactttctacaggtgatcttaagtatctgttcaggtggaatgtttaatgaacaacagactgggatattaatagtcaaagacacaatctatcaggcctaaaatattccctgatggtaaatgggctccagcagatatcaatttaattttgtcagaaagttacacttatttttctaaagttgtgactgatttctatatctatttctatttttttataatctttttaatctatctgaaatcatacgaagacatcattttaaagcataccttattttaggcaacatgatataattgaaacgaagtaaaactatatatgtataatatatatttgttatatatgtgacagtattttcataaatgtagaattacacatatacacacatataatgcatatatacatatataaatatacacacatatataacatcctgaacataaaatgagttatacagaaatatataaatgagttatatataaagcagtgagttacatataaagtagtgaaatatgtatctatataaagtggttcatataaattacaaagtaacaacactttaatcaactttgatatctagaaactctcaacttggtaaataatttgcgaaaggtgttcccgatagtaggaacagcatctaaaaaggtcgaagacaaattatgtgagatgaaggactttctcttctggaatatatgatttgattacaaaagaccaacatatttgtctaaaaacaacaagaaaagctgtttgactacaaagacggtgaggattcgaggggctcagtgaatggatatagaaagaagactttgaggtgagctttatcttgtattctgctttcttcctgaagtcatctgtctactagtaagccacacagagcaataacttaatgtgattagaggggtgtgtaaaaagtactaggtaaggtgagctttcaacagtctcatgggctcagaggatacaagtactggaataaatggtcagaaaggcatttagaacttcatacgctaaaattctgaggaaaagggacatataaaggtcaacccaatattctatattccttcttgccttgaggcatatactgatttcaaatcaacactaggttagaggtaaaaggttttttagagagtgttgtctaagaggctgagaagagaaatgcaaagtttgttaggatcaaagtgaaaagaaaagaataattgcaattcaaggagcattaaggatgagaagcactggaaaatacctaggatctgagttggatccactgaattgctataccctaggaataagggtaaattggaaataaatgtactagaatttaatacagcaactaattttaaaaactgaaaagataagcttaacaaatttagatgcatagagttgaaagctgtactggaagataaattagtagaaattatacagatggaagcacaacagggaaaagatattttcaataaatgtaaaaagttcagcatttacacacaagaacatatggaaacaacaaaaataaccctggggcagaccagagtggctacttttggaaacaaaagatggaaagggaaattgagattaaacaaaaaatataataagaggattaaatttcaaccctcaaatgaataaatttgctgaaactcaaaatcaaaatacttctaagataataattaataaattctactgaacgcagtggagaaaacaatgaattgtatctggaaatgtaagtaaaatcttaccagttgagcgttcctaaagaaaggtcatatactagttaaattccaccatcttgtctcttagagtgctgagatcttatctggaagctgctgatcaccagcttcccgtgttttctaaagctgctgatcaccagcttcaggtgttttctatctgttgggagactgcctttcaccggtaccagctggaatcaattattatgttagagaggcagtttaacagctgcctgaccatcacctgatgctctcttgacattcctggtatgtgtgggtgggcttctcctgccctgctcatgtctgcctacctactctaacagaaagaatggttttacaatcaactgtatatgaggctataccatcaatattgaaatatgctacataaataatatataaatgtccagctttgagggaaktatttcgtcttgcaagtctagactgattcattgtttttcaatgagcaggcacaggacttcatagaaaaggaagttctggaactcttgttatccatagccttttcagttcatcaaaattgagtcaatcattattctagttttttatggctttaatcttgctgcttattctcactttttcttcaaaggagccacacgatcttctttgttataactctgactctcctaactcctgatgcaatacctaaggcctcctctgtttcctggattaactggaatgtcaattttaatattatcctcagttcagacctgctaatttgaagtcagatggcaaaatgttttatatacaaattttttagtgtatatgttattgaagctaaggttggttaaaaatgtatttatttggcatataattaaaatgtttaaaaataataatgca

SEQ ID NO: 38333 - DNA, 2769 bp, Homo sapiens
gttacatccccagaactagaacatatgagcataaaacataaagagcataaaatttgttatatggattatatttgaatacaatatagacccttttcaagttaaaagaaaaaacaacatgttggaagctcattagaataattttctacaagctggttagctcctgctgtcacttctccttaggtgtcttgaagattttagagtaaatgttcttactttctacaggtgatcttaagtatctgttcaggtggaatgtttaatgaacaacagactgggatattaatagtcaaagacacaatctatcaggcctaaaatattccctgatggtaaatgggctccagcagatatcaatttaattttgtcagaaagttacacttatttttctaaagttgtgactgatttctatatctatttctatttttttataatctttttaatctatctgaaatcatacgaagacatcattttaaagcataccttattttaggcaacatgatataattgaaacgaagtaaaactatatatgtataatatatatttgttatatatgtgacagtattttcataaatgtagaattacacatatacacacatataatgcatatatacatatataaatatacacacatatataacatcctgaacataaaatgagttatacagaaatatataaatgagttatatataaagcagtgagttacatataaagtagtgaaatatgtatctatataaagtggttcatataaattacaaagtaacaacactttaatcaactttgatatctagaaactctcaacttggtaaataatttgcgaaaggtgttcccgatagtaggaacagcatctaaaaaggtcgaagacaaattatgtgagatgaaggactttctcttctggaatatatgatttgattacaaaagaccaacatatttgtctaaaaacaacaagaaaagctgtttgactacaaagacggtgaggattcgaggggctcagtgaatggatatagaaagaagactttgaggtgagctttatcttgtattctgctttcttcctgaagtcatctgtctactagtaagccacacagagcaataacttaatgtgattagaggggtgtgtaaaaagtactaggtaaggtgagctttcaacagtctcatgggctcagaggatacaagtactggaataaatggtcagaaaggcatttagaacttcatacgctaaaattctgaggaaaagggacatataaaggtcaacccaatattctatattccttcttgccttgaggcatatactgatttcaaatcaacactaggttagaggtaaaaggttttttagagagtgttgtctaagaggctgagaagagaaatgcaaagtttgttaggatcaaagtgaaaagaaaagaataattgcaattcaaggagcattaaggatgagaagcactggaaaatacctaggatctgagttggatccactgaattgctataccctaggaataagggtaaattggaaataaatgtactagaatttaatacagcaactaattttaaaaactgaaaagataagcttaacaaatttagatgcatagagttgaaagctgtactggaagataaattagtagaaattatacagatggaagcacaacagggaaaagatattttcaataaatgtaaaaagttcagcatttacacacaagaacatatggaaacaacaaaaataaccctggggcagaccagagtggctacttttggaaacaaaagatggaaagggaaattgagattaaacaaaaaatataataagaggattaaatttcaaccctcaaatgaataaatttgctgaaactcaaaatcaaaatacttctaagataataattaataaattctactgaacgcagtggagaaaacaatgaattgtatctggaaatgtaagtaaaatcttaccagttgagcgttcctaaagaaaggtcatatactagttaaattccaccatcttgtctcttagagtgctgagatcttatctggaagctgctgatcaccagcttcccgtgttttctaaagctgctgatcaccagcttcaggtgttttctatctgttgggagactgcctttcaccggtaccagctggaatcaattattatgttagagaggcagtttaacagctgcctgaccatcacctgatgctctcttgacattcctggtatgtgtgggtgggcttctcctgccctgctcatgtctgcctacctactctaacagaaagaatggttttacaatcaactgtatatgaggctataccatcaatattgaaatatgctacataaataatatataaatgtccagctttgagggaattatttcgtcttgcaagtctagactgattcattgtttttcaatgagcaggcacaggacttcatagaaaaggaagttctggaactcttgttatccatagccttttcagttcatcaaaattgagtcaatcattattctagttttttatggctttaatcttgctgcttattctcactttttcttcaaaggagccacacgatyttctttgttataactctgactctcctaactcctgatgcaatacctaaggcctcctctgtttcctggattaactggaatgtcaattttaatattatcctcagttcagacctgctaatttgaagtcagatggcaaaatgttttatatacaaattttttagtgtatatgttattgaagctaaggttggttaaaaatgtatttatttggcatataattaaaatgtttaaaaataataatgca

SEQ ID NO: 38334 - DNA, 661 bp, Homo sapiens
tttgtcaaaacaaaaaatctgtacaatacagagtatttgtactgtacaaatacactaatataaatgatgaacttcagttaaactaatgtattgatattggttcatcaattgtaataaatatattacactgagaaaraatgttaaaatagggcaaacggtgtggggtaggagttccagcctatggaagctctgcattttctgccatttttggtaaatcaaaaccttttccaagaaagactctgttaaaaacatttattcctctctgatattcctaacaaattgaggtcctgaatcattgcaaaggacacttgactctgtaatttatcctcatattttgtcatcaacaaaattccttcaataagaagaaaagtgttatggcttctatatagccataacaatattaaagttctttaacactttctagataaccttggtatgtttttaatactctcattttaagaatatggccagttttatggagtgcagataggtttatttctcaaaatttgctaatgtcagactttagtcatgttaattaaaggtaaaacattgttgtactggattaaaatgtttttaatgctgtatgaaaactctagattttattttgggaatccatagtattcatagaacattaaaaataagctgaataaaaaacataata

SEQ ID NO: 38335 - DNA, 565 bp, Homo sapiens
aaattagccttggaatgtgaaggcagatgacaggcagagggaaatgacaaaatgctaaattgttgcaatttctttggtgtactttccatttgcagagaatatctgcaatccctaggaacaaacataaggattatcattgaatccctatgaacaagcaccctaagaatgtcataagcttatttaaaatatttgattctgcctcaatgcaatcatgctgaaattagaccaaataaattaaaaataagtatattcatcaatattygaaagacactaatttattcatctttactcaggcagattcaatatttatttaacatctactttgtgcaagcacatgacagcattgaatgaatcggcctttgatgaggatcgatcagccttcaggcccagatgagaaaagtctcagtatatcatgtttagatgtccctaaatctaatcccgtttatatttggcattttctggtcacttattaaatactgtagtcagtactctgtttctattatctttattattccactcttactatgtttctgttaaaagtgggaaatgtaaaatacaaaatata

SEQ ID NO: 38336 - DNA, 572 bp, Homo sapiens
aatgcaattttggtttgttattgtttttgtttcatgaatagaataattttcaaaataaatgaagtttgttagtagtttcaacctccctccctacccaaactcagatattcagtttcatttttctaatgctccaaaattgtcttcattctttccattcatggtattactatagtattcaaatttttaaaaacactcaattgttgaatcttttcagtgtcaatatrttaaaattaagcacaagcaagcattaattacattttaaaatgatgaaattgaaactaagaatactcaagaaacttaattttgggcaacttaagccagaaacaaaaggacaggtgttcaaatccatgtcagcctgggcccgaagtacactcctcaccatccctctaaataatctcttgttcctctctcaacctgtccatgcgtccttcaatgttactttcttctctagccctgataaaaatataaaagtactgattcctatataatattaatttatagtgcatactattcctttatatgaaaagaatgtgaattaaaagtaatatttaaagaaagaaggttattgtgaa

SEQ ID NO: 38337 - DNA, 572 bp, Homo sapiens
aatgcaattttggtttgttattgtttttgtttcatgaatagaataattttcaaaataaatgaagtttgttagtagtttcaacctccctccctacccaaactcagatattcagtttcatttttctaatgctccaaaattgtcttcattctttccattcatggtattactatagtattcaaatttttaaaaacactcaattgttgaatcttttcagtgtcaatatattaaaattargcacaagcaagcattaattacattttaaaatgatgaaattgaaactaagaatactcaagaaacttaattttgggcaacttaagccagaaacaaaaggacaggtgttcaaatccatgtcagcctgggcccgaagtacactcctcaccatccctctaaataatctcttgttcctctctcaacctgtccatgcgtccttcaatgttactttcttctctagccctgataaaaatataaaagtactgattcctatataatattaatttatagtgcatactattcctttatatgaaaagaatgtgaattaaaagtaatatttaaagaaagaaggttattgtgaa

SEQ ID NO: 38338 - DNA, 572 bp, Homo sapiens
aatgcaattttggtttgttattgtttttgtttcatgaatagaataattttcaaaataaatgaagtttgttagtagtttcaacctccctccctacccaaactcagatattcagtttcatttttctaatgctccaaaattgtcttcattctttccattcatggtattactatagtattcaaatttttaaaaacactcaattgttgaatcttttcagtgtcaatatattaaaattaagcacaagcaagcattaattacattttaaaatgatgaaattgaaactaagaatactcaagaaacttaattttggkcaacttaagccagaaacaaaaggacaggtgttcaaatccatgtcagcctgggcccgaagtacactcctcaccatccctctaaataatctcttgttcctctctcaacctgtccatgcgtccttcaatgttactttcttctctagccctgataaaaatataaaagtactgattcctatataatattaatttatagtgcatactattcctttatatgaaaagaatgtgaattaaaagtaatatttaaagaaagaaggttattgtgaa

SEQ ID NO: 38339 - DNA, 572 bp, Homo sapiens
aatgcaattttggtttgttattgtttttgtttcatgaatagaataattttcaaaataaatgaagtttgttagtagtttcaacctccctccctacccaaactcagatattcagtttcatttttctaatgctccaaaattgtcttcattctttccattcatggtattactatagtattcaaatttttaaaaacactcaattgttgaatcttttcagtgtcaatatattaaaattaagcacaagcaagcattaattacattttaaaatgatgaaattgaaactaagaatactcaagaaacttaattttgggcaacttaagccagaaacaaaaggacaggtgttcaaatccatgtcagcctgggcccgaagtacactcctcaccatccctctaaataatctcttgttcctctctcaacctgtccatgcgtccttcaatgttactttcttctctagccctgataaaaatataaaagkactgattcctatataatattaatttatagtgcatactattcctttatatgaaaagaatgtgaattaaaagtaatatttaaagaaagaaggttattgtgaa

SEQ ID NO: 38340 - DNA, 572 bp, Homo sapiens
aatgcaattttggtttgttattgtttttgtttcatgaatagaataattttcaaaataaatgaagtttgttagtagtttcaacctccctccctacccaaactcagatattcagtttcatttttctaatgctccaaaattgtcttcattctttccattcatggtattactatagtattcaaatttttaaaaacactcaattgttgaatcttttcagtgtcaatatattaaaattaagcacaagcaagcattaattacattttaaaatgatgaaattgaaactaagaatactcaagaaacttaattttgggcaacttaagccagaaacaaaaggacaggtgttcaaatccatgtcagcctgggcccgaagtacactcctcaccatccctctaaataatctcttgttcctctctcaacctgtccatgcgtccttcaatgttactttcttctctagccctgataaaaatataaaagtactgattcctatataatattaatttatagtgcatactatycctttatatgaaaagaatgtgaattaaaagtaatatttaaagaaagaaggttattgtgaa

SEQ ID NO: 38341 - DNA, 495 bp, Homo sapiens
tagacaatgtttttcaaaagccaggaaaaaaaaagaaagaaaataacttcacacaatctttgtgagatgtataacaaagcctgatagattaatttttctaaacaagatacagagctggttacaaatttcatttctggctataaaattttagaaataatcatttgaaaataataaaattacatactttaaagtgatacaatgcaaattttacacagactgggcaacagatctcattttggggaatcataataattaatattttcttaaatatattgtcttaataaaggaaattatatgttattctagtgttctagatgcagtattggtattattttgtcatgcagccaattagctgtaggcatatgaccaattamctacaaacccagtgacttctgacaggtttttaaatacataatacgcccaaaaaaagggttagacgatagactgtcccaaattatcacattattttgcataagtccaggagtggaggaaaca

SEQ ID NO: 38342 - DNA, 468 bp, Homo sapiens
ttgttgaagattttttagtttctaaggaaatgctattattagtagttttattgatataagccagatgtgtttaagaacttccactttgacttccagtttctgctatgatctcattttgtgaggagcatgtgtttatttttgtatgttcttaaatctaaaatgtatcacaaaataactcatctttttttttyccctgctgccttccagatatgatgtagttaacacttcccatttgaggacagtcttcagggtgcttgctactaagagaaatgttcttagataggagcagtaaggaaaactaactcattctggttataatgttagtgggagcaggtttaaatattgctgccagttatgccatggtccaagttgcagaatgtgagttgcatgaagcaatcagtccacagtaacaggttagctgggaaacagggtaaagtataggtttaatgggtataaaatatttatggg

SEQ ID NO: 38343 - DNA, 1178 bp, Homo sapiens
tttcaaatacatgatttattaggtcatttggttagagggggaaaggtaaaaatgataacctaattctgaaattagaaactcaatgctacttcctattgtctgtctgttttgggagccaggtcattcacatgtgtcatccaccaaggtcccgtatcttccttcagtgaattctgttgccgggtaggattaaatttcattagtattatgcagagctacaaggtgtcaccagctggtacaaatgaccagtttcaacttttgaatcacatttacaataaatatttaacaatgcagaaagtacatttttcacaaattagttataaattacctatttggaattttttttaattttttttcctgaaactcaaccactactcactaaaccccatatacagtggaataatgatatgttctccagcaagaacaggtcgtaatattatttttagtgtcagaaactcttcataatatccagtagaaataaacagaggtatactgttctatacttttcaaattattcacttttgtgtgatcagagtacatgacttaatttataaagagtaaactagagtgtttgcttaggtgactaatttgaagtaaagtgtattatgtaattgggtacaggcaattggagtcatgaaatttgacaaccgttctgttataaaaattttgtgtaaatacagatcattctaaaacaagattcctaacgtttgaaaaataaaaagtacaggatgtttatattacttgcacttactaaaggcatataccacttctggcaaatgtgaccataagcagatggtcttgatgttctttcacttagcctaatgtcaaaagaaactaaagtgtaaactatgtgaaccattagcttttgaagacctgattttcaaaaagagaacaaatcttagaacaaatctaaataggtaattagattaagamaaaataaacataataattggattcgtaataattttatgtctagtttgtctttcaggtaaaaccgcagagatggcggccacccattcccctgggaactcagttcatctcaagcagtctccagcctgctgccaccggctggctggaattccaagccagtgggtcttaacttgtgacgtaccaggggagtggggcccacagaatgaggctgcttggctccctggattcagccccattcctaggcgaatgca

SEQ ID NO: 38344 - DNA, 1178 bp, Homo sapiens
tttcaaatacatgatttattaggtcatttggttagagggggaaaggtaaaaatgataacctaattctgaaattagaaactcaatgctacttcctattgtctgtctgttttgggagccaggtcattcacatgtgtcatccaccaaggtcccgtatcttccttcagtgaattctgttgccgggtaggattaaatttcattagtattatgcagagctacaaggtgtcaccagctggtacaaatgaccagtttcaacttttgaatcacatttacaataaatatttaacaatgcagaaagtacatttttcacaaattagttataaattacctatttggaattttttttaattttttttcctgaaactcaaccactactcactaaaccccatatacagtggaataatgatatgttctccagcaagaacaggtcgtaatattatttttagtgtcagaaactcttcataatatccagtagaaataaacagaggtatactgttctatacttttcaaattattcacttttgtgtgatcagagtacatgacttaatttataaagagtaaactagagtgtttgcttaggtgactaatttgaagtaaagtgtattatgtaattgggtacaggcaattggagtcatgaaatttgacaaccgttctgttataaaaattttgtgtaaatacagatcattctaaaacaagattcctaacgtttgaaaaataaaaagtacaggatgtttatattacttgcacttactaaaggcatataccacttctggcaaatgtgaccataagcagatggtcttgatgttctttcacttagcctaatgtcaaaagaaactaaagtgtaaactatgtgaaccattagcttttgaagacctgattttcaaaaagagaacaaatcttagaacaaatctaaataggtaattagattaagaaaaaataaacataataattggattcgtaataattttatgtctagtttgtctttcaggtaaaaccgcagagatggcggccacccattcccctgggaactcagttcatctcaagcagtctccagcctgctgccaccggctggctggaattccaagccagtgggtctyaacttgtgacgtaccaggggagtggggcccacagaatgaggctgcttggctccctggattcagccccattcctaggcgaatgca

SEQ ID NO: 38345 - DNA, 793 bp, Homo sapiens
tatctcactgcagcctcagctctagggttcaggtgatcctaccgcctcagcctcccgagtagctgggactacaggcatgcaccaccacacttaagttttaaattttttttgtggagactgggagtctcactatgttgcccaggctggtctcaaactcctggcctcaagtgatcttcccacctcagccttccacaatgcyggtattagagtttccagagccaccatgcccagcctccattctacattgagtcctgagttggatggtagaaaagagcacagcctcaggaagcccctagtttgagggcaaagacatactctcaaatccagttgtgaggttcccccctttctgctcacagagtcgtggaaacagttttcttcccagtctttgataccaaaaaggaggtggagatgactgggaattccacctggctggcccagcagaagctcgatgctcaaaggtggacaccaagagctgcaggttaccctgcccacacccacccattcctaaagccagcctgtggtcgctcatgagcagaggtgactgtgttagtcccctccttgtgccctcatgctttgcaatgtgactttgccattcctcccatcaggaggtggagtgtgttccccaccccttgaatctgggctggtgtattagtcagtgttctccagagaaacagaaccaacaggatgtgtatatatatagaaggacatttattttaaggaattggctcatgtaatcatggaggcttggtaagtccaaaatttgcagagtaggctggcaggctggagattcaag

SEQ ID NO: 38346 - DNA, 516 bp, Homo sapiens
ctttaaagggacccctccatctgaagaaggtcaccttttaatgagctgatataaatttctaaaggtaccgatgagtcactcaatgcatgggatggacaggcattgctgcactctgtcttctagctctccaatgtgtccctggcatgattggcacactccaggaccagccaacttcacagttcacagatttggaggcaagcatctcccagagcagagctagaagaccagtgaagcttggggcattgttctgcaagggactgtgttagagggcaggccaacttcatgcaacttattaatgcaagggtggtagttcccttcaatatctccagccaaccacgtatcttgaacacttatgttcrtgccactgcccctaggatgtagattatatgttgagtcacattgtttgtgataaagcatttttaaagtacattatgacacaggtcatatagcccaattaaaggtgagtaactcaggcttagaaaaataaagatatgtccacggtgacccagctagtta

SEQ ID NO: 38347 - DNA, 587 bp, Homo sapiens
ggctcacacctgtaatcccagtactttggtaggctgggacgggcagatcacttgaggtcaggagtttgagactagcctggccaacattgtgaaaccccttctctactaaaatacaaaaattagctgggcatggtggtgtgtgcctgtagtcccagctacttgggaggctgaggcaggagaatcgcttgaacctggaaggcagaggttgcagtgagccaagattgcacccttgcactccagcctgggtgacagagtgagactcagtctcaaaaaaaaaaaaaaaaagaaaaaraaaaagaaaaagaaaaccaaaaaacaaaatgagcaactcccattttaaattgcctgccatgctgagtagagtgaatcatccctctgtccagcacgtccatgctgcatattcttcccgctcattagtcacttggtagctgtcttggctgtcagatcaactgctgaggtatcgcagtgcttatgttcaggtaacccttacttcatttaataacgacccctggatgcaaaagtggtgatgcttaacatcatcacaacataattattattaacaataataactgagaataaaatagaac

SEQ ID NO: 38348 - DNA, 587 bp, Homo sapiens
ggctcacacctgtaatcccagtactttggtaggctgggacgggcagatcacttgaggtcaggagtttgagactagcctggccaacattgtgaaaccccttctctactaaaatacaaaaattagctgggcatggtggtgtgtgcctgtagtcccagctacttgggaggctgaggcaggagaatcgcttgaacctggaaggcagaggttgcagtgagccaagattgcacccttgcactccagcctgggtgacagagtgagactcagtctcaaaaaaaaaaaaaaaaagaaaaagaraaagaaaaagaaaaccaaaaaacaaaatgagcaactcccattttaaattgcctgccatgctgagtagagtgaatcatccctctgtccagcacgtccatgctgcatattcttcccgctcattagtcacttggtagctgtcttggctgtcagatcaactgctgaggtatcgcagtgcttatgttcaggtaacccttacttcatttaataacgacccctggatgcaaaagtggtgatgcttaacatcatcacaacataattattattaacaataataactgagaataaaatagaac

SEQ ID NO: 38349 - DNA, 937 bp, Homo sapiens
acagtttctgcagcatcagaagaagaaactgaggcccaggcacagaggcaacttgcctcagagtatatgatgccttggctggggatggggtagtagacctagttcccaggccatcccaacttggacccacgagatgtcccctgccccagtccggctctcagggttttttgtactgtgtcaaaggatgtagagggcttcactttccctggaaatgtgctttagattgctttttgggggaatcttgcaaactgggatgtttggacttctctcctgccctatgctgaatttggagggagccattttctgtctgggaaatgctttagatcttggagccactggagatgttgaagaattgaaaaaggccaggtggggaccctcaggtacccacagtgcttctccccggtgaggaggcaccagtgaggaagtggggtctgatatctggtgttacctgagaaaaaggtgggacggaaaaagaagagccttctaactggtccagtaaggccactctgggacaaatcrcagagtcatccaaggtggcagttatcttagctataaggtggttttcagtgggaacttttcactgaggaccttcgttggttgccagcagtggaagttcaagctctttcctgccctgttgtagggtggaaagaccctcttggaggaaggagggggaagcagtgctggccctctctggagaagtccctaagcctctaagggcctgctgttgtcaccctcaggacacgccacctttgagctgggagccacctggatccatggctcccatgggaaccctatctatcatctagcagaagccaacggcctcctggaagagacaaccgatggggaacgcagcgtgggccgcatcagcctctattccaagaatggcgtggcctgctaccttaccaaccacggccgcaggatccccaaggacgtggtt

SEQ ID NO: 38350 - DNA, 937 bp, Homo sapiens
acagtttctgcagcatcagaagaagaaactgaggcccaggcacagaggcaacttgcctcagagtatatgatgccttggctggggatggggtagtagacctagttcccaggccatcccaacttggacccacgagatgtcccctgccccagtccggctctcagggttttttgtactgtgtcaaaggatgtagagggcttcactttccctggaaatgtgctttagattgctttttgggggaatcttgcaaactgggatgtttggacttctctcctgccctatgctgaatttggagggagccattttctgtctgggaaatgctttagatcttggagccactggagatgttgaagaattgaaaaaggccaggtggggaccctcaggtacccacagtgcttctccccggtgaggaggcaccagtgaggaagtggggtctgatatctggtgttacctgagaaaaaggtgggacggaaaaagaagagccttctaactggtccagtaaggccactctgggacaaatcacagagtcatccaaggtggcagttatcttagctataaggtggttttcagtgggaacttttcactgaggaccttcrttggttgccagcagtggaagttcaagctctttcctgccctgttgtagggtggaaagaccctcttggaggaaggagggggaagcagtgctggccctctctggagaagtccctaagcctctaagggcctgctgttgtcaccctcaggacacgccacctttgagctgggagccacctggatccatggctcccatgggaaccctatctatcatctagcagaagccaacggcctcctggaagagacaaccgatggggaacgcagcgtgggccgcatcagcctctattccaagaatggcgtggcctgctaccttaccaaccacggccgcaggatccccaaggacgtggtt

SEQ ID NO: 38351 - DNA, 937 bp, Homo sapiens
acagtttctgcagcatcagaagaagaaactgaggcccaggcacagaggcaacttgcctcagagtatatgatgccttggctggggatggggtagtagacctagttcccaggccatcccaacttggacccacgagatgtcccctgccccagtccggctctcagggttttttgtactgtgtcaaaggatgtagagggcttcactttccctggaaatgtgctttagattgctttttgggggaatcttgcaaactgggatgtttggacttctctcctgccctatgctgaatttggagggagccattttctgtctgggaaatgctttagatcttggagccactggagatgttgaagaattgaaaaaggccaggtggggaccctcaggtacccacagtgcttctccccggtgaggaggcaccagtgaggaagtggggtctgatatctggtgttacctgagaaaaaggtgggacggaaaaagaagagccttctaactggtccagtaaggccactctgggacaaatcacagagtcatccaaggtggcagttatcttagctataaggtggttttcagtgggaacttttcactgaggaccttcgttgsttgccagcagtggaagttcaagctctttcctgccctgttgtagggtggaaagaccctcttggaggaaggagggggaagcagtgctggccctctctggagaagtccctaagcctctaagggcctgctgttgtcaccctcaggacacgccacctttgagctgggagccacctggatccatggctcccatgggaaccctatctatcatctagcagaagccaacggcctcctggaagagacaaccgatggggaacgcagcgtgggccgcatcagcctctattccaagaatggcgtggcctgctaccttaccaaccacggccgcaggatccccaaggacgtggtt

SEQ ID NO: 38352 - DNA, 937 bp, Homo sapiens
acagtttctgcagcatcagaagaagaaactgaggcccaggcacagaggcaacttgcctcagagtatatgatgccttggctggggatggggtagtagacctagttcccaggccatcccaacttggacccacgagatgtcccctgccccagtccggctctcagggttttttgtactgtgtcaaaggatgtagagggcttcactttccctggaaatgtgctttagattgctttttgggggaatcttgcaaactgggatgtttggacttctctcctgccctatgctgaatttggagggagccattttctgtctgggaaatgctttagatcttggagccactggagatgttgaagaattgaaaaaggccaggtggggaccctcaggtacccacagtgcttctccccggtgaggaggcaccagtgaggaagtggggtctgatatctggtgttacctgagaaaaaggtgggacggaaaaagaagagccttctaactggtccagtaaggccactctgggacaaatcacagagtcatccaaggtggcagttatcttagctataaggtggttttcagtgggaacttttcactgaggaccttcgttggttgccagcagtggaagttcaagctctttcctgccctgttgtagggtggaaagaccctcttggagsaaggagggggaagcagtgctggccctctctggagaagtccctaagcctctaagggcctgctgttgtcaccctcaggacacgccacctttgagctgggagccacctggatccatggctcccatgggaaccctatctatcatctagcagaagccaacggcctcctggaagagacaaccgatggggaacgcagcgtgggccgcatcagcctctattccaagaatggcgtggcctgctaccttaccaaccacggccgcaggatccccaaggacgtggtt

SEQ ID NO: 38353 - DNA, 937 bp, Homo sapiens
acagtttctgcagcatcagaagaagaaactgaggcccaggcacagaggcaacttgcctcagagtatatgatgccttggctggggatggggtagtagacctagttcccaggccatcccaacttggacccacgagatgtcccctgccccagtccggctctcagggttttttgtactgtgtcaaaggatgtagagggcttcactttccctggaaatgtgctttagattgctttttgggggaatcttgcaaactgggatgtttggacttctctcctgccctatgctgaatttggagggagccattttctgtctgggaaatgctttagatcttggagccactggagatgttgaagaattgaaaaaggccaggtggggaccctcaggtacccacagtgcttctccccggtgaggaggcaccagtgaggaagtggggtctgatatctggtgttacctgagaaaaaggtgggacggaaaaagaagagccttctaactggtccagtaaggccactctgggacaaatcacagagtcatccaaggtggcagttatcttagctataaggtggttttcagtgggaacttttcactgaggaccttcgttggttgccagcagtggaagttcaagctctttcctgccctgttgtagggtggaaagaccctcttggaggaaggaggggsaagcagtgctggccctctctggagaagtccctaagcctctaagggcctgctgttgtcaccctcaggacacgccacctttgagctgggagccacctggatccatggctcccatgggaaccctatctatcatctagcagaagccaacggcctcctggaagagacaaccgatggggaacgcagcgtgggccgcatcagcctctattccaagaatggcgtggcctgctaccttaccaaccacggccgcaggatccccaaggacgtggtt

SEQ ID NO: 38354 - DNA, 937 bp, Homo sapiens
acagtttctgcagcatcagaagaagaaactgaggcccaggcacagaggcaacttgcctcagagtatatgatgccttggctggggatggggtagtagacctagttcccaggccatcccaacttggacccacgagatgtcccctgccccagtccggctctcagggttttttgtactgtgtcaaaggatgtagagggcttcactttccctggaaatgtgctttagattgctttttgggggaatcttgcaaactgggatgtttggacttctctcctgccctatgctgaatttggagggagccattttctgtctgggaaatgctttagatcttggagccactggagatgttgaagaattgaaaaaggccaggtggggaccctcaggtacccacagtgcttctccccggtgaggaggcaccagtgaggaagtggggtctgatatctggtgttacctgagaaaaaggtgggacggaaaaagaagagccttctaactggtccagtaaggccactctgggacaaatcacagagtcatccaaggtggcagttatcttagctataaggtggttttcagtgggaacttttcactgaggaccttcgttggttgccagcagtggaagttcaagctctttcctgccctgttgtagggtggaaagaccctcttggaggaaggagggggaagcagtgctggccctctctgsagaagtccctaagcctctaagggcctgctgttgtcaccctcaggacacgccacctttgagctgggagccacctggatccatggctcccatgggaaccctatctatcatctagcagaagccaacggcctcctggaagagacaaccgatggggaacgcagcgtgggccgcatcagcctctattccaagaatggcgtggcctgctaccttaccaaccacggccgcaggatccccaaggacgtggtt

SEQ ID NO: 38355 - DNA, 1268 bp, Homo sapiens
ttgtcactgctattaatgtaatcacataaaactttctcttgttctcaagtgcttttaaagtgagctatttgagcttttgattctgcaggttttccttctctttcaaaattagcaaaggtaatatgtaagccctgaaacttttttttttaaatgtaagagcagaagtaaagaaaagagtatggtagttgcttgggtaaattgagaaccgtggcgtatctttcatgggctgttgcccgtaattgtaataaaaatatcctgagaggatcataaaggacattgcaagtgttttctgaatgatatattagtaccagatcatctatgcaggccgtctgcacagccattcttctcctgttgtattttccctctgactgaggaactcctggccgcctcagggagagactccctgctgtgcccccgacagcaggaaaatcttgggatggacacagggtagtcatgggctttgctttggcatggtttctggagctcacagagttctaactatgtcagaggcatgggaaccagagcaactccatcttgaatggggctgggtaaaatgaggctgaaacctactgggctgtattcccagacggttaaggcattctaagtcacaggatgtcataggaggtcggcacaggatacaggtcataaagaccttcctgataaaacaggttgcaataaagaagccagccaaaacccaccaaaaccaagatggccacgggagtgacctctggtcgtcctcactgctacgctcgcaccagtgccatgacagtttacaaatgctatggcaacgtcaggaagttaccctacatagtctaaaaaggggaggcatgaataatccaccccttgtttagcatrtcatcgagaaataaccataaagatgggcaaccagcagccctcaaggctgctctgtctatggagtaggcattcttgtattcttttactctcctaataaacttgctttcaattatggactcaccctgaattcttttttgcatggtatccaagaaccctctcttagggtctggattaggacccctttcctgtaacaactagagtgggctccttgaagggtagtgaaaagcctctctttaccacttcattgtaccctgccccagtctcaagagtgaaagggggcctgcctcctttcttccttcaaccagaaagacctgatttgagacttggttcaccatttccaggcactgtggccttggacaaatgatttaatctttctgagcctcaatgcttcgtataatacccaccttccaggg

SEQ ID NO: 38356 - DNA, 1166 bp, Homo sapiens
caggagccaagcttcagtatttgctaattcagtgttcatagcaaatgtataaaccataactaccacgcataacgataataagctgtactttagtttttgatagtttgcaattcagagaaaagatgacctattctgatttttaaacttataatggaaaagtctacactctccttaggaaacctctctaatttcaaacttcagctataatccacaaagatggtttatgatatgstttggatttgtgtccccacccaaatctcatgttgaattgtaatccccaatgttggaggaggggcctggtgggaggcgatttgatcatgggggcagatttcccccttcctgttctcatgatagtgaatgagttctcgtgagatctcattgtttaaaagtgcatagcatctcccccctgctctctcttcctcctgctccaatcgtgtaagacacgcctgcttccccctcaccttctaccatgtttataagttctctgaggcctccccagccatgcttcctgtagagccagcagaactgtgagccaattaagcctcttttctttataaattaccaagtctcagatagctccttatttcagtgtgagaacagactaatacagtttatattttcagccccaatctttcctttgagttcagctccccttctccagcttcctaccgggtatttgcacttgaatttcctattattatcaaaatccaaatggcaataccccatgtaattttcgctgttctctctgaatcccagtcccataaccattaacaccttctgtttccattaatggtcctccattttccaaagctcttaggtacggaaatcttaggcactatctcaccttacctagccaatccatcacaagtccccttggttttaattgcagaatctcttaccctttcattccactgttactcctaccaccctagtcaggttcctcttacttcatacctaggtaagtgtgattgcattctaactgaagtccctttccagctctccagatcatcctgtaccttagtataagactgaccttcctaaaacacatttccaacatgtcgtatgtctgagttgacatttgcctccactcctataattttacctactgtctatctggtctagtcccgcatttgcgctggctattccatgggtccctgaaacccagc

SEQ ID NO: 38357 - DNA, 1151 bp, Homo sapiens
tccgtacaaacttgcctatgctgagagactccaaaatttcatttcgtaggcttgaagctgcaataactctgactaaagggaatagaattctcaagaccgctttggtagaagactccacattggaaaagtttccgctggtctctttctttccattttaactgtccagcatttcccaaagggtagtctgctaaaaggtattacccaatacaattttccatggtcaaatacacttgaaaaatgatgggtttaaggaaaccacagatctcttgtggcagagggcctcagatcctgtaacacacgaacatgcactgtcacttttccagtracaatatacactgtctcccagagccatttcaccctttaacttctgttttgagggtaacaacttatggagttaacatcccaaggaatatattttgggggagtcttctcatttggggaaatattattttaaaaatcttgaccaggtgctgtggctcacacttgtaatcccagcactttcggaggccgaggtgggtggatcatttgcatccaggagtttgagaccagcctgggtaacacgacaaaaccccgtctcttaaaaaaaaaaaaaaaagtaattgctttctaaattgctcattttgtacccatattttaaaattcatggcttatacatttcatatatgtattattttgatagcattgtgagaaatgttaaagaactcaattcatttaatgtgcatgctgactcttgactaactcagcatttcgaaaagtataattttgtgtgcttaaaggcacacactacttttggggtttctagaaatttcaatacaaggtttcaaatagctaataggcagtattcacccagtgttaaggctttgactcaaacactgctttagatagcaaattagataattattacaaacgttccatcacagtgacgggaaggaatgcccacatcgcttgccctcccgaagccagagcacggtctatttgatgaagcctcttgtgatctgcagcctctgataatgcccatcaaccccaacagccaactttgatgccctgctgaaggaagagctgagctgctttcacttgaaagggatcagaaacaattacaaaattgaacgaggtattactgacatggcaggaaggcatgcccgaagaagtga

SEQ ID NO: 38358 - DNA, 1151 bp, Homo sapiens
tccgtacaaacttgcctatgctgagagactccaaaatttcatttcgtaggcttgaagctgcaataactctgactaaagggaatagaattctcaagaccgctttggtagaagactccacattggaaaagtttccgctggtctctttctttccattttaactgtccagcatttcccaaagggtagtctgctaaaaggtattacccaatacaattttccatggtcaaatacacttgaaaaatgatgggtttaaggaaaccacagatctcttgtggcagagggcctcagatcctgtaacacacgaacatgcactgtcacttttccagtgacaatatacactgtctcccagagccatttcaccctttaacttctgttttgagggtaacaacttatggagttaacatcccaaggaatatattttgggggagtcttctcatttggggaaatattattttaaaaatcttgaccaggtgctgtggctcacacttgtaatcccagcactttcggaggccgaggtgggtggatcatttgcatccaggagtttgagaccagcctgggtaacacgacaaaaccccgtctcttaaaaaaaaaaaaaaaagtaattgctttctaaattgctcattttgtacccatattttaaaattcatggcttatacatttcatatatgtattattttgatagcattgtgagaaatgttaaagaactcaattcatttaatgtgcatgctgactcttgactaactcagcatttcgaaaagtataattttgtgtgcttaaaggcacacactacttttggggtttctagaaatttcaatacaaggtttcaaatagctaataggcagtattcacccagtgttaaggctttgactcaaacactgctttagatagcaaattagataattattacaaacgttccatcacagtgacgggaaggaatgcccacatcgcttgccctcccgaagccagagcacggtctatttgatgaagcctcttgtgatctgcagcctctgataatgccyatcaaccccaacagccaactttgatgccctgctgaaggaagagctgagctgctttcacttgaaagggatcagaaacaattacaaaattgaacgaggtattactgacatggcaggaaggcatgcccgaagaagtga

SEQ ID NO: 38359 - DNA, 1151 bp, Homo sapiens
tccgtacaaacttgcctatgctgagagactccaaaatttcatttcgtaggcttgaagctgcaataactctgactaaagggaatagaattctcaagaccgctttggtagaagactccacattggaaaagtttccgctggtctctttctttccattttaactgtccagcatttcccaaagggtagtctgctaaaaggtattacccaatacaattttccatggtcaaatacacttgaaaaatgatgggtttaaggaaaccacagatctcttgtggcagagggcctcagatcctgtaacacacgaacatgcactgtcacttttccagtgacaatatacactgtctcccagagccatttcaccctttaacttctgttttgagggtaacaacttatggagttaacatcccaaggaatatattttgggggagtcttctcatttggggaaatattattttaaaaatcttgaccaggtgctgtggctcacacttgtaatcccagcactttcggaggccgaggtgggtggatcatttgcatccaggagtttgagaccagcctgggtaacacgacaaaaccccgtctcttaaaaaaaaaaaaaaaagtaattgctttctaaattgctcattttgtacccatattttaaaattcatggcttatacatttcatatatgtattattttgatagcattgtgagaaatgttaaagaactcaattcatttaatgtgcatgctgactcttgactaactcagcatttcgaaaagtataattttgtgtgcttaaaggcacacactacttttggggtttctagaaatttcaatacaaggtttcaaatagctaataggcagtattcacccagtgttaaggctttgactcaaacactgctttagatagcaaattagataattattacaaacgttccatcacagtgacgggaaggaatgcccacatcgcttgccctcccgaagccagagcacggtctatttgatgaagcctcttgtgatctgcagcctctgataatgcccatcaaccccaamagccaactttgatgccctgctgaaggaagagctgagctgctttcacttgaaagggatcagaaacaattacaaaattgaacgaggtattactgacatggcaggaaggcatgcccgaagaagtga

SEQ ID NO: 38360 - DNA, 647 bp, Homo sapiens
gcagggatgtatttgaagcgagtatgagtcaagaagggtcaagtctgttactcattgtcaatacatctgttgtcagtaagcatataattaaaagatgtttatttggaggaaggttgatagcacactttatattgcaggtattaaactggtaccacctgaacacaccgcccaatcttagtattactagataactagtgcaacaagttactatatgcctagaataggatgcaccacctgtgaagtcatcttgtcttaaaagttcaacctaggccaggcgcggtggctcacgcctgtaatcccaggactttgggaggccgaggcgggtggatcatgaggtcaggagatcgagaccatcctggctaacacggtgaaacccygtctctaataaaaatacaaaaaattagccggacgtcgtggcgggtgcctgtagtcccagctactcgggaggctgaggcaggagaacggcgtgaacccgggaggcggagcttgcagtgagccgagatcgcgccactgcactccagcctgggcaacagagcgagactccgtctcaaaaaaaaaaaaaaaaaaaaaaaaaagttcaacctaaacctaatcaattttctataccaaaatttcagttacagaaaatatggaagagagaataacaa

SEQ ID NO: 38361 - DNA, 612 bp, Homo sapiens
tgaccaccacagcctactctgactcttacagaaatcacttccttgcttttctttattgttttatcacttaagtgagtgtccccaagcagcacagtttcattttgcctgtcttttgaactttctgtaactgcaatcatgcagtgcaattcagctatgcctggtttctttcatccaacaatgtgtgtgtgagattcatccaggttgtcaggtgtagcagtagtttattttcatgtatgtatactattttattatatgactattctaccatttatttatttcttcttcttttatagmcctttgggttgttccaattcagggttattatgaatactgctactgtgacaatctcttatgtgttcctgggtcattattgagtatagatctgggaattaaattcagggtcgaaggatgtgcctattttcagaagatacttgacccaatgtttactaatgtcattgacattcccatcagcaatgtgggacaattccagttactcctccccttcaccaatactctgtgttgtcaatctttgtaactttagccattttggtaggtatgtaatgatattcccttgtgatttcagacacaatttttatggctatatttattctg

SEQ ID NO: 38362 - DNA, 612 bp, Homo sapiens
tgaccaccacagcctactctgactcttacagaaatcacttccttgcttttctttattgttttatcacttaagtgagtgtccccaagcagcacagtttcattttgcctgtcttttgaactttctgtaactgcaatcatgcagtgcaattcagctatgcctggtttctttcatccaacaatgtgtgtgtgagattcatccaggttgtcaggtgtagcagtagtttattttcatgtatgtatactattttattatatgactattctaccatttatttatttcttcttcttttatagccctttgggttgttccaattcagggttattatgaatactgctactgtgacaatctcttatgtgttcctgggtcattattgagtatagatctgggaatkaaattcagggtcgaaggatgtgcctattttcagaagatacttgacccaatgtttactaatgtcattgacattcccatcagcaatgtgggacaattccagttactcctccccttcaccaatactctgtgttgtcaatctttgtaactttagccattttggtaggtatgtaatgatattcccttgtgatttcagacacaatttttatggctatatttattctg

SEQ ID NO: 38363 - DNA, 876 bp, Homo sapiens
ctaagatattcagatccacagtgctggggaagacattattctccccagtttacaaatgagaaaactggggctctgaaaaatgaaattatgtcttgaggtcacattgacaggaataggactcagcccaggtcttcctgctgcagggtctgggtttatttctattccaacattttgcctcaaaggctctgatggttttattgggttcttgagtcttcactggtaaaaaaaaaaattaccagaaaacacaccccgttgtatagtttaagttgcgattgctggtcactgtatrgtcatctcaaccatgaattaactccctgaagaaaccatttgaaggcacttttcaaaacggtagatggtaaaaaaaaaaaaaaaaatctaggaaggaggtaagatgcggaaccatagcccaagaatataaataactcatgacagaactgttctaatataaggcttcaaaacaatactattttttgtaacattatgaagaccattttgctggcagttctattttttctggatgtcccaaataaatgcagtttgtttttacctcaatatgacattacttgtaatttaaaaccctcactcaactaatttcaaagatagtagattaaatatgatgctaaaaataacaataaaataataccctcaagagtttccatacctcaagtccccaccatgtacccttacatgtacatattattattttcatgtttttaggctcaaggaggttaagtaactctcccaactttccagaggatgggttgaaggatccagataccttcattgatttctggtgcattgcattgttgcaaactttattttgtttttggaagaaagtaatccaacaatagctattaggaacaaatatgcatatac

SEQ ID NO: 38364 - DNA, 876 bp, Homo sapiens
ctaagatattcagatccacagtgctggggaagacattattctccccagtttacaaatgagaaaactggggctctgaaaaatgaaattatgtcttgaggtcacattgacaggaataggactcagcccaggtcttcctgctgcagggtctgggtttatttctattccaacattttgcctcaaaggctctgatggttttattgggttcttgagtcttcactggtaaaaaaaaaaattaccagaaaacacaccccgttgtatagtttaagttgcgattgctggtcactgtatagtcatctcaaccatgaattaactccctgaagaaaccatttgaaggcacttttcaaaacggtagatggtaaaaaaaaaaaaaaaaatctaggaaggaggtaagatgcggaaccatagcccaagaatataaataactcatgacagaactgttctaatataaggcttcaaaacaatactattttttgtaacattatgaagaccattttgctggcagttctattttttctggatgtcccaaataaatgcagtttgtttttacctcaatatgacattacttgtaatttaaaaccctcactcaactaatttcaaagatagtagattaaatatgatgctaaaaataacaataaaataataccctcaagagtttccatacmtcaagtccccaccatgtacccttacatgtacatattattattttcatgtttttaggctcaaggaggttaagtaactctcccaactttccagaggatgggttgaaggatccagataccttcattgatttctggtgcattgcattgttgcaaactttattttgtttttggaagaaagtaatccaacaatagctattaggaacaaatatgcatatac

SEQ ID NO: 38365 - DNA, 1155 bp, Homo sapiens
ttttggaatgtagtgggatataaataaatccataacattaaaaaaaaatcaaaatcagtcaagggttacctaagacctgtgggctgtggcggctgcaggtaggccagaattctggatctcaaggaattgttaagtacctccggttgagtttagtggtgactttgctaaatgaaccacttcagcccttcagggagcagagcttcattttatggcagctgaaacagtattgagtaagagtcacaaaatcaaatgcctccaggggccaggcaggtactactaattagtaaagcaggtaggtacaaggcaagagggagtggtggtgactgtggcaaaccagagagcacctgcctggtctgttgatggctgcctctcctccatttaataggtaggcaggtatatgggctaatcttaccagaacctttagaggggccagatataaagcaatgggccaggcactagtttttttttgttttgctttttgtttttttctttttttgaggcggagtctctgtcacccgggctggagtgcagtggcgcaatctcggctcactgcaacctccgcctcccaggttcaagcgattctcctgcctcagcctcagcctcccaagtagctgggattacaggcgcccgccaccacacccggctactttttgtatttttagtagagayggggtttcaccatgttggttaggctggtcttgaactcctgacctcatgatctacccctctcagcctcccaaagtgctgggattacaggcgtgagccaccgcgcccggccaggcactagtttttaacaccaccccgccccccacccttttgccataaaatgggactttcagatgaaatcttcgattaaaattcagtatctacaaggttgaaggtgggacaggttatttgggttaagtgtggcagcctgaagagctgacccctagaggtgcctctccaaaggccctgtggctctaaggaacactttggagacttcagactagatcgtgggcagactagatctctgatctcctcttgtgccttacatacccacaggaatagtcacttacagcttctcaaccctggatgctgtgggtttgcacatgacacactgaccctgaacaaactttggagcatgtgtgtgctctgcaaattccagaaattattttc

SEQ ID NO: 38366 - DNA, 853 bp, Homo sapiens
ctctctggtcagtagcgtttctccttagcaggtgccatgagtaatctccctgcctggagtcctcctcccttaggcttatggtagaacataaactatctcgggtctttcctgcagcttgccccagacgtttttaagaacagaatcacaggcctgcactggcactaagtaaagagagactattatggctctcgatttgggctgtttcctattacttccccacccctcttcatcttgcctgcaaatatagtgtcctagttgctaggttcgggtactttagaagttcttattctccctcccaacaaccctaggaggtgaatattacttttactgatgaagaaattaaggctcagagaggtggagtaacaaccaaacacacagctagaaagggacagagccaggattcaaacccaatctgttgactccaggatgaagctttctcccctaagtttatataaaacaaagcagccctttccaccttactgtgggcctctcaaacaaatatcataagattctgccaaacaatttgctgaaatccagatatgttgtctactacgtttctctggtaagtcagattcctaaccttaaattaaaatggactaaggccgggcatggtgactcacacctgtaatttcagcacttcaggaagccaaggctggtggatcacttgagcccaggagttcgagaccagccttggcaacatggtgaaaccccgtctcaaaaaattgaaggggtgkgttgcccctccacacctgtgggtgtttctcgtgaggtggaatgagagacttggaaaagaaaaagacacagagacaaagtatagagaaaggactcgaggaaccagcattcagcatatgga

SEQ ID NO: 38367 - DNA, 749 bp, Homo sapiens
tcaaggcagaagaatttttcttagtacagaacaaaatggagtctcctatgtctacttctttctatacagacacagtaacaatctgatctctcttgcttttccccacaaaaatacaaaaattagcctgtctcataactaggtctctaaataaataaattaaaaattaaaaattaaatgtataatggagtaaattcatcttggtatactctagcttagtaaacccgtgctggttaccactgatcacatctatcctttcaaagtgctcataaattgccaccaaaatcagcacggattctttgagtctccacaacatctctaaaagcacccctaagggttgagctattttagttacaacagtctaaggcgtaatttatctaaagatgaacaaaacaagacctttattagagaacatttcaaacatacaaagattttcactttgggaggctgaggcaggcagatcacttgacctcaggagtttgagaacagcctgggcaacatagggagacctcatgtctacttaagttagccacatgtgatggtgagtgcctgtagtcccagctactcgkaaggctaaggtgggaggattgcttgagcccaggaagttgaggctgctgtgagccatgttcgtgccactgcattccatccagcctaggtgacagacagacgctgtctcaaaaaaagaagagtggagagaatagtataatgagccctcgtgtgcccctctgtcagattcaacaattcctaatgca

SEQ ID NO: 38368 - DNA, 1679 bp, Homo sapiens
tcgttggactaatctctcttagccatcccagccattygaatcactctctttcctggctctcttagaatcaatactatagtcactaagatcctgacataatgtcttaaatgtatgttaatctgtgacacattaccatcacagccattttagatttcttatccctgtctctggttttacctgggacatccctggatcatcttgtctccatatagatttttctgccttgggcatctctaccttgacacagctattaggagaagtggccaaagattaaactaggaagttcctgtctccaaaccagatgctctgaatgagcatatcatcttgtcctcaagattgtagatgtcccaatgtttctgtcagccccatccttcctcaccccaccattatctcttcctcctcatcacccccttcatgcttcttgggtccacaagttcctcttagttgccatgcctgagtttactgtccttggacggacacaggatccacatcttactcaccccgtcaaccatcccaagtgacagcaggtgacaccatctgtattcatcattcactacaagtcactgcagagcaacaagggactaacctccaacaactctgacctcaggcctgaggactcccacacacgtgtatctcagcaccctcacttggctcagacttagtttcctacttatctctcagccccactacctcatcagcctaagggtagggatagtatctttactcttgaatatgccttgcccagcacagagtgtgccattgaaatgggaggagttcccttatcccatttgcagggcatgcaacaggggtgtgactcgcttctttgatgtcctgctgctcgaaccgctagggggagcatgcaaatgggcaggtcctgggagcatttttgggctgtgaccccatggcagtgtctagggttgagtgtttacagctcccaaagccccagtaggcatgtgttacagtgtgctctttcagctttgcggtctgcaggcagcttgtgttaatcagctcagttagaccctctgacttatcacaaggacagagagctttctgtatcccatattctgtaggctctagtgtactggaaaaatcagattacatgtgggcttggagaatgactgcaaggttttattgagtggtggaagtagctctcagtgagatggatgggggggccagcaaggggatggggtgggaagataggcttcagctggagtcggaccacccagtggccagctggcctccaactgcccccactgaattccatgaggtcctgctgttgatggcctgctggcgtctgctggtatcagtcagtgtgctcttctgctcctctccacgtccagccacttgtgtccatgcccactagggtcttgaagattttatgggcccaggatgtggggcatggtgggtcagagtgggcttagaaaatgcaacatttgggtgcaaaaccaggagtgcctgtcctcacttaggtccatgggcataggcctgagggtggagccctcaccagggaccccactcttctctacccagcacttccctgcccgcctctcgtatcaccatcatctcaatataaattgtttaaataacggatgatgataacaaatgaaaaataaagagctaaagacctacagaaagattgaggcagaaatatatgaatatcttggatattggagtttctt

SEQ ID NO: 38369 - DNA, 1679 bp, Homo sapiens
tcgttggactaatctctcttagccatcccagccatttgaatcactctctttcctggctctcttagaatcaatactatagtcactaagatcctgacataatgtcttaaatgtatgttaatctgtgacacattaccatcacagccattttagatttcttatccctgtctctggttttacctgggacatccctggatcatcttgtctccatatagatttttctgcctygggcatctctaccttgacacagctattaggagaagtggccaaagattaaactaggaagttcctgtctccaaaccagatgctctgaatgagcatatcatcttgtcctcaagattgtagatgtcccaatgtttctgtcagccccatccttcctcaccccaccattatctcttcctcctcatcacccccttcatgcttcttgggtccacaagttcctcttagttgccatgcctgagtttactgtccttggacggacacaggatccacatcttactcaccccgtcaaccatcccaagtgacagcaggtgacaccatctgtattcatcattcactacaagtcactgcagagcaacaagggactaacctccaacaactctgacctcaggcctgaggactcccacacacgtgtatctcagcaccctcacttggctcagacttagtttcctacttatctctcagccccactacctcatcagcctaagggtagggatagtatctttactcttgaatatgccttgcccagcacagagtgtgccattgaaatgggaggagttcccttatcccatttgcagggcatgcaacaggggtgtgactcgcttctttgatgtcctgctgctcgaaccgctagggggagcatgcaaatgggcaggtcctgggagcatttttgggctgtgaccccatggcagtgtctagggttgagtgtttacagctcccaaagccccagtaggcatgtgttacagtgtgctctttcagctttgcggtctgcaggcagcttgtgttaatcagctcagttagaccctctgacttatcacaaggacagagagctttctgtatcccatattctgtaggctctagtgtactggaaaaatcagattacatgtgggcttggagaatgactgcaaggttttattgagtggtggaagtagctctcagtgagatggatgggggggccagcaaggggatggggtgggaagataggcttcagctggagtcggaccacccagtggccagctggcctccaactgcccccactgaattccatgaggtcctgctgttgatggcctgctggcgtctgctggtatcagtcagtgtgctcttctgctcctctccacgtccagccacttgtgtccatgcccactagggtcttgaagattttatgggcccaggatgtggggcatggtgggtcagagtgggcttagaaaatgcaacatttgggtgcaaaaccaggagtgcctgtcctcacttaggtccatgggcataggcctgagggtggagccctcaccagggaccccactcttctctacccagcacttccctgcccgcctctcgtatcaccatcatctcaatataaattgtttaaataacggatgatgataacaaatgaaaaataaagagctaaagacctacagaaagattgaggcagaaatatatgaatatcttggatattggagtttctt

SEQ ID NO: 38370 - DNA, 971 bp, Homo sapiens
tggaatgtttattcttggaagtcatagacccaattaaaacttagaagttttattaatgtgaaaggaaggttacatagatattgaggtaaattaacacttaagtggcaaacaataatatatttaaaakagttgaaaagagaaattatgaactgagagatatgttgaaatgacttagaatgcagtgatttccatattacagaatgcaaaagtcctaaatgcatctaatgagatttccagaaggaatataagaaataatgaataagtagcaatatttgaagaggtattggctctaaatttttagaaatgaatgaaagacatgaattctcacaaacacaaatctgaagggaaaattgtaaaaagtatcggaatatgaaacagattacctccccagaaaaaaaaaggctgatagcacctttctcaaccattagtgtcagaaaatagtggaataatatcttcaaagtgatttgagacaatatttgccaacctggaattctatatctagctaaaatattatttaagcgtaagggcgcaattaaggtattttcagatgaagattaatcttgctactaatagtggctaaaagaactaccaaggatttactccaggaagaagaaaattgaatccataaggagagaataatctaaagtaggcaatggtaagggggcagagaaaaatatgaaaatgtggataaaaataaacaagcattgacaatataaaatagtagaagtagtttcagggtgttaagatgaaactacaatattagacaaaaataaaatgaaaggcaagaagtatatgtttatagttaaagtgctctaacatgttatactgctccagagcatgggaaatataagcagctgtccatcatatgtggtctgacctcatcagagatagcttgttgccaccatatgtaggcatagattaagatttccaacttgagcctcgtctggtaccacatggcaaatgccttgcct

SEQ ID NO: 38371 - DNA, 971 bp, Homo sapiens
tggaatgtttattcttggaagtcatagacccaattaaaacttagaagttttattaatgtgaaaggaaggttacatagatattgaggtaaattaacacttaagtggcaaacaataatatatttaaaatagttgaaaagagaaattatgaactgagagatatgttgaaatgacttagaatgcagtgatttccatattacagaatgcaaaagtcctaaatgcatctaatgagatttccagaaggaatataagaaataatgaataagtagcaatatttgaagaggtattggctctaaatttttagaaatgaatgaaagacatgaattctcacaaacacaaatctgaagggaaaattgtaaaaagtatcggaatatgaaacagattacctccccagaaaaaaaaaggctgatagcacctttctcaaccattagtgtcagaaaatagtggaataatatcttcaaagtgatttgagacaatatttgccaacctggaattctatatctagctaaaatattatttaagsgtaagggcgcaattaaggtattttcagatgaagattaatcttgctactaatagtggctaaaagaactaccaaggatttactccaggaagaagaaaattgaatccataaggagagaataatctaaagtaggcaatggtaagggggcagagaaaaatatgaaaatgtggataaaaataaacaagcattgacaatataaaatagtagaagtagtttcagggtgttaagatgaaactacaatattagacaaaaataaaatgaaaggcaagaagtatatgtttatagttaaagtgctctaacatgttatactgctccagagcatgggaaatataagcagctgtccatcatatgtggtctgacctcatcagagatagcttgttgccaccatatgtaggcatagattaagatttccaacttgagcctcgtctggtaccacatggcaaatgccttgcct

SEQ ID NO: 38372 - DNA, 798 bp, Homo sapiens
  misc_feature (1)...(798): n = A,T,C or G
ttccttaccataaagacgtaaatgttagtatttataactcctagaattaaaaatattccctgtgcttaaaaagttgatatttagcttgcatttgctttctatttttgtatctatgagaaaatacatgtgattatgtggcttttttttgaataactaactaaaacattcgttattacagttgttttaaatagagattatgtctgtagttctaataaagactatcactacgaaggtaacacaagtagcagcagatatccacagttaaagtatggataatgcaatgctaaagatcccgtttaagattataagtaggaatgcaggggtctatggcttagatcaagtgaatgtatgcttcaaattgttaatctcttaaatgctgaaaangcctgtctcttttaaatgacaaattggttacaaggttctctgtaaatcatcaggctgataaccctttgatttcttaatctttgtaatgttgctgtaactgtaggactggaattaacattatcttgaaagtttcraaattcaatcaatcaaaaaaaacagggccttattcagcatctgtaagatgctcaattctgacatgttagaaaattctactatgtaattctactatgtattagaaattttctactatgtagaaaattctactaagagaatttgaaacttaaactccttccagtcaaaccctactcttcaatacctgttctgtataaaactatcagctttccttttaattggtcatagaaaagccatttgcttattcaaacaagcagttattattaattttgagggagtgta

SEQ ID NO: 38373 - DNA, 1461 bp, Homo sapiens
ttgagctataactttcaatcagatggcatcttacagttgaagatgtttcaccattactgttgggcaggcaacaatctcatgaatttttcattactagagcagctcacatagtagatacttcaataacaaatcstgcctactatgttccaatttgtaaaactacacaatccgtgataataaagtaatctattaacctttagaaacaaaatgatagtgagaaagagatgagaaatgtagtgattacgaatgcttatgaacagtactgtaacagaaatcaaaagtaggctaactctaggtaattgcaaagcctgctagctctgcacaattgtaaaatctgttttagagcacacactgccaagtttaatattttatggaacttttaaaaaaactcctgcatcaccaatacatttgataacagaacagaccatctggtgtgaaaaaatcacaatcattgtgagttgaaaaaataatttagcctctgaatgttaacaatttagcatcacgttaaacaatttagttgcttattttcctttttatgtatgcacaaaagtgtataatgaaatttgtgttaaactaagcttaaaagatctccttaaaaatataaaaatttctaagcaataacaaaacatgtttcattgtttaactgaagggtgtttattctttgaaagaatgatgcttcatacagtctagtctggcttaaattttaaaacatatggtattcaatttgctgtcttcaatttaagtgaaaagtttgttgttgttgtttgcctatagttttcaccacttttcccttttaagcgccctgttttatatagttttaactatattgcaaccaattaaatttattagggtacattccaatcgcttttcttatgtggctctgctttctctctcctaaaatattttaaagtgtagttcaagagatctaaataattctagctttatttactttattgccctcatggctcttttgcaaacaaacacaaatatctaatatgctgtgtcatactttaccttcatttttttccttcctgacacttggttcctatttcaaacaaatattctcaatagaagtgactaaagattaacttattctgaaatgcaatttgaaaacacagaaaagttaaaaaggtcaaatatgcacattctagaatttctcatgataagaaatgataattcaagaagtatcaccatggtcagaaaaaaaaaacgtaatgtaggtaatgatacttgagacaatcagaaatcaagacccattcaagctttttttgagcatagagtggaataatacaagtagcattttaggaagattgttttttaagtacaatccctaataaattgaacagacaacttaaaataataaatccaattagaaaatatttttatattctagggataaagtaatcagatacccatattaggagagtgacatcacgacaaccatagcaactgaaatatcag

SEQ ID NO: 38374 - DNA, 1461 bp, Homo sapiens
ttgagctataactttcaatcagatggcatcttacagttgaagatgtttcaccattactgttgggcaggcaacaatctcatgaatttttcattactagagcagctcacatagtagatacttcaataacaaatcctgcctactatgttccaatttgtaaaactacacaatccgtgataataaagtaatctattaacctttagaaacaaaatgatagtgagaaagagatgagaaatgtagtgattacgaatgcttatgaacagtactgtaacagaaatcaaaagtaggctaactctaggtaattgcaaagcctgctagctctgcacaattgtaaaatctgttttagagcacacactgccaagtttaatattttatggaacttttaaaaaaactcctgcatcaccaatacatttgataacagaacagaccatctggtgtgaaaaaatcacaatcattgtgagttgaaaaaataatttagcctctgaatgttaacaatttagcatcacgttaaacaatttagttgcttattttcctttttatgtatgcacaaaagtgtataatgaaatttgtgttaaactaagcttaaaagatctccttaaaaatataaaaatttctaagcaataacaaaacatgtttcattgtttaactgaagggtgtttattctttgaaagaatgatgcttcatacagtctagtctggcttaaattttaaaacatatggtattcaatttgctgtcttcaatttaagtgaaaagtttgttgttgttgtttgcctatagttttcaccacttttcccttttaagcgccctgttttatatagttttaactatattgcaaccaattaaatttattagggtacattccaatcgcttttcttatgtggctctgctttctctctcctaaaatattttaaagtgtagttcaagagatctaaataattctagctttatttactttattgccctcatggctcttttgcaaacaaacacaaatatctaatatgctgtgtcatactttaccttcatttttttccttcctgacacttggttcctatttcaaacaaatattctcaatagaagtgactaaagattaacttattctgaaatgcaatttgaaaacacagaaaagttaaaaaggtcaaatatgcayattctagaatttctcatgataagaaatgataattcaagaagtatcaccatggtcagaaaaaaaaaacgtaatgtaggtaatgatacttgagacaatcagaaatcaagacccattcaagctttttttgagcatagagtggaataatacaagtagcattttaggaagattgttttttaagtacaatccctaataaattgaacagacaacttaaaataataaatccaattagaaaatatttttatattctagggataaagtaatcagatacccatattaggagagtgacatcacgacaaccatagcaactgaaatatcag

SEQ ID NO: 38375 - DNA, 691 bp, Homo sapiens
tgccatcaactaaccaaatcttttatttcttactcatctcacttccttgacttctagatgcatactgaaaatgttcttggctatcttatagactttagtcctttcctaaaaacactgcatataaggaatgattataaagccacatgctctggcaagatgactcttccccattcctcctgcaaatacccaagataatttgaagctcatgtaatcaagttatatccccccatctttgcctgtgatcctggtgactcctcttttgttgactgatgactttagcatctgacacactttattctctactcctgctcccatcacaatgcttggtaatgccaacttaattgaatatccaccaatatcctggcttctttttttttttaatctcgtttctattgaccaagttcttcacccatctcacttacccaattctatgtcatggcsaattgtactttctctgaaatctcaatttcaagtcttttggtctctcaccctctctctgtctctttctctctcatacctcctctctttgtatttttctctaataacaccagtccaataatttccccctcatttaaaggctgcctatcccttttccatttttcactatccatctgtccttcatgcacattctatgatacaatattataatcatgttcttgcaaacgttattgatttctttatcttcaactcc

SEQ ID NO: 38376 - DNA, 533 bp, Homo sapiens
taaacaatcccatcagtggttgcatatcacagaactgctattcactctcttatcattaaaaatatggtgargaaaataggatgttattgttaaataataatgccagactgctgatcaagcacaatgtcaggtattgcccttgggggtgcgacatcataatgtttgctacctccgctaagtacgagattgcactttcaatagagtaagtctttaagaggccaaggaaaaagagtgctgagacctcatgatctcatttcaacacatatgccagcaagtgataaaaacctgagaagtgaaatagagaactatcagttgataaagaaataaaattgtctctaaatgctatgtctttcagagtttttcaggatacattcctgtgtctgtaaagacagcatttccttctttaaagacagggtcagtcaagggcagccagtcatttatctctgaggtggcagaagtctaaaacttaagaacaccctacttgaaaatgacagtcatctggaggccgcttttatgatatcttcttcttttaa

SEQ ID NO: 38377 - DNA, 533 bp, Homo sapiens
taaacaatcccatcagtggttgcatatcacagaactgctattcactctcttatcattaaaaatatggtgaggaaaataggatgttattgttaaataataatgccwgactgctgatcaagcacaatgtcaggtattgcccttgggggtgcgacatcataatgtttgctacctccgctaagtacgagattgcactttcaatagagtaagtctttaagaggccaaggaaaaagagtgctgagacctcatgatctcatttcaacacatatgccagcaagtgataaaaacctgagaagtgaaatagagaactatcagttgataaagaaataaaattgtctctaaatgctatgtctttcagagtttttcaggatacattcctgtgtctgtaaagacagcatttccttctttaaagacagggtcagtcaagggcagccagtcatttatctctgaggtggcagaagtctaaaacttaagaacaccctacttgaaaatgacagtcatctggaggccgcttttatgatatcttcttcttttaa

SEQ ID NO: 38378 - DNA, 591 bp, Homo sapiens
gctaaagactcagccaggaggattactttaaaaaaaaattagcaggctgggtgctgtggctcatgcatgtaactccaacagtttaggacactgaggcaggaatatcacttgaagccaggaacttgagcctgggcaacaccatgagacctcatctctacaaaaaaaaawtttttttaattagccatgcatggtggtgcatgcctgtagtcccagctactcaggaggctgaggcaagaggatctcttgagcccagaaatttgaggctgtagtgagccatgattgtaccactgcattccagcctgggcaacaaagtgagactttccccaaataaaaattttaaaattaggtaatttttactaatggtgccccttccatttccctgctcccaagtagtgagcctggccctagttcttctctctgcatagcatattttttaatactttgcctcacagatatcaaatttctgactacaatacttgcttccagacccacagcctagcagtcatgtggcttcagactcattttcttgtctgcatttctggtccattgctgatttactgagtggctggtcttgtttttaaggttatctat

SEQ ID NO: 38379 - DNA, 1288 bp, Homo sapiens
cctgtttaaggtaatggcagtttagctatccaattgcccaggccaaaagccatggcattatccctaactctttgttttctaccctacatcaaattcattagcaaagcctttgagttagaccttgaaaatatatctagggttaaatcacttctcaccatttccattactatcatcttggttcaagccagtaacatctcacctaaattactgcaagtttccaaacacatttttccactttcatccttgtcttcctaaaaggtcttttaaaatcagcagcaagtgtgatacccttgaaattaaagtcaaatcactcttcagctcaaagccccttattcatttagtagttattacctaccatgtgccrgccagagggatactagcgtgtacaaaataaacaagtttcttgccttcctggagcttgcagtatatcaagaaagatggataataattacacaattagtccataataattctaacaaatgtcataagggataagcacaaggaacaatgagaatatataaaaaaggatatatattaaaagaatctgtaataaaatactctagaagaaatgctactaaaattaaaatctgaaggatgggtagcacagtgttggagctatgagtatataaatatcacatcattagaaagtggtgaaatgaatattcaaaaccaggttaatatgtctctcaccttgaacttttaagcatcatgtaatagtattcttgatgttaaatatggtgaccgtaatttatcaagattttgaggcctataggtaatgaagtctgaactcaaatacagaatcaagggttctatttttttttttaaactttagtgcccttcaatcagttttatgacaagacttacattttagatggataaggagagaattttattaagaactatgctcagaaaattcaactcaaaaatatatgttatatggatccatcataatcataatcacctttatatagagcttactatatactgggtactttgctgaacactctagtatgaactattttatttaaatttcacaacagccttatgaaatagggtctgtcattcccattttactgacttaatagctgtgttataactgtgaatatttctgcattttcagtgacagctgttggcgacaccaactcctaatcatgtatgagaaagagagttgcaaaacatggagcactattgatttatttatttcagtggttatctacccatccctgacactcatccacatctgttgcctccagaaaccagtgtgctttcgtaagaatttcaacacctg

SEQ ID NO: 38380 - DNA, 517 bp, Homo sapiens
tgaaaaaggggcaaaagaaaatttatttggacttgatgggtatatttattactttctttcctcttcattctttccttcctctttcctctgttactttattttctacttttattccctttgttcatccttcatttctttattaattatgtattgagtctctcatgcaaaaagaccacattttaggcatttgggagtgaggaaggtataaagatgagaaaaaaaatttaaatgctttttaaaggtttatataatatagtgaaaaaggcagacatgcagaccacctacttggttctttgcttcttatttttttgtcaagrtgagttattgctttgacatattttataggtactctctattttattttttagagaaaccagcataggtatctactactcatttccttactttaattctttctaccttgatttgtgagaaaatgaaggtcaagtattctgatatctttcccctaaccccttgcggtagggagaaaaagctctttcttcacctcagacttcac

SEQ ID NO: 38381 - DNA, 517 bp, Homo sapiens
tgaaaaaggggcaaaagaaaatttatttggacttgatgggtatatttattactttctttcctcttcattctttccttcctctttcctctgttactttattttctacttttattccctttgttcatccttcatttctttattaattatgtattgagtctctcatgcaaaaagaccacattttaggcatttgggagtgaggaaggtataaagatgagaaaaaaaatttaaatgctttttaaaggtttatataatatagtgaaaaaggcagacatgcagaccacctacttggttctttgcttcttatttttttgtcaagatgagttattgctttgacatattttataggtactctctattttattttttagagaaaccagcataggtatctactactcatttccttactttaattcyttctaccttgatttgtgagaaaatgaaggtcaagtattctgatatctttcccctaaccccttgcggtagggagaaaaagctctttcttcacctcagacttcac

SEQ ID NO: 38382 - DNA, 550 bp, Homo sapiens
tgcccaaggttgaattctgcccaaaaactgctraataagatgagggcatgaaaacagtggcatctagttttgtcagttaagaattataatgtttgaagaaattaaaggaaaactccagaaagaaaatgtgtttctacattttgtgcaaattatacctttgctttgttgtaaaattataattaagtgatactgtagtagtatcttcaatatgttagattgcgtcaattttgtaaatttggttaagataaataacatgtattcgtattattttctactttttgtagtacttttgatacataattttatttgatctcctgaatagccctctaagttaggtaagaaaaaattactttataaggatatttaaatatacagttttaggaacgtaatgcataccagtatatgtagagtgaaagaaataaaaaaaatagaaaagagaagtagaagaattaaataaatataaaataattagacttactgaagactaaagacagaaacagaatattcctagtctatggaaatagcagttagtggtattagaattcacaca

SEQ ID NO: 38383 - DNA, 550 bp, Homo sapiens
tgcccaaggttgaattctgcccaaaaactgctaaataagatgagggcatgaaaacagtggcatctagttttgtcagttaagaattataatgtttgaagaaattaaaggaaaactccagaaagaaaatgtgtttctacattttgtgcaaattatacctttgctttgttgtaaaattataattaagtgatactgtagtagtatcttcaatatgttagattgcgtcaattttgtaaatttggttaagataaataacatgtattcgtattattttctactttttgtagtacttttgatacataattttatttgatctcctgaatagccctctaagttaggtaagaaaaaattactttataagkatatttaaatatacagttttaggaacgtaatgcataccagtatatgtagagtgaaagaaataaaaaaaatagaaaagagaagtagaagaattaaataaatataaaataattagacttactgaagactaaagacagaaacagaatattcctagtctatggaaatagcagttagtggtattagaattcacaca

SEQ ID NO: 38384 - DNA, 550 bp, Homo sapiens
tgcccaaggttgaattctgcccaaaaactgctaaataagatgagggcatgaaaacagtggcatctagttttgtcagttaagaattataatgtttgaagaaattaaaggaaaactccagaaagaaaatgtgtttctacattttgtgcaaattatacctttgctttgttgtaaaattataattaagtgatactgtagtagtatcttcaatatgttagattgcgtcaattttgtaaatttggttaagataaataacatgtattcgtattattttctactttttgtagtacttttgatacataattttatttgatctcctgaatagccctctaagttaggtaagaaaaaattactttataaggatatttaaatatacagttttaggaacrtaatgcataccagtatatgtagagtgaaagaaataaaaaaaatagaaaagagaagtagaagaattaaataaatataaaataattagacttactgaagactaaagacagaaacagaatattcctagtctatggaaatagcagttagtggtattagaattcacaca

SEQ ID NO: 38385 - DNA, 550 bp, Homo sapiens
tgcccaaggttgaattctgcccaaaaactgctaaataagatgagggcatgaaaacagtggcatctagttttgtcagttaagaattataatgtttgaagaaattaaaggaaaactccagaaagaaaatgtgtttctacattttgtgcaaattatacctttgctttgttgtaaaattataattaagtgatactgtagtagtatcttcaatatgttagattgcgtcaattttgtaaatttggttaagataaataacatgtattcgtattattttctactttttgtagtacttttgatacataattttatttgatctcctgaatagccctctaagttaggtaagaaaaaattactttataaggatatttaaatatacagttttaggaacgtaatgcataccagtatatgtagagtgaaagaaataaaaaaaatagaaaagagaagtagaagaattaaataaatataaaataattagacttactgaagactaaagacagaaacagaatrttcctagtctatggaaatagcagttagtggtattagaattcacaca

SEQ ID NO: 38386 - DNA, 207 bp, Homo sapiens
gagactgcggaagtaaattattagctttttaagttctacggaacaagagagaaaagattaaatggaatgaatacctgttgccttcatgcctgaactatccatcaaatcttatcttgttttttttactcttatcttggtttttcctattaaagcaaggggaattttcaacggcttyataagctgctgaaatggactgcatagtcgtca

SEQ ID NO: 38387 - DNA, 683 bp, Homo sapiens
tgcttgatgagcaaaaagtccaagcacagacagagttgtgtgtggtccttggacggaccagggtgcagtggtgcagcccacggtgggtgtgtagctgcccaaatccatccacacccacctcagttggctctgccatgttgctgacccttcaaggaggtggcctctggtaatcaccaaacccagtaaaagacagcaggagagtgaggggggcaggggacagtggctgctgcagccgttggtccgagggtagcatgcaataaatagcattcacccacctccctcctctcctcctgacattccagggtgcatccagccgacggcttctgtgccaccaagacaaagggaggctggcaggtgactggtgtgggccccttgtygcatctccatctccataaagtggtcctaggccatgtgggtaaatcacacagtgtgggccctcagaaaatgatgtgcaccagatttgagccagagaagaaacgcagtcctcaacaggcgtcaacctgggaggacgcagcccttctctctcctcttcccagaccacatagctgagccttcaccaggctctgggagtccaaacatgtctttgcctccagccacagagctgatgactgagtgtccagggggaagcatagccactgtgcaagatgcttctctggatgccgtctttctggggttccctgaca

SEQ ID NO: 38388 - DNA, 683 bp, Homo sapiens
tgcttgatgagcaaaaagtccaagcacagacagagttgtgtgtggtccttggacggaccagggtgcagtggtgcagcccacggtgggtgtgtagctgcccaaatccatccacacccacctcagttggctctgccatgttgctgacccttcaaggaggtggcctctggtaatcaccaaacccagtaaaagacagcaggagagtgaggggggcaggggacagtggctgctgcagccgttggtccgagggtagcatgcaataaatagcattcacccacctccctcctctcctcctgacattccagggtgcatccagccgacggcttctgtgccaccaagacaaagggaggctggcaggtgactggtgtgggccccttgtcgcatctccatctccataaagtggtcctaggccatgtgggtaaatcacacagtgtgggccctcagaaaatgatgtgcaccagatttgagccagagaagaaacgcagtcctcaacaggcgtcaacctgggaggacgcagcccttctctctcctsttcccagaccacatagctgagccttcaccaggctctgggagtccaaacatgtctttgcctccagccacagagctgatgactgagtgtccagggggaagcatagccactgtgcaagatgcttctctggatgccgtctttctggggttccctgaca

SEQ ID NO: 38389 - DNA, 683 bp, Homo sapiens
tgcttgatgagcaaaaagtccaagcacagacagagttgtgtgtggtccttggacggaccagggtgcagtggtgcagcccacggtgggtgtgtagctgcccaaatccatccacacccacctcagttggctctgccatgttgctgacccttcaaggaggtggcctctggtaatcaccaaacccagtaaaagacagcaggagagtgaggggggcaggggacagtggctgctgcagccgttggtccgagggtagcatgcaataaatagcattcacccacctccctcctctcctcctgacattccagggtgcatccagccgacggcttctgtgccaccaagacaaagggaggctggcaggtgactggtgtgggccccttgtcgcatctccatctccataaagtggtcctaggccatgtgggtaaatcacacagtgtgggccctcagaaaatgatgtgcaccagatttgagccagagaagaaacgcagtcctcaacaggcgtcaacctgggaggacgcagcccttctctctcctcttcccagaccacatagctgagccttcaccaggctctgggagtccaaacaygtctttgcctccagccacagagctgatgactgagtgtccagggggaagcatagccactgtgcaagatgcttctctggatgccgtctttctggggttccctgaca

SEQ ID NO: 38390 - DNA, 681 bp, Homo sapiens
tttcaagggtctctatttatgccctcagagtaggatttgttctatccccagtttttgcatgaattaccattcctgtctgtcccatccaagccacccccacataaactatctattcttatcattatggtaccattaatcccattctcccctccccctcccaactcacctaaggggttaaaagacttcagtacatttgtgacttgtcagtgacatataatacccaggtccttcatgcaatcaacttttacttgacatgtatttgctcatcacaggacccrcattactactgggaaaatgaagaaaaacctaaattaacacttgacattcaatatggtcaagtccttaattggctgggcttcctgagaaagcaattttctattccccaaactgttcgcgtgtcatgtgtagagtgcagctcttggccatcactgctgtccctcgctccctctaatgagagcagatgaattagtgctacgtgacacgatttgagcagggcttcctcctcctcccctccccccagtctttctcctataccagtgacagctgtgtggcaaggggaagaaagaaagagaaacgcaagagcaaagaatcctgtaaaggatgatcatttttttaaatgaaccttaaatgtctcgttgaaactacagaacaacagggtcacttaattgtggaggtggggaa

SEQ ID NO: 38391 - DNA, 599 bp, Homo sapiens
atgggaccttgaaatatgctggccagtcttgctcactaagcctgtcctctgatttgtaattaaggctatgtggaggtggggtgggcccaaggtgtgcctattgagagattgggaaaggaaattacatatgcccagacagtattacttaaaagcattgagtacatcaaaactttaagaaattgcaaatataacacaccaatgaccaactaaacacattttttaagagttaatagtttctaaggctgatagtagccaacagctaaataaactttggtgagaactaaagtaacaaagtgggaataactgaataatttgctgattgataatggatacacttttgccctgcctagctcaatttcttactcccttttcttccacttaatatgacacttttaactgctgttagggwatactaatcacccccacccccatcctcccgccccagccccccgccccgctcccttgccaagtataagaagctgtggagaacacaaaagttaagacatactccttgctcacaagtttacaatctagtacaggagataagctatgaacaaaacaaccttaacaaaaacagaataggaaaagaaacaagagca

SEQ ID NO: 38392 - DNA, 599 bp, Homo sapiens
atgggaccttgaaatatgctggccagtcttgctcactaagcctgtcctctgatttgtaattaaggctatgtggaggtggggtgggcccaaggtgtgcctattgagagattgggaaaggaaattacatatgcccagacagtattacttaaaagcattgagtacatcaaaactttaagaaattgcaaatataacacaccaatgaccaactaaacacattttttaagagttaatagtttctaaggctgatagtagccaacagctaaataaactttggtgagaactaaagtaacaaagtgggaataactgaataatttgctgattgataatggatacacttttgccctgcctagctcaatttcttactcccttttcttccacttaatatgacacttttaactgctgttagggaatactaatcacccccacccccatcctcccgccccagccccccgccccgctcccttgccaagtataagaagctgtggagaacacaaaagttaagrcatactccttgctcacaagtttacaatctagtacaggagataagctatgaacaaaacaaccttaacaaaaacagaataggaaaagaaacaagagca

SEQ ID NO: 38393 - DNA, 1232 bp, Homo sapiens
tgcatttctctgtgagcatttctaaggtcttgttctgagggtccaatttcctatattcacatcctggcacatctgtaaatgctcacagtgatggtgtcttaactctttctagagctgtgaacgtactgcttcttgagttcttagacacctctctttctaaagtaacaggatcctagtgttagtttcactgtaagaactgaaatccagaacctggatgtcctgtgaccrcaaggggcagagccaggtcttggttgcagctgttctgatgcccagtttggactcttccctagctagtctgttatgctgcaagctgaagtttacaaatttgatgcctcctgttggggtatttctgaagggtgtatagggttatcaaacactcttaaaatacatgcctaaggtcatgcttaatgtatacggcaaaccatccctcacagtttcttgcataaacttgaatatgttctacatgttttctcagcctaatagaatgaccgcttaattgagttgtataatttgaaatgttgaagtgcaataagaacaggaggactctctgctttctttggaaactattaaccagtaaatgaaaatttagttgaaaactagtagttaataattgccattttctaacatgaaaggattttatccctcatgtgttttgttaaacattgtaaaagtgtcaaaattagctgaactctcatgtatttgtatttaatataatctgtttagatgatctggatatgaaatgtgataggaatgatggttgtagcttagagagaaagagagagagattgagaccctctctgaatatttggtttctggatttaatcaccaatgcacttattttattactcttggcttttgtagtctgaggactttgttttcttcttttgcttaattttcttaacctgaaatgtgacttggcaaaattaaggacagaggtgtatcaaattctttgctagtctctatttttttttttgtgaagaagagatttgtattactacgttttatttataatctttagaagagctataatagaaatgggttcatagatctgtaaaaatcaaaatcactcttaaaaaatccctcaagctgtctgtcactaatgggggaaaaaatgtaatccactttggagatttttttttttaatgagacagggtctcactctgttgcccaggctagaatgtagtggtgcgatcatagctcactgaagccttgaactcctgggcttacgcagt

SEQ ID NO: 38394 - DNA, 427 bp, Homo sapiens
taaaaaagaaaaaaaattgtttaaaagaattttgatttctgaatggagacggaatttaacacatttttttcaatgcttaattttatagtatatatcaatgaagaggattgattattctggaactgtttacaaattttggggggggataaatttcagtacttaagtcaagacctctctatacctaggccctaaaataagtaataactaaagaaaaaaagtccaaatcatatttgtatcatgttaaattttggcagmaatactaaggcaattttaccagtatggctgtggctaaaagagaatatcccaaagttcataaagtaagcacacaccccatgtacttaaatctctccctctctctctttctctctctcacacacacacacgcaaatgcacttgcacatatataaaagtacagaaaacttctgat

SEQ ID NO: 38395 - DNA, 780 bp, Homo sapiens
tatcaggcgggagatttaatgtattccactgacaaagaatctcaaaagtaatgcccaattgcctgtggtgatatcttttgcaaattttgaaatgtagaggaagaatatttacagaaatattgctgttgtaatataaagcaatttaatatgttattcttacttttttggcttttgttttcaattttattctaattaaagtaaactaaaatatatgtacttaaagtgtaaaatttgattaactttgacattatgatataattaccatagtcaagataatacatattttcataactaagggtttttcctgccctttgtaattatgcttactttttaccttatctgaagtccaggaagtaagaatttactaaattcagcaacrtatgtaaatcttgtcctggctaaactagatgcacagcattataattagatcatcaagaagatacaaaaactttctcttttaaaatccaagtaggggatgtagttgtgtcagaatatggttattggactctgaactgtatagtatttatctattagttcactccccaaatgtgcattaagcatctactacaagccatgccctgatccaggaggtgaggacacagttctaaagaaaacgcattctctgcccttgtggaacagcttactggggagagaaaagtaagcttactggggagagaaaagtcttatgagaagaatgggcagtcacagtttacacatcttaatgtaatgcaaaaagaaatggcagaaatataaaatgttgtccaaagcactaggtggcga

SEQ ID NO: 38396 - DNA, 780 bp, Homo sapiens
tatcaggcgggagatttaatgtattccactgacaaagaatctcaaaagtaatgcccaattgcctgtggtgatatcttttgcaaattttgaaatgtagaggaagaatatttacagaaatattgctgttgtaatataaagcaatttaatatgttattcttacttttttggcttttgttttcaattttattctaattaaagtaaactaaaatatatgtacttaaagtgtaaaatttgattaactttgacattatgatataattaccatagtcaagataatacatattttcataactaagggtttttcctgccctttgtaattatgcttactttttaccttatctgaagtccaggaagtaagaatttactaaattcagcaacgtatgtaaatcttgtcctggctaaactagatgcacagcattataattagatcatcaagaagatacaaaaactttctcttttaaaatccaagtaggggatgtagttgtgtcagaatatrgttattggactctgaactgtatagtatttatctattagttcactccccaaatgtgcattaagcatctactacaagccatgccctgatccaggaggtgaggacacagttctaaagaaaacgcattctctgcccttgtggaacagcttactggggagagaaaagtaagcttactggggagagaaaagtcttatgagaagaatgggcagtcacagtttacacatcttaatgtaatgcaaaaagaaatggcagaaatataaaatgttgtccaaagcactaggtggcga

SEQ ID NO: 38397 - DNA, 517 bp, Homo sapiens
aattctgctttagcaagaccgtgaaacaggtctagcatcctcagtgccttcctaaggtcagttacacagttggcaagtgatggatgctggattaagacacgagggacctcagtccacgccccatcttttaattgccattctgtattgcttcttgctgggtaatattgccactctttatcctcaacttctggctattttctcaataactttcctctttctaagtggtaaatactttgtttctttgaacaaattctaagagttttatgtccatataaacatgactataacaatttgaaattaattttgtgtgaagttggtgagtgcctaaatgtatgctggttaaaaagtgaaaacaaaaataaaacatatatacatgtgacccgtrgacacaccatggaaaaataaataagtaggtgacagcttcccaaaaggtgattatgtggaaagtatatagcgtaatgtactcattttccaggcgaggaggagtgtctggtctccacttcacgctgaaaaatat

SEQ ID NO: 38398 - DNA, 849 bp, Homo sapiens
  misc_feature (1)...(849): n = A,T,C or G
aaatttgtggtctagccgaaaatttgtaattaggaatttttcaaagcattttctcccaaaaaaaaaaaaaaaaagaaaaggaaaaaaaagggagaattgtggacccagactcaggactcttttccttctgtctttggaaataccgggggaactttggtttttgtcctaatatatcagaaataaaatgaactttgtgatatattttcaaagctcccaggtaaagacaaaaaagagaaactttttcattttgatgctgtaaaacattattcagttgactactaaaacatacttaatcgtggtacatttatagagccatgacatattcacaatccaatgctgcaggcagatgtcatatagtatatntgtgccgcagtcnagtaaattatggatacagactctcaaacagatgctttcaagcataagcgaaaacaaacctttccttaaaagttagtttttgtatttggaaattattattttttattctgaaaaatgatgtgtttctagacacttctaaagtgacataaatgarcttagcctgtaaaattatctttcagccaatagtcagtgtcttggttctatcatttcttttttttttttcttttctaaccctgttttatggtgctgatctatcatttctatgcagataagatgatttagctattctttaccagatatttttactccatgacacataatttaaatagatacttttaagtgaactttcaaaactatatatataaaattatcttaaatatttataaaattattttcaataagctgatttacccagagctctaaacaagtctttactactgatttggtgtctcaaaagtagtcctggctttatgc

SEQ ID NO: 38399 - DNA, 849 bp, Homo sapiens
  misc_feature (1)...(849): n = A,T,C or G
aaatttgtggtctagccgaaaatttgtaattaggaatttttcaaagcattttctcccaaaaaaaaaaaaaaaaagaaaaggaaaaaaaagggagaattgtggacccagactcaggactcttttccttctgtctttggaaataccgggggaactttggtttttgtcctaatatatcagaaataaaatgaactttgtgatatattttcaaagctcccaggtaaagacaaaaaagagaaactttttcattttgatgctgtaaaacattattcagttgactactaaaacatacttaatcgtggtacatttatagagccatgacatattcacaatccaatgctgcaggcagatgtcatatagtatatntgtgccgcagtcnagtaaattatggatacagactctcaaacagatgctttcaagcataagcgaaaacaaacctttccttaaaagttagtttttgtatttggaaattattattttttattctgaaaaatgatgtgtttctagacacttctaaagtgacataaatgagcttagcctgtaaaattatctttcakccaatagtcagtgtcttggttctatcatttcttttttttttttcttttctaaccctgttttatggtgctgatctatcatttctatgcagataagatgatttagctattctttaccagatatttttactccatgacacataatttaaatagatacttttaagtgaactttcaaaactatatatataaaattatcttaaatatttataaaattattttcaataagctgatttacccagagctctaaacaagtctttactactgatttggtgtctcaaaagtagtcctggctttatgc

SEQ ID NO: 38400 - DNA, 1078 bp, Homo sapiens
gaccccgaagccttgccttcagccaagttagatctttcagtggaaataagatggaattatttcaaaataagatggaaataatttggaagttggctgggtaagacctgttgacatggaaaagcaggttttttccatttttccactctcaactctataccccctagatagacactcttatatttcctatttcaccttccacaatttcttgtcaaagattactttaaagtgtacaaaacaatgatatctaaaggcttcccatctcacttagagtaaaaacaaagtctctataatccctcatcaccaggccaccagccaaccactcacccaatgtcttaattccttctccagcctcctccaggcacactggcttacctgtgagtccttgaacattctgggcacatttctgtttcagggcctttgcacttgctcttccctccatctggactgcccttcagtgcctacatggcaaagtcaagtcttaattgtccctcttcgatagagacttccagatctatcctatctaaaatttcaacctctcccacctgccaaacaatttctatcctctttcctaacatatcatataattaacttttccaatctcatttattgcctgtctctccactcgaatataagctccatgaggacagtattttatacactgctgtatcctttgtgcctggaacaattcctggcatgtagtaatggcccaataaatactaactgaatgagtgcataaataaatgaatgaatatcagtgattcactaaacccacctctccttcattcacacaaaagccaggtcctttcacagggcacttccagcattgccaccatgatcttaattgcaaatagttactagctgttaccaggctccaagcattgtatgaaacaccttacatacactatcttatcttcwcaagcaactcctgagctgagtgtaatcatccccagtttacgatgaataaatgatgagccagagagatcaagtaacctgcccacattggcttgctagtatgtggtagagctcaaatgaaagtcaaagttaaagtttgtctaacacatgaggtcttaaccaggga

SEQ ID NO: 38401 - DNA, 1078 bp, Homo sapiens
gaccccgaagccttgccttcagccaagttagatctttcagtggaaataagatggaattatttcaaaataagatggaaataatttggaagttggctgggtaagacctgttgacatggaaaagcaggttttttccatttttccactctcaactctataccccctagatagacactcttatatttcctatttcaccttccacaatttcttgtcaaagattactttaaagtgtacaaaacaatgatatctaaaggcttcccatctcacttagagtaaaaacaaagtctctataatccctcatcaccaggccaccagccaaccactcacccaatgtcttaattccttctccagcctcctccaggcacactggcttacctgtgagtccttgaacattctgggcacatttctgtttcagggcctttgcacttgctcttccctccatctggactgcccttcagtgcctacatggcaaagtcaagtcttaattgtccctcttcgatagagacttccagatctatcctatctaaaatttcaacctctcccacctgccaaacaatttctatcctctttcctaacatatcatataattaacttttccaatctcatttattgcctgtctctccactcgaatataagctccatgaggacagtattttatacactgctgtatcctttgtgcctggaacaattcctggcatgtagtaatggcccaataaatactaactgaatgagtgcataaataaatgaatgaatatcagtgattcactaaacccacctctccttcattcacacaaaagccaggtcctttcacagggcacttccagcattgccaccatgatcttaattgcaaatagttactagctgttaccaggctccaagcattgtatgaaacaccttacatacactatcttatcttcacwagcaactcctgagctgagtgtaatcatccccagtttacgatgaataaatgatgagccagagagatcaagtaacctgcccacattggcttgctagtatgtggtagagctcaaatgaaagtcaaagttaaagtttgtctaacacatgaggtcttaaccaggga

SEQ ID NO: 38402 - DNA, 2272 bp, Homo sapiens
tgtcacccaggtagtctataatagtacctgatagttttttgatcctcatcctcctcccaccttccaacctcaagtaggttctggtgtctattgttcccctctttgtgtccacgtgtcctcaatgtttagctcccacttataagtgggaacatgtggtatttgcttttctgttcctgtgttaattcacttaggataatggccaccagctgtatctatgttgctgcaaagggcatgatactgttgtttttatggctgcatagtattccatcgtgtgtatgtcccagtacacttctttttgttgtttttatggctgcatagtattccatcrtgtatatgtcccaatacacttcttcatccagtacactgttgatgggcatctagatttattccatgtctttgctaatgtgaatagcgctgcaatgagcatacacatgcatgtgtcgtgtctttatggtagaacaatgatacaaaggctttttaagagttaggacaaaagtacaattcgattatgtatccaaacacacaataaatagctgttgttgtcactaagtgtacaccttcttcactgtgacttctcagaacgaaaacagaaagacatgttagaattggctgagaaacatattccatccatgtttatggagctggctgagtggtgggcatggaagtgggcaaaatctttacttccaggacacaccttaagtaaccaaactgcaataatacctaagtcatcagaatcacatagcttcaatgaatcctgaacagaaagaatttcacatgtataagatgaatggtcaaagaagaatagaaaaatatccaccagcattggaactttggcgtcaaacaatctatttagattcccttctcttccactgataaactatgtgaccctaggcaagttatctaaattctttagctctcagtttcctcatctgtgaaatgataaaaatagccacttattaggaaaggtggaataaagaaatgtggtaatatctgctagggtctgaatgtttgttcccccaaaattcatatattgaaatcctcacgccaacagtgatggtattaggaggtggggtctttgggagatgattagcttatggtgacagagccttcatgaatgggattagtgcctttataaaagaggctcccgaaagatctcctgcccctcccactgtgagaggtttatagcaaagagacattgtttatgaaccaggaagtgccctcactagacactgaatttggtggcatcttgatcttggacttcccagcctccagagctgtggggaacaaattcctgtggattgtatgctatccagtctatgacatttcattatagcagcctaaaaggactaacatataaagtataaaaacaatttcattttctaaagtgtcctactttattttcacccaaattttggctaatagccaaggtttagcaaaccaaattatttctctaaatttatccaattttagaactgtgtattttttcaagaaagtcgatatcaccataaagatgttttgaagcaggaacctcagaaataggtgaacctatgaacgtctaaccaaatatactctatatttttatgtaatttcaactgaaaaaaagttaaaaaatgtcaatacactaaaatatcaaaaaagatgaaagcatttaaatatccctgtatcacaaatgattaagaatatccagctttataaaatacactgtcaagtatcagaaagtcattatgcatttgattttttttttggcatcattatttctggaaatgacatatagaaaatgttgaggtgtgtgctgagttcccttttgtttggcaggaaccagtttcaccttcccctctttcacaccacagaactgagagtcctgtaagggtaaaagggaagaagaacaggagctgttgatgctttaacttcattttgctagcagtgttataaaccacaaatttaagtcaatgatatgcctttaactgcctgacaagttatttaattcagatacagctattaaaaatttatattcatttgacctaggattgagttctagctatgaaacataggatgacagagaaaattatccaagtattctctgtttagcttatgaacaacagaaatttaattcttacagttctggagggtgagaagtccaagttccaattttcaaacatgctaagcactttaaaagcaagtaacaccaatacaaataccctaaattggtaacttaattacaagtgccttattgttattacagaatgtcagaccctcatggtaaattaccata

SEQ ID NO: 38403 - DNA, 2272 bp, Homo sapiens
tgtcacccaggtagtctataatagtacctgatagttttttgatcctcatcctcctcccaccttccaacctcaagtaggttctggtgtctattgttcccctctttgtgtccacgtgtcctcaatgtttagctcccacttataagtgggaacatgtggtatttgcttttctgttcctgtgttaattcacttaggataatggccaccagctgtatctatgttgctgcaaagggcatgatactgttgtttttatggctgcatagtattccatcgtgtgtatgtcccagtacacttctttttgttgtttttatggctgcatagtattccatcatgtatatgtcccaatacacttcttcatccagtacactgttgatgggcatctagatttattccatgtctttgctaatgtgaatagcgctgcaatgagcatacacatgcatgtgtcgtgtctttatggtagaacaatgatacaaaggctttttaagagttaggacaaaagtacaattcgattatgtatccaaacacacaataaatagctgttgttgtcactaagtgtacaccttcttcactgtgacttctcagaacgaaaacagaaagacatgttagaattggctgagaaacatattccatccatgtttatggagctggctgagtggtgggcatggaagtgggcaaaatctttacttccaggacacaccttaagtaaccaaactgcaataatacctaagtcatcagaatcacatagcttcaatgaatcctgaacagaaagaatttcacatgtataagatgaatggtcwaagaagaatagaaaaatatccaccagcattggaactttggcgtcaaacaatctatttagattcccttctcttccactgataaactatgtgaccctaggcaagttatctaaattctttagctctcagtttcctcatctgtgaaatgataaaaatagccacttattaggaaaggtggaataaagaaatgtggtaatatctgctagggtctgaatgtttgttcccccaaaattcatatattgaaatcctcacgccaacagtgatggtattaggaggtggggtctttgggagatgattagcttatggtgacagagccttcatgaatgggattagtgcctttataaaagaggctcccgaaagatctcctgcccctcccactgtgagaggtttatagcaaagagacattgtttatgaaccaggaagtgccctcactagacactgaatttggtggcatcttgatcttggacttcccagcctccagagctgtggggaacaaattcctgtggattgtatgctatccagtctatgacatttcattatagcagcctaaaaggactaacatataaagtataaaaacaatttcattttctaaagtgtcctactttattttcacccaaattttggctaatagccaaggtttagcaaaccaaattatttctctaaatttatccaattttagaactgtgtattttttcaagaaagtcgatatcaccataaagatgttttgaagcaggaacctcagaaataggtgaacctatgaacgtctaaccaaatatactctatatttttatgtaatttcaactgaaaaaaagttaaaaaatgtcaatacactaaaatatcaaaaaagatgaaagcatttaaatatccctgtatcacaaatgattaagaatatccagctttataaaatacactgtcaagtatcagaaagtcattatgcatttgattttttttttggcatcattatttctggaaatgacatatagaaaatgttgaggtgtgtgctgagttcccttttgtttggcaggaaccagtttcaccttcccctctttcacaccacagaactgagagtcctgtaagggtaaaagggaagaagaacaggagctgttgatgctttaacttcattttgctagcagtgttataaaccacaaatttaagtcaatgatatgcctttaactgcctgacaagttatttaattcagatacagctattaaaaatttatattcatttgacctaggattgagttctagctatgaaacataggatgacagagaaaattatccaagtattctctgtttagcttatgaacaacagaaatttaattcttacagttctggagggtgagaagtccaagttccaattttcaaacatgctaagcactttaaaagcaagtaacaccaatacaaataccctaaattggtaacttaattacaagtgccttattgttattacagaatgtcagaccctcatggtaaattaccata

SEQ ID NO: 38404 - DNA, 2272 bp, Homo sapiens
tgtcacccaggtagtctataatagtacctgatagttttttgatcctcatcctcctcccaccttccaacctcaagtaggttctggtgtctattgttcccctctttgtgtccacgtgtcctcaatgtttagctcccacttataagtgggaacatgtggtatttgcttttctgttcctgtgttaattcacttaggataatggccaccagctgtatctatgttgctgcaaagggcatgatactgttgtttttatggctgcatagtattccatcgtgtgtatgtcccagtacacttctttttgttgtttttatggctgcatagtattccatcatgtatatgtcccaatacacttcttcatccagtacactgttgatgggcatctagatttattccatgtctttgctaatgtgaatagcgctgcaatgagcatacacatgcatgtgtcgtgtctttatggtagaacaatgatacaaaggctttttaagagttaggacaaaagtacaattcgattatgtatccaaacacacaataaatagctgttgttgtcactaagtgtacaccttcttcactgtgacttctcagaacgaaaacagaaagacatgttagaattggctgagaaacatattccatccatgtttatggagctggctgagtggtgggcatggaagtgggcaaaatctttacttccaggacacaccttaagtaaccaaactgcaataatacctaagtcatcagaatcacatagcttcaatgaatcctgaacagaaagaatttcacatgtataagatgaatggtcaaagaagaatagaaaaatatccaccagcattggaactttggcgtcaaacaatctatttagattcccttctcttccactgataaactatgtgaccctaggcaagttatctaaattctttagctctcagtttcctcatctgtgaaatgataaaaatagccacttattaggaaaggtggaataaagaaatgtggtaatatctgctagggtctgaatgtttgttcccccaaaattcatatattgaaatcctcacgccaacagtgatggtattaggaggtggggtctttgggagatgattagcttatggtgacagagccttcatgaatgggattagtgcctttataaaagaggctcccgaaagatctcctgcccctcccactgtgagaggtttatagcaaagagacattgtttatgaaccaggaagtgccctcactagacactgaatttggtggcatcttgatcttggacttcccagcctccagagctgtggggaacaaattcctgtggattgtatgctatccagtctatgacatttcattatagcagcctaaaaggactaacatataaagtataaaaacaatttcattttctaaagtgtcctactttattttcacccaaattttggctaatagccaaggtttagcaaaccaaattatttctctaaatttatccaattttagaactgtgtattttttcaagaaagtcgatatcaccataaagatgttttgaagcaggaacctcagaaataggtgaacctatgaacgtctaaccaaatatactctatatttttaygtaatttcaactgaaaaaaagttaaaaaatgtcaatacactaaaatatcaaaaaagatgaaagcatttaaatatccctgtatcacaaatgattaagaatatccagctttataaaatacactgtcaagtatcagaaagtcattatgcatttgattttttttttggcatcattatttctggaaatgacatatagaaaatgttgaggtgtgtgctgagttcccttttgtttggcaggaaccagtttcaccttcccctctttcacaccacagaactgagagtcctgtaagggtaaaagggaagaagaacaggagctgttgatgctttaacttcattttgctagcagtgttataaaccacaaatttaagtcaatgatatgcctttaactgcctgacaagttatttaattcagatacagctattaaaaatttatattcatttgacctaggattgagttctagctatgaaacataggatgacagagaaaattatccaagtattctctgtttagcttatgaacaacagaaatttaattcttacagttctggagggtgagaagtccaagttccaattttcaaacatgctaagcactttaaaagcaagtaacaccaatacaaataccctaaattggtaacttaattacaagtgccttattgttattacagaatgtcagaccctcatggtaaattaccata

SEQ ID NO: 38405 - DNA, 2272 bp, Homo sapiens
tgtcacccaggtagtctataatagtacctgatagttttttgatcctcatcctcctcccaccttccaacctcaagtaggttctggtgtctattgttcccctctttgtgtccacgtgtcctcaatgtttagctcccacttataagtgggaacatgtggtatttgcttttctgttcctgtgttaattcacttaggataatggccaccagctgtatctatgttgctgcaaagggcatgatactgttgtttttatggctgcatagtattccatcgtgtgtatgtcccagtacacttctttttgttgtttttatggctgcatagtattccatcatgtatatgtcccaatacacttcttcatccagtacactgttgatgggcatctagatttattccatgtctttgctaatgtgaatagcgctgcaatgagcatacacatgcatgtgtcgtgtctttatggtagaacaatgatacaaaggctttttaagagttaggacaaaagtacaattcgattatgtatccaaacacacaataaatagctgttgttgtcactaagtgtacaccttcttcactgtgacttctcagaacgaaaacagaaagacatgttagaattggctgagaaacatattccatccatgtttatggagctggctgagtggtgggcatggaagtgggcaaaatctttacttccaggacacaccttaagtaaccaaactgcaataatacctaagtcatcagaatcacatagcttcaatgaatcctgaacagaaagaatttcacatgtataagatgaatggtcaaagaagaatagaaaaatatccaccagcattggaactttggcgtcaaacaatctatttagattcccttctcttccactgataaactatgtgaccctaggcaagttatctaaattctttagctctcagtttcctcatctgtgaaatgataaaaatagccacttattaggaaaggtggaataaagaaatgtggtaatatctgctagggtctgaatgtttgttcccccaaaattcatatattgaaatcctcacgccaacagtgatggtattaggaggtggggtctttgggagatgattagcttatggtgacagagccttcatgaatgggattagtgcctttataaaagaggctcccgaaagatctcctgcccctcccactgtgagaggtttatagcaaagagacattgtttatgaaccaggaagtgccctcactagacactgaatttggtggcatcttgatcttggacttcccagcctccagagctgtggggaacaaattcctgtggattgtatgctatccagtctatgacatttcattatagcagcctaaaaggactaacatataaagtataaaaacaatttcattttctaaagtgtcctactttattttcacccaaattttggctaatagccaaggtttagcaaaccaaattatttctctaaatttatccaattttagaactgtgtattttttcaagaaagtcgatatcaccataaagatgttttgaagcaggaacctcagaaataggtgaacctatgaacgtctaaccaaatatactctatatttttatgtaatttcaactgaaaaaaagttaaaaaatgtcaatacactaaaatatcaaaaaagatgaaagcatttaaatatccctgtatcacaaatgattaagaatatccagctttataaaatacactgtcaagtatcagaaagtcattatgcatttgattttttttttggcatcattatttctggaaatgacatatagaaaatgttgaggtgtgtgctgagttcccttttgtttggcaggaaccagtttcaccttcccctctttcacaccacagaactgagagtcctgtaagggtaaaagggaagaagaacaggagctgttgatgctttaacttcattttgctagcagtgttataaaccacaaatttaagtcaatgatatgcctttaactgcctgacaagttatttaattcagatacagctattaaaaatttatattcatttgacctaggattgagttctagctatgaaacataggatgacagagaaaattatccaagtattctctgtttagcttatraacaacagaaatttaattcttacagttctggagggtgagaagtccaagttccaattttcaaacatgctaagcactttaaaagcaagtaacaccaatacaaataccctaaattggtaacttaattacaagtgccttattgttattacagaatgtcagaccctcatggtaaattaccata

SEQ ID NO: 38406 - DNA, 613 bp, Homo sapiens
aactttatatgataaaagtattttcatattcccarcttacagctgtgtaagctgaggcttagggaggctaataagcttgcccaagggcacacaggcacctgaaggtgggaatacttaaggttcactatggatcaattaggcatttataggctggtatggctgtctgattttcatctagcaaaattcagaatgtgtttcccttatacaaataaatggactctttggaatgtacactgccaacagattagtattaaatagttaatggtagaaatacttatgccaagtttttctccacaagacaagggactagcttgtaagagttattctctaagcagtctttaccaactggattctgccaagccctagggttccctggaagtgcagtgagtggggaagtagggcactgaaaggcagagctctcggttctgcacttcaaccacagcgccctttatgtaccgagcttccttacaaaactccatctgaacccagtgcgcaatagcaaaatgacaaactgggatcacattacggatgctcaacttatgatggggctacatcctgagaaacccagcacacgttgaaaatattgtaagttgaaattgcatttcatacacct

SEQ ID NO: 38407 - DNA, 388 bp, Homo sapiens
atactgatgaactaactgcttagaacaaggtttgccccttactaaatactgtgcacggtggtaataagtaataataattgatttctcctacttttcttcctctagtctatatcactacccttcagacacactggactcttttctctccttcatacaagtcaagcctttttctgtctccaagtctctgctcttgctgttttctttacctgtgttctctctcacatatcactttatgctcttcagatcctttgtcgcaatgtyacccttatgttttatggtatggtcctgctgtgtttttgtcttccctgactgcatgctcactcgtgctctctctcaatcatgcgctctctctctctctccctccctccctctctctccctccctctcc

SEQ ID NO: 38408 - DNA, 568 bp, Homo sapiens
tttattattattttttttttgtgatggagtctcactctgtcacccaggctggagtgcaatggcacaatcttggctcactgcaacctccgcctcctgggttcaagcgattctcctgcctcagactcctgaatagctgggattacaggcacatgacaccacgcctggctattttttgtatttttagtagagacagagtttccccatgttggccaggctcgtctcraactcctgaccttaggtgatccgcctgccttggccttccaaagtgctgggattacaggcatgagccactgcatccggcctagtttttttgttttcaaagcaccggtcaccacggtgagtgaggggatgggatgagaaccaggtgagatccctgtgcatgcaggaagttgcaccaaaggagaagaaccctaaacttctgagattcatttaaatagaaattactggcacatctgcccatcctcttctctggggagagagtgagagagattgagattacttattaagcaaatctccagggttgagagggaaggtatcactaagtttattatcctggagtataagcaca

SEQ ID NO: 38409 - DNA, 568 bp, Homo sapiens
tttattattattttttttttgtgatggagtctcactctgtcacccaggctggagtgcaatggcacaatcttggctcactgcaacctccgcctcctgggttcaagcgattctcctgcctcagactcctgaatagctgggattacaggcacatgacaccacgcctggctattttttgtatttttagtagagacagagtttccccatgttggccaggctcgtctcaaactcctgaccttaggtgatccgcctgccttggccttccaaagtgctgggattacaggcatgagccactgcatccggcctagtttttttgttttcaaagcaccggtcaccacggtgagtgaggggatgggatgagaaccaggtgagatccctgtgcatgcaggaagttgcaccaaaggagaagaaccctaaacttctgagattcatttaaatagaaaytactggcacatctgcccatcctcttctctggggagagagtgagagagattgagattacttattaagcaaatctccagggttgagagggaaggtatcactaagtttattatcctggagtataagcaca

SEQ ID NO: 38410 - DNA, 515 bp, Homo sapiens
gcagggggtgcggcagaaactgaggatgtagagtaggaaagtagagtcatgaatgtgaaggagtaagtactctagtacttttccttaattctgtgaatgtggagtaggaaatcagttcaaatcctgaaagagggaatagagggaataaaggctaagaaaagcgcccttattagaaaaacagatggagtaagaggaagataacagcaccaggagactgagcacctcccatacaccacacactgactcaacaaggtacattcacataaggaatctaatttaatccccactaaaaccctgccagactagcattttcgtctccattattgggtccctattattagagtgtagccaaaaaaaggtacagatttgcataagctcacagctcagacccagcagggctggtttgaactcaggtctgtctgccctgtcacaaaagcccattytcattttaacagaccaaaaccacctattctcacttttcaaattttttaaggcaaatattgagtacataagat

SEQ ID NO: 38411 - DNA, 581 bp, Homo sapiens
tacttataccataatagtaaatataatatatatttactattgaagcctaacatatttttcctaaatatgaaatgaaaaagcttaaaatattgtaagaatgaccaaaacgtgacacagagacacaaagtgagcacatgctattgggaaaatggtgccaatagacttgctggacwcagggttgccacaaacctttgatttgtaaaaagcacagtatctgtgaagtgcaataaaatgaagcacaataaaaaagagatatgtctgtaattaggaaaggaagaggagaaggatgagggagaaaaatgttggtgggaatactctttgtctaactcagatataattttaacaattctctcccatcacttgaaaaaaattacagttgaaataagaacaaaagtataaactgatacatatataattcaatctttgtattgtatgtatcattacatacatacatatatatatataaaatgtacatatgtatcatacatgatttgagtcagataacccaaagtctcaatttcacaacttttagtttagttataaagcaagcagaatttttattctttgctggatttgaacct

SEQ ID NO: 38412 - DNA, 581 bp, Homo sapiens
tacttataccataatagtaaatataatatatatttactattgaagcctaacatatttttcctaaatatgaaatgaaaaagcttaaaatattgtaagaatgaccaaaacgtgacacagagacacaaagtgagcacatgctattgggaaaatggtgccaatagacttgctggacacagggttgccacaaacctttgatttgtaaaaagcacagtatytgtgaagtgcaataaaatgaagcacaataaaaaagagatatgtctgtaattaggaaaggaagaggagaaggatgagggagaaaaatgttggtgggaatactctttgtctaactcagatataattttaacaattctctcccatcacttgaaaaaaattacagttgaaataagaacaaaagtataaactgatacatatataattcaatctttgtattgtatgtatcattacatacatacatatatatatataaaatgtacatatgtatcatacatgatttgagtcagataacccaaagtctcaatttcacaacttttagtttagttataaagcaagcagaatttttattctttgctggatttgaacct

SEQ ID NO: 38413 - DNA, 758 bp, Homo sapiens
agtacaataagtaatacaaaaattacttcaaatttcttcaattgtcaaagttaacaattttctgggtgttgcttgttttctcttggctatagcattctcataaaataagggtgctgtacattccaggcttgaagttctatgattaaaatctcttggcattaaagggattaatatatgtaaagtgtttagaacaaggaatagcacatgctatttaagtgtatgcttaatgattattaatgtttatcttattttcttgcattaygacattgacagagagaagaataatttacttttataagaaacctgcagtacaaagtcacctttataacatagcttataagagtttaagggtataagctctgcttgtgagttatgtctttgaaacactatatgtgttatctcaggcaatatattttagcactctctgtgcctcagtttactcatctgcaaagagaggataatggtacttattttataagatagtttatgaatattacattagccgttaaagttgagaccgtaaaaagtgtctagaccagtactggcacaaagaaatgtaaataaatattttttgttagctattatttgcataaagtttaaataaaaatttcaaatattttcttagtattctctgggttcagtaaaaatatttctgaaaatttgaaaatgtctattagaattgaaacttgcctgatactcaaggagataataatttgaaaaatctaatttctatcaagtaaatatatattttgaggagt

SEQ ID NO: 38414 - DNA, 584 bp, Homo sapiens
ccctcactgatgagggaatgaaaatagggtgtgtaactgggtgtgaaataggagtaacatgaaaagtgaaccatgccaactgcataaatgagtcaggatcagtgatcctgaccactgtcccagcttggaaactcaattctaggcatagctcttcaaactcaagaaacaacccatgacactcttccatagtcaatttctgaagaaatttctccattgccttccagttccatctcataactttcatctcctagacttcattaaaagagataaaaagagaggggagttcatatattgccaaaaaagataaccactgtattttataaataaatcataaaggacttttctactttactattacccatgaacttgtttttgtttattctctaaggtgtgcatcatatccagttcttcatcatatccccaacgtctaacatagtacttaggtcatggcagggattcagtacctgttgttaaastgaacctcttttattcatttattgaacgaatgtttacagagctcctgctatgggctaatgttgtaaataagaccttaggatatagataaaacaagaaaaataaggtga

SEQ ID NO: 38415 - DNA, 1347 bp, Homo sapiens
catagtgcttacattttttttccaaaatttatataagtaagaaaaatataagatgaaggaaagcaactgaaaatacacacacaaaataacagttaatagtgaatagagtacaataatttttttcagtgtctgagccatggagcggtagaaaacaaaaggtaatagaatattatttttaatttagtacacacacatattttgtaataatggcattatcaataacagtaagcaatagaatttattaactgtttacatatatataccaatcatctataatgtatttttaagtcattattgcaatcctgagaatagtcttatttctgttttgtatatagagacaccaagattatttaaaactgtgtgccttacagttagcaaatgggtagtgctggttgaatgcaacccagtgtctgtatatcttctgcctcatcaactgcctacaaagaagatttgccttactacactgctgatgggtaacaatgcaggactgttctgtggctaaaaatatgtttttaaagcttcaaaaatatatattgaaaccgttatgataccatctccaaatgatatggtttggatgtttatcccatccaaatcttatgttgaaatgtggtcctcattgttagagttggggcttagtgggaggtgtttgaatcatgggactagatccctcatgaatagcttggcattgtccttgcattgagtgagttctcaccctgtaagttcacatgagacctggtttttaagaagagcccgacacttcctcctttctctcttgctctctctctcaccrtgtgacataccagctccccctcccttctgccacgattgtaagtctactgaggcctcactagaagccaaacagatatgagtgccatgttagtacagcctgcattggcaaataaacttcttttctttataaattacacagtctcaggtactcctttatagcaatgcaaaatggactaagtcatccaatatgaagattttctctcactcaataccaggagctttcaacttaattcttgaattttcataatggcttagtctatatgatcaataataaagagttggtaagcttgttgatggccattaatttagaaagtagcttctcctaggtgacataatgatttgccacaagtacccacatgtgcaaaaacatctgtgtcttattctgtcaggcatggcttcccagggcatagttctctgtggaaataaatgagagcataacttcaggggatgtgccaatgtacatatgtctgtgtgcctctcttgaccaaatcctggtatgctgagctgacagtgagggtttttaccctcactgtatgtacattttgaaaatgttatgca

SEQ ID NO: 38416 - DNA, 658 bp, Homo sapiens
ccaataataactaacattctgaaggtttaggatttagaggcccaaatgtcttagctaaaagtgttcattctaacctcacaggaaaattgaaatatgaaaatatacagaaaaatcttaggcagtatttatcaattttaagaaacaactatttacaggtttttcaataggsattacattaaaaatgaaatatatagttaataaatatgaaaactgtggatataatcaacacatttattttacttcttgaagtgttaacatgtgctgtctcaaatatcaacagtgtacacgtgagaaaaaacattttacatagattttctgcgacagaaaacagcatctcattagacatcccaagttttttcatttggaacacacacccattccccagtatactaggggtaataataatttaaagagtttaattactttttactactagaaaactaattttatgtttggcacaaatttctgaaatgatattccactgcaaagaataatacctatatatggccagaattactttttttctataacattaagataatacttgtcagcctgagcaacaaagtgagacctcatctttacaaaaaataaataaattagacgggtgttgtggtgatgagggtctgtagtcccagatactcaagaggctgaggtggga

SEQ ID NO: 38417 - DNA, 658 bp, Homo sapiens
ccaataataactaacattctgaaggtttaggatttagaggcccaaatgtcttagctaaaagtgttcattctaacctcacaggaaaattgaaatatgaaaatatacagaaaaatcttaggcagtatttatcaattttaagaaacaactatttacaggtttttcaatagggattacattaaaaatgaaatatatagttaataaatatgaaaactgtggatataatcaacacatttattttacttcttgaagtgttaacatgtgctgtctcaaatatcaacagtgtacacgtgagaaaaaacattttacatagattttctgcgacagaaaacagcatctcattagacatcccaagttttttcatttggaacacacacccattccccagtataytaggggtaataataatttaaagagtttaattactttttactactagaaaactaattttatgtttggcacaaatttctgaaatgatattccactgcaaagaataatacctatatatggccagaattactttttttctataacattaagataatacttgtcagcctgagcaacaaagtgagacctcatctttacaaaaaataaataaattagacgggtgttgtggtgatgagggtctgtagtcccagatactcaagaggctgaggtggga

SEQ ID NO: 38418 - DNA, 658 bp, Homo sapiens
ccaataataactaacattctgaaggtttaggatttagaggcccaaatgtcttagctaaaagtgttcattctaacctcacaggaaaattgaaatatgaaaatatacagaaaaatcttaggcagtatttatcaattttaagaaacaactatttacaggtttttcaatagggattacattaaaaatgaaatatatagttaataaatatgaaaactgtggatataatcaacacatttattttacttcttgaagtgttaacatgtgctgtctcaaatatcaacagtgtacacgtgagaaaaaacattttacatagattttctgcgacagaaaacagcatctcattagacatcccaagttttttcatttggaacacacacccattccccagtatactaggggtaataataatttaaagagtttaattactttttactactagaaaactaattttatgtttggcacaaatttctgaaatgmtattccactgcaaagaataatacctatatatggccagaattactttttttctataacattaagataatacttgtcagcctgagcaacaaagtgagacctcatctttacaaaaaataaataaattagacgggtgttgtggtgatgagggtctgtagtcccagatactcaagaggctgaggtggga

SEQ ID NO: 38419 - DNA, 658 bp, Homo sapiens
ccaataataactaacattctgaaggtttaggatttagaggcccaaatgtcttagctaaaagtgttcattctaacctcacaggaaaattgaaatatgaaaatatacagaaaaatcttaggcagtatttatcaattttaagaaacaactatttacaggtttttcaatagggattacattaaaaatgaaatatatagttaataaatatgaaaactgtggatataatcaacacatttattttacttcttgaagtgttaacatgtgctgtctcaaatatcaacagtgtacacgtgagaaaaaacattttacatagattttctgcgacagaaaacagcatctcattagacatcccaagttttttcatttggaacacacacccattccccagtatactaggggtaataataatttaaagagtttaattactttttactactagaaaactaattttatgtttggcacaaatttctgaaatgatattccactgcaaagaataatacctatatatggccagaattactttttttctataacattaagataatacttgtcagcctgagcaacaaagtgagacctcatctttacaaaaaataaataaattagaygggtgttgtggtgatgagggtctgtagtcccagatactcaagaggctgaggtggga

SEQ ID NO: 38420 - DNA, 658 bp, Homo sapiens
ccaataataactaacattctgaaggtttaggatttagaggcccaaatgtcttagctaaaagtgttcattctaacctcacaggaaaattgaaatatgaaaatatacagaaaaatcttaggcagtatttatcaattttaagaaacaactatttacaggtttttcaatagggattacattaaaaatgaaatatatagttaataaatatgaaaactgtggatataatcaacacatttattttacttcttgaagtgttaacatgtgctgtctcaaatatcaacagtgtacacgtgagaaaaaacattttacatagattttctgcgacagaaaacagcatctcattagacatcccaagttttttcatttggaacacacacccattccccagtatactaggggtaataataatttaaagagtttaattactttttactactagaaaactaattttatgtttggcacaaatttctgaaatgatattccactgcaaagaataatacctatatatggccagaattactttttttctataacattaagataatacttgtcagcctgagcaacaaagtgagacctcatctttacaaaaaataaataaattagacgggtgttktggtgatgagggtctgtagtcccagatactcaagaggctgaggtggga

SEQ ID NO: 38421 - DNA, 653 bp, Homo sapiens
agggcttaaaacatagatgatgagttgataggcacagcaaaccaccatggcacatgtatacctatgtcacaatcctgcacgttctgcccatgtatcccagaacctaaagtaaaataaaataaaataaaaaataaaaagtaaaataattaactaaattaaataataawtcagcatgtctgtaaaaaaagaaaaaaagaaaggctaaattagtgtagtcaaaaattccttttgatgcccatctctcctttccactgaaaaatccatctgttctatgccttctcctacaccagtgtacctgattttcaggaggttcactcagcactttcttctctcatcaagtagccagccaggtgaagtagaaaggttattagagtgaaagggctgatttctagctacactttaaagctgaatttgcaacaaggccctttatccctaggcaagttgcttcaccactttttgcctgcgcctcaccaaataaggtcgttaatgtgaaaattaaaatgatcatttttattttccatgggtagagtctttcatctccggcactaacaacgtgggccttacatcctttctggggaggtagtgttctgcaaccatctctgctggctcagtccccagtaagaaacatgaaattcaacaacaaccaaaggagc

SEQ ID NO: 38422 - DNA, 653 bp, Homo sapiens
agggcttaaaacatagatgatgagttgataggcacagcaaaccaccatggcacatgtatacctatgtcacaatcctgcacgttctgcccatgtatcccagaacctaaagtaaaataaaataaaataaaaaataaaaagtaaaataattaactaaattaaataataattcagcatgtctgtaaaaaaagaaaaaaagaaaggctaaattagtgtagtcaaaaattccttttgatgcccatctctcctttccactgaaaaatmcatctgttctatgccttctcctacaccagtgtacctgattttcaggaggttcactcagcactttcttctctcatcaagtagccagccaggtgaagtagaaaggttattagagtgaaagggctgatttctagctacactttaaagctgaatttgcaacaaggccctttatccctaggcaagttgcttcaccactttttgcctgcgcctcaccaaataaggtcgttaatgtgaaaattaaaatgatcatttttattttccatgggtagagtctttcatctccggcactaacaacgtgggccttacatcctttctggggaggtagtgttctgcaaccatctctgctggctcagtccccagtaagaaacatgaaattcaacaacaaccaaaggagc

SEQ ID NO: 38423 - DNA, 520 bp, Homo sapiens
agaaagaaagaaagaaagaaagaaagaaaggaaaagaaagaaaagaaagaaaaaagaaagagaaagaaagaaagaaagaaagaaagaaagaaagaaagaaagaaaggaaagaaaggaaggaaagaaggaaagaaggaaggaaggaaggaaagaaaggaaggaaagaaggaaagaaggaaagaaggaaggaaggagaaaagaaaaaagaaagagagagagaggaagggagggaggaagggaaggaaggaagggagaaagaaagaaagacagaaagacagaaagamagaaagaaagaaagaaagaaagaaagaaagaaagaaagaaagaaagaaaagagagagggagggaggaagggaaggaaggaagggagaaagaaagaaaggcagaaagaaagaaggaaagaaagaaagaaagaaagaaagaaagaaagaaagaaaagaaaagaaaattaaatatgatgatccatataaagttctcctcacatggttggattgaataaatcatagctattccttttgta

SEQ ID NO: 38424 - DNA, 1196 bp, Homo sapiens
gcatatactggcattttataaataaattattacggcactaattgcaattaaattgccatggtttaatatggcctagtaattaagtcataagtggcttgctgcctggttcttgcctgaacctggcaacaaagaaaactatttgactcagctaaagtagttctgaatataccctcaaacttttgtagggcaatggaggtccaaaggaatcccagctctacacttaagggttatttctcctcccccttgcctttttaaatgaatatttacaaagaaaaacaatgccaaagtaaattgggttaacttgaactcttcttgtgtgtcaagaaatactgccaattctgactcagtcttctccaaaaaattttttttccctgaaagcttagggcacctctccggttagytagtttcaccacccatatattcctcggtactgaaaggagaatgcctttgtcagaaatgccactacagttgtgagcgttggttatacataaaacttccatgggatccctttgggtcatctgtccctgtctgtgctcccatggctcctgtgtttaaccatgtcaaagtattgttttctccacatttcaatcatttattcctggatatatgtatccatttacctgagggcagaactatgaccctttgtattatttccagatcctaaaatatgctatgtattcaaatctattggttgttagtgaaggaaaaaaaagaaagtaaagctaattcacaactcatcataatcactaaaagcccatatgtaataattaattaaatcaattcatactcatttcagtgtctgccaactgcaagggtttttgaagatataaacagagatacatgataatccctgtcttcaaatgaagtacagtccacttaccaaaaagaatacccatataaagataaaatcactttttgccagacactgctttgaaaacaatatgagctcttcaatcctcacaatgatgctattattgtactattagtatccctacttcatatatgagaaaatgcacaccaagtttaagaaactttcccaaggcctctctactggtaaatgaaacagccaggcttgtgtcccaggctagctggctcctgagcctacatgtttaattactgcaagatttaactacaagaatactctatttaaagtattaaatagagtatttaaaggaagtgaaggtcaatgatcttta

SEQ ID NO: 38425 - DNA, 1196 bp, Homo sapiens
gcatatactggcattttataaataaattattacggcactaattgcaattaaattgccatggtttaatatggcctagtaattaagtcataagtggcttgctgcctggttcttgcctgaacctggcaacaaagaaaactatttgactcagctaaagtagttctgaatataccctcaaacttttgtagggcaatggaggtccaaaggaatcccagctctacacttaagggttatttctcctcccccttgcctttttaaatgaatatttacaaagaaaaacaatgccaaagtaaattgggttaacttgaactcttcttgtgtgtcaagaaatactgccaattctgactcagtcttctccaaaaaattttttttccctgaaagcttagggcacctctccggttagctagtttcaccacccatatattcctcggtactgaaaggagaatgcctttgtcagaaatgccactacagttgtgagcgttggttatacataaaacttccatgggatccctttgggtcatctgtccctgtctgtgctcccatggctcctgtgtttaaccatgtcaaagtattgttttctccacatttcaatcatttattcctggatatatgtatccatttacctgagggcagaactatgaccctttgtattatttccagatcctaaaatatgctatgtattcaaatctattggttgttagtgaaggaaaaaaaagaaagtaaagctaattcacaactcatcataatcactaaaagcccatatgtaataattaattaaatcaattcatactcatttcagtgtctgccaactgcaagggtttttgaagatataaacagagatacatgataatccctgtcttcaaatgaagtacagtccacttaccaaaaagaatacccatataaagataaaatcactttttgccagacactgctttgaaarcaatatgagctcttcaatcctcacaatgatgctattattgtactattagtatccctacttcatatatgagaaaatgcacaccaagtttaagaaactttcccaaggcctctctactggtaaatgaaacagccaggcttgtgtcccaggctagctggctcctgagcctacatgtttaattactgcaagatttaactacaagaatactctatttaaagtattaaatagagtatttaaaggaagtgaaggtcaatgatcttta

SEQ ID NO: 38426 - DNA, 1185 bp, Homo sapiens
gcatcaaaaaaaataggaaatttttaaggaaaggaagagaaattgatgtctagcattagactaataaggcctgatagccattgtgaatccaacatcaaatgtatcaaaaaatcatactgtaccccataaatatataaatttactatgtgttagtgatgaggaatttttgctccttagttcagctaaaaatgcgttcttgtcaaacaaccagaaaagattagkcacatggacacattgaagggtgaggaaagcagaaaaaaaggagtactgctaataggctccttcgtaaaatggctttatgtgttttctcttctcctttacacagcatctgttatctggagactggctgctctcagtgaaaaaagaaggagtactgctaataggctttcacctcacagcctgaatgccaggccaccacacaagaactgaagaggccaggctcctccccattctcccagtgtgcaggtgggcccctcatccattgcaggcatgtgcagaaaagaccctgggcaggttccctcatctgcacaaaagcatctgatgtaaacacttgtggggtgagtcggagattctctggggaccctccctcatctgactcctgcatctatcactaccattacctcaaaaacaataaaaaagttaaattggcatttttttttaacctaaaggctagtgtatctggcaacatacaagatacatacctctcatagaagattaaaagctttttcgtaccagggattgtgtctttcactttgtatcattcaacctaacacagtgcttagcacccaaaaactactcaaaaaacttagccaagttcattatattctaaatattaaataaatcacacacatacacatatatgtaaagctgtcaaagaccgatttctctcttcagtaagattgtcatacataatgaaatgtagtaaaaatgttcagtcataactgtcttcattcccttctgcttacagttatttagaaaacaatatttgtatcctaatgcccattgaactcaagctagaaaaatattaagagtgaaagattgaaaagtgaaatgatttaagtcaaaggaggggggaaaatgagactttaatgaatgtaagtatgttagggtttaggtttgtattctagaaacaagccagacagttttctattgtgcctatatattatataaagagctctaaaatat

SEQ ID NO: 38427 - DNA, 867 bp, Homo sapiens
cagactttgaagtcacactgacctgggttcaaatcctgagtctgctactcaccaggaaaataattttaaatctggaaactcactttcctttatagtaatgtgtgagatcacttctacctttccagagaattgttattactaaaagtgataacaatggatttagtgtggtgycttgttagagtgccaggtagttggcacattgtagtgatattcaattttcagtatttcacagttttgttgtcattcagtggccagtggaacttagtgtggtgaatggagaaaatgttgttctaagtattagacaaaacaagaactcagagtaggtaagaatgtgtgcaaagttttatgacgaagtggtcacagaatcaacactagaacctcgaatatagattagcagagctgggaccctatcctctactcatcaagaacttatagcttcatgttgttggtaaagaaacagcccagaaatcaaatggtttcgccaggaacctagacttcacctgacatcaaggctactcatctctcctgtgttatacggtttcagtggaccactttgatgcccaaaagagcttgaaaataaaactttaagtatgacaatattcataactattgaactcagcacaagaaataatttaaattgtatggtcatagccaatattttaaaagtataatagcatgagtatttcagggtgaaaactcaacaaaatgtttgtgatatgtgttaattgaggcatagttcacattttaatagcctggctactaaatgatggtcaaaactcaataatgtgtttctgacataagtgtgttcaattacctttttccatacttttatccatcattttccttctccttaaaatatgtttctca

SEQ ID NO: 38428 - DNA, 771 bp, Homo sapiens
acgctgctttttaaaaaaaaataaaaataaaaaaacacttttaaatattcacagtttaaatttccattatggtaaatattgatagagagaacccacataaacaaaagctctccttggtatcctcaaacattttaagagtgtaaagtatcctacgacttaaaagtttgcaaaccacctttaaaatattttcaagataacaatgagaggttttgtgaacagttaaaagtgtttatttactaattaattcacttaaaaaacaataagatgagaggagctgggaagatgttggtcaaaggatacagacttgcagctagataggaatacgttcaagagatctattgcacaacgtagtgactgtagttataaaaatatattgaattcttaaaaattgctaagagagtagattttaaggattcttaccacacacacacacgtacacayacacacacacacacacacacaaataagaatgtgaggtaatgaatacattaatttgatttagccattttgtgatgcatacttttttcaaaacaagttgtacatgataaatatgtataagttttgtcaattaaagtgaataaataatgaaattattacacatgaacataagtaccatatttttaaataaaaatgatggttttttttttaaaaaaacaaaagtaagaagggtggcttttttttttttttttgagatggagtctcgctgtgtcgcccaggctggagtgcggtgttgcaatctcagctcactgcaagctccgcctcccgggttca

SEQ ID NO: 38429 - DNA, 700 bp, Homo sapiens
actgaatgcctactatgaggtaggcatttcgataggtaaccaacacagtccctgcccttataggttgttgtagaagtcgaatgaggtgatcataccaattgttatcatttattaagtgcctactatgtgccgtgaactttacattattatttgcattatacatatgccatggacttattacctcagtcagtcttctcataaatctgtttgggtagttactgccaatgtgcacgtaaggtaattgaagtacaatttaaaaacttgtcaaagttaaataacttataaggggcttgactgggatttgaaccaaggtggatctgattcaaaagacactgattttccaagaaaacatgtcaatataaaagttctttacaaacataaaaagtgccatataaaaataaaataatrtttattattattgttctccacacctacatatgatgatataaaaacagaccaaagccaaaaccaagacaggaattaggggcttaatcatgttactgtggaaattctcattataatgcttttgatttctggttttgcagttttgaaatttccactgtctttttcccctgtgggcacacattgttgctgttctttttctgtctgcagatcatggctgggcttttggtaagcacataattttttaaaaatggaaatggtttcattccaatgaatcattgtgtcaaggaggttgtgt

SEQ ID NO: 38430 - DNA, 700 bp, Homo sapiens
actgaatgcctactatgaggtaggcatttcgataggtaaccaacacagtccctgcccttataggttgttgtagaagtcgaatgaggtgatcataccaattgttatcatttattaagtgcctactatgtgccgtgaactttacattattatttgcattatacatatgccatggacttattacctcagtcagtcttctcataaatctgtttgggtagttactgccaatgtgcacgtaaggtaattgaagtacaatttaaaaacttgtcaaagttaaataacttataaggggcttgactgggatttgaaccaaggtggatctgattcaaaagacactgattttccaagaaaacatgtcaatataaaagttctttacaaacataaaaagtgccatataaaaataaaataatatttattattattgttctccacacctacatatgatgatataaaaacagaccaaagccaaaaccaagacaggaattaggggcttartcatgttactgtggaaattctcattataatgcttttgatttctggttttgcagttttgaaatttccactgtctttttcccctgtgggcacacattgttgctgttctttttctgtctgcagatcatggctgggcttttggtaagcacataattttttaaaaatggaaatggtttcattccaatgaatcattgtgtcaaggaggttgtgt

SEQ ID NO: 38431 - DNA, 1230 bp, Homo sapiens
aattaagatttttggatcttaaagttctgcattgcacatcaatgtcttcaaagattagggaaaaatatttgaacttcccagattgtgtgaacaattctgagaatttctgtagtatgaggagaaaaaaaaatctcagcaaagattcattccttagagactgactgaaacatgctgaaaagtctggttgaagtcaagagaccccatgcagtccagacacatagcaggcttcccagagaaccttaggagagcaggttttgagtcactttcctcttggctgtaaccaggaggctaaagtacgtatgagccaaagtcttgggaaatttacatcaggcgagcaattcaacaggtcttggccacacacagatccagcttctgtgaagagttaagcaccaaggattcacagagacagcagcacagatgttttcagtctcggtttcctattgtgtccacccatcccaacttcccacaccctctgcccagacccacagcccctgcctttctaccctctcacgattcacttgttcgacgtgtctccattaagtgtctctatgagccccacagctgcatccctactctcatactcctctctcagaaagaacaaatatttggataaattatgtataatttccctgccccatgcagccctataggcttcatttacaataagttgaaaaatatgcttctcagagatggtacttctctgggaaaagagagcagattgtgctaaagacggtaaccgtggtctcctaagaactcctcatcatgttccacagcgcatgggaaaccaaggttactattccatcctctgcttgcagcagcaaaacagatgcctccccagcccccagtgctaaaaacctagagcactgtataccaggaacagattaaagtggtagctggaagcatacccaagccgaggatttacrgatgttcaataaaacctgcagacagcccaccgaaatccctgcacagagctgcgagggcacacatccagctcagttggaaatgggtccatagtgagggaaagaaacaagaatcatagctgctccagatgcatgttagttacaaaggatgctgaggagctcaagcgcatctttcaagaatagcaactttacaatccatctcaggcttttttgaacttcagaattctcacttcaccattaaaagtgttcagtttagtcagagcgtataacagatatcttgctgccaagaaacggtaagatgcacaagctg

SEQ ID NO: 38432 - DNA, 2533 bp, Homo sapiens
aacaacaggggaatcattaagtaaccaacaccttatcaacctatggcaataaggaaaatgctggacagtgctaagaagaaaggcatgctgtaatttgattgggatgatatagaaaggaatgataataaatggttaactttgagtaggaagattctagtctattcatttctgtttgttttgttctattttctgaaccatccctctttctgtttgccagcctcgacgaggggctttgtactagttcttgctttcccaaatgttctgtccccagcggtggctggcttctctcatcctcaaaagacacctgctcagagagccttccctgagcaccaattgacaatatgtcccctgcagtaactacagacacttccagtttaaaaccaaacaaataaaagtcagaaaaattggactaaaattaattttaaaatagatgtttaggaggagatatcctcactttcagctgggatagccagcatatacaagcatacatcagcataagaatgcagcttaagtagcagcatgtctactctggttttattttttttttwaaagcagtggtaattgttagaccagggtgacacagggagagtagatgttattcttagggatgattgaaataaagtactgtgattctataacttaatgtgtgtattattacccagatgatttatttgttctcataatttcacaacctgccactggtctggactaacttatttacctatacagtaatgtgaaataggaaacggatcttgccttccagatggataaagccaaggtggttagaaatgatgagttgttaatggtctgaggtccattcactcagtaaataattattgaatgtttattcttgagtaaacactattgatcagaatgagaaaatgttgtactggagaaaaggaaagaatcgaggttagtcaatagcactgacattggttaaggtattagtgtaaggaaataatgtagaaatgtatgggatcctggagaggacaccaacagaactgaaggaaggtttcactctctggaccataagagtaggagtcaacactggatgtttgatcaagtcaaggttagactttggtaaaggctgaaataggcatatgttactcctagttattacctggcaatggagctctctcctcatgcttataggaagaacacatggaaattaagtgtaataaatggtgcgatagtaggtggcctatttaatttcacctcggggggataatacagatgaggaatttggggtacccgaataaatcaagagcttcccctccacgttgcctttcctgttctagttgttgccatcactgtgtggagagaaagttgaatggagggacggtggagtcattctagtggataaacatagtagcctgctgtttggattgctttctccttcacttgccattccccacaaggtttgattcttcccagagaatgagaaagggagttcaacaggaagtcaacagttaccatattcctagggacagcaatgggtgctggggagttggtgaatgcagtccctacctccagggagcttacagtcaagcaggagagacagatgagaaaacagtccatttctgcagcgtgagaagtggttcatgagagtggaaggggggtaatgagggatctcacatgagtggcccatattgagctttcaggtggtgaggagagcttcttaattttagctaggggtcattttagctaggtcccgaaggacaggtgtgatctggtgggtagaggaaaagaggatagtccagcgaaaatgatccacatatgccaaggtcccaagtgaagagaagagatgtgtgtttagggaactggataggggtcaagtggttggagcatgatgggcaaggagaggtatgagatgacccaggataagtggggcaagggccagacattgaagggatcccaactacataattgatggcaaggagtcggtagagagggagaggctaagattatgaaagacagtggtattcaggaggggcagatccagaggataggacctggagcagatgtgcagggttggacccactcaggggagagaaagttcttcattgtgacaaggatgggcatggaggcagttgacctggaaagtggtagtgccacgaaggctgatggcacacctggctggtgactccttcctctctgaagtcaggggtgatgcgtcctgctgaaagtgaagttggaggaagacaggagggtctgagagaaactcaggggtgggtatggaattggaatcagagctcttaaagaagacaaataaggattcctgggcaattttgagtttcagttgaggcttatgactacatacttgcaggggcacaattccatgtgattatacaatgttctcaaggagtaaaggacagcagggatccggggaacagattcagggttggtgttttgatggcacatgtgacagaaagccagggaatgccaggtaaagaagacatcttgaacacacacatttacttttgctcatttgtgtgtgtgtgtcggggtggggggagtttaaaaggacttttta

SEQ ID NO: 38433 - DNA, 2533 bp, Homo sapiens
aacaacaggggaatcattaagtaaccaacaccttatcaacctatggcaataaggaaaatgctggacagtgctaagaagaaaggcatgctgtaatttgattgggatgatatagaaaggaatgataataaatggttaactttgagtaggaagattctagtctattcatttctgtttgttttgttctattttctgaaccatccctctttctgtttgccagcctcgacgaggggctttgtactagttcttgctttcccaaatgttctgtccccagcggtggctggcttctctcatcctcaaaagacacctgctcagagagccttccctgagcaccaattgacaatatgtcccctgcagtaactacagacacttccagtttaaaaccaaacaaataaaagtcagaaaaattggactaaaattaattttaaaatagatgtttaggaggagatatcctcactttcagctgggatagccagcatatacaagcatacatcagcataagaatgcagcttaagtagcagcatgtctactctggttttatttttttttttmaagcagtggtaattgttagaccagggtgacacagggagagtagatgttattcttagggatgattgaaataaagtactgtgattctataacttaatgtgtgtattattacccagatgatttatttgttctcataatttcacaacctgccactggtctggactaacttatttacctatacagtaatgtgaaataggaaacggatcttgccttccagatggataaagccaaggtggttagaaatgatgagttgttaatggtctgaggtccattcactcagtaaataattattgaatgtttattcttgagtaaacactattgatcagaatgagaaaatgttgtactggagaaaaggaaagaatcgaggttagtcaatagcactgacattggttaaggtattagtgtaaggaaataatgtagaaatgtatgggatcctggagaggacaccaacagaactgaaggaaggtttcactctctggaccataagagtaggagtcaacactggatgtttgatcaagtcaaggttagactttggtaaaggctgaaataggcatatgttactcctagttattacctggcaatggagctctctcctcatgcttataggaagaacacatggaaattaagtgtaataaatggtgcgatagtaggtggcctatttaatttcacctcggggggataatacagatgaggaatttggggtacccgaataaatcaagagcttcccctccacgttgcctttcctgttctagttgttgccatcactgtgtggagagaaagttgaatggagggacggtggagtcattctagtggataaacatagtagcctgctgtttggattgctttctccttcacttgccattccccacaaggtttgattcttcccagagaatgagaaagggagttcaacaggaagtcaacagttaccatattcctagggacagcaatgggtgctggggagttggtgaatgcagtccctacctccagggagcttacagtcaagcaggagagacagatgagaaaacagtccatttctgcagcgtgagaagtggttcatgagagtggaaggggggtaatgagggatctcacatgagtggcccatattgagctttcaggtggtgaggagagcttcttaattttagctaggggtcattttagctaggtcccgaaggacaggtgtgatctggtgggtagaggaaaagaggatagtccagcgaaaatgatccacatatgccaaggtcccaagtgaagagaagagatgtgtgtttagggaactggataggggtcaagtggttggagcatgatgggcaaggagaggtatgagatgacccaggataagtggggcaagggccagacattgaagggatcccaactacataattgatggcaaggagtcggtagagagggagaggctaagattatgaaagacagtggtattcaggaggggcagatccagaggataggacctggagcagatgtgcagggttggacccactcaggggagagaaagttcttcattgtgacaaggatgggcatggaggcagttgacctggaaagtggtagtgccacgaaggctgatggcacacctggctggtgactccttcctctctgaagtcaggggtgatgcgtcctgctgaaagtgaagttggaggaagacaggagggtctgagagaaactcaggggtgggtatggaattggaatcagagctcttaaagaagacaaataaggattcctgggcaattttgagtttcagttgaggcttatgactacatacttgcaggggcacaattccatgtgattatacaatgttctcaaggagtaaaggacagcagggatccggggaacagattcagggttggtgttttgatggcacatgtgacagaaagccagggaatgccaggtaaagaagacatcttgaacacacacatttacttttgctcatttgtgtgtgtgtgtcggggtggggggagtttaaaaggacttttta

SEQ ID NO: 38434 - DNA, 2533 bp, Homo sapiens
aacaacaggggaatcattaagtaaccaacaccttatcaacctatggcaataaggaaaatgctggacagtgctaagaagaaaggcatgctgtaatttgattgggatgatatagaaaggaatgataataaatggttaactttgagtaggaagattctagtctattcatttctgtttgttttgttctattttctgaaccatccctctttctgtttgccagcctcgacgaggggctttgtactagttcttgctttcccaaatgttctgtccccagcggtggctggcttctctcatcctcaaaagacacctgctcagagagccttccctgagcaccaattgacaatatgtcccctgcagtaactacagacacttccagtttaaaaccaaacaaataaaagtcagaaaaattggactaaaattaattttaaaatagatgtttaggaggagatatcctcactttcagctgggatagccagcatatacaagcatacatcagcataagaatgcagcttaagtagcagcatgtctactctggttttatttttttttttaaagcagtggtaattgttagaccagggtgacacagggagagtagatgttattcttagggatgattgaaataaagtactgtgattctataacttaatgtgtgtattattacccagatgatttatttgttctcataatttcacaacctgccactggtctggactaacttatttacctatacagtaatgtgaaataggaaacggatcttgccttccagatggataaagccaaggtggttagaaatgatgagttgttaatggtctgaggtccattcactcagtaaataattattgaatgtttattcttgagtaaacactattgatcagaatgagaaaatgttgtactggagaaaaggaaagaatcgaggttagtcaatagcactgacattggttaaggtattagygtaaggaaataatgtagaaatgtatgggatcctggagaggacaccaacagaactgaaggaaggtttcactctctggaccataagagtaggagtcaacactggatgtttgatcaagtcaaggttagactttggtaaaggctgaaataggcatatgttactcctagttattacctggcaatggagctctctcctcatgcttataggaagaacacatggaaattaagtgtaataaatggtgcgatagtaggtggcctatttaatttcacctcggggggataatacagatgaggaatttggggtacccgaataaatcaagagcttcccctccacgttgcctttcctgttctagttgttgccatcactgtgtggagagaaagttgaatggagggacggtggagtcattctagtggataaacatagtagcctgctgtttggattgctttctccttcacttgccattccccacaaggtttgattcttcccagagaatgagaaagggagttcaacaggaagtcaacagttaccatattcctagggacagcaatgggtgctggggagttggtgaatgcagtccctacctccagggagcttacagtcaagcaggagagacagatgagaaaacagtccatttctgcagcgtgagaagtggttcatgagagtggaaggggggtaatgagggatctcacatgagtggcccatattgagctttcaggtggtgaggagagcttcttaattttagctaggggtcattttagctaggtcccgaaggacaggtgtgatctggtgggtagaggaaaagaggatagtccagcgaaaatgatccacatatgccaaggtcccaagtgaagagaagagatgtgtgtttagggaactggataggggtcaagtggttggagcatgatgggcaaggagaggtatgagatgacccaggataagtggggcaagggccagacattgaagggatcccaactacataattgatggcaaggagtcggtagagagggagaggctaagattatgaaagacagtggtattcaggaggggcagatccagaggataggacctggagcagatgtgcagggttggacccactcaggggagagaaagttcttcattgtgacaaggatgggcatggaggcagttgacctggaaagtggtagtgccacgaaggctgatggcacacctggctggtgactccttcctctctgaagtcaggggtgatgcgtcctgctgaaagtgaagttggaggaagacaggagggtctgagagaaactcaggggtgggtatggaattggaatcagagctcttaaagaagacaaataaggattcctgggcaattttgagtttcagttgaggcttatgactacatacttgcaggggcacaattccatgtgattatacaatgttctcaaggagtaaaggacagcagggatccggggaacagattcagggttggtgttttgatggcacatgtgacagaaagccagggaatgccaggtaaagaagacatcttgaacacacacatttacttttgctcatttgtgtgtgtgtgtcggggtggggggagtttaaaaggacttttta

SEQ ID NO: 38435 - DNA, 567 bp, Homo sapiens
tggaaaccgttcacctaaagcgatatcagtgtgttcctggatggatggaggagcttctgaaatcttaataacgggcctgaaggaagataagctgtcaggctggaaatggtaagatctcagtgttcaatctttgttgaaacayctatcaggccaagcaaaggagctatattgtagtcaacaaaacttgtgttgactaataaggaattttagaaaagtaaagtcggatgagtcactagtacttgttcgtatctatccaggacgcgggcttgtctgaaagcaccccagacaccaaacgtcgcccctttttagtcttcattccacttgcccttttgtgctcctgggcacaggtgatcacacctgtcctcttgtcccccttccctccctctctacatcaacccttccttagactcctagccgggattctcttctttttgaacaacccacttgtttgtctgccatctaccttctctgtacatttcctcaagtgaccaggacttccagtagcccctactgacaagcccccaggcagtgtctccaatcctcaccccatctccacctggatgtccc

SEQ ID NO: 38436 - DNA, 597 bp, Homo sapiens
cctccccactgtgggagatttctccatggacatttcctgactaaatgccacaaaatggcagccaactctgtggccgccaatctggcatggtctaaaaagtggcaaagaggctgctgctcccagttctcttccccttcagctgttagagctttgcctccacctatgacctctccagcatcagtcamcatatattaggtgaaaatagtgaggccaattctccataaccaccaggcttaagccccttagcatatcaagcatagctgtttgtaaggtatcacctgcttccctcttcaggctttcatccttccccaaccattcttgccccctagggactgagaaatttagagaagcaatacaaaagtacacatagtaaaggctcaataaatagttatcaagtgaactctcagacaggtcttcatccacagaccttgtctggggcagaacaactctgttcagatctcagtctaacttccaggggcaatctttgacccttagcgtgcatcgctacctcacagatccccctgaccatacatagaagcaagacatcccacttcatcagctggagctgcaaaatcaggtcacttaaaaaaaaaagat

SEQ ID NO: 38437 - DNA, 597 bp, Homo sapiens
cctccccactgtgggagatttctccatggacatttcctgactaaatgccacaaaatggcagccaactctgtggccgccaatctggcatggtctaaaaagtggcaaagaggctgctgctcccagttctcttccccttcagctgttagagctttgcctccacctatgacctctccagcatcagtcaccatatattaggtgaaaatagtgaggccaattctccataaccaccaggcttaagccccttagcmtatcaagcatagctgtttgtaaggtatcacctgcttccctcttcaggctttcatccttccccaaccattcttgccccctagggactgagaaatttagagaagcaatacaaaagtacacatagtaaaggctcaataaatagttatcaagtgaactctcagacaggtcttcatccacagaccttgtctggggcagaacaactctgttcagatctcagtctaacttccaggggcaatctttgacccttagcgtgcatcgctacctcacagatccccctgaccatacatagaagcaagacatcccacttcatcagctggagctgcaaaatcaggtcacttaaaaaaaaaagat

SEQ ID NO: 38438 - DNA, 597 bp, Homo sapiens
cctccccactgtgggagatttctccatggacatttcctgactaaatgccacaaaatggcagccaactctgtggccgccaatctggcatggtctaaaaagtggcaaagaggctgctgctcccagttctcttccccttcagctgttagagctttgcctccacctatgacctctccagcatcagtcaccatatattaggtgaaaatagtgaggccaattctccataaccaccaggcttaagccccttagcatatcaagcatagctgtttgtaaggtatcacctgcttccctcttcaggctttcatccttccccaaccattcttgccccctaggractgagaaatttagagaagcaatacaaaagtacacatagtaaaggctcaataaatagttatcaagtgaactctcagacaggtcttcatccacagaccttgtctggggcagaacaactctgttcagatctcagtctaacttccaggggcaatctttgacccttagcgtgcatcgctacctcacagatccccctgaccatacatagaagcaagacatcccacttcatcagctggagctgcaaaatcaggtcacttaaaaaaaaaagat

SEQ ID NO: 38439 - DNA, 597 bp, Homo sapiens
cctccccactgtgggagatttctccatggacatttcctgactaaatgccacaaaatggcagccaactctgtggccgccaatctggcatggtctaaaaagtggcaaagaggctgctgctcccagttctcttccccttcagctgttagagctttgcctccacctatgacctctccagcatcagtcaccatatattaggtgaaaatagtgaggccaattctccataaccaccaggcttaagccccttagcatatcaagcatagctgtttgtaaggtatcacctgcttccctcttcaggctttcatccttccccaaccattcttgccccctagggactgagaaatttagagaagcaatacaaaagtacacatagtaaaggctcaataaatagttatcaagtgaactctcagacaggtcttcatccacagaccttgtctggggcagaacaactctgttcagatctcagtctaacttccaggggmaatctttgacccttagcgtgcatcgctacctcacagatccccctgaccatacatagaagcaagacatcccacttcatcagctggagctgcaaaatcaggtcacttaaaaaaaaaagat

SEQ ID NO: 38440 - DNA, 1235 bp, Homo sapiens
acagaagagggattgacctgaaggatcaaggggtatgcagtccaagtgggaatgtaacatgcatgaggtaagggggtgaggaagggcttagggttgctactgatgcccccacaaccctcactgtcagggtctggacagagctgccccttcccataattgctgtcatttaaggcccaagataaagaaatgtcattgcaatcattttcttttgtaacataaaactccactaaacccttaacaagagaaaaatgaaatggcaagaaaattgcagaagagaaagaccatgagacttattgccagatggtccagtatgaatttagacttgtctgacctggggcaaattatcgagcttcctggggcctcgatttcctcatttgtaaactgaagatggtcatagyaattccggcctcacaggccactgtgcctggaactgagagactgtaaaaagcaccatgcaaagttgattgatttcagcatcattgaccagcccccaagggccttctttttcagtgcctacttgatgccaggtactttaaatatattaattcttacaatgactcacaagcttgatattattatgtccatttaacaggtggagggactgaacctcaatcagatggagtgaatgcttcaggtcacacagcgaaagagtcctggatgaaaacccagtgctaccagaaggcagtctcttctctccaccacactgtacctcccacagccctcttttagagcaaggccatttcagggaagccttgccatacccgatctccacaggcagctctcaccaactgtgcttcaagtgcatggtcattccagagcctggacggaacgggcactcctggtgctatggcctcactgcctacaaagctaagtgcacaggtagggggacagggtgcttcctttgctcctgtggtgatctggagacacagatcaacccagtgtgaatggaaccaggcagagctgcccaccaaaataaaagtgtggccaaaacccagccctgcttgtgggtgaacaaaaaacatgccctccagccacaactgcattcacagagcttccggggatggctcttacctggggctgctccgtatggaaacataatccatagcttggctcccacaaatatgcttatcccacgtgctacatatggaaggagaaatcagcttgtatttcattaaacagtttggctcaggtcttgtgagcaaatattagaatctgcacttggtacagagtcgtaa

SEQ ID NO: 38441 - DNA, 1235 bp, Homo sapiens
acagaagagggattgacctgaaggatcaaggggtatgcagtccaagtgggaatgtaacatgcatgaggtaagggggtgaggaagggcttagggttgctactgatgcccccacaaccctcactgtcagggtctggacagagctgccccttcccataattgctgtcatttaaggcccaagataaagaaatgtcattgcaatcattttcttttgtaacataaaactccactaaacccttaacaagagaaaaatgaaatggcaagaaaattgcagaagagaaagaccatgagacttattgccagatggtccagtatgaatttagacttgtctgacctggggcaaattatcgagcttcctggggcctcgatttcctcatttgtaaactgaagatggtcatagcaattccggcctcacaggccactgtgcctggaactgagagactgtaaaragcaccatgcaaagttgattgatttcagcatcattgaccagcccccaagggccttctttttcagtgcctacttgatgccaggtactttaaatatattaattcttacaatgactcacaagcttgatattattatgtccatttaacaggtggagggactgaacctcaatcagatggagtgaatgcttcaggtcacacagcgaaagagtcctggatgaaaacccagtgctaccagaaggcagtctcttctctccaccacactgtacctcccacagccctcttttagagcaaggccatttcagggaagccttgccatacccgatctccacaggcagctctcaccaactgtgcttcaagtgcatggtcattccagagcctggacggaacgggcactcctggtgctatggcctcactgcctacaaagctaagtgcacaggtagggggacagggtgcttcctttgctcctgtggtgatctggagacacagatcaacccagtgtgaatggaaccaggcagagctgcccaccaaaataaaagtgtggccaaaacccagccctgcttgtgggtgaacaaaaaacatgccctccagccacaactgcattcacagagcttccggggatggctcttacctggggctgctccgtatggaaacataatccatagcttggctcccacaaatatgcttatcccacgtgctacatatggaaggagaaatcagcttgtatttcattaaacagtttggctcaggtcttgtgagcaaatattagaatctgcacttggtacagagtcgtaa

SEQ ID NO: 38442 - DNA, 1666 bp, Homo sapiens
tttcatatrtttcctagaaattttgttaatttttgcttcatgtatttttaaggctatattattgagtgtcgatatgttcaggattattttcctggtgagttgtttttatttatcatttttgcaataattatttgtatccctaatgatttttaaccttaatatctttattatttatgttaatataataataatgttatagctcacacttattagagtgcttattgtatgcaagggactattacataaaacaaatcatataaagtagatactattatcatccccattttgcagataaggaaactaaagtacagagagactataatgtgccccagggtaataactaataagtgctccaactaataactaataaatcacatggcttataagtagaacagcttgtatttaaatttgggcaatttggctccagagtttagaatctttaactgtgatgccattttgcctgtaacaaacactaacaatactctgatttagttttgattgataaatcttatttcatccttatactttaaatctttctgtgacagttatttttttttttttttgagacggagttttgctcttgttgcccaggctggagtgcagtggcatgatcttggctcaccgcaacctccacctcccaggttcaagtggttctcctgcctcagcctcccaagtagctgggattacaggcatgtaccaccacccctggctaattttgtatttttagtagagatggggtttctccatgttggtcaggctggtcttgaactaccaacctcaggtgatccacccgccttggcctcccaaagtgctgggattacaggcgtgagccaccgtgcccagcctgtgatagtatttttaggtatatctcctgtaggtagtctttgcattttattttaatttttaaaaatccggcttgagagtcatagtcttgtaactggtaagtttaagctatttacatttattgtaatatgatgtattttgaaatatttctgtcattttatttgtgatattaattagttatactttgcttctttatttctcttattttctaccttctcttaattgactgggttttatttgttcccttgttttttctacactggtttagaagtcctgcattaagttgtacagattcttcctgctcttttaataattactcataacttttttctaatatgcatatttgacttaaaatttaaatttatttaacatctctttcctcttccagataacatagtaatttaaaagttttaattctgatcacttcctctcccattaaattattcattaacagttttatagagttgatacatgattagaattaactatatatttatcaccttatttcctctggattcactttctttccctctgaaggagcttctttatagtttttacaataaggaatatgagttataaactctgaaactatttctttatctttacttctgaataatagtttacatggtaataaaattatctgtatattatttttttcagtattttaatgattttatttctattttttagtctataattgtgttcttaaaaatctgcttttaagtttattctattttaggtaattcaattttttaggcaagtttttcttttcatttctggtattctttagtttcaatatgatgtgtttaggtatctaagggtg

SEQ ID NO: 38443 - DNA, 1666 bp, Homo sapiens
tttcatatatttcctagaaattttgttaatttttgcttcatgtatttttaaggctatattattgagtgtcgatatgttcaggattattttcctggtgagttgtttttatttatcatttttgcaataattatttgtatccctaatgatttttaaccttaatatctttattatttatgttaatataataataatgttatagctcacacttattagagtgcttattgtatgcaagggactattacataaaacaaatcatataaagtagatactattatcatccccattttgcagataaggaaactaaagtacagaragactataatgtgccccagggtaataactaataagtgctccaactaataactaataaatcacatggcttataagtagaacagcttgtatttaaatttgggcaatttggctccagagtttagaatctttaactgtgatgccattttgcctgtaacaaacactaacaatactctgatttagttttgattgataaatcttatttcatccttatactttaaatctttctgtgacagttatttttttttttttttgagacggagttttgctcttgttgcccaggctggagtgcagtggcatgatcttggctcaccgcaacctccacctcccaggttcaagtggttctcctgcctcagcctcccaagtagctgggattacaggcatgtaccaccacccctggctaattttgtatttttagtagagatggggtttctccatgttggtcaggctggtcttgaactaccaacctcaggtgatccacccgccttggcctcccaaagtgctgggattacaggcgtgagccaccgtgcccagcctgtgatagtatttttaggtatatctcctgtaggtagtctttgcattttattttaatttttaaaaatccggcttgagagtcatagtcttgtaactggtaagtttaagctatttacatttattgtaatatgatgtattttgaaatatttctgtcattttatttgtgatattaattagttatactttgcttctttatttctcttattttctaccttctcttaattgactgggttttatttgttcccttgttttttctacactggtttagaagtcctgcattaagttgtacagattcttcctgctcttttaataattactcataacttttttctaatatgcatatttgacttaaaatttaaatttatttaacatctctttcctcttccagataacatagtaatttaaaagttttaattctgatcacttcctctcccattaaattattcattaacagttttatagagttgatacatgattagaattaactatatatttatcaccttatttcctctggattcactttctttccctctgaaggagcttctttatagtttttacaataaggaatatgagttataaactctgaaactatttctttatctttacttctgaataatagtttacatggtaataaaattatctgtatattatttttttcagtattttaatgattttatttctattttttagtctataattgtgttcttaaaaatctgcttttaagtttattctattttaggtaattcaattttttaggcaagtttttcttttcatttctggtattctttagtttcaatatgatgtgtttaggtatctaagggtg

SEQ ID NO: 38444 - DNA, 1666 bp, Homo sapiens
tttcatatatttcctagaaattttgttaatttttgcttcatgtatttttaaggctatattattgagtgtcgatatgttcaggattattttcctggtgagttgtttttatttatcatttttgcaataattatttgtatccctaatgatttttaaccttaatatctttattatttatgttaatataataataatgttatagctcacacttattagagtgcttattgtatgcaagggactattacataaaacaaatcatataaagtagatactattatcatccccattttgcagataaggaaactaaagtacagagagactataatgtgccccagggtaataactaataagtgctccaactaataactaataaatcacatggcttataagtagaacagcttgtatttaaatttgggcaatttggctccagagtttagaatctttaactgtgatgccattttgcctgtaacaaacactaacaatactctgatttagttttgattgataaatcttatttcatccttatactttaaatctttctgtgacagttatttttttttttttttgagacggagttttgctcttgttgcccaggctggagtgcagtggcatgatcttggctcaccgcaacctccacctcccaggttcaagtggttctcctgcctcagcctcccaagtagctgggattacaggcatgtaccaccacccctggctaattttgtatttttagtagagatggggtttctccatgttggtcaggctggtcttgaactmccaacctcaggtgatccacccgccttggcctcccaaagtgctgggattacaggcgtgagccaccgtgcccagcctgtgatagtatttttaggtatatctcctgtaggtagtctttgcattttattttaatttttaaaaatccggcttgagagtcatagtcttgtaactggtaagtttaagctatttacatttattgtaatatgatgtattttgaaatatttctgtcattttatttgtgatattaattagttatactttgcttctttatttctcttattttctaccttctcttaattgactgggttttatttgttcccttgttttttctacactggtttagaagtcctgcattaagttgtacagattcttcctgctcttttaataattactcataacttttttctaatatgcatatttgacttaaaatttaaatttatttaacatctctttcctcttccagataacatagtaatttaaaagttttaattctgatcacttcctctcccattaaattattcattaacagttttatagagttgatacatgattagaattaactatatatttatcaccttatttcctctggattcactttctttccctctgaaggagcttctttatagtttttacaataaggaatatgagttataaactctgaaactatttctttatctttacttctgaataatagtttacatggtaataaaattatctgtatattatttttttcagtattttaatgattttatttctattttttagtctataattgtgttcttaaaaatctgcttttaagtttattctattttaggtaattcaattttttaggcaagtttttcttttcatttctggtattctttagtttcaatatgatgtgtttaggtatctaagggtg

SEQ ID NO: 38445 - DNA, 1666 bp, Homo sapiens
tttcatatatttcctagaaattttgttaatttttgcttcatgtatttttaaggctatattattgagtgtcgatatgttcaggattattttcctggtgagttgtttttatttatcatttttgcaataattatttgtatccctaatgatttttaaccttaatatctttattatttatgttaatataataataatgttatagctcacacttattagagtgcttattgtatgcaagggactattacataaaacaaatcatataaagtagatactattatcatccccattttgcagataaggaaactaaagtacagagagactataatgtgccccagggtaataactaataagtgctccaactaataactaataaatcacatggcttataagtagaacagcttgtatttaaatttgggcaatttggctccagagtttagaatctttaactgtgatgccattttgcctgtaacaaacactaacaatactctgatttagttttgattgataaatcttatttcatccttatactttaaatctttctgtgacagttatttttttttttttttgagacggagttttgctcttgttgcccaggctggagtgcagtggcatgatcttggctcaccgcaacctccacctcccaggttcaagtggttctcctgcctcagcctcccaagtagctgggattacaggcatgtaccaccacccctggctaattttgtatttttagtagagatggggtttctccatgttggtcaggctggtcttgaactaccaacctcaggtgatccacccgccttggcctcccaaagtgctgggattacaggcgtgagccacygtgcccagcctgtgatagtatttttaggtatatctcctgtaggtagtctttgcattttattttaatttttaaaaatccggcttgagagtcatagtcttgtaactggtaagtttaagctatttacatttattgtaatatgatgtattttgaaatatttctgtcattttatttgtgatattaattagttatactttgcttctttatttctcttattttctaccttctcttaattgactgggttttatttgttcccttgttttttctacactggtttagaagtcctgcattaagttgtacagattcttcctgctcttttaataattactcataacttttttctaatatgcatatttgacttaaaatttaaatttatttaacatctctttcctcttccagataacatagtaatttaaaagttttaattctgatcacttcctctcccattaaattattcattaacagttttatagagttgatacatgattagaattaactatatatttatcaccttatttcctctggattcactttctttccctctgaaggagcttctttatagtttttacaataaggaatatgagttataaactctgaaactatttctttatctttacttctgaataatagtttacatggtaataaaattatctgtatattatttttttcagtattttaatgattttatttctattttttagtctataattgtgttcttaaaaatctgcttttaagtttattctattttaggtaattcaattttttaggcaagtttttcttttcatttctggtattctttagtttcaatatgatgtgtttaggtatctaagggtg

SEQ ID NO: 38446 - DNA, 1666 bp, Homo sapiens
tttcatatatttcctagaaattttgttaatttttgcttcatgtatttttaaggctatattattgagtgtcgatatgttcaggattattttcctggtgagttgtttttatttatcatttttgcaataattatttgtatccctaatgatttttaaccttaatatctttattatttatgttaatataataataatgttatagctcacacttattagagtgcttattgtatgcaagggactattacataaaacaaatcatataaagtagatactattatcatccccattttgcagataaggaaactaaagtacagagagactataatgtgccccagggtaataactaataagtgctccaactaataactaataaatcacatggcttataagtagaacagcttgtatttaaatttgggcaatttggctccagagtttagaatctttaactgtgatgccattttgcctgtaacaaacactaacaatactctgatttagttttgattgataaatcttatttcatccttatactttaaatctttctgtgacagttatttttttttttttttgagacggagttttgctcttgttgcccaggctggagtgcagtggcatgatcttggctcaccgcaacctccacctcccaggttcaagtggttctcctgcctcagcctcccaagtagctgggattacaggcatgtaccaccacccctggctaattttgtatttttagtagagatggggtttctccatgttggtcaggctggtcttgaactaccaacctcaggtgatccacccgccttggcctcccaaagtgctgggattacaggcgtgagccaccgtgcccagcctgtgatagtatttttaggtatatctcctrtaggtagtctttgcattttattttaatttttaaaaatccggcttgagagtcatagtcttgtaactggtaagtttaagctatttacatttattgtaatatgatgtattttgaaatatttctgtcattttatttgtgatattaattagttatactttgcttctttatttctcttattttctaccttctcttaattgactgggttttatttgttcccttgttttttctacactggtttagaagtcctgcattaagttgtacagattcttcctgctcttttaataattactcataacttttttctaatatgcatatttgacttaaaatttaaatttatttaacatctctttcctcttccagataacatagtaatttaaaagttttaattctgatcacttcctctcccattaaattattcattaacagttttatagagttgatacatgattagaattaactatatatttatcaccttatttcctctggattcactttctttccctctgaaggagcttctttatagtttttacaataaggaatatgagttataaactctgaaactatttctttatctttacttctgaataatagtttacatggtaataaaattatctgtatattatttttttcagtattttaatgattttatttctattttttagtctataattgtgttcttaaaaatctgcttttaagtttattctattttaggtaattcaattttttaggcaagtttttcttttcatttctggtattctttagtttcaatatgatgtgtttaggtatctaagggtg

SEQ ID NO: 38447 - DNA, 269 bp, Homo sapiens
aaacagaaggtcactccacttccatctgaagaagcaagaaaaagacgtgtaggcagggccaaagttctaatcagaactttaactggaatttttaattccaataaaacaacaatacacagccattgggttcctatatctcaaagatgtcttgagtatattgtttaatccttagtttcctctccttcagcagytttggacaaggagagagaaaaaaacataagcgataacaagaagatgtgcgtgggtttgggttgtgtgttgactaaaaa

SEQ ID NO: 38448 - DNA, 540 bp, Homo sapiens
atcaacaaaaatttctacatacttgaatggttgcagattaaaccttatttatgaaactagctccagagagcagtacaactttgaacttggcatggactcctgaactctcccagttgtatgacaggagccattttgactgattatctcccgtcttccacactgccttgccctgcctatccaaagtctactctccccagcaagaccatccaccaagctgtacgctgaggtgcctcacaggcagaagaggtcatgcacctcagtgtcatcctttgttttctactcatatcttctctagttyaaagattcagttggtggcagtgaagtccttctttatttgggaaagtacaccaactaccctttgcttgattagcacaaaaatactaaccatgttgctcagtagaaaaatttacttgaaaaactagattgtgagtaattacctgtattttttttttcagttatacaaagtatgaaacatttctacctcttctggacttcattttgaacccagtcagtgtattttctcaaaccatgaaccaaaac

SEQ ID NO: 38449 - DNA, 701 bp, Homo sapiens
agtgagctatgatcaagccactgcattccagcctgggcaacagtgcaagaccctgtatctgaaaaaaaagaaaaagctaagttctccttatttacagggcaagtggtggtctggttagtcaaatatactatgtgatagagatttttcacatttatcaaatagattgacaattttaaaaataaaataaaactcagtaaaatgcacaacatcaaaaccatactaggccaggcatggtggctcatgcctgtaatcccaacactttgggaggctgagacaggatgattgcttgagcccaggagttcaagaccagtctgggcaacatagtgagacaccatatctacaaaaaaattttaaactatccaagcatggtagcacgtgcctatagtcccagctactcaggaggctgggtgggaggatcacttgacctcaggaggttgaggccgcagtgagctgtgattgtgccactgcactctggacagtaagagcaagaccctgtctcttagaaaagaaatgcagagaggaaaaaaaagcacagattgaccaaaaagaaaaacagcacttgaaactgatattacataccagtatgtccactcaaagcatggaggccctgtcctctttgacaatcggttgtataaatgtkacaatcccctgctccagcacttattaaaatagctcctccgctttctgggccttccataaat

SEQ ID NO: 38450 - DNA, 607 bp, Homo sapiens
ttttgatcacagactttttttaaaaaaatggaatgtgtctttgaagccctgaacacagctacttttccatgtatttactgagcacttaagttggttttctgattctaatcaacatttttctgccattgtctttctctacatggttttgtacctttcattttgttgacattatgtcagtaaagatctctagatctcttcttcaaagtctttaaatcatcacatatctctctccacctttccttttttctaaaactgcccgttttctttttctcctcaattcagacattaaagatgttttcttctctttttctacattgaataatgtccttgtgctttttgggtgtacttttttttcttcttatagactgtggtcaacggatatcaaaatgtatttttgtgtctttttcaaacatatatgtgttttactttttaaaaatcttggttactcatctctcggttatgccttatatttactaatacgttatttcatcttagcataccaaaatggatatgaatagtytatttataaaaaactgtatggttaggccaggtgtggtggctcatgcctgtaatcccagcaatttgggaggccaaggcaggtagatca

SEQ ID NO: 38451 - DNA, 805 bp, Homo sapiens
accccccatcctcatcttttgaccccactcccaaaataatctccaccattctccccacacccgtacctccaacccccatgcttcaccatgattaaatcaccttccaccaggtcccaactttcacattccccattacamttccacatgagtatcggtagggacacagaaccaaatcgtattattctgaccctagttcccccaaatctcatatctttgacacactgcaaaatacaatgatgccttctctacagtcccccaaagtcttaagtcattccagcctttactgaagtatccaaagcccaaagtcttatctgacacaaggctgcagtcccttctgcctctgagcctctgaaatacaaagtaagttaattactttcaaggtacaatgattgtacaggcattgggtatgaattcccagccaaaagaaaaaactttgccagaaagaagcacaaaatatagatgagacttacagatccgatgcaagtcaaaaacccagcaggccagtcattccattgtacagctccaaatcatcacttttcaatccaaatcccacatccagaacacaggggtgtgatggctgggctcccaaggccttgggtagctctgcacctgtggctttgcagggtctttcccccacagctgccctcatgggctgggctagtgttgagcacttgtagctttccacactgagggtgcaagctgttggtaggtctatgaatctgggtttgcagaatggtgcctccatgtgtgggggttccaactctatatgttccttctgtaatgccctagaaaagctttcccatga

SEQ ID NO: 38452 - DNA, 844 bp, Homo sapiens
tttaaaattttaccatagttagtctttctagctaggaaagtgttttttatcttgcctttttttcaaatttttaaaaaaatgatcttcaataaagttctatcatttcctgcatatactttctgaatatttttatgtttagtccttgatagttcacaaattggtatttttatgttttttccattaatttttatgaccaagtttttatatattaaaaaaaaacattaattgtataatttttatcagataacttagtgaactcttttgttttcatttcattatcttgaattttctagggagacaaaagtgtcctttgtaaagaataaacctctcttctttcatattagtagacctttttctgcttcttttcatagttaactagccaaaattttgtttcctggtgacaatttaatattcctctacaatagaagaaaacagtctccttatatctgtatagtacatrtattagctgtagtaaaataagaactccagggcatgctgtataactcaaagaaagtaaggaagtggcactcttgctataaacaaccttggtagaattacaaagaatattagttgtggtgtgatgctgccctcaagtggtttcatcaaaaaagggtggatggaaaacaagaccatataactgacttcagatgtcagccatttagttccagaaatatccagaatgaggctgtagatagggaagatggctggaggatctgtttagaagcagaaggtggatataggatataaattaatgctgtttgggtttttactattaatgtgatttcattaatacttacagaatggattataccagtaaaccatatttaactgtctcagataagcc

SEQ ID NO: 38453 - DNA, 663 bp, Homo sapiens
tgcatagaagagaagattaagcttactgtctctaaaaggaaacgtcaaagacaaaaaacacaaagatggctttgggtcccaagcttctggcaycaatgaaaggctcttactggccaacattctgaaaatggtacatgctttttctggctaatggcacaatgattctcagatgggtgtcattttctctggctctttaatcaggagcaaaatcaagaggaaatagctttattatgtgtagcttcaaatcagacagcccttcgctaggtaatcatcactctgggaacatttcaaaacattacagatttgaactttccagtattaggaacatccttatttggcaagtccagataataagggtcctggtcaaattatggacagtattctgggtatgatagtgagtttctctatgaggatttcaaactataaaacattccagttcattaataactagtatgacttggaggcgagtggatcacttgagcccaggaattcaagaccagactgggcaacatggcaaaatcccgtctctaccaagaaaaaaaaagttaataaaaataaaaactagtatgacttgaatgtttaggacaaaaacaaagcacaaggtgccatagtacagtacaaaactcaatgacactttctgtctaaagatataattaatactaa

SEQ ID NO: 38454 - DNA, 256 bp, Homo sapiens
ccctggctgcctccacccactcccagggagaccgaaagccttcatacatctcaagttgagggacaaaaaagggggccacaaagtctgatcattcaaaataaaacaaaataaaaaagtgttaaggtgaagatttttaaaaattggcattacataatttacatgagagcaatgctatcacctcctctgtgtggatgtgggagaggacygggccattctccttagagagaagtggggcggcttttaggagggcaaggaa

SEQ ID NO: 38455 - DNA, 758 bp, Homo sapiens
tttaaatataattaaaattaactcaggttcagttcttcagttcccttggccacatttgaagtgcagtagccacatgtggctggtgactgccatgctggacagcaaagatacagagcatttccattacagctggacattcatgccaaatatacagcatctccaatgaccaagtgacaggcaaattcaagccttctggtcttccaggtggcactaccaaatactgtgtagttttgtaaataattttttaaaatttattatttcaacagcaggtacaaacaaaaatttttatgaaactatcagctgaaaagagcagagagtagcttttagagttagccaagctctttcttaagaacacatttttgttttgagcataacacttcacaaaatcaaagtagtgaataaaagatatctaatgtaattttcaaacgactaagaatttttgcttttggtaactgcctccctttayatgaaaatcaaatacaacatgcggatcactaaaaagccaaactctcaaagtgcaaataatctcttctttcatcaggaaaaagatgtcaagtatgaaagtaaaaccagtttctcctcggcaagttgtggaaatatcatagaactagagatactaacaatggcaggtatctgaaagtgagagtaattatcaatcccatttctgcagtaccctatcattatctctactgtgatttgcagagcttgctacttatttttagttagccttctaaaatacatcttccacttttggtttt

SEQ ID NO: 38456 - DNA, 1014 bp, Homo sapiens
tatttcaattaatccaataaaaatgattgaataaaaagaatatgtccgtatctgtgtgtgtgcatatgtgagtatacacatgcacatgtgtgtgacagaggagacaaaggaaagtaaatattgtatttgaaaagcaatataaaatattaatgtcccaattttttcttgaaaaatctgtcttattttttggttccaaaatagtcatatgtagaatgtcctatgatttaatttgcaagaagagtattcgaaagagtattttgtaatattttcccctttaagttctaattgtaaagatgctctgctaagtattcagcaaaacaggtttaaacaatgtaatctgtactcctctagttgcacagaatttaaaattcacaatgttccagagctgattaattacatataaatcgtatttttctttgtgcaactcaatagataattagacttaattgtcttgtgaatgaataggagttgtatgtcagagaatagaagttgctattatataaaattaagagtttaggccgggcgcgttggctcacgcctgtaatcccagcactttgggaggccgaggcgggtggatcatgaggtcaggagatcgagaccatcctggctaacaaggtgaaaccccgtctctactaaaaatacaaaaaattagccgggcgcggtggcaggcgcctgtagtcccagctactcgggaggctgaggcaggagaatggcgtgaaccccggaagcggagcttgcagtgagccgagattgcgccactgcagtccgcagtccrgcctgggcgacagagcgagactccgtctcaaaaaaaaaaaataaataaataaaaaataaaattaagagtttaaaaagccttcaaaaataattttaaaacaatatttgacttataaagaatcctaatttgccagaagattttgtccacatttaataataatacacagctgctctttaatttgatgtcttttaaatgctcttatgctggaaaaacagagaaatctacataatgtaaatgca

SEQ ID NO: 38457 - DNA, 909 bp, Homo sapiens
acataaaaatgctgatggtgacacatgtgcatgaataaattctccaaatacttgtctctgtgactttgtctctatgtctgaggtataacagctttgaaacagtgtttcatacatgttacatgtcagctcctaaacagaacaataacctttaggagtaaagtgaaaattgtattcctaaaacaattgtgatcccaattctacaatatactttagctataaatagacattacagagaattgttttactgctatcatttcttgggtcacttgtctcttgctaatttggaaacatgagtgctttcttgttctgtttaataaggtactaaaataaattctagatagcatataacattttattgtaaatttctttgacttcaatgaattgcattttatgtggagtgcaggttcgtagaatgctgccaaactcrtatgtttaaattgttaaaaataaactctttggattgctaatgactgtagtatatgcaattcaccagattgtttaaacagatttcaaataattttcctgtaattgctaatcattttgtaggagacctgagaccagcaatcaataatcacatgaaactgttgaaaaggaggctcagtgatcaatacaaattcttctttccgtgggaatacagcctgctcagatggttgacatatatagtgctctccttggtgttctcttctgttatgtatttattgcagtttcataggcacctttttatggaaagaaataacaaattagaaaaaattggtataatatctctttgctgacatcatgacagagataacatttgctacaaagaacaaatccttagagggcaggagcatctaacttggtacagatgctaaggttgcaaagtaaagttcatcacttctaaacaatggacaagtttgtcactgatcagct

SEQ ID NO: 38458 - DNA, 909 bp, Homo sapiens
acataaaaatgctgatggtgacacatgtgcatgaataaattctccaaatacttgtctctgtgactttgtctctatgtctgaggtataacagctttgaaacagtgtttcatacatgttacatgtcagctcctaaacagaacaataacctttaggagtaaagtgaaaattgtattcctaaaacaattgtgatcccaattctacaatatactttagctataaatagacattacagagaattgttttactgctatcatttcttgggtcacttgtctcttgctaatttggaaacatgagtgctttcttgttctgtttaataaggtactaaaataaattctagatagcatataacattttattgtaaatttctttgacttcaatgaattgcattttatgtggagtgcaggttcgtagaatgctgccaaactcatatgtttaaattgttaaaaataaactctttggattgctaatgactgtagtatatgcaattcaccagattgtttaaacagatttcaaataattttcctgtaattgctaatcattttgtaggagacctgagaccagcaatcaataatcacatgaaactgttgaaaaggaggctcagtgatcaatacaaattcttctttccrtgggaatacagcctgctcagatggttgacatatatagtgctctccttggtgttctcttctgttatgtatttattgcagtttcataggcacctttttatggaaagaaataacaaattagaaaaaattggtataatatctctttgctgacatcatgacagagataacatttgctacaaagaacaaatccttagagggcaggagcatctaacttggtacagatgctaaggttgcaaagtaaagttcatcacttctaaacaatggacaagtttgtcactgatcagct

SEQ ID NO: 38459 - DNA, 909 bp, Homo sapiens
acataaaaatgctgatggtgacacatgtgcatgaataaattctccaaatacttgtctctgtgactttgtctctatgtctgaggtataacagctttgaaacagtgtttcatacatgttacatgtcagctcctaaacagaacaataacctttaggagtaaagtgaaaattgtattcctaaaacaattgtgatcccaattctacaatatactttagctataaatagacattacagagaattgttttactgctatcatttcttgggtcacttgtctcttgctaatttggaaacatgagtgctttcttgttctgtttaataaggtactaaaataaattctagatagcatataacattttattgtaaatttctttgacttcaatgaattgcattttatgtggagtgcaggttcgtagaatgctgccaaactcatatgtttaaattgttaaaaataaactctttggattgctaatgactgtagtatatgcaattcaccagattgtttaaacagatttcaaataattttcctgtaattgctaatcattttgtaggagacctgagaccagcaatcaataatcacatgaaactgttgaaaaggaggctcagtgatcaatacaaattcttctttccgtgggaatacagcctgctcagatggttgacatatatagtgctctccttggtgttctcttctgttatgtatttattgcagtttcataggcacctttttatggaaagaaataacaaattagaaaaaattggtataatatctctttgctgacatcatgacagagataacatttgctacaaagaacaaatccttagagggcaggagcatctaacttggtayagatgctaaggttgcaaagtaaagttcatcacttctaaacaatggacaagtttgtcactgatcagct

SEQ ID NO: 38460 - DNA, 553 bp, Homo sapiens
tgatctctggtaatatcctctttactcatgtgaaaactatttacaaaaacctcaactcatgtgaactctgaagtgggtaggraagataaaaaaggaaattctttaattttgtgctttagagtctgaatatggatgccagtttgtcagtttatattccttgggaatattccatgggaagaaactggtccgccttgcagtcggcacagcacagcttcccaggtgtaacaacttggttgggataggagaaaacggttgctcctaagcttttgcgcagactggaagctgaatcaggcgtctgctgggatacaatcagagaccagcagctaacctcagggctttcagaaaataacggcaatcaggtagaaacagagtctcgaggagggtaattgccagctaggattcctcaagggctccactctctatcttacacgtgaactctatctttctctgggtcatggggtcacaaccaattaagactttccgagtgacaagctgggaatcaccgtgttgcagttacagcaagtgttattgccaactttgccaatagtgtgtg

SEQ ID NO: 38461 - DNA, 553 bp, Homo sapiens
tgatctctggtaatatcctctttactcatgtgaaaactatttacaaaaacctcaactcatgtgaactctgaagtgggtaggaaagataaaaaaggaaattctttaattttgtgctttagagtctgaatatggatgccagtttgtcagtttatattccttgggaatattccatgggaagaaactggtccgccttgcagtcggcacagcacagctwcccaggtgtaacaacttggttgggataggagaaaacggttgctcctaagcttttgcgcagactggaagctgaatcaggcgtctgctgggatacaatcagagaccagcagctaacctcagggctttcagaaaataacggcaatcaggtagaaacagagtctcgaggagggtaattgccagctaggattcctcaagggctccactctctatcttacacgtgaactctatctttctctgggtcatggggtcacaaccaattaagactttccgagtgacaagctgggaatcaccgtgttgcagttacagcaagtgttattgccaactttgccaatagtgtgtg

SEQ ID NO: 38462 - DNA, 553 bp, Homo sapiens
tgatctctggtaatatcctctttactcatgtgaaaactatttacaaaaacctcaactcatgtgaactctgaagtgggtaggaaagataaaaaaggaaattctttaattttgtgctttagagtctgaatatggatgccagtttgtcagtttatattccttgggaatattccatgggaagaaactggtccgccttgcagtcggcacagcacagcttcccaggtgtaacaacktggttgggataggagaaaacggttgctcctaagcttttgcgcagactggaagctgaatcaggcgtctgctgggatacaatcagagaccagcagctaacctcagggctttcagaaaataacggcaatcaggtagaaacagagtctcgaggagggtaattgccagctaggattcctcaagggctccactctctatcttacacgtgaactctatctttctctgggtcatggggtcacaaccaattaagactttccgagtgacaagctgggaatcaccgtgttgcagttacagcaagtgttattgccaactttgccaatagtgtgtg

SEQ ID NO: 38463 - DNA, 1069 bp, Homo sapiens
ttgtgtccaaaacctattgacattgaggttgaaggaatactttctttgaatatatgtactaccattacaaaarttatcactaaaatcttatccattcagtagatatttgttgaatattagtaaatgaataattgaatcaatagatgaatggcacatgcgtaagcttttcatttttgttgcatttcctggcaaagctccctctgtctagaataacttctacctttttgtttctgtaaaaatattctgcaggcactaaagcctagttagtgcctagttagtgcctagtttgtgcctagttaaatccaatatgaccgtatccttgaaagtttccttcatttctccagatgtcccaagtataaatacaagcaaagagcttgttatattctgtcttgcaggctggcaaagatctgtctccagatctagacagtaaactttttaaagaaaaccggaggattttcaaaactgtgtgagtttgtaactgaattagagtgccataaatactatgcttcataattgacataattaatgtattttatactttcataatattgtacttggctaaacttttagcatatttttatataatgatgccaattgtgataatgttgcacttatacaatatattgagtaccatattatttcttatgttacaaaaataatttacccaccattattcaataaacttaactttcagtcagctacttactctataatgctcatttttataggatttatataaccagttattaatgtgtttcagtttaagtggtactgtgccagaattcttaaaggagggcttttgttccattacactatgagaggagtagttagagttgaaagaggacagatacaagtgtttctcaggaatgcttactgaactaaagaaagccagagacttctttggagtgatatttggaaagtaagttgagagtgcatttcaaagacttgacaatacatgatgttccattgtgggtggcatgagggatttgttttaaattattttcattctacttcattgacaatagagtttttacaaatcagattatgaaaagtgttcagatactctgcc

SEQ ID NO: 38464 - DNA, 1069 bp, Homo sapiens
ttgtgtccaaaacctattgacattgaggttgaaggaatactttctttgaatatatgtactaccattacaaaagttatcactaaaatcttatccattcagtagatatttgttgaatattagtaaatgaataattgaatcaatagatgaatggcacatgcgtaagcttttcatttttgttgcatttcctggcaaagctccctctgtctagaataacttctacctttttgtttctgtaaaaatattctgcaggcactaaagcctagttagtgcctagttagtgcctagtttgtgcctagttaaatccaatatgaccgtatccttgaaagtttccttcatttctccagatgtcccaagtataaatacaagcaaagagcttgttrtattctgtcttgcaggctggcaaagatctgtctccagatctagacagtaaactttttaaagaaaaccggaggattttcaaaactgtgtgagtttgtaactgaattagagtgccataaatactatgcttcataattgacataattaatgtattttatactttcataatattgtacttggctaaacttttagcatatttttatataatgatgccaattgtgataatgttgcacttatacaatatattgagtaccatattatttcttatgttacaaaaataatttacccaccattattcaataaacttaactttcagtcagctacttactctataatgctcatttttataggatttatataaccagttattaatgtgtttcagtttaagtggtactgtgccagaattcttaaaggagggcttttgttccattacactatgagaggagtagttagagttgaaagaggacagatacaagtgtttctcaggaatgcttactgaactaaagaaagccagagacttctttggagtgatatttggaaagtaagttgagagtgcatttcaaagacttgacaatacatgatgttccattgtgggtggcatgagggatttgttttaaattattttcattctacttcattgacaatagagtttttacaaatcagattatgaaaagtgttcagatactctgcc

SEQ ID NO: 38465 - DNA, 1205 bp, Homo sapiens
ccggagaaagggcagatgtggagcggctctcaggctcagctggttccaggaactcagctcctgtctccagctctctcttactcttcatcttgatctctatcatacgtctctacctctgttcatctctctccatctcttcttctttgtatgctgttcccagtctcttcactgattatggagacaatttcttctactaaagggtccattgttttctctataaagtaggaaatagggctatctgcagctttaagtgtaaataatctgaacctggaagcttcgaaggacagggaggtcacttttatgacctataaatcacagggaacaactttcccaacttgggtcaggggttacctactattctctgtgttgatactcgtgggtttgggtgagtttctagagcttgaaatggggaagggtggctttctttgtaagaaaaagataaattgagaaggtagaaagaacagttgttgacctcagcccttgattttctttttaayttagtgattttaaacactaaaactaaagacagaatttgtttttaaaagtgactgttagatatactttctaagcccaagaaccatgttcttgtttttcactggcacaatcaaatatatagcaataatccagagaatgcagtaaaataaatgtaccgaatggcatcccactccacaataaaactagagttttgctgaaactctgccaagtaggaattcttctttaccgctgtatagcaattttattttccagacctgtgtccagaatgcaaaaattatttaccagaggttgaaattcctactataaaaagggaacatttggttacttgcagtaagtacaggagtaggagtgagtggagagtgatgtacctaccgtttcagataaagaggtttggttaatgacgatattaaccactttttttgctcattatcccatttattcatcattcccattcctcattcccattgtaccctctgtccttttctatttccctggatatattttttctccgctcaccaaatattctgttcttttctttatcctatgacatctaaattcctttacccagctcatgtgcttatcctggctaagtgacaatcaagaaagtctgtgccactatggatgatgtcatagactttcactggaatggaaatctagatttcaaaagaaagctttataattatcagacttctaagaaggaacaaaagtgt

SEQ ID NO: 38466 - DNA, 1205 bp, Homo sapiens
ccggagaaagggcagatgtggagcggctctcaggctcagctggttccaggaactcagctcctgtctccagctctctcttactcttcatcttgatctctatcatacgtctctacctctgttcatctctctccatctcttcttctttgtatgctgttcccagtctcttcactgattatggagacaatttcttctactaaagggtccattgttttctctataaagtaggaaatagggctatctgcagctttaagtgtaaataatctgaacctggaagcttcgaaggacagggaggtcacttttatgacctataaatcacagggaacaactttcccaacttgggtcaggggttacctactattctctgtgttgatactcgtgggtttgggtgagtttctagagcttgaaatggggaagggtggctttctttgtaagaaaaagataaattgagaaggtagaaagaacagttgttgacctcagcccttgattttctttttaacttagtgattttaaacactaaamctaaagacagaatttgtttttaaaagtgactgttagatatactttctaagcccaagaaccatgttcttgtttttcactggcacaatcaaatatatagcaataatccagagaatgcagtaaaataaatgtaccgaatggcatcccactccacaataaaactagagttttgctgaaactctgccaagtaggaattcttctttaccgctgtatagcaattttattttccagacctgtgtccagaatgcaaaaattatttaccagaggttgaaattcctactataaaaagggaacatttggttacttgcagtaagtacaggagtaggagtgagtggagagtgatgtacctaccgtttcagataaagaggtttggttaatgacgatattaaccactttttttgctcattatcccatttattcatcattcccattcctcattcccattgtaccctctgtccttttctatttccctggatatattttttctccgctcaccaaatattctgttcttttctttatcctatgacatctaaattcctttacccagctcatgtgcttatcctggctaagtgacaatcaagaaagtctgtgccactatggatgatgtcatagactttcactggaatggaaatctagatttcaaaagaaagctttataattatcagacttctaagaaggaacaaaagtgt

SEQ ID NO: 38467 - DNA, 1205 bp, Homo sapiens
ccggagaaagggcagatgtggagcggctctcaggctcagctggttccaggaactcagctcctgtctccagctctctcttactcttcatcttgatctctatcatacgtctctacctctgttcatctctctccatctcttcttctttgtatgctgttcccagtctcttcactgattatggagacaatttcttctactaaagggtccattgttttctctataaagtaggaaatagggctatctgcagctttaagtgtaaataatctgaacctggaagcttcgaaggacagggaggtcacttttatgacctataaatcacagggaacaactttcccaacttgggtcaggggttacctactattctctgtgttgatactcgtgggtttgggtgagtttctagagcttgaaatggggaagggtggctttctttgtaagaaaaagataaattgagaaggtagaaagaacagttgttgacctcagcccttgattttctttttaacttagtgattttaaacactaaaactaaagacagaatttgtttttaaaagtgactgttagatatactttctaagcccaagaaccatgttcttgtttttcactggcacaatcaaatatatagcaataatccagagaatgcagtaaaataaatgtaccgaatggcatcccactccacrataaaactagagttttgctgaaactctgccaagtaggaattcttctttaccgctgtatagcaattttattttccagacctgtgtccagaatgcaaaaattatttaccagaggttgaaattcctactataaaaagggaacatttggttacttgcagtaagtacaggagtaggagtgagtggagagtgatgtacctaccgtttcagataaagaggtttggttaatgacgatattaaccactttttttgctcattatcccatttattcatcattcccattcctcattcccattgtaccctctgtccttttctatttccctggatatattttttctccgctcaccaaatattctgttcttttctttatcctatgacatctaaattcctttacccagctcatgtgcttatcctggctaagtgacaatcaagaaagtctgtgccactatggatgatgtcatagactttcactggaatggaaatctagatttcaaaagaaagctttataattatcagacttctaagaaggaacaaaagtgt

SEQ ID NO: 38468 - DNA, 1174 bp, Homo sapiens
ttagccattccacaatgtatccatatttcaaaacatcatgttgtacacaataaatatatacaacttttatttgtcaattaaaaaattaatattttttaaaattagtcagctgtgctggtacatacctgtagtccgagctactgaggagactgaggcaggagaatcacttgagcccaggaagtcaaggcagcagtgagctgtgatcttaccactgcactccaacctggggtatagagcgagaccttgtctcaaagaaagtattaattaattaattataaaagaaaacaaatgtgcaagccacagctggaaaaaacattcacaaagcaagtatatgaccaaaatcttgtytccagaatttataaggagctctacaactcaataataacacaaaccactgaactgaaaaaaaaatagcgcgcaaaagatttgataggcacttaaaaaaagagcaagagtagtagaaagagacagatatgagttcacagaaagcacaggaaaaataatattattttataaagtaaaactacaatgtgatactacacaatgtatctcataccatatataagaaataattccaatagacctattgtaagggcctaactgtaaatcttgtagaagaaaacataggagaccgtcttatgacattgggtttggcaaagagaatttaaataggacacaaaaagaaaaactttaaaaggaagcatttagtaaattggatttcatcaaaataaactctttgagtcttccgcagtcactattacgaaatacaaacagcaagccacaccaggagtaaatactcctaaaatctatgcctgacaatggggcttgtatttagaacataaaatgagctctcacaattcagtaaaaagaaggcaacccattaaagagaatatatgaatcatttccccactcaaaatcaaatattatgatatttaatacaaaattggcagaggttaagaaaatgaataagcaattcataaaaatcagaaagcttttttattagctttctgttgtttggtggatgcaacgatcatcacagttctctatggttcctaattattcttgtattttcatctaatcaataaactgtttctttcaaaataacattcttttggtcatttctgcacatctcttttattcatcagctgtttttaaaagattgctggtacctttt

SEQ ID NO: 38469 - DNA, 1174 bp, Homo sapiens
ttagccattccacaatgtatccatatttcaaaacatcatgttgtacacaataaatatatacaacttttatttgtcaattaaaaaattaatattttttaaaattagtcagctgtgctggtacatacctgtagtccgagctactgaggagactgaggcaggagaatcacttgagcccaggaagtcaaggcagcagtgagctgtgatcttaccactgcactccaacctggggtatagagcgagaccttgtctcaaagaaagtattaattaattaattataaaagaaaacaaatgtgcaagccacagctggaaaaaacattcacaaagcaagtatatgaccaaaatcttgtctccagaatttataaggagctctacaactcaataataacacaaaccactgaactgaaaaaaaaatagcgsgcaaaagatttgataggcacttaaaaaaagagcaagagtagtagaaagagacagatatgagttcacagaaagcacaggaaaaataatattattttataaagtaaaactacaatgtgatactacacaatgtatctcataccatatataagaaataattccaatagacctattgtaagggcctaactgtaaatcttgtagaagaaaacataggagaccgtcttatgacattgggtttggcaaagagaatttaaataggacacaaaaagaaaaactttaaaaggaagcatttagtaaattggatttcatcaaaataaactctttgagtcttccgcagtcactattacgaaatacaaacagcaagccacaccaggagtaaatactcctaaaatctatgcctgacaatggggcttgtatttagaacataaaatgagctctcacaattcagtaaaaagaaggcaacccattaaagagaatatatgaatcatttccccactcaaaatcaaatattatgatatttaatacaaaattggcagaggttaagaaaatgaataagcaattcataaaaatcagaaagcttttttattagctttctgttgtttggtggatgcaacgatcatcacagttctctatggttcctaattattcttgtattttcatctaatcaataaactgtttctttcaaaataacattcttttggtcatttctgcacatctcttttattcatcagctgtttttaaaagattgctggtacctttt

SEQ ID NO: 38470 - DNA, 1174 bp, Homo sapiens
ttagccattccacaatgtatccatatttcaaaacatcatgttgtacacaataaatatatacaacttttatttgtcaattaaaaaattaatattttttaaaattagtcagctgtgctggtacatacctgtagtccgagctactgaggagactgaggcaggagaatcacttgagcccaggaagtcaaggcagcagtgagctgtgatcttaccactgcactccaacctggggtatagagcgagaccttgtctcaaagaaagtattaattaattaattataaaagaaaacaaatgtgcaagccacagctggaaaaaacattcacaaagcaagtatatgaccaaaatcttgtctccagaatttataaggagctctacaactcaataataacacaaaccactgaactgaaaaaaaaatagcgcgcaaaagatttgataggcacttawaaaaagagcaagagtagtagaaagagacagatatgagttcacagaaagcacaggaaaaataatattattttataaagtaaaactacaatgtgatactacacaatgtatctcataccatatataagaaataattccaatagacctattgtaagggcctaactgtaaatcttgtagaagaaaacataggagaccgtcttatgacattgggtttggcaaagagaatttaaataggacacaaaaagaaaaactttaaaaggaagcatttagtaaattggatttcatcaaaataaactctttgagtcttccgcagtcactattacgaaatacaaacagcaagccacaccaggagtaaatactcctaaaatctatgcctgacaatggggcttgtatttagaacataaaatgagctctcacaattcagtaaaaagaaggcaacccattaaagagaatatatgaatcatttccccactcaaaatcaaatattatgatatttaatacaaaattggcagaggttaagaaaatgaataagcaattcataaaaatcagaaagcttttttattagctttctgttgtttggtggatgcaacgatcatcacagttctctatggttcctaattattcttgtattttcatctaatcaataaactgtttctttcaaaataacattcttttggtcatttctgcacatctcttttattcatcagctgtttttaaaagattgctggtacctttt

SEQ ID NO: 38471 - DNA, 1174 bp, Homo sapiens
ttagccattccacaatgtatccatatttcaaaacatcatgttgtacacaataaatatatacaacttttatttgtcaattaaaaaattaatattttttaaaattagtcagctgtgctggtacatacctgtagtccgagctactgaggagactgaggcaggagaatcacttgagcccaggaagtcaaggcagcagtgagctgtgatcttaccactgcactccaacctggggtatagagcgagaccttgtctcaaagaaagtattaattaattaattataaaagaaaacaaatgtgcaagccacagctggaaaaaacattcacaaagcaagtatatgaccaaaatcttgtctccagaatttataaggagctctacaactcaataataacacaaaccactgaactgaaaaaaaaatagcgcgcaaaagatttgataggcacttaaaaaaagagcaagagtagtagaaagagacagatatgagttcacagaaagcacaggaaaaataatattattttataaagtaaaactacaatgtgatactacacaatgtatctcataccatatataagaaataattcsaatagacctattgtaagggcctaactgtaaatcttgtagaagaaaacataggagaccgtcttatgacattgggtttggcaaagagaatttaaataggacacaaaaagaaaaactttaaaaggaagcatttagtaaattggatttcatcaaaataaactctttgagtcttccgcagtcactattacgaaatacaaacagcaagccacaccaggagtaaatactcctaaaatctatgcctgacaatggggcttgtatttagaacataaaatgagctctcacaattcagtaaaaagaaggcaacccattaaagagaatatatgaatcatttccccactcaaaatcaaatattatgatatttaatacaaaattggcagaggttaagaaaatgaataagcaattcataaaaatcagaaagcttttttattagctttctgttgtttggtggatgcaacgatcatcacagttctctatggttcctaattattcttgtattttcatctaatcaataaactgtttctttcaaaataacattcttttggtcatttctgcacatctcttttattcatcagctgtttttaaaagattgctggtacctttt

SEQ ID NO: 38472 - DNA, 591 bp, Homo sapiens
aaattaggtttgtccagaatcaacagaagcttgaataaagtcaaagtgaaataccatcttgagactcatgttaccttcaaaagcaactgaaaaagctaaaaagtaacctaaaccgctttctaatcaggaatgttctttccaggtaacgttgccagcagaagcaaaatcctaagtggctccctttttatttatttgtttatttatattgtcaaatgataattgtgaatatttatggagtgcaatgtttttgatggtattgattggctttgtttcatgggtacacacataggtttgcccaccgcccccttgttcttcagtgacttcgctagagagacgatccatagtattttgctatttctttggcagaccctatgtgctctytgcttctcacatctttgaataaacatcacactttaaaactgacagcccttgggtttcacttcgcactcaggaggcacagctctgtcagattttaagtgaaaggatatagtttgtttaagcccttttcaggataagttggaaggagagatggtttctaggtgctcagaatgacttatttttcttttgataagctctgagaagcactttcat

SEQ ID NO: 38473 - DNA, 1035 bp, Homo sapiens
ttgagggcagatgtcttctccatcaagttaaagggtccagtccaacatttaatttcctgccacagtgggactggtacattggtcaaatgcctcatctaagttcatgaaactttttcaaagcactaaggattctttaacttacactctgaacttccaatagagcagcaaaaataagttatctcctacccatcccgaaataaaatgttagagcaaaccaagacattttttattagctttaaaaccaatgccagtaatacaaaccaggaaattttatagctatatgtagagaaataggatccgtggacaggggttgtatctcaggcactaattctatctgattttcaaatgctactttcacctacacaggtcagagcygcacgtgtgagtaattctcagtgagatgactaactgatatgtagctaatgggtacctcctgcaaccgtagatggtatactgcagaggtttcaaattctgactgatcattttaaatcccttgatcactttagaaaaatacagatacttaaagttcccacctgcagatatactgcatcagactttctaagggcatggggccttgggcatcttattaagaaaaaattacccccacccctcccctgtaagacttcttgtgtactgctggtgggatataaattggtagaaccttttaagagggacagtttgactatatctatcaaaagctaaaatgtacttccctttgaaccagtttgaaccagcaattctactgcatgtattggataaatttgcacaagtttcaaatatatatgcaactttgtaatagcaaaaaaaaaaaaaaaaagaaaacaaactaaacatttgttataatggtactggttgaataaattaaaatacatctccacaatggaatactatacagttgttacaaataataaatgagataatttgggaataatctatgtatggtggtatggaaatataccaagtatacgcatgtatattttaagtgaaaaaataagttgcagaaagacttgattattttgatcctgtgcatgtatg

SEQ ID NO: 38474 - DNA, 1035 bp, Homo sapiens
ttgagggcagatgtcttctccatcaagttaaagggtccagtccaacatttaatttcctgccacagtgggactggtacattggtcaaatgcctcatctaagttcatgaaactttttcaaagcactaaggattctttaacttacactctgaacttccaatagagcagcaaaaataagttatctcctacccatcccgaaataaaatgttagagcaaaccaagacattttttattagctttaaaaccaatgccagtaatacaaaccaggaaattttatagctatatgtagagaaataggatccgtggacaggggttgtatctcaggcactaattctatctgattttcaaatgctactttcacctacacaggtcagagctgcacgtgtgagtaattctcagtgagatgactaactgatatgtagctaatgggtacctcctgcaaccgtagatggtatactgcagaggtttcaaattctgactgatcattttaaatcccttgatcactttagaaaaatacagatacttaaagttcccacctgcagatatactgcatcagactttctaagggcatggggccttgggcatcttattaagaaaaaattacccccacccctcccctgtaagacttcttgtgtactgctggtgggatataaattggtagaaccttttaagagggacagtttgactatatctatcaaaagctaaaatgtacttccctttgaaccagtttgaaccagcaattctactgcakgtattggataaatttgcacaagtttcaaatatatatgcaactttgtaatagcaaaaaaaaaaaaaaaaagaaaacaaactaaacatttgttataatggtactggttgaataaattaaaatacatctccacaatggaatactatacagttgttacaaataataaatgagataatttgggaataatctatgtatggtggtatggaaatataccaagtatacgcatgtatattttaagtgaaaaaataagttgcagaaagacttgattattttgatcctgtgcatgtatg

SEQ ID NO: 38475 - DNA, 1327 bp, Homo sapiens
gaagaagctcttataagcatctattgataacctaggctagagttgacaaattatggccctcagaccacatctagccccctgccggtttttgtacagtgcttgatctaaaaatagtttgtacatttttaaatggctgcaaaaaatcaaaagaataatatttcgggatacagaaaacttatgtgaaattcraatttcagtgttcataaaattttattagaacgcagtcacggccaggcacggtggctcacgtttataatcccagcactctgggaggctgaggcgggcagattgcttgagtccaggagtttgaaaccagcctgggcaacatggtgaaactccatctctacaaaaatacaaaagttagctgggcatagtggtgcatgactgtagtctcaggtgcttgggaagttgagaccagaggaggattgcatgagccaagaggttgagactgcagtgagctgtgatcactccactgcactacagcctgggggacagagtgagaccctgtctcaaaaaaaaaaaaaaaagaagaagaagaagaacacagccacactcattcacactcagcaacatttgccctctagccctttaccaagaagtttgccaacctctggcctagagtaaaatattactgatttctgcaagtgaaggaaagctaggttgcattgcagtgtattctgaaatgaagttttcttacctcaattaagtacataaaaaaagtagcttaaccttgtctgcagaggcccttgttaaaggaccagataggacacatttatcattagcatatcattagttagtagcggcctcaccttttctccttatgttgacatatggtagcactgtttatattcaaacactgtttctaatctgtttgaaaagtttgtcttcctaattgggtaatctagtattttataattttataatttcatttttgtactcaaactgttcaacaaattgttttctcagtagatagtcttaaatgtcaggtcgatggaggtataattttgatacattatagaggtttatagttcaaagagttttgaccagtgtccagtcatgtaaccacgaccacagtcaagatctaaaatagctctatcacctccccagattcccttgtacctctttggaatcagtcatctttcccctttccacagcccctgactgtgatggatcagttttctgttcccatagttttgcgttttccagaacgtcacatacatgggatcatatgtgaagtaatgaatattttaaaagtatgtttcagttccctcaactgcagtttagaaaccaatgaactcttaattgatgagtttcaactatacttgca

SEQ ID NO: 38476 - DNA, 1327 bp, Homo sapiens
gaagaagctcttataagcatctattgataacctaggctagagttgacaaattatggccctcagaccacatctagccccctgccggtttttgtacagtgcttgatctaaaaatagtttgtacatttttaaatggctgcaaaaaatcaaaagaataatatttcgggatacagaaaacttatgtgaaattcgaatttcagtgttcataaaattttattagaacgcagtcacggccaggcacggtggctcacgtttataatcccagcactctgggaggctgaggcgggcagattgcttgagtccaggagtttgaaaccagcctgggcaacatggtgaaactccatctctacaaaaatacaaaagttagctgggcatagtggtgcatgactgtagtctcaggtgcttgggaagttgagaccagaggaggattgcatgagccaagaggttgagactgcagtgagctgtgatcactccactgcactacagcctgggggacagagtgagaccctgtctcaaaaaaaaaaaaaaaagaagaagaagaagaacacagccacactcattcacactcagcaacatttgccctctagccctttaccaagaagtttgccaacctctggcctagagtaaaatattactgatttctgcaagtgaaggaaagctaggttgcattgcagtgtattctgaaatgaagttttcttacctcaattaagtacataaaaaaagtagcttaaccttgtctgcagaggcccttgttaaaggaccagataggacacatttatcattagcatatcattagttagtagcggcctcaccttttctccttatgttgacatatgrtagcactgtttatattcaaacactgtttctaatctgtttgaaaagtttgtcttcctaattgggtaatctagtattttataattttataatttcatttttgtactcaaactgttcaacaaattgttttctcagtagatagtcttaaatgtcaggtcgatggaggtataattttgatacattatagaggtttatagttcaaagagttttgaccagtgtccagtcatgtaaccacgaccacagtcaagatctaaaatagctctatcacctccccagattcccttgtacctctttggaatcagtcatctttcccctttccacagcccctgactgtgatggatcagttttctgttcccatagttttgcgttttccagaacgtcacatacatgggatcatatgtgaagtaatgaatattttaaaagtatgtttcagttccctcaactgcagtttagaaaccaatgaactcttaattgatgagtttcaactatacttgca

SEQ ID NO: 38477 - DNA, 764 bp, Homo sapiens
atcagaggcatttaaaaaaatcaaggagaaacccagcattttacaaagaggctattgtatcgacttgttaaattgcttaaagagaaaagtgatgtagaccacattggcttttatgsaggattgagcaaacttaccaatgaagagaaatacaacactagcattgtgtgagagaaaatgtatttgaaactacatttccaggggattaagatgtgacaccaccactttcagttaggtttgcactgttggtgggaaagtacattagtccaaccattgtggaagacagcgtggcgattcctcaaagatctagaggcagaaataccatttgacccagcaatcccattgctgggtatgtacccaaaggaatagaaatcattctcttataaagatacatgcatgtgtgtgttcattgcagcactattcacaataccaaagacatgaaatcaacccaaatgcccatcatgatagactggatgaggaaaatgtggtacatatacacagtggaatactatgcagccgtaaaaaggaacgagatcatgttctttgcagggatggagctggaagccattatcctcagcaactgctaactaaagtaatgcaagaacagaaaaccaaacaccacatgttttcacttataagtgggagctgaatgatgagaacacatggacacatgggggaggggaacaacacacactggagcctatcagggggcaggggaaggaagaacatcgggaagaatagctaatggatgctgggcttaataccta

SEQ ID NO: 38478 - DNA, 1272 bp, Homo sapiens
tgcatttatctcattgagcagagggatgactgaatagagtgggaggcaggcttgccctgcgcagttctcagcttgacttttccctttagctcagtgatttgggggccgcaagatttgtttttctttcactcatgtagccattyagattttcgagatattcaagtattgaccctcatattaaccatacaaattagaattatgcctttgcaagactttcttttgaaagtcagataaagtcactcagtgtctcctagaagttttcatcaaaggagctcaggggagctaattttgaccttaaaaggcagaagattttgcctgctttgttaaaaaagtgacattaactttccatgctcctatctctacattagaaaacaagtaagacagatgatattagcttgtgcgtcagtgaattttacatttgtaattaaagtccacattgaatgtcagtgtttttctcaataatatacttttagaatgccctatttcacttttgtttaagacttataaggctgatttatcaaagtgaataataattcactcttaaattaaaaataacatattcttatgtaaataaattaaatttaaaattattattactattctaaaataaatgaacagacatgttgtcaccttgccttaccatttgatgagcaatatcagtgcatatattgtgatcttttgaattgagttccaaagtgtcattatttttctaagaggataatctctttattaaaattacaatttcttcagagattcaatcatgtttatatttgaatgtaagaggaacatttgtcaaaataaggaaaatacagggattccatagaatgtagatgatgtattttactcgtaaaatatggctcaaattgtttagcttctagtttatccatagtgttcatgccacatgccctaggctgtgccttatttcagtcacagccctggtggacagttccaacttcccttgcagcttgtagcatttggattcaagtgaattaaacaaaagtatatattttttcattctgacctagggcctcctcttccaggaaacttattttgaaagcacactagagaatgcagatttgtgggtatgtttgggagtatgttaatgaccctcagaacagcctttaaccaaaggaggatgggatgtaaaattctgtagcctatgggaggatgggatgtagccttctattttccaggtggtaattctgggtggtgttctttagccttctcagtgacctcatctaaattaaatcctcagtagcgaacccaataatg

SEQ ID NO: 38479 - DNA, 1272 bp, Homo sapiens
tgcatttatctcattgagcagagggatgactgaatagagtgggaggcaggcttgccctgcgcagttctcagcttgacttttccctttagctcagtgatttgggggccgcaagatttgtttttctttcactcatgtagccattcagattttcgagatattcaagtattgaccctcatattaaccatacaaattagaattatgcctttgcaagactttcttttgaaagtcagataaagtcactcagtgtctcctagaagttttcatcaaaggagctcaggggagctaattttgaccttaaaaggcagaagattttgcctgctttgttaaaaaagtgacattaactttccatgctcctatctctacattagaaaacaagtaagacagatgatattagcttgtgcgtcagtgaattttacatttgtaattaaagtccacattgaatgtcagtgtttttctcaataatatacttttagaatgccctatttcacttttgtttaagacttataaggctgatttatcaaagtgaataataattcactcttaaattaaaaataacatattcttatgtaaataaattaaatttaaaattattattactattctaaaataaatgaacagacatgttgtcaccttgccttaccatttgatgagcaatatcagtgcatatattgtgatcttttgaattgagttccaaagtgtcattatttttctaagaggataatctctttattaaaattacaatttcttcagagattcaatcatgtttatatttgaatgtaagaggaacatttgtcaaaataaggaaaatacagggattccatagaatgtagatgatgtattttactcgtaaaatatggctcaaattgtttagcttctagtttatccatagtgttcatgccacatgccctaggctgtgccttatttcagtcacagccctggtggacagttccaacttcccttgcagcttgtagcatttggattcaagtgaattaaacaaaagtatatattttttcattctgacctagggcctcctcttccaggaaacttattttgaaagcacactagagaatgcagatttgtgggtatgtttgggagtatgttaatgaccctcagaacagcctttaaccaaaggaggatgggatgtaaaattctgtagcctatgggaggatgggatgtagccttctattttccaggtggtaattctgggtggtgttctttagccttctcagtgacctcatctaaattaaaycctcagtagcgaacccaataatg

SEQ ID NO: 38480 - DNA, 628 bp, Homo sapiens
ctcagcaattccactcaaaggtgtgcatgtttatcaatgagcacaaatatcatcaagaggacggttcaaacatatttattttagcattatttgtagtagcctcaaactgaaaaatattcaaatgtccattaacattatgatgaaaataaattatgatatattcacaaataaaaacctacacatcaatgaaaatgaactagctacagttgcagtcaaccatatttgtaaagctcacatattgttgggcaaaagaagctgaaaacaaaacaacgcatactatatgatttcagttataaaaattacccaaactggcaggactaaactattgcacttagaaattcttgcatgaatggaaaaatgcaaataaagtaattaccataaattcaggataatgactatttttggatgggagaatgcataatgaggacttttggggtcctaataaaattctattttttttaacttgttttgtgattacrtggtatttcgcttttgctaaatcattaagctatacgtttttgtttctgtacttttctatacgtatgctatggttcaagtaaaacacatcatcagagaaacacctttcaaatttatcgaataaactgctgctgctatctgttttgtatta

SEQ ID NO: 38481 - DNA, 1090 bp, Homo sapiens
ccacatggtggaggggcaagaaaattctctgaggtccctattataaggacactaaccccattcatgagcactctgccttcatgtcctagtcacctgccaaaggtcccacctaaaaaccacaagactgtgcaaacatgtattatcctccttcaaatatatgttaaaccctaatgttcaggcacagtctgttttcttttagtaaccacttattcctctgtctttagtaagtttagcgaaatgctttttaaaattaaatggtacttctagtttgacctaactttctaaactgggatttcagaacacaggatgtcattctaatatttcagaatttgagagacatacaattacaacacagtggcaaacgtgtgtatccaaacatgcctaaacataggaaaagtagagtaaaaatacagtattagaatcttatgggaccaccatcgtatttgaggtctgtcattgactaaaatgttatgtggtgcatgaccatatgtagtaaattaaacagtacagaactatgaatcaggcttaattgtaagaatagtagaatattgttttacaatatattctgtatactaattcttagaatgagaagattgagactcacctgacctataaaattagcaattctgtatttctgaatccaggattacattataactacaggggaccatgacacatgtagttatgtccctgaaaaattaaagagttcccaaagaaattatttatgagagctaataaaaaacattttgacactgaaaataaactaagtaaaactttactaaactcaggggttactcctttacctaggctaggcccaagtttgtttcttttaaggtcaacggaaggtaggtttcatgacataaagcaactagttaaaaggtttttctgctgccagttttctagtcaaggcaatactgctacattgctttgtggcggtttctcctggagtggtttccccctctcattcttttgaggtgttggaggggtgtgaagtggagtagctggattttaaactgtgggagttaygtagatgattagatatcctttttacagacagcactgtggcaacagcctgcagaatgcgttggag

SEQ ID NO: 38482 - DNA, 623 bp, Homo sapiens
agcagatcaattccattctcccccatctcccaaaggcaggatgtgtaggaacaataacagataaaacatttcatatcaccaactacttcaaaataagaacataattactcccaccctttctcattctctgagaaacttgatacagtcaaattccaaacgatgtaaagtcccagggctcttccagaagctcaatgatagagtccaggcacaggctgatagaaattcccacttcaccagggtgtagattacgtggatcttgttctactaactcaawagccaattccgaagtttcaaagaaaaaaaatccaaggatacttaaccaattaagaataatgaaagatggagatttgggacctccggggcttgtggtatgcctggagtagtatgatactttccatccaagatgaaaagtgtaggaaatgattcactagtgtcattacattattttaactggttactggggagtatttatcacactttgacatcatagttgtctcaacactataaatgtaacattaaaccactgaccacagatataaaaaaaactgtaacatttgtttatgggtttcctcacttagcgaaatgagtagggactgaataccatctcaaatatttaaaaatgc

SEQ ID NO: 38483 - DNA, 623 bp, Homo sapiens
agcagatcaattccattctcccccatctcccaaaggcaggatgtgtaggaacaataacagataaaacatttcatatcaccaactacttcaaaataagaacataattactcccaccctttctcattctctgagaaacttgatacagtcaaattccaaacgatgtaaagtcccagggctcttccagaagctcaatgatagagtccaggcacaggctgatagaaattcccacttcaccagggtgtagattacgtggatcttgttctactaactcaatagccaattccgaagtttcaaagaaaaaaaatccaaggatacttaaccaattaagaataatgaaagatggagatttgggacctccggggcttgtggtatgcctggagtagtatgatactttccatccaagatgaaaagtgtaggaaatgattcactagtgtcattacattattttaactggttactggggagtatttatcacactttgacatcatagttgtctcaacactataaatgtaacattaaaycactgaccacagatataaaaaaaactgtaacatttgtttatgggtttcctcacttagcgaaatgagtagggactgaataccatctcaaatatttaaaaatgc

SEQ ID NO: 38484 - DNA, 584 bp, Homo sapiens
tagaagtaactgaaatctacatcttgtgactgttctatgtcctcatctccaacaaataatctattgatcttaagaccttttaaactcatgtgtatattacctcacagtttgcaaaactcattcatatgcattgtcttaatctccacagtagcaatgaagtattttattagttagctactgctgcataacaaactagcagaaaacstcaatggcataaaacagtaatcacctatctttggttacaaattgatatcattggctgcacagttcagctgagctcaacagggtttattcacacatctttgatcagtttcaggtcatctaggtagttttgattaccttaactggactctctcacatgtcttgggcattaactggacaacatgtgctatcttgactctgttccacatggcccctccccttgtttgggaatttcttatgataaaggcagaggaggaaaggaatgagcaggtatgctttttcatgtgtcagactgcatcaaatttgctactgtcccacttgccaaagcaaataacatggccaacccagagttacagtacacagaaaaagatgttgctatagaa

SEQ ID NO: 38485 - DNA, 584 bp, Homo sapiens
tagaagtaactgaaatctacatcttgtgactgttctatgtcctcatctccaacaaataatctattgatcttaagaccttttaaactcatgtgtatattacctcacagtttgcaaaactcattcatatgcattgtcttaatctccacagtagcaatgaagtattttattagttagctactgctgcataacaaactagcagaaaacgtcaatggcataaaacagtaatcacctatctttggttacaaattgatatcattggctgcacagttcagctgagctcaacagggtttattcacacatctttgatcagtttcaggtcatctaggtagttttgattaccttaactggactctctcacatgtcttgggcattaactggacaacatgkgctatcttgactctgttccacatggcccctccccttgtttgggaatttcttatgataaaggcagaggaggaaaggaatgagcaggtatgctttttcatgtgtcagactgcatcaaatttgctactgtcccacttgccaaagcaaataacatggccaacccagagttacagtacacagaaaaagatgttgctatagaa

SEQ ID NO: 38486 - DNA, 584 bp, Homo sapiens
tagaagtaactgaaatctacatcttgtgactgttctatgtcctcatctccaacaaataatctattgatcttaagaccttttaaactcatgtgtatattacctcacagtttgcaaaactcattcatatgcattgtcttaatctccacagtagcaatgaagtattttattagttagctactgctgcataacaaactagcagaaaacgtcaatggcataaaacagtaatcacctatctttggttacaaattgatatcattggctgcacagttcagctgagctcaacagggtttattcacacatctttgatcagtttcaggtcatctaggtagttttgattaccttaactggactctctcacatgtcttgggcattaactggacaacatgtgctatcttgactctgttccacatggcccctccccttgtttgggaatttcttatgataaaggcagaggaggaaaggaatgagcaggtatrctttttcatgtgtcagactgcatcaaatttgctactgtcccacttgccaaagcaaataacatggccaacccagagttacagtacacagaaaaagatgttgctatagaa

SEQ ID NO: 38487 - DNA, 597 bp, Homo sapiens
ttgtagttacttgtgctgcagaacaccctctacttgagttttgtgacaccgtcattgttttccttgtttttttcccctgtcctttcattgtcttttactgattatgcttcttgtccttgatcccttataataatcaccattgtactgtgctgtctaatattatagcctctacccaaatatggatacttgaatttaaattaagattacataaaatttgagtcagtttctcaagcacatgaatcacatttcaagtgtttaaaacatcttatgtaccccataaatatatatgcctactatgtacccacaaaaataaaaaactttttaaaaatttaaatttaaatttaaaataaataaattttaaaaayataaattttaaaaatttttaaataaaatatttttttaattttaaataaaaatttttaaatgggaacatatgggtagtgacttctatattggacaacatagatatagaacattttcatttccataggaagttctattggattgttatgtcaaaggatgttctgttgcaaaggaagagaaactcccaccatgaagctcaaaagcagggaatttgtgctgaaatcttacaggaaa

SEQ ID NO: 38488 - DNA, 568 bp, Homo sapiens
ttttctacggtcatctttctagatctgtcatacagttatgtaattatttgttaacatgtgtctctctcctcctctctcactagaccaaaccctgtgctcctcacacaatgtctggctcataatagatgctcaatgactattggttaaactgaattaatggtccactttcattcattctagtgtaactgctaaatcacacctgtggaaaacccaccatatgtcaaggtatggtgatgggaacctaaaagagtgcaaggccctgtgaaaragggtcctcattcactgcggtggacagaactcctgaccacctagaatttaccatgttataagatgtagaacaaagctggaaaagtaaggccttggggaaattgattttgtaataaatagaaaacctgtttctactaccctattaaacttttcctacttccttcattctccctaaatcatttccaatttgccacagaccacaaatgacagaaagtgacattgttctcacatctttgaaccactgctttcccaactcctcattcacctcttctgcgaatttctctatatttttgtagccaaa

SEQ ID NO: 38489 - DNA, 1955 bp, Homo sapiens
atgctctatgaagctagccactttaagcatgatcaccgtgtgaggcaatagaaagaactggttataaactcaggatttggagtcaaagtgcctgggtaaaaaatagcagcatagcttcctgattcttaggtgtgcaaccctgaacaagatccttaaacttagagacactatctacagagtatctggaaatgttaaatgagcttaatagtaaaaagcatttatgatggaataacacacaaactatcatataatttatacttaaatactagttataattattgtctcatccactttacagatgaggaaactgaggcttgtagaggtcagtcaaatgctgaracacattgactcaggcaaattgactattgagttcactctcttgccttttttgaacattatctgtaataaagttctatgtgtatttgatatgtagaggtccaggaaatcaaatagattgtgttctccatgacttctcaatgagttaatcaaactgagtgaagattagctccataaaatattatgggttcttctgacattgcagcatgattctaactttaaaagagaacattcttttcattctattcattcattatccaatgaaaacttttgagttgggctattgtgttccatctattttcttggacttcaaaataaagtgatcatcagggcagtcgttgttcctgcacttgtaaacttatgatcaaataagaaaagtgtgttaaattttataaaagagaaacataaactatgtgaatataaaaggaaaagtgagtttcaaatttaggtaatacttaagtacctactaaagttatggccaaaactgccactccagcactcataatctacatgaatcattaatggtgatcctacttcccctgactcttaatgtggcctcatagaatatagtagaaacattaaaatgtaaaaatttagtaatacaagcaagccatctcactcaatggctatatgccctgaagagagcatgaaatgggagatattactttgctgttcagtcagttgatttcagtttccatttacttcttatgatatgtacagtttattgagctgggtataattcttatgttaaagatacttacttttccaaaacatggcctttcaacatgaactattttatctgtggtgaattgaagaaatagcaatcttttcaaatcctggaggaagatttctggtgttgatcttattggtctccaatgtagcatagaatacaaccatgcatggtacttcatccatgattaaagggatttttagttttagttttgattatatccaatttttgctttatgtgctcactttagaacttaacctccaaataagatgtaactccatagagtattttccttatctgaatggaccccagagccaggtaaacttgggctgaaatcacagtactctcataactggctgtgtgattgggagaattcaattaacttttctatgcttcattttcctcctctgtaaaatggggataatcttacaatacagagttgttgaagattaaatgaaaacatatgcaaagcccttagcacagaattttattgagcaatagtagtctattaagaaaagtccttgccaaacatagaactctagagagtcagagttggcacagcagctaaaacttactttgtgctgacatgtgtattaggagccagtaaaacattgaaggaactagtatataaaacagtgattaagtttagttttggagttagtgctgagcttgaaaccccacttactatgcttacaagctttgtaacttcgggcaagttatttaacttctctaagctgttcatctgtaaaatgatacaactaataattcctacttcacagggttgttgtgaggattaaatgaaatgatccatgtaatgcacttagctgagttcctggcacacagtgtgcactccgaggtgttagcttttattatgggaaaatttcacaca

SEQ ID NO: 38490 - DNA, 1955 bp, Homo sapiens
atgctctatgaagctagccactttaagcatgatcaccgtgtgaggcaatagaaagaactggttataaactcaggatttggagtcaaagtgcctgggtaaaaaatagcagcatagcttcctgattcttaggtgtgcaaccctgaacaagatccttaaacttagagacactatctacagagtatctggaaatgttaaatgagcttaatagtaaaaagcatttatgatggaataacacacaaactatcatataatttatacttaaatactagttataattattgtctcatccactttacagatgaggaaactgaggcttgtagaggtcagtcaaatgctgaaacacattgactcaggcaaattgactattgagttcactctcttgccttttttgaacattatctgtaataaagttctatgtgtatttgatatgtagaggtccaggaaatcaaatagattgtgttctccatgacttctcaatgagttaatcaaactgagtgaagattagctccataaaatattatgggttcttctgacattgcagcatgattctaactttaaaagagaacattcttttcattctattcattcattatccaatgaaaacttttgagttgggctattgtgttccatctattttcttggacttcaaaataaagtgatcatcagggcagtcgttgttcctgcacttgtaaacttatgatcaaataagaaaagtgtgttaaattttataaaagagaaacataaactatgtgaatataaaaggaaaagtgagtttcaaatttaggtaatacttaagtacctactaaagttatggccaaaactgccactccagcactcataatctacatgaatcattaatggtgatcctacttcccctgactcttaatgtggcctcatagaatatagtagaaacattaaaatgtaaaaatttagtaatacaagcaagccatctcactcaatggctatatgccctgaagagagcatgaaatgggagatattactttgctgttcagtcagttgatttcagtttccatttacttcttatgatatgtacagtttattgagctgggtataattcttatgttaaagatacttacttttccaaaacatggcctttcaacatgaactattttatctgtggtgaattgaagaaatagcaatcttttcaaatcctggaggaagatttctggtgttgatcttattggtctccaatgtagcatagaatacaaccatgcatggtacttcatccatgattaaagggatttttagttttagttttgattatatccaatttttgctttatgtgctcactttagaacttaacctccaaataagatgtaactccatagagtattttccttatctgaatggaccccagagccaggtaaacttgggctgaaatcacagtactctcataactggctgtgtgattgggagaattcaattaacttttctatgcttcattttcctcctctgtaaaatggggataatcttacaatacagagttgttgaagattaaatgaaaacatatgcaaagcccttagcacagaattttattgagcaatagtagtctattaagaaaagtccttgccaaacatagaactctagagagtcagagttggcacagcagctaaaacttactttgtgctgacatgtgtattaggagccagtaaaacattgaaggaactagtatataaaacagtgattaagtttagttttggagttagtgctgagcttgaaaccccacttactatgcttacaagctttgtaacttcgggcaagttatttaacttctctaagctgttcatctgtaaaatgatrcaactaataattcctacttcacagggttgttgtgaggattaaatgaaatgatccatgtaatgcacttagctgagttcctggcacacagtgtgcactccgaggtgttagcttttattatgggaaaatttcacaca

SEQ ID NO: 38491 - DNA, 597 bp, Homo sapiens
ttcctctgttaagagtgtttacattttcaagtaaagtaaaagaagcagttttctttaccccctgcttcacaatgaagctggtgagtttatcaaacaatccgttattatgaaattctaacacactacttgctgtaggtggaaatgcaaacaatctgatttttcctgagctcttagaatctaatctacttctagtcctagctgatatatataataaatatgcaacccacgttgtttcatgycgcagcaacctggaggagagtgttatggagatgggttactagaaatgagcaatactggccaggcgcggtggctcacgcctgtagtcccaccactttgggaggctgaggtgggcagatcatgaggtcaggagttcaagaccagcctggccaacatagtgaaaccccatctctattaaatatacaaaaattagctgggtgtggtggtgcacacctgtagtcccagctacttgggaggctgaggcaggagaatcgcttgaacccagaaggtggaggttgtggtgagccaagatcacaccactgcactccagcctaggcaacagactgagactccatctacaaaaaaaaaaaaaaaaaaaaa

SEQ ID NO: 38492 - DNA, 597 bp, Homo sapiens
ttcctctgttaagagtgtttacattttcaagtaaagtaaaagaagcagttttctttaccccctgcttcacaatgaagctggtgagtttatcaaacaatccgttattatgaaattctaacacactacttgctgtaggtggaaatgcaaacaatctgatttttcctgagctcttagaatctaatctacttctagtcctagctgatatatataataaatatgcaacccacgttgtttcatgccgcagcaacstggaggagagtgttatggagatgggttactagaaatgagcaatactggccaggcgcggtggctcacgcctgtagtcccaccactttgggaggctgaggtgggcagatcatgaggtcaggagttcaagaccagcctggccaacatagtgaaaccccatctctattaaatatacaaaaattagctgggtgtggtggtgcacacctgtagtcccagctacttgggaggctgaggcaggagaatcgcttgaacccagaaggtggaggttgtggtgagccaagatcacaccactgcactccagcctaggcaacagactgagactccatctacaaaaaaaaaaaaaaaaaaaaa

SEQ ID NO: 38493 - DNA, 591 bp, Homo sapiens
caaggatatggcctgttggaatatcatgggaggtgagggctttagtgagggttcctgtgtggcataaccctcagctggggcactgggctcaccttccaagtggttatgcctcatcgattaaactgtctcattgcttgtatgtcattgataagaattgtgttacatggccattttttgctttgagtgtattttattttatttttatttcctatggtataggtaagtaaaaataggaggttaaaattacatggtagaagaagccacttagtgtctgtcacacaagcttactrgccgtagccaaatctctttgttatgaaagtgggaatttgtgctaaaacaattgataggatttgagcaccgtgtgaattttacatttcctaattatgtggacacctaaaacatctaccagctacatcagtttactgtgtattaaaagccacatctatctacatttagtgttataacttctagtctaattccagataaccctccttacactacctcacaataactcacaagttgcaactcttcagatatcaacaagaaagtttcagatcacttttcaaagtaaagtattatctttattatatt

SEQ ID NO: 38494 - DNA, 589 bp, Homo sapiens
tttaaagtgtgctgtgagaggtatgtagtgagggaggagggaaaaagtggagaaggaaagatattcctcgggaaaaccattgcagaatattggtgagcagagatggtcatgccaaatttaaaaacagaagtaagggatatcccacaatgtgaattcatccaccargtagtggcatcaatctttttgggacctctttataacataagaagaccaaccaccccagtttgcctggggattatcccagtgttagcactgaaagttttgtctctctagaacccttccctgggattcagaaagtcccaatggcaatgggtatgggaggttagggtaaaagtgaaaaacccatactgtgcctccaaaaaaaaaatagggctggaagtaacactactttttacatcaaatgaatgtgacacagattatccaccctctgtagtagctactgctgttaattttttttcccatgaccactgatgttggcaaccattatttgcagctcacaatgcataatgaatcatccattgttgcattgcttcaagtggattaacttgtgcttttaatcttgtggattaactacagtgctttgtactga

SEQ ID NO: 38495 - DNA, 2028 bp, Homo sapiens
ttctcacccacatctggaagccacatgtcagcggcagctatataaaacggtcagaccagcaatcttagagtgacattgtttgccaaaatcccaggcagcatggacctcagtcttctctgggtacttctgcccctagtcaccatggcctggggccagtatggcgattatggatacccataccagcagtatcatgactacagcgatgatgggtgggtgaatttgaaccggcaaggcttcagctaccagtgtccccaggggcaggtgatagtggccgtgaggagcatcttcagcaagaaggaaggttctgacagacaatggaactacgcctgcatgcccacrccacagagcctcggggaacccacggagtgctggtgggaggagatcaacagggctggcatggaatggtaagggccagtccctgcactgcactggggctgggaacatctctgcatatccctcctcctgggggctgctagactctcaaggaatatcagtaaccaaagcctgggcaaatcccaccccaaacctcaccactgcatgctctgggtggagcagggctgctgctgagcagactacatgacaggacaaaaacctgggatggggagtgtctgtgggagacagactcctctgtggctctgttccttccagaagctgttctacctactctcagtttgggccaggggctggtgtaggtcggcgagaagcttgcttaccagactaccaaaagatatgtacagaaactgaaagtaataaactttatagaaattaaaactttctgtgccatcggaatggcatttttcttttttagaaatttatttttaccattttacaaaagtactggcccacagtagtttgggaacaagaaaaataaacaattgatctctcagcacggagggtttgagaactattgatttagagcaagtgaatggaaaagaggggacaaggacatttaggcaaaagaaagtggaattaaatagctgtctactgccttgattaaatgtgctctctcaattatgagtactgaggtccttctctctgcctgaatttaaagtgggttttattgctggaaaatagtttactaaagggttttggagagaggtgctgtcttcccctgactgcattctgccctaagcagtggcatggaattttttcgagcttgtacttttttgtggggtgtgattgtctcagctgggtctcagcccaggtgcttggtcaggagctcatcctagtaggcactgactgctaggctgattatttacaacagcctagatggagccagcactctaggaggcttggaggagagaacggaggaggcagtccagggaggaggaagcccacctggagggctgctgcatgtgctatctgtagagcaacccagatgtgtggcaacaagtacttagtgtagtggggattggaggggtcaagcacaaaatctggccaggtgtggtggctcacgcctgtaatcccaaacactttgggaggctggggagggaggatcacttgagatcaagagttcgagaccagcctagggaacacagccagaccctatctctacagaaaaaaaaaaattagcccggtgtagttgcatgcagcctgtggtcccagctactcaggaggctaaggtaggaggatcacttgagcccagggagtcgaggctgcagtgagccatgctcgcaccactgtattccctcctgggtggcagagcaagactctgcctcaaaaaaaaaaaaaaagaaaatagaaaaaagaaaaagcatagaaccctgggggacacaaccagtagagaggtgatgatgggaaatccaagaggaagaaacaccgatgggtgggggagccaggaaagagagcgggcctttaagtaatgacaacagctaccatttattgagtgcttaccctgagcaggctccatgctaagtgctttatgtggatcatctcgtgtaatgctcaaaacaagggtatatgccatttataggtagacaaactgcagtctagagatccagtatttcctcggctagaaagctggggttt

SEQ ID NO: 38496 - DNA, 2028 bp, Homo sapiens
ttctcacccacatctggaagccacatgtcagcggcagctatataaaacggtcagaccagcaatcttagagtgacattgtttgccaaaatcccaggcagcatggacctcagtcttctctgggtacttctgcccctagtcaccatggcctggggccagtatggcgattatggatacccataccagcagtatcatgactacagcgatgatgggtgggtgaatttgaaccggcaaggcttcagctaccagtgtccccaggggcaggtgatagtggccgtgaggagcatcttcagcaagaaggaaggttctgacagacaatggaactacgcctgcatgcccacgccacagagcctcggggaacccacggagtgctggtgggaggagatcaacagggctggcatggaatggtaagggccagtccctgcactgcactggggctgggaacatctctgcatatccctcctcctgggggctgctagactctcaaggaatatcagtaaccaaagcctgggcaaatcccaccccaaacctcaccactgcatgctctgggtggagcagggctgctgctgagcagactacatgacaggacaaaaacctgggatggggagtgtctgtgggagacagactcctctgtggctctgttccttccagaagctgttctacctactctcagtttgggccaggggctggtgtaggtcggcgagaagcttgcttaccagactaccaaaagatatgtacagaaactgaaagtaataaactttatagaaattaaaactttctgtgccatcggaatggcatttttcttttttagaaatttatttttaccattttacaaaagtactggcccacagtagtttgggaacaagaaaaataaacaattgatctctcagcacggagggtttgagaactattgatttagagcaagtgaatggaaaagaggggacaaggacatttaggcaaaagaaagtggaattaaatagctgtctactgccttgattaaatgtgctctctcaattatgagtactgaggtccttctctctgcctgaatttaaagtgggttttattgctggaaaatagtttactaaagggttttggagagaggtgctgtcttcccctgactgcattctgccctaagcagtggcatggaattttttcgagcttgtacttttttgtggggtgtgattgtctcagctgggtctcagcccaggtgcttggtcaggagctcatcctagtaggcactgactgctaggctgattatttacaacagcctagatggagccagcactctaggaggcttggaggagagaacggaggaggcagtccagggaggaggaagcccacctggagggctgctgcatgtgctatctgtagagcaacccagatgtgtggcaacaagtacttagtgtagtggggattggaggggtcaagcacaaaatctggccaggtgtggtggctcacgcctgtaatcccaaacactttgggaggctggggagggaggatcacttgagatcaagagttcgagaccagcctagggaacacagccagaccctatctctacagaaaaaaaaaaattagcccggtgtagttgcatgcagcctgtggtcccagctactcaggaggctaaggtaggaggatcacttgagcccagggagtcgaggctgcagtgagccatgctcgcaccactgtattccctcctgggtggcagagcaagactctgcctcaaaaaaaaaaaaaaagaaaatagaaaaaagaaaaagcatagaaccctgggggacacaaccagtagagaggtgatgatgggaaatccaagaggaagaaacaccgatgggtgggggagccaggaaagagagcgggcctytaagtaatgacaacagctaccatttattgagtgcttaccctgagcaggctccatgctaagtgctttatgtggatcatctcgtgtaatgctcaaaacaagggtatatgccatttataggtagacaaactgcagtctagagatccagtatttcctcggctagaaagctggggttt

SEQ ID NO: 38497 - DNA, 1320 bp, Homo sapiens
aaaaagcattctaagagaagaaaattatctccagggaaactgaaaagaatattaactatgtctcttctttctactcaactgtagaatcacaaggcaagggtttcatctcagctttcttgtccacttactgtcatttcttggtggtcattattacaacaacttactcctacccaaaaaagagaaaaagtgtcacatgaagttaagacaatccattggtaggagttattttccaggaaaattttttttttcagacacattagcttatctagatactattgaatcagtatttgggaawttatatttcataccattctcatgttgcattaaaatgtaatactagaacagtggcttacacctgtaatcccagcactttgggaggctgaggtaggaggactgcttgagttcaggagttcaagaccagcctgggcaacatagcgagacatcatctctacaaaaaattaaacaattagccgggcatggtggcatgcacctgtaggccttaggaggcttaggcaggaggatcacttgaacctagaagctggaggctgcagcgagccatgatggcgccaatgtactctggcctgggcggggggacccatctctagttaaaaaaaaatgtaatactgaatatttaaggacaacataggcaaatgcactggatcagaacagaagcatggatggtaaaagcaaatttcaagttcaaattctagcttcaccatatattaggtgtgtaacgattgatatggtatttaatcgctgtgtgcctcagtttcctcatcagttaaatagagaaaataatactacctatcttataaagttgttcaaaaagatcaaatgagcttaaaataaataaaacttttgtaactgtgcctagcacagagtgagtgttatatcagtgctcataatatattataaccattattattatgttgcatgttcagtacctggcagagtatttaatactgtagatcaggtttacaaacatattatttctttttatagttgatctttttttttttttttagtccttatcattctgagaaaggcttcccaaaagatgtgggtcctttaataaacaaatagctcagcataattctcatatagagttaattatataatatgaaaacagggataattttcacatcaagctcaggaagagaaaaatttctaataagcagaaactatagattttagacgggtcacgatagttcccttcacatccaaacgactatcttgaggaagataaattatatttgtcctatgtgcatgtattttatttcaagttagtattttattttatttcacgtattttatttcaaa

SEQ ID NO: 38498 - DNA, 920 bp, Homo sapiens
gattcttttccaatccaggctctacatgagacataaagattttcattgcacttatctgtctcctatgcacttcaataatactcatcctctttttccccgtgagatcatctccttcagtactgcatcttcaatgcccatctctgagctggcacaataatgaagctcagtgtaaatagtgaatgaataagctaatgatcctgtgtactattcctgcacaaatcaagtcaacttcactttttttctgctctccttcctcccactttatcatattccatcctcactacaatttccctcatctctataagatctttctgtacaagaaggtatttccacgtttgaattcacgagcttccacctccattttgagctgtcaatcctgctaacaatgagcaccccagtaaacaacaatagaaaaaaaaaagtaaaaacaacctctaacatgtctcactacttaggataatgattaatgatactaaaataataaaatattcatttatcattgaatactcataaatcattcctttgccttaatatgcagttgatgcttagggatcaaccaaaaatgtttcccacatttttaaaacatcatagggtttaatcttcattacaaatttcagttcaaaatgtttcttctcagaagcatgacaaagtgattkagagtagaagtagtgaaaggacctttttcaaagtgattggaacctttctggtatagacgttaaacagcataatgaatgtgttggcatttgtttcttatttgcatactataaaaataaaacagagtgtacaacaagttcctgttaaattcatattacctgtttaaataaggatattcaaaaggcaatgtgatctaattaaaatcaagaaatggtattcaagccatatttatatacttctatgataatacacatgcactaatattt

SEQ ID NO: 38499 - DNA, 593 bp, Homo sapiens
aatgtatttcaaaagaatagcccatttaatgttaacaattagaagtaacatttttatgacaaattcattagagtagaaatgttttacattttcacaaatctctttaacatgtggcttaagacagctggattctcaaatctggttcctgcattcaatctgctgtgataacatatatcatataactctactgttacatggaaaactctactgcacaatcctcagagaatgagagcaggaaaaactattatggaaaattgtttacttcagagtgtctgaaagggtctcaagagtccccaggtaccacagaacatactgggaaccaatgctctattgtatcacccactcttattttatggctactgtacgctatgctgacaaaatatgctgttacttgtgtatagattatgtaaatatgtaactaatttacatccaatatattttctatcarttgtggcattctaatcagtaagagcatatattactataaatgctgttatcaaaatatttccttataaatcaaatattgtggttaagaaatacaacacattatttttatctgcactcaacaatcaactagcacataaaggactgaa

SEQ ID NO: 38500 - DNA, 934 bp, Homo sapiens
cgcaccggggctgcaggtggagctgcctgccagtcccgcgccgtgcgcccgcactcctcagcccttgggtggtcgatgggactgggcaccgtggagcagggggcggcgcacatcagggaggctctggccccacaggagcccagggagggggtgggaggctcaggcatggcgggctgcaggtcccgagccctgcccggcgggaaggcagctaaggctgggcgagaaatcgagcgcagtgctggtgggctggcactgctgggtaacccagtacaccctctgcagctgctggccagggtgctaagtccctcattgcccggggccggcagggccagccggctgctccgagtgcggggcctgccaagcccacgcccacccggaactccagctggcccgcaagcgcagctagcagccctggttcccgctggcgcctctccctccacacctccgtggaagctgagggagctggctctggccttggccagcccagaaaggggctcccacagtgcagsggtgggctgatcaggtccctcaagtgctgccaaagtgggagcgccaagagcgagcgagggctgtgaggactgccagcacgctgtcacctctcacttcttcaggaggactgcaagtattcaggcaattgactacattttgataatgctaagctcaaggcgcaggggcctatgcatataggatgggcatgtaacctagttttaggtatcattgcagattttccaatggaaatgatagctaagtgaaacctcaagtctgagtggtagtgagttagctgaaaagtgagattgatgatggacacagctctaatgtcagtgaaaacatcttattgcaaaagcctggaggtgagagacagtgagaactctggaaaactgcagatttgtagtatgaggggctgcagttagaaagggagctagagagaaaatta

SEQ ID NO: 38501 - DNA, 1079 bp, Homo sapiens
cattgaatattttatcaaagtcatgtcaaattagatgtgttctattaatatttattatcatgtgcatctgtcaggatcttaaagggaaatgaatgtcaaaatgcaattgaataatttgaagagagtataataaagcatctgtgcagggtataggaaaatcacaaagatattgcagcaatttgggactagtagcagtgaggttatgctattaaccttaggcttgaaaagacaagggagggagcagaggggggtgcgaaggtagcttcccgacaggaatgcagccagccctgaataatctgcagggaagatgccagaggtatatgtaccttaaccttctcccccttgttggcatttctgagcactgttctcctttggctatatccaataggaagccacagggaaggagaacaagctgatgtaatcactataggtcagtttcctgggaagagttggatggaaagaaagagacttaatcttgaggggcwaatgaaatacagacagcatatcatgtttttatttaagaaaatagtaatattcttactcttgaggaatctaaagccatttgataattatcattttaaacttatgtgaaatatggcaaaacaaaataaaactaaacactaaaactatatcactcagggctggacaaatgtgatttttttttttaacatgaagcacctactctccctatctcccacccaaaaataaaaataacatcattatactaacatgttagaagtgcatccagtatgctataaaacattcccgattcattcattcagtggatcttttttgagcactttctatgtgtctagaattatgttaggtattgagatgtaaagatgagtaagcctaggtctctaggttcatatatctcagtgatatctcttattcttactcttagattttctacgtcatcaccctccattccacaacaattgatgttatttgtatgtatactagtttgcatgcttgattcttacattgtattttttctttgatttttatttgacacatagtaactgtatatatttatgggatacagaatgatattttgatccatgataaaatgtttaatg

SEQ ID NO: 38502 - DNA, 1079 bp, Homo sapiens
cattgaatattttatcaaagtcatgtcaaattagatgtgttctattaatatttattatcatgtgcatctgtcaggatcttaaagggaaatgaatgtcaaaatgcaattgaataatttgaagagagtataataaagcatctgtgcagggtataggaaaatcacaaagatattgcagcaatttgggactagtagcagtgaggttatgctattaaccttaggcttgaaaagacaagggagggagcagaggggggtgcgaaggtagcttcccgacaggaatgcagccagccctgaataatctgcagggaagatgccagaggtatatgtaccttaaccttctcccccttgttggcatttctgagcactgttctcctttggctatatccaataggaagccacagggaaggagaacaagctgatgtaatcactataggtcagtttcctgggaagagttggatggaaagaaagagacttaatcttgaggggcaaatgaaatacagacagcatatcatgtttttatttaagaaaatagtaatattcttactcttgaggaatctaaagccatttgataattatcattttaaacttatgtgaaatatggcraaacaaaataaaactaaacactaaaactatatcactcagggctggacaaatgtgatttttttttttaacatgaagcacctactctccctatctcccacccaaaaataaaaataacatcattatactaacatgttagaagtgcatccagtatgctataaaacattcccgattcattcattcagtggatcttttttgagcactttctatgtgtctagaattatgttaggtattgagatgtaaagatgagtaagcctaggtctctaggttcatatatctcagtgatatctcttattcttactcttagattttctacgtcatcaccctccattccacaacaattgatgttatttgtatgtatactagtttgcatgcttgattcttacattgtattttttctttgatttttatttgacacatagtaactgtatatatttatgggatacagaatgatattttgatccatgataaaatgtttaatg

SEQ ID NO: 38503 - DNA, 761 bp, Homo sapiens
gtaaaaaactcgtcacaggaagtgaattttgtcatgtaagatatgaataagctatgtgagcggaggaccctagggaactgccagataggtcaaattatgacaaaatctgggaactgggcttttgagtgactgctctttccagtgtctactaggctgatyttaaaaaatagcttctgtagtttcaagattgttgtttttttgagtatcatgagattgaggagattggaataatagcacaataatagcacaggtgaaataccgtgaatttcatttgttcttaccaagattcaaccatttgctcttgaataaatgttccttgggtttttgcaaaactttggttaattcgtagcattctaacaatattgggttttccatttctttcctgtgttctcattgatcttatggaggagtggattttcaaatgttcttactctcctatttggaatgtgctcactcctgatatattttaagtatttgatatatacttcttgaatatgttaataaatcttattaagactacggaaacaggatgccagctcttatgcaatgcctcagaacagataagtacacctttgtaaaaaactagccctaaggttctaaaatttattccctgagtaccatattctccacgatactgtactcttttgttcatttgatattcatccacatatttatcctgtattgctctttaacagagctgcagactcatggaaaataatgtctgagtcagtaacaattcagaattttaattcctattatta

SEQ ID NO: 38504 - DNA, 561 bp, Homo sapiens
agccgggcacctgggtgcctggggctttgttacatacaacaaaaccagtcctcctcagcttccagctccaggctaggctgcggtccgccggcaatgtggggtgtgggtcgggccgactagggaagtgagagaatgtgagaggrcactccctgtatgtgactacacacaggaatgcagtggtgtgtgtcgtggagatggtgtgggttttgtgtggaattcagtgagtgcgagttggagtggtgtgtgtgtgtgtgtgtgtgcgtgtgtgtgtgtctgcgccatggggctgggctactcttggcattacatgtccttgggtctcattccatgccaagccagactgcagcaacacgcaggtggatcaggtccaacctgttctgcccacattggaaggataatgattgttttcaaagtgatggaaatccccccagctgggactgttgcttaggactttctggatgcggaatttcgagccaggttgaccaagccctaccagatagcgttattgttctcccaaagatgcccaactttcttagcagggtttcctctctcagccaatga

SEQ ID NO: 38505 - DNA, 561 bp, Homo sapiens
agccgggcacctgggtgcctggggctttgttacatacaacaaaaccagtcctcctcagcttccagctccaggctaggctgcggtccgccggcaatgtggggtgtgggtcgggccgactagggaagtgagagaatgtgagaggacactccctgtatgtgactacacacaggaatgcagtggtgtgtgtcgtggagatggtgtgggttttgtgtggaattcagtgagtgcgagttggagtggtgtgtgtgtgtgtgtgtgtgcgtgtgtgtgtgtctgcgccatggggctgggctactcttggcattacatgtccttgggtctcattccatgccaagccagactgcagcaacacgcaggtggatcaggtccaacctgttctgcccacattggaaggataatgatygttttcaaagtgatggaaatccccccagctgggactgttgcttaggactttctggatgcggaatttcgagccaggttgaccaagccctaccagatagcgttattgttctcccaaagatgcccaactttcttagcagggtttcctctctcagccaatga

SEQ ID NO: 38506 - DNA, 661 bp, Homo sapiens
attaggagttgattaaagcacctgccctaggactcttggagataaataggattttctgacctgttactttattttaaaattaatgttgcctttggggctctcagtgctaaatagtgaaaactcaacaaagatagtagtccctgctttgggctggaaaacatcacaagggaaattagaaaacaccttgagatgaatgaaaatgaaaatacaacatatcaaaatttatggaacrcggtgaaagcagtgctaaaagtgatattcatggctataaatgtttacattgagaaagaagttcttaaatcaacaacctaacttcacaccttaaggaattaaaaaataacaagctaaacccaaagctagcagaggaaagagaccaataaagattggaacagagataaataaaaatagtgaatagaaaataaaataaataaaatagaataaaatagagaacagcaatgaatccaagagatgtctctttgaaaagatcaacaaaattgacagagtttatagctagatcgactaagcaaaaaaaagagaagcctcaagtaactaaaatcagaaatgaaagcacagacattaccaaaaatgttaaaggaataaaaagattataagggagtacaatgaagaatggcatgttaacaaatgtggtaacctagataaa

SEQ ID NO: 38507 - DNA, 661 bp, Homo sapiens
attaggagttgattaaagcacctgccctaggactcttggagataaataggattttctgacctgttactttattttaaaattaatgttgcctttggggctctcagtgctaaatagtgaaaactcaacaaagatagtagtccctgctttgggctggaaaacatcacaagggaaattagaaaacaccttgagatgaatgaaaatgaaaatacaacatatcaaaatttatggaacacrgtgaaagcagtgctaaaagtgatattcatggctataaatgtttacattgagaaagaagttcttaaatcaacaacctaacttcacaccttaaggaattaaaaaataacaagctaaacccaaagctagcagaggaaagagaccaataaagattggaacagagataaataaaaatagtgaatagaaaataaaataaataaaatagaataaaatagagaacagcaatgaatccaagagatgtctctttgaaaagatcaacaaaattgacagagtttatagctagatcgactaagcaaaaaaaagagaagcctcaagtaactaaaatcagaaatgaaagcacagacattaccaaaaatgttaaaggaataaaaagattataagggagtacaatgaagaatggcatgttaacaaatgtggtaacctagataaa

SEQ ID NO: 38508 - DNA, 604 bp, Homo sapiens
agagaaaacctcaggctaaaacacgggtaagagaaaattttacagtgttgaaggaatttcagtgattatccgagctcagagtcaacacattcttgaaatagctaggccagttgggcaccttattcctttctccctttccacttargctgagtggcggggattagcagtgtttgcccctggataaaatcagaaaaaccctctctggagggtgaataatctgccatgggaggccgaggtcccctcagagaattatcctgccctggagaagctgagcagagctggggatgactcccctggaactccaccacagatacagaggggaaaaaaaaaggaaacatatgatcaataatgccaatgggctacaccccagattaaagccctctcgattttggtaactggacaggggaggtcaccagcctgcctgacttcttcctgctcagaatggaacttggcggtcagaatgccctgccgactttatatagcacacaattaggtcttgctttggagaagggactacttggggaagcaaagcaacacagttcagaggagaccttatccacatggataaggtcaactaatctttgtcatgtccaattaagaaaaa

SEQ ID NO: 38509 - DNA, 604 bp, Homo sapiens
agagaaaacctcaggctaaaacacgggtaagagaaaattttacagtgttgaaggaatttcagtgattatccgagctcagagtcaacacattcttgaaatagctaggccagttgggcaccttattcctttctccctttccacttaagctgagtggcggggattagcagtgtttgcccctggataaaatcagaaaaaccctctctggagggtgaataatctgccatgggaggccgaggtcccctcagagaattatcctgccctggagaagctgagcagagctggggatgactcccctggaactccaccacagatacagaggggaaaaaaaaaggaaacatatgatcaataatgccaatgggctacaccccagattaaagccctctcgattttggtaactggacaggggaggtcaccagcctgcctgacttcttcctgctcagaatggaacttggyggtcagaatgccctgccgactttatatagcacacaattaggtcttgctttggagaagggactacttggggaagcaaagcaacacagttcagaggagaccttatccacatggataaggtcaactaatctttgtcatgtccaattaagaaaaa

SEQ ID NO: 38510 - DNA, 943 bp, Homo sapiens
ctttgttatcttaaagctgtaattyttattaatgtgcaaatattcttagaaagagacatattgaaactgttaataatcatttctatcttaggataaatgagttccagatattgtcgtgggcctaggttttggaaacgggaaaggatagttattagtcaagcaattacttgagtcctagagaaggggatgggggtgacaacaagtataatcatggagttcagagtctggggagatacacatttcccatgtcatagagcctctctttacacattcatcagaatgtgtccctgtaacatcaccacacaatggtttggtgttccagggaagcaaataacttagtaggtgttgggaaagtgcttaaataaaaaacatgggcttcagtgacataaattatgaaacataagtcatggtactttttgtttttccatagtataaattaaacaaaaccaggaaaacagcttcatagggaggcttatatctatccaataaaattcccagtcaggatatttattcactcaaaggcgctaccagaagggacagaacagatggatgacactgtgacagcccagggctgcctaagacagccatggagtcttccttctccctgcactgctctcctttttctaattgaagtttgaataccatcttgcattttcaatattcttttgtgcacttctatttgatcctaataacaacctcgtttattagacttttcttgtgtactctctcacatccaaccaaacacgtcttactaccctttttttttttttttttttttgagacacagtcttgctctgtcacccaggctgaaatgaagtggcttgatctgtgctcactgcaacttttgcctcccaagttcaagctattctcctgtctcagcctcccaaatagctgggattacaggtgcgtgccaccatgcctggctaattttttgtatttttag

SEQ ID NO: 38511 - DNA, 551 bp, Homo sapiens
tgcaattgttctccagcataaattttagtcccygtgttagttagctggggctgctgtaaaaaggtcacatactgggtggctgaaacaacagaaatgttttgtctcacggttctggagaatggaagtccgaggtcaagaccaggttgttcctcctgaaggctgtgagaggaaatctttcccatgcctctcgccagctcttagtggttttctggccatcttggcttgtagatgtattgctcccatctttgcctttatcttcacatgacattctccttgtgtgggtgtctctgtgtccaaagtttccctttttatgaggacaccaatcagtttggattagggctcacctaatgacttcattttagctgaactgttacatctgcaatgaccctatttccaaattaggtcatattctgaggtcctggaggttaggatttcaatgtatgaaattttgggggatacagttcagctcataacatctccctaccttgtttttacagacttcaaattagccattatgtttagatttacttatttgtttacccaatattttg

SEQ ID NO: 38512 - DNA, 560 bp, Homo sapiens
tggacagtctgaaattaatcttattgtgatttctttgtagatgatatttctttgtagatgatatttcattcattcatttttttttctgatggcattaaagctctgttgtttgctgcagttaaaccacactatgtctagatgtggatttattttaatttattttccaaaagattcattgttgtcctgagtctacagaatcatgcattttgtcatttccagaaaaatctcagccttatgtcttagaatgttgtttttgtcctgttttytttcctttttttttttttttttttttttgagatggagttttgctcttgttgcacaggctggagtgcaatggtgccatcttggctcagtgcaacctctgcctcctgggttcaagagattctcctgcctcagcctcccaagtagctgggattacaggcatgcaccaccatgcctggctaatttttgtatttttagtagagaagaggtttcaccatgttggtcaggctggtagttttagcagagatgaggtttcaccatgttgatcaggctggtctcaagctcctgacctcaggtga

SEQ ID NO: 38513 - DNA, 592 bp, Homo sapiens
  misc_feature (1)...(592): n = A,T,C or G
agannnnnnnnnnnnnnnnnnnnnnnnnnnnnnnnnnnnnnnnnnnnnnnnnnnnnnnnnnnnnnnnnnnnnnnnnnnnnnnnnnnnnnnnnnnnnnnnnnnnattcttccgtgcacagtcttgacaagctggttcttgcctctgctctgttcttggaggcttaaggttgctcagagagtgtctcttgtgggggacccaaaacttatgacacctgtaagtggtcagaatggaagctgagtgggagagcaatgcagagaaacttggtggtttctctcccacagccttccaggggagtaaatatttctcacttaaataatgataaagattattatcactaataataatcatcatagctaatcatggagaatttactgtcagggcttgttttaaatgttttaatatatttwtatattaaatattaaaatatgttatatatttaatattcttaacattctaatgaggtaggaacaattatcctcacttttggagatgagaaaattgaggcacagagaagtagagaagttaggtggccaaagtcactctactgataagtgacaatattaggatttgaactcggagaattggatccag

SEQ ID NO: 38514 - DNA, 245 bp, Homo sapiens
acggtaagagagaggaggctttatatttattgaatctctttgcaaatttctgtcttatagctcaaggagtttattgtaaaatttcctgaagaataaacaattctgtttataggatcacatttggtaaactttcatttatttttaactttgttayatttctattataaatttggtctggtctctgaaagtaatagacctatatgacattaaacataagatctgaaaaaatgaaagaagaatacaca

SEQ ID NO: 38515 - DNA, 1101 bp, Homo sapiens
agcccttcacccacccccaggaaggcagtccctttagacccacttcctacgtaccttctactcacggacttctcgctttcagaccctccgacctcccccagggctgtggactcagggcgccccttcctcccgtcgcgctctccagtgactcacgcctggggcttgcccggaagaggggttactcagcccsgggctgtcccgccaggccgcccgtccccagcccgcggtcgtcttcggatgtacacgtagcaaacatgcccccaccccaggatctgtgactgttcccttgaatcccttgtttagggattctgttctcgcaatgattggggaacgtcaagagagacacctttcttcctaaaggagccctggtttacagggctgattatctcaatctcagtctaggaacctagaggcgtaatttcaatttcagcattctaatgcgcagataatacacgcgatgttctttaactcctggggctgccaaaggcagagagcagtgtacaaatcagagggtacttttgttgagaccctgttgtatccaatacattgggctaagggtgtcagtggaagccttgctctgtcgcctaggctggagtgcagtggcgcgatctcggtttagtgcaacctctgcctcccgggttcaaacaattctcatgcctcagcctcccaaatacctgggattacaggcatgttccaccatgcccagctaacttttttgtatttttagtagaaacggggtttcaccaagttggcccagttggtctcgaactcctgacctcaggcgataccagccccccccgccctccccccgcctcggcctcccaaagtgctaggattacaggcatgagccactgcgcccagctacaaaaacaattcatttctgccccaaagggacactacatctctagtgaggaggtttcatactgggtgagatggaagagtagttctacaccgctggcagtacatagtatttaacttagggaatttaatttcctgttggctattctgctgcagttctgctctttgaaagtcaaaacatttgctctttggtgaatgattttaaatcttggccactgtgtttagaatctgggctgagccctg

SEQ ID NO: 38516 - DNA, 1101 bp, Homo sapiens
agcccttcacccacccccaggaaggcagtccctttagacccacttcctacgtaccttctactcacggacttctcgctttcagaccctccgacctcccccagggctgtggactcagggcgccccttcctcccgtcgcgctctccagtgactcacgcctggggcttgcccggaagaggggttactcagcccggggctgtcccgccaggccgcccgtccccagcccgcggtcgtcttcggatgtacacgtagcaaacatgcccccaccccaggatctgtgactgttcccttgaatcccttgtttagggattctgttctcgcaatgattggggaacgtcaagagagacacctttcttcctaaaggagccctggtttacagggctgattatctcaatctcagtctaggaacctagaggcgtaatttcaatttcagcattctaatgcgcagataatacacgcgatgttctttaactcctggggctgccaaaggcagagagcagtgtacaaatcagagggtacttttgttgagaccctgttgtatccaatacattgggctaagggtgtcagtggaagccttgctctgtcgcytaggctggagtgcagtggcgcgatctcggtttagtgcaacctctgcctcccgggttcaaacaattctcatgcctcagcctcccaaatacctgggattacaggcatgttccaccatgcccagctaacttttttgtatttttagtagaaacggggtttcaccaagttggcccagttggtctcgaactcctgacctcaggcgataccagccccccccgccctccccccgcctcggcctcccaaagtgctaggattacaggcatgagccactgcgcccagctacaaaaacaattcatttctgccccaaagggacactacatctctagtgaggaggtttcatactgggtgagatggaagagtagttctacaccgctggcagtacatagtatttaacttagggaatttaatttcctgttggctattctgctgcagttctgctctttgaaagtcaaaacatttgctctttggtgaatgattttaaatcttggccactgtgtttagaatctgggctgagccctg

SEQ ID NO: 38517 - DNA, 1060 bp, Homo sapiens
ggatcccattatgttatgatgctattattcaagctggttggactcagtttgcagagactcctattttacaaatcacttggcttgtgtgaattgactatttagtggctgtgagattgaggataagggctaaatcttttctaacaagaggactatttaaaaaccagaagaaaatcatagtattttagctgtgaactttaggagaagctttagagaaaagattttatacatatctttagtttcatatggtaataggttataaagcatacgaaatcaaagtaaagagctagaggtgatggggtactgttaaaatagggtgcccagggaagaccttcctaagggtgagatccaacaatgtattgctttatgaaaattaattttctggcagagcaaaggtatttaaaagattagtattaaaaatgctcaacctactttcttctgacttctgtaaaaaagcacttttttatatatcagatttttaagttataataataactgacaacattttgatttctttctgtgtttgagggataaccttctatgctttatcttatttaattctcaaatgtaaccaatgagccttcaaccattttgtcaagaaaattctttaaacatgtattaattccttactggccttttgaaaccttttgaaacactgaattattattatttttattttttactttttttgttcgtttttttttttttgacacggagtctcgcactgtcscccaggctggagtgcagtggcgcgatcttggctcactgcaagctccacctcccgggttcacgccattgtctcgcctcagcctccagagtagctgggaccacaggtgcccgccaccacgcccggctaattttttgtatttttagtagagacggggtttcaccgtgttaagccaggaaggtcttggtctcctgaccttgtgatccgcctgccttggcctcccaaagtgctgggattacaggcatgagccactgcgcctggccaaaatgctgaattatttttcacctttccagagtggggcgtataggatagaagttggcccttgggatgagggga

SEQ ID NO: 38518 - DNA, 1060 bp, Homo sapiens
ggatcccattatgttatgatgctattattcaagctggttggactcagtttgcagagactcctattttacaaatcacttggcttgtgtgaattgactatttagtggctgtgagattgaggataagggctaaatcttttctaacaagaggactatttaaaaaccagaagaaaatcatagtattttagctgtgaactttaggagaagctttagagaaaagattttatacatatctttagtttcatatggtaataggttataaagcatacgaaatcaaagtaaagagctagaggtgatggggtactgttaaaatagggtgcccagggaagaccttcctaagggtgagatccaacaatgtattgctttatgaaaattaattttctggcagagcaaaggtatttaaaagattagtattaaaaatgctcaacctactttcttctgacttctgtaaaaaagcacttttttatatatcagatttttaagttataataataactgacaacattttgatttctttctgtgtttgagggataaccttctatgctttatcttatttaattctcaaatgtaaccaatgagccttcaaccattttgtcaagaaaattctttaaacatgtattaattccttactggccttttgaaaccttttgaaacactgaattattattatttttattttttactttttttgttcgtttttttttttttgacacggagtctcgcactgtcgcccaggctggagtgcagtggcgcgatcttggctyactgcaagctccacctcccgggttcacgccattgtctcgcctcagcctccagagtagctgggaccacaggtgcccgccaccacgcccggctaattttttgtatttttagtagagacggggtttcaccgtgttaagccaggaaggtcttggtctcctgaccttgtgatccgcctgccttggcctcccaaagtgctgggattacaggcatgagccactgcgcctggccaaaatgctgaattatttttcacctttccagagtggggcgtataggatagaagttggcccttgggatgagggga

SEQ ID NO: 38519 - DNA, 1815 bp, Homo sapiens
attacccttgatattatggcatgtctcaatgtgctgtggctgaacatatgttcatattccctcaagtttaaataagaattccatttatatttaaagaaaaaaagagaacaataatacttcatagcagaggagtaaaaaaacatctaaagtgtgctttaaaacatctaaagtggcaacctcagcaaaaatatttaaaaatacatataatacagtataatttgtagttcaaaagaagcctttggagaaaatgtattgctttccttttcttttatagttatgtctgtgtactatggctttaaaaaatgccctttgttaaagcagtctgcaagaatgatttgtagaattcctaatgataattttattcctctggtaagtcagcctgtgtatatatrtgtgtgtgtgtgtgtctgtgtgtgtgtgtgtgtgtgtgtgtgtgtgtgtgtaaaggaatatatgtttggactgatgcttaaggtcacaaataatcagtgcttcatatttctagttgccttcatcatcttttctctctctctttttaaaaatcacaggccttgagagtctcattgatttgatgcctctgggagcttaccttctgaacagagtatcacatttttttccccagtacctgcccagtgggtgacctaacacaatcatttagattgaaaggtggaagcgaaagaagataaaagattgagaagcaagaggcagagggacagaggggaacaaaacacaaataggcaaactgcaaagcaaatggaaaatgcattatttctaaaagggaaataccaaaagcactggcaggagcaataatggaaacaagagtgaccagatagatgggaaaattatgataggacctaacctaatattcacatgataaaagggtttctcaggctaaaaatgcacacatatgcctatgtatgcagtcactgatttttttcctagttttatttgcttctttctttctcccaatttcctgggaaacaagaaagtttgtgttaactcctgactcaaaccaaaccggactacagtatggtcaagaattagaaacacagacaacactgaagggctgctctcgggataataattgcttgttacgcatttcttccctgcctaatgctaataataaattgacattgattgaaaacatcttggaaacctaattaactttttcttacttaaactgtttactttttgcttttaatttgtcttgagtaaattcccggttggtctcaatatttcattcttgtttagtgacacaagctttgtctgatcatctaattctgcttgtttctattaagagccccttccttctaaataatgacttaagtaggcacatccaagtctcagagagtacactgtcctttttattcttgcacaaagctaaaggttggctagacgacttgatgcaaagtgtcttcatctaatgtacagggggttctctcctgttctttccttatccttcttttgaaatggttcggaggttaacttcatttattagattttaaacttgtggttcaggcttaggcatggtaactcacatctgtaaccccagcactttgggaggccaagttgggaggatggcttgaagtcaggggttcgagaccagcccaggcaacatagcaaaaccctgtctctacaaaataataaaacttaaaaaaatcagctgggcatggtggagcatgcctgtagtcccagctgcttgggaggctgaggtgagaggatcacttgagtccaggagcgtgaggctacagtgaacgatgactgagccactgcacaccaccctggatgacagagtgagaccctgtctctaaaaat

SEQ ID NO: 38520 - DNA, 1815 bp, Homo sapiens
attacccttgatattatggcatgtctcaatgtgctgtggctgaacatatgttcatattccctcaagtttaaataagaattccatttatatttaaagaaaaaaagagaacaataatacttcatagcagaggagtaaaaaaacatctaaagtgtgctttaaaacatctaaagtggcaacctcagcaaaaatatttaaaaatacatataatacagtataatttgtagttcaaaagaagcctttggagaaaatgtattgctttccttttcttttatagttatgtctgtgtactatggctttaaaaaatgccctttgttaaagcagtctgcaagaatgatttgtagaattcctaatgataattttattcctctggtaagtcagcctgtgtatatatatgtgtgtgtgtgtgtctgtgtgtgtgtgtgtgtgtgtgtgtgtgtgtgtgtaaaggaatatatgtttggactgatgcttaaggtcacaaataatcagtgcttcatatttctagttgccttcatcatcttttctctctctctttttaaaaatcacaggccttgagagtctcattgatttgatgcctctgggagcttaccttctgaacagagtatcacatttttttccccagtacctgcccagtgggtgacctaacacaatcatttagattgaaaggtggaagcgaaagaagataaaagattgagaagcaagaggcagagggacagaggggaacaaaacacaaataggcaaactgcaaagcaaatggaaaatgcattatttctaaaagggaaataccaaaagcactggcaggagcaataatggaaacaagagtgaccagatagatgggaaaattatgataggacctaacctaatattcacatgataaaagggtttctcaggctamaaatgcacacatatgcctatgtatgcagtcactgatttttttcctagttttatttgcttctttctttctcccaatttcctgggaaacaagaaagtttgtgttaactcctgactcaaaccaaaccggactacagtatggtcaagaattagaaacacagacaacactgaagggctgctctcgggataataattgcttgttacgcatttcttccctgcctaatgctaataataaattgacattgattgaaaacatcttggaaacctaattaactttttcttacttaaactgtttactttttgcttttaatttgtcttgagtaaattcccggttggtctcaatatttcattcttgtttagtgacacaagctttgtctgatcatctaattctgcttgtttctattaagagccccttccttctaaataatgacttaagtaggcacatccaagtctcagagagtacactgtcctttttattcttgcacaaagctaaaggttggctagacgacttgatgcaaagtgtcttcatctaatgtacagggggttctctcctgttctttccttatccttcttttgaaatggttcggaggttaacttcatttattagattttaaacttgtggttcaggcttaggcatggtaactcacatctgtaaccccagcactttgggaggccaagttgggaggatggcttgaagtcaggggttcgagaccagcccaggcaacatagcaaaaccctgtctctacaaaataataaaacttaaaaaaatcagctgggcatggtggagcatgcctgtagtcccagctgcttgggaggctgaggtgagaggatcacttgagtccaggagcgtgaggctacagtgaacgatgactgagccactgcacaccaccctggatgacagagtgagaccctgtctctaaaaat

SEQ ID NO: 38521 - DNA, 1815 bp, Homo sapiens
attacccttgatattatggcatgtctcaatgtgctgtggctgaacatatgttcatattccctcaagtttaaataagaattccatttatatttaaagaaaaaaagagaacaataatacttcatagcagaggagtaaaaaaacatctaaagtgtgctttaaaacatctaaagtggcaacctcagcaaaaatatttaaaaatacatataatacagtataatttgtagttcaaaagaagcctttggagaaaatgtattgctttccttttcttttatagttatgtctgtgtactatggctttaaaaaatgccctttgttaaagcagtctgcaagaatgatttgtagaattcctaatgataattttattcctctggtaagtcagcctgtgtatatatatgtgtgtgtgtgtgtctgtgtgtgtgtgtgtgtgtgtgtgtgtgtgtgtgtaaaggaatatatgtttggactgatgcttaaggtcacaaataatcagtgcttcatatttctagttgccttcatcatcttttctctctctctttttaaaaatcacaggccttgagagtctcattgatttgatgcctctgggagcttaccttctgaacagagtatcacatttttttccccagtacctgcccagtgggtgacctaacacaatcatttagattgaaaggtggaagcgaaagaagataaaagattgagaagcaagaggcagagggacagaggggaacaaaacacaaataggcaaactgcaaagcaaatggaaaatgcattatttctaaaagggaaataccaaaagcactggcaggagcaataatggaaacaagagtgaccagatagatgggaaaattatgataggacctaacctaatattcacatgataaaagggtttctcaggctaaaaatgcacacatatgcctatgtatgcagtcactgatttttttcctagttttatttgcttctttctttctcccaatttcctgggaaacaagaaagtttgtgttaactcctgactcaaaccaaaccggastacagtatggtcaagaattagaaacacagacaacactgaagggctgctctcgggataataattgcttgttacgcatttcttccctgcctaatgctaataataaattgacattgattgaaaacatcttggaaacctaattaactttttcttacttaaactgtttactttttgcttttaatttgtcttgagtaaattcccggttggtctcaatatttcattcttgtttagtgacacaagctttgtctgatcatctaattctgcttgtttctattaagagccccttccttctaaataatgacttaagtaggcacatccaagtctcagagagtacactgtcctttttattcttgcacaaagctaaaggttggctagacgacttgatgcaaagtgtcttcatctaatgtacagggggttctctcctgttctttccttatccttcttttgaaatggttcggaggttaacttcatttattagattttaaacttgtggttcaggcttaggcatggtaactcacatctgtaaccccagcactttgggaggccaagttgggaggatggcttgaagtcaggggttcgagaccagcccaggcaacatagcaaaaccctgtctctacaaaataataaaacttaaaaaaatcagctgggcatggtggagcatgcctgtagtcccagctgcttgggaggctgaggtgagaggatcacttgagtccaggagcgtgaggctacagtgaacgatgactgagccactgcacaccaccctggatgacagagtgagaccctgtctctaaaaat

SEQ ID NO: 38522 - DNA, 1248 bp, Homo sapiens
  misc_feature (1)...(1248): n = A,T,C or G
gaatgtgtagtctggggatttccctagactttgtgactcttaayattacggagtgccaggtgtatccaattgttcaggggattatcagtctttcttaatgtacgtgccttgtgttcattattacagtccatcaaaataaaagctctctgtactgacaaaaaagaaatcctcataggacagccttgtaaatttggaataagatttgcaaaaccactagaatctcatttttattgattctgactaggggttcttatatctcaaattataaaactattttacatgcattatcattattcataataaattgagttgttcatgtaacagcaaggactcatctgtaattctttttaaaaagctgatttggttttcactagggctatcttcagacctcctattttgtgagaatatattcaacaccatttgaaaattttactttaataaaataaggaatagataagtgtttgatgtgcttataaaaagtctattcaatatgtatgtgtgtgnnnnnnnnnnnnnnnnnnnnnnnnnnnnnnnnnnnnnnnnnnnnnnnnnnnnnnnnnnnnnnnnnnnnnnnnnnnnnnnnnnnnnnnnnnnnnnnnnnnnaaaatcccctgtcatcccctgtgagtccctggcaggctctgcaatatgccgtcagtgtgaccggcagaaaggtctgcagaacggataccctttacagaggcgagcaagaatcctggaataacctctgctctcagggcagcactgagcaggacatttttgttcgtttgcgttgtaaaatgtagactttattatgatgtaggtatggtggggccaacagatcaggagactgccgttaagcaagtggtttgttactcacaggtcccaagaggaggggcgtgttgacaccactcaggaccacacaggggcgcaccaagtttggtcaggtgggaagacaaaggagaccagagctctcactgtggtttccaagggaaggaacaggcgagtaggcttacagttggctagtgtgaatgatttcagcaggctctggggcataggggctgtccctgactctctggtacctggctttggggtggttagggcaggtggagagtgacgtggaatatgcaaccccaataaaggagatggctggggggtggattctggattgatgggtttgcatatgaaagacaggttcataggtgggctcttcaccacctctggggattcgctagctatgggaggggcagggtctctagggttgacaag

SEQ ID NO: 38523 - DNA, 1248 bp, Homo sapiens
  misc_feature (1)...(1248): n = A,T,C or G
gaatgtgtagtctggggatttccctagactttgtgactcttaacattacggagtgccaggtgtatccaattgttcaggggattatcagtctttcttaatgtacgtgccttgtgttcattattacagtccatcaaaataaaagctctctgyactgacaaaaaagaaatcctcataggacagccttgtaaatttggaataagatttgcaaaaccactagaatctcatttttattgattctgactaggggttcttatatctcaaattataaaactattttacatgcattatcattattcataataaattgagttgttcatgtaacagcaaggactcatctgtaattctttttaaaaagctgatttggttttcactagggctatcttcagacctcctattttgtgagaatatattcaacaccatttgaaaattttactttaataaaataaggaatagataagtgtttgatgtgcttataaaaagtctattcaatatgtatgtgtgtgnnnnnnnnnnnnnnnnnnnnnnnnnnnnnnnnnnnnnnnnnnnnnnnnnnnnnnnnnnnnnnnnnnnnnnnnnnnnnnnnnnnnnnnnnnnnnnnnnnnnaaaatcccctgtcatcccctgtgagtccctggcaggctctgcaatatgccgtcagtgtgaccggcagaaaggtctgcagaacggataccctttacagaggcgagcaagaatcctggaataacctctgctctcagggcagcactgagcaggacatttttgttcgtttgcgttgtaaaatgtagactttattatgatgtaggtatggtggggccaacagatcaggagactgccgttaagcaagtggtttgttactcacaggtcccaagaggaggggcgtgttgacaccactcaggaccacacaggggcgcaccaagtttggtcaggtgggaagacaaaggagaccagagctctcactgtggtttccaagggaaggaacaggcgagtaggcttacagttggctagtgtgaatgatttcagcaggctctggggcataggggctgtccctgactctctggtacctggctttggggtggttagggcaggtggagagtgacgtggaatatgcaaccccaataaaggagatggctggggggtggattctggattgatgggtttgcatatgaaagacaggttcataggtgggctcttcaccacctctggggattcgctagctatgggaggggcagggtctctagggttgacaag

SEQ ID NO: 38524 - DNA, 1248 bp, Homo sapiens
  misc_feature (1)...(1248): n = A,T,C or G
gaatgtgtagtctggggatttccctagactttgtgactcttaacattacggagtgccaggtgtatccaattgttcaggggattatcagtctttcttaatgtacgtgccttgtgttcattattacagtccatcaaaataaaagctctctgtaytgacaaaaaagaaatcctcataggacagccttgtaaatttggaataagatttgcaaaaccactagaatctcatttttattgattctgactaggggttcttatatctcaaattataaaactattttacatgcattatcattattcataataaattgagttgttcatgtaacagcaaggactcatctgtaattctttttaaaaagctgatttggttttcactagggctatcttcagacctcctattttgtgagaatatattcaacaccatttgaaaattttactttaataaaataaggaatagataagtgtttgatgtgcttataaaaagtctattcaatatgtatgtgtgtgnnnnnnnnnnnnnnnnnnnnnnnnnnnnnnnnnnnnnnnnnnnnnnnnnnnnnnnnnnnnnnnnnnnnnnnnnnnnnnnnnnnnnnnnnnnnnnnnnnnnaaaatcccctgtcatcccctgtgagtccctggcaggctctgcaatatgccgtcagtgtgaccggcagaaaggtctgcagaacggataccctttacagaggcgagcaagaatcctggaataacctctgctctcagggcagcactgagcaggacatttttgttcgtttgcgttgtaaaatgtagactttattatgatgtaggtatggtggggccaacagatcaggagactgccgttaagcaagtggtttgttactcacaggtcccaagaggaggggcgtgttgacaccactcaggaccacacaggggcgcaccaagtttggtcaggtgggaagacaaaggagaccagagctctcactgtggtttccaagggaaggaacaggcgagtaggcttacagttggctagtgtgaatgatttcagcaggctctggggcataggggctgtccctgactctctggtacctggctttggggtggttagggcaggtggagagtgacgtggaatatgcaaccccaataaaggagatggctggggggtggattctggattgatgggtttgcatatgaaagacaggttcataggtgggctcttcaccacctctggggattcgctagctatgggaggggcagggtctctagggttgacaag

SEQ ID NO: 38525 - DNA, 1248 bp, Homo sapiens
  misc_feature (1)...(1248): n = A,T,C or G
gaatgtgtagtctggggatttccctagactttgtgactcttaacattacggagtgccaggtgtatccaattgttcaggggattatcagtctttcttaatgtacgtgccttgtgttcattattacagtccatcaaaataaaagctctctgtactgacaaaaaagaaatcctcataggacagccttgtaaatttggaataagatttgcaaaaccactagaatctcatttttattgattctgactaggggttcttatatctcaaattataaaactattttacatgcattatcattattcataataaattgagttgttcatgtaacagcaaggactcatctgtaattctttttaaaaagctgatttggttttcactagggctatcttcagacctyctattttgtgagaatatattcaacaccatttgaaaattttactttaataaaataaggaatagataagtgtttgatgtgcttataaaaagtctattcaatatgtatgtgtgtgnnnnnnnnnnnnnnnnnnnnnnnnnnnnnnnnnnnnnnnnnnnnnnnnnnnnnnnnnnnnnnnnnnnnnnnnnnnnnnnnnnnnnnnnnnnnnnnnnnnnaaaatcccctgtcatcccctgtgagtccctggcaggctctgcaatatgccgtcagtgtgaccggcagaaaggtctgcagaacggataccctttacagaggcgagcaagaatcctggaataacctctgctctcagggcagcactgagcaggacatttttgttcgtttgcgttgtaaaatgtagactttattatgatgtaggtatggtggggccaacagatcaggagactgccgttaagcaagtggtttgttactcacaggtcccaagaggaggggcgtgttgacaccactcaggaccacacaggggcgcaccaagtttggtcaggtgggaagacaaaggagaccagagctctcactgtggtttccaagggaaggaacaggcgagtaggcttacagttggctagtgtgaatgatttcagcaggctctggggcataggggctgtccctgactctctggtacctggctttggggtggttagggcaggtggagagtgacgtggaatatgcaaccccaataaaggagatggctggggggtggattctggattgatgggtttgcatatgaaagacaggttcataggtgggctcttcaccacctctggggattcgctagctatgggaggggcagggtctctagggttgacaag

SEQ ID NO: 38526 - DNA, 1252 bp, Homo sapiens
ttgacctgatcatgaagacctgctttagccccaacagagtggttggactctcaagtgacytgcagcaagtaggaggggcatcagctcacatccaggatgccctgagcatagtgttgcaatatgcagaggatatactatctgcaaaggtgtcagctgacaatacaatcaggaaggtgggccacttcctgatgagcctggttaaccaagtaccgaaaatagttcccgatgactttgagaccatgctccacagcaacatcaatgacctgttgatggtggcctacctggccaacctcacacagtcacagattgccctcaatgaaaaacgtgtaaacctgtgaagccaccccaagcagtacgcttgctggtctaagtcttaaccccaggactcagaagtgaaggaaaaatgggttttttgtggtcttgagtcacactgagacagtcaactgtgtgtgactctaataaacgtagcctaccttttgtaaattaaagaaaaaaaaaagaagttagtttcctccctggggaatcaatatctctaaatgaggagaacccaaagtttcacaaaagggaagaaaaagtctgcaagtgcaaattaggcataatagtgcagggagccccctccccttgactttcagattcatgtgtttttgttgtaagataaataacactacatggtggtcactgactctaagtttataccacacactgtaggacaacatcccaacctcactatgtgttgtttaccagctgggagcattaactgagttacatgattccattccatcatgtcagattcttctaggtgatggggattatgttgtaaatccaatgaattgcacaaacatgagcctaataccatattttttttttttgcagtgaaatgaattccttagtcaaaaacaattttgtatgggatatcatgatggtgaataacaaattaaagttcacgcatggtagtaccagcagaacaactgcgaatgtaaagggtgagttcgtacccagaataagtgtctatttcagtgagaacaaaatccctgagggatgggtttcaatgtcgtcaatctgcaagttgactgggtagcccctgagggaaggctgtcatattagccttagttgttctacattggtccagatacaatttgattatgtaaagtcgtgaataccttctatccttaatattatgtgcatctgtccatgagcccattgaacaagtatcagctgactaacatctattatataacatgtcattgtatgc

SEQ ID NO: 38527 - DNA, 523 bp, Homo sapiens
cctcaggtgacatggcttccccagacccacttccccctaggtgccctctctgcattcagggggtagagggctgactgggacagaatgtgacacactcagcaagtgaggaaaagcctccttcattctgtaggccctacctctattaacatgtcctttgataaagtgcctcccctcctgtctcccctctctggaatcctcagctgctgccaggcttcagctgtgccccatggaaggcagctctgtctccctactttccccagcccagggttttccttttggggtcagctgcagggatctgggccatcctttacccactcagactttcttcctgcccacctgctgctgtgaatcctgtatgtcatatatatatatatatawaatatattatataattattatatttatgtaatttatataatataatatattataaatatatatagtattatatataaaattatactttaagttccagggtacatgtgcacaacgtacaggtttgttacatatgtatacatgtgcc

SEQ ID NO: 38528 - DNA, 641 bp, Homo sapiens
aggaaattaatatagttatatccatatatctaaaaagaattaaaactaaaaatgtaactaaaattttaactgatgaagttaaaaaagaaaatcaaattaaaatgacagttacaaacatgtaataagacttaattagatgtaagtagaaaacagacactagagaaaataaagaaggccacattttgttttttgaaaagactaacaaaattaataaagctttgacaaaactgtaaagaaaaagtgaaggcaaaactaaactttatcagagatattagtatatatgctacagatatcaaaawgatcatgggagaatattgtgaacaagaaactttttgcatctgtattaatgagtaattttctttcttgtaatgtcctgatcagttttagtaccaggtattgttgatctcataaaataagttagaaacatccttttattttctattatctggaaaagtttgtgtataattggtgttatttcttctttaaatgtttagaattcaacagtgaacctatctgggctgggtattttccctatagaagcttaattattatggattctattcccttaatgaatttggaaacatttagattttctatttctttttgttgttgttcagattcattatgatgtaattttttca

SEQ ID NO: 38529 - DNA, 684 bp, Homo sapiens
aagataaatttaacccccaacacaaatttattacataagctttaaacatgagtctgagttaaagtaaataatgtgttccaatttgccaacaaaagtagtattatgctttcttttttcagactccaggtagaaagcaaatagactaaccaccagacctgaatcatattttaaacttccaccagtggcagtgttttttgggatattagrtgtctaatttaacaaaaattgtttttactttttatataggtagttttccatgacaatctggtagatgttacacaaaaagtttttttgaggaaaactatagagagttgtgatcaggtaacaggcaggctgaatcgtctctgagttaattagagacttatctgagcacacggtatacctgcaatctgaagaataagttggctttgcaagttaacaaggtgtactatcaaaggtacaggcatgggcaaatattctatggcaggaaggaaactggcacattcagataaccaaaaaaaaaaaaatcagagataaggacacatatcctaaatagaggctgagaataaacagagtattcaaaggccttgttaaagattttagttcctctttttatgaatggtaaactgttgaagacttctaacagtaaagtgaatccattgtgtctgtgttttaaaatttttactccgaatgatgattggagaa

SEQ ID NO: 38530 - DNA, 520 bp, Homo sapiens
cattaaagaatatctagagctaattttttttttctggccatgccaatgaagcaagattacttaccttgatggttaaagcttttgactactgtttgtggaaaatatttttaagatttcaaaaatatatattcttgggcgggcacagtggctcatgcctgtaatcccagcactttgggaggccaaggtgggtggatcacaaggttaggagtttgggaccagcctggccaatatggtgaaaccctgtctgtactaaaaatacaaaaattagcggagcctggtggcgggggtttgtagtcccagctactcggggggctgaggcagmaaaatcacttgaacccgggaggcacaggttgcagtgagccgagatcatgccactgcactccatcccaggtgacagagtaagactccatctcaaaaaaaaaaaaaaaaaaaaaaaaaaaacctatatgcttaagggtcaatctttgattttttaaatattttagatgtctttgaacatcaattagagaatgtatctcat

SEQ ID NO: 38531 - DNA, 510 bp, Homo sapiens
tgaagatacactgtggtaataacaaataatttgcctcagatacctgggacctggttgagcaaataagactgtgaaatcagaagacatgagatctgctttctaagacctcctcactgttcctcaaaccctccaggcatcatcacacctcagggccctcacacttgctgttccctgctcctgcactgctcttgccgcagaaatatatgtggcacctccagtcattccattgagactttcactcaaaatgcaccttcttagtgactctttcccctgttacttgatataaaattttcatcatcctccccaccaccatttattaaggagctcctctctttaatttatcacagtrtactttacctatctgtttgtttgggtattgatgtggtttggctgggtcaccacccaaaattcatcttcaactatagttcccataatccccacatgttgtgggagggaccaggtagagataattgaatcacgggtacagttcccccatactgttcttatggt

SEQ ID NO: 38532 - DNA, 631 bp, Homo sapiens
aagggttttagaggagctaaaatcagtgacttcatttttgaagagaatgactgtcatgggtaattgacagaattactgcatcttagccatagaagcattggaaattgtgcagaagctaaatggtttttgccactcaatatagttaaactctggaatgactttcgggggataygtgatgaaagtagcgtgtttttctttaaccctggctactgaactggaattatggagggtcactggcattttttcaaagctctgtaggcaatttggataaacaaccagagctaaaactctggattagagagttagaccgacttttgaagtgtaacagggactagggttgtcaccttccacatgaaatcatgagcttttgggggctaaaagcccaaaggtagtaattgttaaaattatattttaaaatttttacctaattcttttaggtattacccaataaattcacaatagagtgtgaaggaagaaatagaagctgcagtgaaccatggtagttccttaaatctgaccccctgtccgattaactgagaacaatcacacttgtcccaacataattatagccacctccctttcactttcaaaagtattcctgtttgggcaacaaatgataagctcatcccat

SEQ ID NO: 38533 - DNA, 631 bp, Homo sapiens
aagggttttagaggagctaaaatcagtgacttcatttttgaagagaatgactgtcatgggtaattgacagaattactgcatcttagccatagaagcattggaaattgtgcagaagctaaatggtttttgccactcaatatagttaaactctggaatgactttcgggggatacgtgatgaaagtagcgtgtttttctttaaccctggctactgaactggaattmtggagggtcactggcattttttcaaagctctgtaggcaatttggataaacaaccagagctaaaactctggattagagagttagaccgacttttgaagtgtaacagggactagggttgtcaccttccacatgaaatcatgagcttttgggggctaaaagcccaaaggtagtaattgttaaaattatattttaaaatttttacctaattcttttaggtattacccaataaattcacaatagagtgtgaaggaagaaatagaagctgcagtgaaccatggtagttccttaaatctgaccccctgtccgattaactgagaacaatcacacttgtcccaacataattatagccacctccctttcactttcaaaagtattcctgtttgggcaacaaatgataagctcatcccat

SEQ ID NO: 38534 - DNA, 563 bp, Homo sapiens
ggccttcaaaatatgaagcacacattgtaaagaatgttgtactccaggcctgtgaatctcactgatatctggcagccacagttaaaatgttgtagcatctggaattgcgggctgtaattgaaactcaactgaagagctttctgtggagctggaatgaccagccaatgcataaagttgttaaacatgaaacaaagataactattatcttttaaaaacctctcattaaccctcatgacgttcttgggtgaaggtctaatctggcacacttgctaacttctaataaagaatcaaatggtcttccaactcacataatgactaattctaaagcatgcaacctcaaagtactacattctccctgttctagaaatacaaccctagagggccagtcttccttcagcattcaaatattgagtagaacaactgaactgtaaggttcaactaaaggaatgcaactgtgacttgagctgtggaacggctatggcctaartcaagaattctcaacctcagcactagtgattgacattttgggccaggcaattctttcttctggggcctgtcctatg

SEQ ID NO: 38535 - DNA, 563 bp, Homo sapiens
ggccttcaaaatatgaagcacacattgtaaagaatgttgtactccaggcctgtgaatctcactgatatctggcagccacagttaaaatgttgtagcatctggaattgcgggctgtaattgaaactcaactgaagagctttctgtggagctggaatgaccagccaatgcataaagttgttaaacatgaaacaaagataactattatcttttaaaaacctctcattaaccctcatgacgttcttgggtgaaggtctaatctggcacacttgctaacttctaataaagaatcaaatggtcttccaactcacataatgactaattctaaagcatgcaacctcaaagtactacattctccctgttctagaaatacaaccctagagggccagtcttccttcagcattcaaatattgagtagaacaactgaactgtaaggttcaactaaaggaatgcaactgtgacttgagctgtggaacggctatggcctaagkcaagaattctcaacctcagcactagtgattgacattttgggccaggcaattctttcttctggggcctgtcctatg

SEQ ID NO: 38536 - DNA, 1490 bp, Homo sapiens
tccttattaaatcaatagattacaatagatcagaaatgatgcaaaaattcagaacttgtttctaacatctttttttgtcatttatgtgaaagagaatatagcagtgaaacagtaaaccagttttacctcgtactttcttattcctcgtaaaggaatagtcatagcctggcaaatagtaatcactcagtaaatgtgtgttgaatgaactacactgagcagatcactcttaaataggaagtcaaaggattttagtcttgtaaatggataaactccattttgagccaatgctgaagaaatagaggtgagttaataaagatgattttggccaggtgcggtgactcacacctgtaatcccagcactttgggaggccaaggtggggagatcacttgaggccaggagttcgagaccagactggccaacatggagaaaccccgtctctgctgaaaaatacaaaaattagccgggtatgatggcacacgcctgtagtcccagctactctagaggctgaggcaggagaatcacttgaagccaggcggtggaggttgcagtgagctgaggtcatgccactgcactccagcctgggctacagcgggagactccatctcaaaacaaaacaaaacaaaacaaaacaaaacaaaaacaaaaaacgtgatttttgactttgaattgagagtgtcctcgaggatctgtgtcaatacaagttgattaaccagagcgctaagaattattggtttcatttagaaatgattctaagtttccaatgaaaacctgactattcacaaacctctgaaaattaaatctaaaaagccaaggaatgtaggtaactaagggttactcttttagctttaaaatggtttggctgtgttttctgttttaaccattttaaatagtaattttaataaatacacatgcttctatctttttaaacagaattcattggacatgtcaactttttctgatgtgctacagaatgttattayaaacatcagttacagcactgccctcaggattgatagaaatgtgtagtcacaagacagatgtgtggcttttttagaagattttctgtttaaatttttctaccttctcctcttcccccagactctcaggcaattctttcttcttgcttttagtatatatgtgcttatttcaatcctattatcacatttcaatttgtggcctctactctgtggtaggttaagatattaaaaagccacactcaaaactactgtgtgcaaaaaattctcatatttttaagagaatttaggttttaaatggttaaatggaatccctctatgaaaaaaaagtatgcattttgtttcagagtatttttacatattttgattgttctttgtatatctattttagtcctttttggcttctggggtattggctgctttcctgattaggcaaattttaaagacaattaagttctgtagaaatgaagtactaacatatatataagactagttaaataactggttaaccaata

SEQ ID NO: 38537 - DNA, 1053 bp, Homo sapiens
atttaaatcctgatttcaaaatctgcttctgggataattcaaactaaaataattgatatcatacattgctctatggagcaaatcttcaggatgggattcagaaattgaataactccctgggcatagagcaacaagaatcccattcctagtagtatagtatcaaatctatagactctcatttgtggaagattgggttcccatacttacgtagtagctgtagcatgaaagagaccctaccctctttgccatagccagagggaaggctgctgaaaatcagatgcaaggtctaattgtggaattatttaaatttcaaataatgctaaattcacagccccagcaattctcctatgccaaatacagagtcgtcataaagaagaaatgggacccagagacctgaaacagaaacatctggtcttctgtgcttgaaaatcttgacccctctgtgctatgtaagacctccactcccccatgctagatagcctctccttgcttggagatcatgcagaagtctcacttaaggaagatccaatatatagataacaaagacagaataataaccgaggaactctttctcacagatatctgtggtgatatctaatagccatggtgtttttagaggcaagatgggtaggcatccaacaaagatgttgcatgacatgtacaacctataagaacaagagcagagcagaagacagtcattagtcaccataatagaaaattgttttcttactcaatttccaaaccagaatctattctgaaaactagagcccttcaattgaagagaatgctagatccccttccccttaaggaagaattttgtaatgctacagccaagtacttaaatagtgatttccccattccttcccacttaagggatatatggccatttaccccagtcattctacacagaagaaaggagcacatccatgacttttaaaatctgtccttacttccactcacrgcttgtacagcagttactagggttatgcctcaacacagccttactggcgatgaactgctcttccatgagaggaaacgaactatgtaccaaac

SEQ ID NO: 38538 - DNA, 536 bp, Homo sapiens
ctgttctccctcatcttctttctttttycctttgactatcagtaaaaatagagctaaatttaatgctcagttgcataaaactagattaaactacctacttattacctccttaattatttaaaaacattattgtattctttcattggttatgttgtatgtgtgacttcaagtaagcttacattattcttgggagtaggcatcagtgtataaataataaatgcaataaaggcctacactattttagcaaccctcagatgaagaatgactgagccaagagtgtgagggtggtaggtcttgtatttgatagttgttggacaaagtgctccggctccctacagatcacccttcaggcaccagttctacattggctgcctcctattctcccttctggtcaggctttgtgagaggcaccctgtctttcagactccatagtccatgtagcccattgcctgccagctatgaaggaaaaccacaaggtaaaaacttcttcaacttgagtcaaagtgttcacagctaagggcaacatcagactcagg

SEQ ID NO: 38539 - DNA, 767 bp, Homo sapiens
gcatagtttgcaagtattttcttccattctgtaggttgtctgtttactctgtttatcgtggttttttttttttgcttttttctttttttttttttttttgctgtgcagaagctatttcatttcattaggcctcatttgtcaatttttatttttgttgcaattgcttttgaggagttagtcatgatttctttcctgggttgatatacagaatggtattttctaggttttcttctaggattcttatagtgtgtggtcttacatttaaacctttaatccaacttgagttaatttttgtttatggtgaaaggtaggggtcctgtttgcatattctgcatctggctagccagttatcccagcaccatttattgaatagagagtcgtttccccattgcttatttttgtcaacttcatcaaagatcagatggctgtaagtgtgttatgttatttctggkttctgtattctgttccattgatatatctatttttttctttccttttttttttttaccttggctaaatccatttatttatttatttattatactttaagttttagggtacatgtgcacaatgtgcaggttagtaacatgtgtatacatgtgacatggtggtgcgctgcacccactaactcgtcatctagcattaggtttatctcccaatgctatccctcccccctccccccatcccacaacagtccccagagtgtgatattccccttcctgtgtccatgtgttctcattgttcaattcccacctatgagtgagaat

SEQ ID NO: 38540 - DNA, 1024 bp, Homo sapiens
tgactctcagaaccaggaacccagccaaggtcttctggtaactgctctttatactcccatggtctaggtgaaaagaggttacatgcatattaaaaggttcatgaygcataagtaagagcagtgtaaaatattggtaaatagcatagcaatagtcacatggtctatgtgaaaataagagttcatgacacataattaagagcagtgtaaaatattgttaaatagcatagcaataatttccattgtttttccacttgtaggcagaaaaatacaacattgcgttttcaagcaaatgttataattttgctttgtggaataaagataaagaatatatatttaaaaagctatacattattgaaccactctttggacatagacaaattatattattttaaaagttatttttattatttctatgttttattttattatctaaggaatagaactatgttcatactatcttggcttatttatttagattgctcacgtaacaaaacttttaaaattgcagtcaattttgccaaacatagaaaaaaattagttaagtgtgctgttcaatgtaggtaatattattgttactttttaaatattctaagttgatactaacttatctaatgccaatataaaatagaatatggatggagacaaatatggaaccaggattcttgggtgattaacattggctctttgtttcttatgcaaatttctgtagctggcttgaatttctcttcagaaaatgggttttcctttgctattgcatcatcaggctgcaaattttccaaacttttatgctctgcttcctcttgaatgctttgccacttagaaatttcttctgccagataccctaagtcatctctctcaagttcaaagtttcacggatctctagggcaggggcaaaatgctgccagtctctttgctgaagcataacaagagttacctttgctccagttctcaacaagttcctcatcaccatctgagaccacctcagcctggaccttattgtctgtatcagtatcagcattttggt

SEQ ID NO: 38541 - DNA, 587 bp, Homo sapiens
ctataaaatggaatagttattaaattattaggggagatccagatwctttgtttacaaaatgctattaattttgaggaaatcctcaaaattatggaaataattttggaaataaaaaaataaaacatcctccctggcaacacaggttttcttaattctggcaggttattacaatgctgtagtacatgaccaaaacataagcattcagtaactgactgaagtatagttctgcataggagttggccgggaagtgaaaaacctggcggaattaacccaaaagcttcagagaacaccaacccatgttgtatgcactcagtctcagagtcttagcaataatctgcatcaggagcagccatcatgtagaaggttcctagtattccatggctctggccccctggatcaccatgtagatctcatcggtgcttttgctgctggtacaaaatgcaaggcatctgaataaagcccttagcttcaggctctgaaaatgccaactggatcacatttaggagaaaaaagattaccaaatactttctacatttcatgcagattattttcaaatctggagatatttaatcctggcagaaaatggc

SEQ ID NO: 38542 - DNA, 654 bp, Homo sapiens
tgagtgtaagtgcaaggaaagcatagaatatttctagaaacttaacctggcctgaaatgtggatgatttaagtctcatatacatatgtgaaaatgaatgagtcccagtatgttacaactgcaatcatgaggatggaccaagtggaaaatgaccttttccatgcctgtgataatttcatctagaggacacctcacagaatttggacagaagaagcagaaatcatagagaaaggaatgagcaaaaatatgatgctgcttacattaactcctcattcaccctctartgtttctacataagagaatctgatgtagatataagaatatatatttctttcctaaaataagtttcaatttgtttacttactaagccaggtagcagtttattaagcagaatcgatttacttaggcactatagagactagtggctaatagcctcttaaactctctaagcgaatacaaaattttaccttattttgtctaattaatgtcttgcatcctttacttatagcataagaactcaatagaaaaagctgcgtttcttctcaaatgaattgccacaaaagtttaaaggacatatccagctaccagcgacctacaacggaatgttcaaaagactatgtgtatctccaccacaatacccaggtatctgaacacg

SEQ ID NO: 38543 - DNA, 766 bp, Homo sapiens
catctgtttttatgccagtactattctgttttgattactacatytttgtagtatagtttgaagtttgctactgttatgcttccagctttgctctttttttcaggattgatttggctgtttggggtctttcatagttcatacaaatcttagaattgtttttactatttatgtgcagatgtcattggtattttgacagacattgcattgaatctgaggtttggtcatttaaataataataattcttccaatccacaagcattggatgtctttcgatttgtttgtattcttcttcatttcctttcatcagtattttgtagaaataaattctattgttctcttctatgactaaagttaacagtaaagtattacatagttaaaattcttgaaatgctctttaacatcatttctatttctaagcctgtggatatttgttttgcaatgttgttgcagttaaaacacacattttgaacttgtcttatgaatcagagtaagtcctttttgtgttttgctgcaatgagcagtgtatatttttattttgtaatagtttgctaacaatgtttactgctaatcttcctggctttttcttttctgatattcaatgaatacaacaggcgtgggctctgggacagagggaaaataggcatcccatcagcagtcacttgctgctgccagggcaagcacctcctctcttccaagctagggacacttggaccctactgccacctgcactgctgcttctgtcatcaccatcaatatgagcccaggc

SEQ ID NO: 38544 - DNA, 766 bp, Homo sapiens
catctgtttttatgccagtactattctgttttgattactacatctttgtagtatagtttgaagtttgctactgttatgcttccagctttgctctttttttcaggattgatttggctgtttggggtctttcatagttcatacaaatcttagaattgtttttactatttatgtgcagatgtcattggtattttgacagacattgcattgaatctgaggtttggtcatttaaataatawtaattcttccaatccacaagcattggatgtctttcgatttgtttgtattcttcttcatttcctttcatcagtattttgtagaaataaattctattgttctcttctatgactaaagttaacagtaaagtattacatagttaaaattcttgaaatgctctttaacatcatttctatttctaagcctgtggatatttgttttgcaatgttgttgcagttaaaacacacattttgaacttgtcttatgaatcagagtaagtcctttttgtgttttgctgcaatgagcagtgtatatttttattttgtaatagtttgctaacaatgtttactgctaatcttcctggctttttcttttctgatattcaatgaatacaacaggcgtgggctctgggacagagggaaaataggcatcccatcagcagtcacttgctgctgccagggcaagcacctcctctcttccaagctagggacacttggaccctactgccacctgcactgctgcttctgtcatcaccatcaatatgagcccaggc

SEQ ID NO: 38545 - DNA, 766 bp, Homo sapiens
catctgtttttatgccagtactattctgttttgattactacatctttgtagtatagtttgaagtttgctactgttatgcttccagctttgctctttttttcaggattgatttggctgtttggggtctttcatagttcatacaaatcttagaattgtttttactatttatgtgcagatgtcattggtattttgacagacattgcattgaatctgaggtttggtcatttaaataataataattcttccaatccayaagcattggatgtctttcgatttgtttgtattcttcttcatttcctttcatcagtattttgtagaaataaattctattgttctcttctatgactaaagttaacagtaaagtattacatagttaaaattcttgaaatgctctttaacatcatttctatttctaagcctgtggatatttgttttgcaatgttgttgcagttaaaacacacattttgaacttgtcttatgaatcagagtaagtcctttttgtgttttgctgcaatgagcagtgtatatttttattttgtaatagtttgctaacaatgtttactgctaatcttcctggctttttcttttctgatattcaatgaatacaacaggcgtgggctctgggacagagggaaaataggcatcccatcagcagtcacttgctgctgccagggcaagcacctcctctcttccaagctagggacacttggaccctactgccacctgcactgctgcttctgtcatcaccatcaatatgagcccaggc

SEQ ID NO: 38546 - DNA, 766 bp, Homo sapiens
catctgtttttatgccagtactattctgttttgattactacatctttgtagtatagtttgaagtttgctactgttatgcttccagctttgctctttttttcaggattgatttggctgtttggggtctttcatagttcatacaaatcttagaattgtttttactatttatgtgcagatgtcattggtattttgacagacattgcattgaatctgaggtttggtcatttaaataataataattcttccaatccacragcattggatgtctttcgatttgtttgtattcttcttcatttcctttcatcagtattttgtagaaataaattctattgttctcttctatgactaaagttaacagtaaagtattacatagttaaaattcttgaaatgctctttaacatcatttctatttctaagcctgtggatatttgttttgcaatgttgttgcagttaaaacacacattttgaacttgtcttatgaatcagagtaagtcctttttgtgttttgctgcaatgagcagtgtatatttttattttgtaatagtttgctaacaatgtttactgctaatcttcctggctttttcttttctgatattcaatgaatacaacaggcgtgggctctgggacagagggaaaataggcatcccatcagcagtcacttgctgctgccagggcaagcacctcctctcttccaagctagggacacttggaccctactgccacctgcactgctgcttctgtcatcaccatcaatatgagcccaggc

SEQ ID NO: 38547 - DNA, 681 bp, Homo sapiens
  misc_feature (1)...(681): n = A,T,C or G
tttatcctcataaaaacattaaaatgtactgaaattattccatatttggattcccaaatacattttaagaaaattctggcaagtttctcagcctctacagagcaaattatttccaattattttatgacctctggtaatttgtgaaggacaattcagaagaacaaattattttcacatatgtcatttggaaacagtacaagatcagcattaattgtgatgcaatagtatgtaatttatattagtagtttagttattggcaagtagaatatatactgtttgaaattactaacacaattaacatttcaaacatttctatcatttgtattttatacagggcagtctatgatcaactttccatgagatagttatagtcctaactttmaaaagagaaaatgtaacataggacagaatcctattttttcatcagatctcatatttaatgccacgggggaactgactacctcatttaaaaataataataataataataataataatgacttattttctcctcctccccccacctcctacttaactggttaggaataaaaatatatcctttactgtctccaccagacgcgttctacaaggcaagtttatatgactttgtgtttactttagaagttctagagacggaaaccttgnaagcaaatcaggcaccctcaaaactccctcccacta

SEQ ID NO: 38548 - DNA, 1030 bp, Homo sapiens
tgcatctgagattttatttttgttgttgccacatctcactacggactcacatttggccctccgcagatgtccttaagtgctactcctaagccacaaacccctcaacatcatcctgtgcttacttatgcaactagctttatggtcaaaataggatctacattcgtccagtcaaacttcatcttataactagttcatcatcttagtttgacaaaaacatgactgagttcaaatttggacatgtacatgccccatcttagagctgttgttttttgtgcttttccctctcttatgtttagggtaaaagactgatcaggtgatctacctgtggggccacacatactacaccccacacatcccctcccacacctccatttgaagtgaagaagagwatttcaaatacaaagccaaagccaaaatcaaaaataggaaaaggagaggaaactgtattacctagttcccaaggacgtcaatgcctttcttaaaaccccagagttccaaaaaaacttccctgttctttgtcaatagttatctttcacccctgttataccagcagcaattgcatggagatggatgaatgacagaagctgagcagaaaggataggtgggtttcaaacagccagaggtctggggagagggtagggagcaatcccgcataaggattcaataagtaaatacaagatgatgttgttttaaaaaagggggggggggaatacatgaaaagatgctgttagcttatcaatgcaaaattggagtatgtgaagaataaaaggttgaagaggtaaatatttcattcaaagggtctaaaatgaaatattaaaatgtttgaactttctgttacagttgtttcttattaaaagtcactgcataaggccaggcacagtggctcatgcctgtaatcccagtactctgggaagccaaggtgggtggatctcttgagcccaggagtttaagaccagcctgggggcacaacatagtaagaccttgtctctaccaaaaaaaaaaaaaacacacacacacacacagaaaatta

SEQ ID NO: 38549 - DNA, 603 bp, Homo sapiens
tatttttatttttattttttttgagatggagtcttgctctgtcacccaggctggaatgcggtggcgtgatctcggctcactgcaatctccgcctcccgggttcaagcgattctcctgcctcagcctcccgagcagctgggactgcaggtgcgtgccaccatgcctggctagttttttgtatttttagtagagatggggtttcaccgtgttagtcaggatgatcttgatctcctgacctcgtgatcgacccacttcagcctcccaaattgctgggattacaggcgtgagccaccgcacccggccgatattggctttttaaagaaaccaagctagttgttttgtagagtgccctacatttggggcttgtatgattgttttgtcattgtatcatttaactcatttatctatcccatgtatttcctgtacactggaagctagatccaaattcctgactacattaaacaccttcatcagtaatactttataaaggatgaaatatattttggtgtgcaatactttaggtggtacatatggtctggttatccactactaatgattttaartttgatcacttgattaaggtagtgactgcagttggctccg

SEQ ID NO: 38550 - DNA, 794 bp, Homo sapiens
tgggggtcggcaggagtcacagccaggggtgcatacctggtccagcacgctagacccaaaccccaccaccacgagggctcacagcgaggggcagagctccaactccagagtctgtgcttgccctagccctgcttagtgtgtgggcwcatggaggccccaacttccccatctgtcaaatggacttgggggaggttccctgaagtcactccagttccaatgggcatagtcattttctataccaagggtattaaagtaatcattcccctagagtgagctcctccagggccgatgcccccgacaccctcccctgagcctggcatgatgcctggcacatggcaggtactcagcccgtgtccgaaggaaaggatgagtggagggaagctcagagctgccagccagtgatgcagccccaggccccccttgcctcctcgtgcctgctcacctgtaactgcccgccaccacttgctcacagtcaatgaggacgaacttctccagggcctgccccgtgaagcggcggccagccttgctgcagtatgtgtccccacacgtgctccgcacacgcatgttctaggtggaagtaggttgggggtgaccttgagagagtgaggctcaagccatgtctctgccccatggggtctctaaccccagacagctaagggaacccaccccccactcccagtgccccccagtgctgactggccacccactggctcccctgccctccctgactccccgcccacacccctggttactgcccctggtcctcactgaccggcaggtgctccccattgagg

SEQ ID NO: 38551 - DNA, 1280 bp, Homo sapiens
ccaaagtacatgtatgagaaatgaatgggaattgacacctgtcatcataaatagaaaagtgtaccggcagaggctgagcaattattttagtaaaatggtgccaaactcttattcttatgtgggaatcatcactttaacattttatacatagcattttattctaaattgtattttctatgtcagcacaatttgggattcttaatttttatcttaagcaatttttcttcatagtatagtatagtgactagcaggaaaataatatccatttcatttgaagttatctattcttttaattaagcatatctaccttaaatagcatatctttggcaaagatatctttagttcaagtcagcttagcaaatgtttattctgtagttactgaaaatcagaactgtattaaacatggaagttacaaacataaaagcaaagaaatgcaagaaagttgtgaaattttttttctcatacactgattggtatttaagagtgaagactttcaggagaacaatttgggggctatgtctttgtgaccataatactgttagatccagcaattccacaagttcatcttaagataaatgcacaaagtattcattatacggcacatttatatttcccttttaaatgcaaatgccaacatactattttttatttcactcctctcttctctttggggtcatatatgtaacatggctgtaaaacagaaatttactgaggcgcagagtaggtgagagggttaagagagcccctcacaggattgctggggagaaattctgaaactctctgtaaagagaaaaaaaaggtcacaggagaaagtaggaaaataacactatcataagaaaacagaaaaagatcctccctccccccataacagatgagctgtaggattcacagtatataaggatcacatggctctatggcttccatgtctgcattgcagtgtgcaggttactaaattacataaaatacaacrgctccagagatcacagcataaacattaaaaagaaatgctgtagtttgcagcaaatccaaaagactctcccacaaattcaagcctagtaatcaaattttaagaaaggagttggcatctttctatatctgccagagagcagtttcttttcatattaggtataatactatgaaacttataaaagcacctatccatgtatttcagatattcacaggaatgttgggtggggttcagaagagtaatggaagaacagcagcaggaggggcaataagaggatcaggggatagaaataagccaatctgagaagatgatt

SEQ ID NO: 38552 - DNA, 1261 bp, Homo sapiens
tgggtaattgtgtttgtcagtcagggtccctgcagaaaacagatggctcattcaaactkgatactttgaagagaatttgataaaggaactacatagaaagacatggacaagatttaaggagtcccacaatgccagtcaagtaatggggtggtaataatggggagacatcttgaagaagaggaaggtagaaagcagttaccaaaacctggaaaaggcagcattatgagaaggattcaacatgggctgtgccttttgtggagcaattaatcctccacccttactgtcttcccacccttttgtttcttgccagtgcctctcttcggctaaatcaacctaaaaccagggagaaggaggctcactgatggtaagcaaatgggttagctaccttgacaagacttgttaagcaatttttgtggttcagtgaagaatgaaaatgcagggctcctttgtttgaaaacaattgttaggaatttcaagatggtaatagcaaaacaataaatcaagtgtaggatcccactgagtgtggaaccctgtgcatctgtgtaggtcacatgctcatgaagccagcctgctcccagaacacatagaaaaatgaatagggatacagaaggatatgaaggacataaatgtatacagcaccaatgtgttaccttggacaagttacttaggtattctgtatcacagtttacaggtctgttaagtggagatgacaagagtattttatattgttattctgaggattaattgaggtgatacatgcaattttctcaagtcagtggctggcaaagaaaaagtaaatgtcaactactagtattaactttaacacttaatatcaatatgcagagaaatatattcatatgaaattgcatttttataagttatgcaatttttatcattttgaaaaattctaaatttgtttactatttttcagggaaatttttatatttacataattttgaagaatcctggaatgtatggtgaatatgtactctgtaaaaatgaaaatgttttcctgatattactgccaccttcttaaaacaagatattaacctttcatataagaatcagaatagttattttatgatacttggttacccaaatgtgaataaattgcccctcccactcctcttatcaagatttgtgtgtgtgtatgtgtgtgagatctataaaaacttctcttttctaatgacactttttcttatccaccccatgccactgatctcctttggctgttcttgaggtcttatttttgtatcatgca

SEQ ID NO: 38553 - DNA, 1261 bp, Homo sapiens
tgggtaattgtgtttgtcagtcagggtccctgcagaaaacagatggctcattcaaactggatactttgaagagaatttgataaaggaactacatagaaagacatggacaagatttaaggagtcccacaatgccagtcaagtaatggggtggtaataatggggagacatcttgaagaagaggaaggtagaaagcagttaccaaaacctggaaaaggcagcattatgagaaggattcaacatgggctgtgccttttgtggagcaattaatcctccacccttactgtcttcccacccttttgtttcttgccagtgcctctcttcggctaaatcaacctaaaaccagggagaaggaggctcactgatggtaagcaaatgggttagctaccttgacaagacttgttaagcaattyttgtggttcagtgaagaatgaaaatgcagggctcctttgtttgaaaacaattgttaggaatttcaagatggtaatagcaaaacaataaatcaagtgtaggatcccactgagtgtggaaccctgtgcatctgtgtaggtcacatgctcatgaagccagcctgctcccagaacacatagaaaaatgaatagggatacagaaggatatgaaggacataaatgtatacagcaccaatgtgttaccttggacaagttacttaggtattctgtatcacagtttacaggtctgttaagtggagatgacaagagtattttatattgttattctgaggattaattgaggtgatacatgcaattttctcaagtcagtggctggcaaagaaaaagtaaatgtcaactactagtattaactttaacacttaatatcaatatgcagagaaatatattcatatgaaattgcatttttataagttatgcaatttttatcattttgaaaaattctaaatttgtttactatttttcagggaaatttttatatttacataattttgaagaatcctggaatgtatggtgaatatgtactctgtaaaaatgaaaatgttttcctgatattactgccaccttcttaaaacaagatattaacctttcatataagaatcagaatagttattttatgatacttggttacccaaatgtgaataaattgcccctcccactcctcttatcaagatttgtgtgtgtgtatgtgtgtgagatctataaaaacttctcttttctaatgacactttttcttatccaccccatgccactgatctcctttggctgttcttgaggtcttatttttgtatcatgca

SEQ ID NO: 38554 - DNA, 1261 bp, Homo sapiens
tgggtaattgtgtttgtcagtcagggtccctgcagaaaacagatggctcattcaaactggatactttgaagagaatttgataaaggaactacatagaaagacatggacaagatttaaggagtcccacaatgccagtcaagtaatggggtggtaataatggggagacatcttgaagaagaggaaggtagaaagcagttaccaaaacctggaaaaggcagcattatgagaaggattcaacatgggctgtgccttttgtggagcaattaatcctccacccttactgtcttcccacccttttgtttcttgccagtgcctctcttcggctaaatcaacctaaaaccagggagaaggaggctcactgatggtaagcaaatgggttagctaccttgacaagacttgttaagcaatttttgtggttcagtgaagaatgaaaatgcagggctcctttgtttgaaaacaattgttaggaatttcaagatggtaatagcaaaacaataaatcaagtgtaggatcccactgagtgtggaaccctgtgcatctgtgtaggtcacatgctcwtgaagccagcctgctcccagaacacatagaaaaatgaatagggatacagaaggatatgaaggacataaatgtatacagcaccaatgtgttaccttggacaagttacttaggtattctgtatcacagtttacaggtctgttaagtggagatgacaagagtattttatattgttattctgaggattaattgaggtgatacatgcaattttctcaagtcagtggctggcaaagaaaaagtaaatgtcaactactagtattaactttaacacttaatatcaatatgcagagaaatatattcatatgaaattgcatttttataagttatgcaatttttatcattttgaaaaattctaaatttgtttactatttttcagggaaatttttatatttacataattttgaagaatcctggaatgtatggtgaatatgtactctgtaaaaatgaaaatgttttcctgatattactgccaccttcttaaaacaagatattaacctttcatataagaatcagaatagttattttatgatacttggttacccaaatgtgaataaattgcccctcccactcctcttatcaagatttgtgtgtgtgtatgtgtgtgagatctataaaaacttctcttttctaatgacactttttcttatccaccccatgccactgatctcctttggctgttcttgaggtcttatttttgtatcatgca

SEQ ID NO: 38555 - DNA, 1261 bp, Homo sapiens
tgggtaattgtgtttgtcagtcagggtccctgcagaaaacagatggctcattcaaactggatactttgaagagaatttgataaaggaactacatagaaagacatggacaagatttaaggagtcccacaatgccagtcaagtaatggggtggtaataatggggagacatcttgaagaagaggaaggtagaaagcagttaccaaaacctggaaaaggcagcattatgagaaggattcaacatgggctgtgccttttgtggagcaattaatcctccacccttactgtcttcccacccttttgtttcttgccagtgcctctcttcggctaaatcaacctaaaaccagggagaaggaggctcactgatggtaagcaaatgggttagctaccttgacaagacttgttaagcaatttttgtggttcagtgaagaatgaaaatgcagggctcctttgtttgaaaacaattgttaggaatttcaagatggtaatagcaaaacaataaatcaagtgtaggatcccactgagtgtggaaccctgtgcatctgtgtaggtcacatgctcatgaagccagcctgctcccagaacacatagaaaaatgaatagggatacagaaggatatgaaggacataaatgtatacagcaccaatgtgttaccttggacaagttacttaggtattctgtatcacagtttacaggtctgttaagtggagatgacaagagtattttatattgttattctgaggattaattgaggtgatacatgcaattttctcaagtcagtggctggcaaagaaaaagtaaatgtcaactactagtattaactttaacacttaatatcaatatgcagagaaatatattcatatgaaattgcatttttataagttatgcaatttttatcattttgaaaaattctaaatttgtttactatttttcagggaaatttttatatttacataattttgaagaatcctggaatgtatggtgaatatgtactctgtaaaaatgaaaatgttttcctgatattactgccaccttcttaaaacaagatattaacctttcatataagaatcagaatagttattttatgatacttggttacccaaatgtgaataaattgcccstcccactcctcttatcaagatttgtgtgtgtgtatgtgtgtgagatctataaaaacttctcttttctaatgacactttttcttatccaccccatgccactgatctcctttggctgttcttgaggtcttatttttgtatcatgca

SEQ ID NO: 38556 - DNA, 1261 bp, Homo sapiens
tgggtaattgtgtttgtcagtcagggtccctgcagaaaacagatggctcattcaaactggatactttgaagagaatttgataaaggaactacatagaaagacatggacaagatttaaggagtcccacaatgccagtcaagtaatggggtggtaataatggggagacatcttgaagaagaggaaggtagaaagcagttaccaaaacctggaaaaggcagcattatgagaaggattcaacatgggctgtgccttttgtggagcaattaatcctccacccttactgtcttcccacccttttgtttcttgccagtgcctctcttcggctaaatcaacctaaaaccagggagaaggaggctcactgatggtaagcaaatgggttagctaccttgacaagacttgttaagcaatttttgtggttcagtgaagaatgaaaatgcagggctcctttgtttgaaaacaattgttaggaatttcaagatggtaatagcaaaacaataaatcaagtgtaggatcccactgagtgtggaaccctgtgcatctgtgtaggtcacatgctcatgaagccagcctgctcccagaacacatagaaaaatgaatagggatacagaaggatatgaaggacataaatgtatacagcaccaatgtgttaccttggacaagttacttaggtattctgtatcacagtttacaggtctgttaagtggagatgacaagagtattttatattgttattctgaggattaattgaggtgatacatgcaattttctcaagtcagtggctggcaaagaaaaagtaaatgtcaactactagtattaactttaacacttaatatcaatatgcagagaaatatattcatatgaaattgcatttttataagttatgcaatttttatcattttgaaaaattctaaatttgtttactatttttcagggaaatttttatatttacataattttgaagaatcctggaatgtatggtgaatatgtactctgtaaaaatgaaaatgttttcctgatattactgccaccttcttaaaacaagatattaacctttcatataagaatcagaatagttattttatgatacttggttacccaaatgtgaataaattgcccctcccactcctcttatcaagayttgtgtgtgtgtatgtgtgtgagatctataaaaacttctcttttctaatgacactttttcttatccaccccatgccactgatctcctttggctgttcttgaggtcttatttttgtatcatgca

SEQ ID NO: 38557 - DNA, 514 bp, Homo sapiens
ctgtatttctttcttctcttcttcctcaagaatatgagcattgtgtttacagatcattttttgttttattcacttataaatgtttgttgaattaattaaaagaagagaaaatcaatcacagatatgaaaggaccaacatagtgaattgccttggatccatattgcacaattttgctgttggcagactgaagttgtccaagggctgagtaaaaatgatgaggaatactttacaaaggccttacttggtttggttcctgtggtagagatgatttgtttgcagtgactgttccttaagttcccctgcttcatttttcttcctttactgcagttagttttcatcaatggactgcagattgcagtgacatgtttcacttctgggaggggaaatttaacagccagcatgctccctccacctctttttcccccactgttatgatcatgagaccaattgttccaaatggcagagctaaagagggaagagggctrcctaaaccacacaaagctttgcaataga

SEQ ID NO: 38558 - DNA, 1450 bp, Homo sapiens
taaagaatttcccatggtattctgcattctactcagtcttttctttaaatatcaactagagtcttctcttttaaacagattattattatccattgyctattcaatgggtttgactagttctatacttcactcactttcctacttagatgtagcacctataatttccatttctgcaggcctgttaattgaaatttttgcatttgatttggaaggtgattaactgtttcattaggtagctgttctcagagaacaagacaaaaatatttctctgcagattaggtgttactgaagaaataattaggtcagaatccatcaaagtgtggcacagccccataaactgaacatgtgcatgctgataaattcattgtgtcaagagatctgagatcgaaaacatccacactcagctcccttaggcatttagttgtgaagtacagactatgtacttctgtacaagagaagaatatttcttgagatgtttataaacaaggtagttagcaaccaaaaggcaacctgaaaaataatcctgctgaaaatagcagagtaatgtctttgacaataagactggtaaaggagagggcaaatactgataaaagtaaaaatctccaaaagtaagtgcacaaaaaaggtttcctattgactccactttaaagtgcacatagtgtaaattaaagaaataagaaagaaaattttgcacttgggtaaacaagattatgttaatgggtaaaaatagtcaatatgtattaaggtttaatcacatggtattggataaaagttaaactttgcattatccttgtttgcttaaaggttgtaatctaaataatagtgccaaaagcataaatgtaaaaaagtcagcctgatttatgcaaggagtattttatattagctttttttaccttactatttgagaatattttcaagttatacttacagtgccattgaattttctcagggagtgtatgaaggaaaatagaggacaggtaagaacaaattatgcactgataaggatgccaaaataaaaatggacagaaacttaatgcatgatatggcatctttcttgttaaggcctaacaaaataaatcaaacacatctaatggtgcaggtctcaaggccatttcaaacctctctcccacctgaatctcaatcattaacctaaaatttagctaaatttgagcccagtatagtagagtactcataagcctctctaggcgtaaaccagaagaagcccagtttggcccatcgaccatctcagactcccagatatctttgaaacatgggttccttctggaccagatctcctcttcgtaatttaaaacagaaagagcttaattttctgaaggcagaaaggatggagcaatttttaccttacaacgaggtttctctatagaataagtttctacaaaagatctgttcatccatttattaaaatatcaagaaaaaattaatgacaatg

SEQ ID NO: 38559 - DNA, 735 bp, Homo sapiens
gactcaatgtaacacaagagcttacatttccttgactcctcaacaccagtggccttgccttcttatcctcccctgcagctgctcccagccctactcctccttgtccttgtttttccaccattctatgacatcccatccctgcatatcgacttcctgccttctgcatccaggtggctacaagcaattatatagattcatttgctccaactttaggtgaccctcaagctgctgctaacctgttccttctgtcattcttctcaacagctctctcacrcattctctttttttccttaaaccctcaacaccttcatcacctgcaacttcagtaaatcatctttctactttatgagaaaattaaagctatcaggtcggaactccctgagctccatcaacaacacctaaaaactctcagtctaattctatcccttctttctctcctctcaggacattttctctagttcaaaactaatccctccatctgacctctgcctacgcctcaggaaactgttactctattcgttatcctctctatctcctttactccaagcttcccctctacttgatctttcctggcaaaatataaatattatcatctctaatctaaaaacaacttccactcgcccactcttctcttctagctcttagtcatttctctctttttcaaagccaagttttttaagtctacctattattgttgcctccactttcacctcccattcacttacaaatctagtg

SEQ ID NO: 38560 - DNA, 562 bp, Homo sapiens
ttccagagggctgggagacaatacctacctctcaagacagtacgaaggccaaatgagatgctgcaraaatgctttggaaactaggaagggccagagaaaggctggcttctatagctcattttccctgtttggggcccctcccctcagtctgggcacctcatgcccccaggttggaaccccctcggaggctcctacttggcctaacatatccctttgtctgcagtctattttctgactcccactggggtgtaatttctctgaggacagtgggcatcttgtcttgttcatttcccaatcccccaacctgagcacaacatggcacaaagggacattaactgctcctttcctctgccctctcctgcagcttctgttccctcctccccgggtgtccttgtccttacgtcctgatatgtcaccaccctcagactgggtctatatcatatgtcttatattcatgcttcgctcagggcccagcacagagaaagcactcagtaagtgctggtggacgagggaagttagttagcaaatgccctccttcaggtgctgcttctctgaaggactt

SEQ ID NO: 38561 - DNA, 562 bp, Homo sapiens
ttccagagggctgggagacaatacctacctctcaagacagtacgaaggccaaatgagatgctgcagaaatgctttggaaactaggaagggccaragaaaggctggcttctatagctcattttccctgtttggggcccctcccctcagtctgggcacctcatgcccccaggttggaaccccctcggaggctcctacttggcctaacatatccctttgtctgcagtctattttctgactcccactggggtgtaatttctctgaggacagtgggcatcttgtcttgttcatttcccaatcccccaacctgagcacaacatggcacaaagggacattaactgctcctttcctctgccctctcctgcagcttctgttccctcctccccgggtgtccttgtccttacgtcctgatatgtcaccaccctcagactgggtctatatcatatgtcttatattcatgcttcgctcagggcccagcacagagaaagcactcagtaagtgctggtggacgagggaagttagttagcaaatgccctccttcaggtgctgcttctctgaaggactt

SEQ ID NO: 38562 - DNA, 562 bp, Homo sapiens
ttccagagggctgggagacaatacctacctctcaagacagtacgaaggccaaatgagatgctgcagaaatgctttggaaactaggaagggccagaraaaggctggcttctatagctcattttccctgtttggggcccctcccctcagtctgggcacctcatgcccccaggttggaaccccctcggaggctcctacttggcctaacatatccctttgtctgcagtctattttctgactcccactggggtgtaatttctctgaggacagtgggcatcttgtcttgttcatttcccaatcccccaacctgagcacaacatggcacaaagggacattaactgctcctttcctctgccctctcctgcagcttctgttccctcctccccgggtgtccttgtccttacgtcctgatatgtcaccaccctcagactgggtctatatcatatgtcttatattcatgcttcgctcagggcccagcacagagaaagcactcagtaagtgctggtggacgagggaagttagttagcaaatgccctccttcaggtgctgcttctctgaaggactt

SEQ ID NO: 38563 - DNA, 1686 bp, Homo sapiens
atgccaccatacccagctaattattactattattatttttgagatggagtctcactctgttgcccaggctggagtgcagtggcacaatctcggctcactacaaccttcgscttccgggctcaagcaattctcccaactcagcctcccgagtagctgggattacaagcgcatgccaccacgtctggctaatttatttgtattttagtagagacggggtttcaccatgttgcccagggtggtttcaaactcctgagctcaggcaatctgcccacctcagcctcccaaagtgctgggattacaggtgcgagccgccgggcccagcctaattattttttaattatttgtagagacgggggtctccctatgttgcccaggctagtcttgaactcctggactgaagtgatcctcccacctcagcctcccaaagtgctggaattacaggtttgagccaccatgcccagtcctgtgtccttgttgaaagcagatactggatgttatttcacccaaaacagtatgtggcatctagctggcattccataaatatttatcttacagaagaatgctggcacatgcacaaaacagagatctataaatatttattacagtgaattgactttataagctatataaaataatgtagggaaataaagagttgagagtaaggatagcttttttcctatgcctattagttatgaaatcttgggatttcataactaattaagtcttatgcccagactctgtgggtctctaatctcactggcaaaattagaaggatgaactagacatataagacgttatgattttgaaagctttggaatacagtctttaacaaccattctattatgttttcaaaaccacatttagactggcaataccaagtgttggcaaggatacggaacaactggaactcttgtacgttgctggtgggaatttcatatggtacagccaccttggaggactgaacacttgacatctgaatattttattatatgtaaattatatctcaattttttaaaagttcaagtcatataagattttcaaaacttagaaatttttacacttaccttcttttcttttgagcaaggttgagttccataaacttatacttctggtactgttcatccagcttctttaatactgtatctgcagtctcattcccaggctgtttcatgaaggaatctacatcttcctttaatatcaaaaataatactttacaaattttagaattcatgccactcagattttttgactgctttgtttttaaaacatagaagaaaaaaaagctttgtttttctccaaaggtttgtttttaactaaaagtacaggttaagcacccttatctaaaatgcttgggaccagaattgttttggattttagattttttttttttttttagattttggaatatttacattataccagttgagcatcctcaatccaaaaatccaaagtccaaaatgctccaatgagcatttcctttgagcactatattggtgttcaaaaagttttggattttagagcattctggatttcagattttcagatttaggatgctcaacctgtagttataaaaagttagagacaatttcagatggtacatatatattatatagctaatttattctttcactttcctcttcattttttattcaaaaataggaaaagaagaatgaccttgcccaccac

SEQ ID NO: 38564 - DNA, 1652 bp, Homo sapiens
tgcacatatccttagaatagacgtctcacttctaggctattacatagaaagtaactcagacatatgtagagatataaagtagatttaactctttaagaaatgtaactttttcatttcattttaatattttgacctaagttcaaacttacagaggagtttcaagaataatacaaagaattcacccaggtagaccaaatgttaatccgtttgcctgtgctcttttgctctttctctgtctayaccaaattatttttctgaaccaattaaaaataaactgaaaacatgattttccttcaccctttagatacattagggagtttcctaaaaacaagaatatcttctcacttaatcagactataattaccaaaatcaggaaattaatattggtactacatcactatctaagctactaacctatgcaaattttgtcaattgtccaatcttaatctgtgtagtataagtaggtgccatctcagacactgcacagtaatgtcatgcgtctttatctcctttaatctggaagatttctctctttttcaggacatttcacacctttgaagggtactagtcagttattttgtggaaattcccttcatttgagttctgctgaagtgtcttcataattagattcaacttacatgtttctggcagaaattccacagaagtcatgctatgtcctcagctcatctatcaggcatatgatgtccatttgtctcactagagcatcattcactttgatgacttggataagattatgttggccagctttcttccatttacaagttactacctagctctttgcaattaagaagtattttgggagaggtaatttcagattttgcaaatatgccgttattccccacactcacccactagttttaatatctatttaataattctttcttaaacccattatttttctgatgattgtcaaatcatgcttttctaattatgtacgagatggctttctaatctaggaagagtgtttccttctctctcttttattattcatttatttatattagcattgactcactaattattattttactcaatggcttattatttaatttggagctcaaaatatcccagatttagccacttgaggcggctcccatatccttttgacttgccatgatcattctttaagccctgccttaccttctgtcacaaaaagatgttcagatgtaaattgatagcccttaggcatgataaagcaatgtccattaatgaaatacttgggatgcaatcaagtctaatgatggagattcagcccatgaaatccagaggtttggggttaattttacctcattcctcactgtgtaatgtcagtcccatcttaaatttcattaagcctcatattagttcacagttttgggggactttggggtagaatgcaataggatcatgcttaattaacattgtgtctgacacatggttgaaccaaaattcaaatacattctgagcatcaacaagaagagtaattggaaataaaataagaattactatccatccttaatgtacattcatactcaaggaacactctttgccattctaggcaccagaccttaacagagagatcacagatcttgctaaggtgaaaatagagtacttgtgtatatgatatataaaaagatgggtacaaatatgca

SEQ ID NO: 38565 - DNA, 1652 bp, Homo sapiens
tgcacatatccttagaatagacgtctcacttctaggctattacatagaaagtaactcagacatatgtagagatataaagtagatttaactctttaagaaatgtaactttttcatttcattttaatattttgacctaagttcaaacttacagaggagtttcaagaataatacaaagaattcacccaggtagaccaaatgttaatccgtttgcctgtgctcttttgctctttctctgtctacaccaaattatttttctgaaccaattaaaaataaactgaaaacatgattttccttcaccctttagatacattagggagtttcctaaaaacaagaatatcttctcacttaatcagactataattaccaaaatcaggaaattaatattggtactacatcactatctaagctactaacctatgcaaattttgtcaattgtccaatcttaatctstgtagtataagtaggtgccatctcagacactgcacagtaatgtcatgcgtctttatctcctttaatctggaagatttctctctttttcaggacatttcacacctttgaagggtactagtcagttattttgtggaaattcccttcatttgagttctgctgaagtgtcttcataattagattcaacttacatgtttctggcagaaattccacagaagtcatgctatgtcctcagctcatctatcaggcatatgatgtccatttgtctcactagagcatcattcactttgatgacttggataagattatgttggccagctttcttccatttacaagttactacctagctctttgcaattaagaagtattttgggagaggtaatttcagattttgcaaatatgccgttattccccacactcacccactagttttaatatctatttaataattctttcttaaacccattatttttctgatgattgtcaaatcatgcttttctaattatgtacgagatggctttctaatctaggaagagtgtttccttctctctcttttattattcatttatttatattagcattgactcactaattattattttactcaatggcttattatttaatttggagctcaaaatatcccagatttagccacttgaggcggctcccatatccttttgacttgccatgatcattctttaagccctgccttaccttctgtcacaaaaagatgttcagatgtaaattgatagcccttaggcatgataaagcaatgtccattaatgaaatacttgggatgcaatcaagtctaatgatggagattcagcccatgaaatccagaggtttggggttaattttacctcattcctcactgtgtaatgtcagtcccatcttaaatttcattaagcctcatattagttcacagttttgggggactttggggtagaatgcaataggatcatgcttaattaacattgtgtctgacacatggttgaaccaaaattcaaatacattctgagcatcaacaagaagagtaattggaaataaaataagaattactatccatccttaatgtacattcatactcaaggaacactctttgccattctaggcaccagaccttaacagagagatcacagatcttgctaaggtgaaaatagagtacttgtgtatatgatatataaaaagatgggtacaaatatgca

SEQ ID NO: 38566 - DNA, 1652 bp, Homo sapiens
tgcacatatccttagaatagacgtctcacttctaggctattacatagaaagtaactcagacatatgtagagatataaagtagatttaactctttaagaaatgtaactttttcatttcattttaatattttgacctaagttcaaacttacagaggagtttcaagaataatacaaagaattcacccaggtagaccaaatgttaatccgtttgcctgtgctcttttgctctttctctgtctacaccaaattatttttctgaaccaattaaaaataaactgaaaacatgattttccttcaccctttagatacattagggagtttcctaaaaacaagaatatcttctcacttaatcagactataattaccaaaatcaggaaattaatattggtactacatcactatctaagctactaacctatgcaaattttgtcaattgtccaatcttaatctgtgtagtataagtaggtgccatctcagacactgcacagtaatgtcatgcgtctttatctcctttaatctggaagatttctctctttttcaggacatttcacacctttgaagggtactagtcagttattttgtggaaattcccttcatttgagttctgctgaagtgtcttcataattagattcaacttacatgtttctggcagaaattccacagaagtcatgctatgtcctcagctcatctatcaggcatatgatgtccatttgtctcactagagcatcattcactttgatgacttggataagattatgttggccagctttcttccatttacaagttactacctagctctttgcaattaagaagtattttgggagaggtaatttcagattttgcaaatatgccgttattccccacactcacccactagttttaatatctatttaataattctttcttaaacccattatttttctgatgattgtcaaatcatgcttttctaattatgtacgagatggctttctaatctaggaagagtgtttccttctctctcttttattattcatttatttatattagcattgactcactaattattattttactcaatggcttattatttaatttggagctcaaaatatcccagatttagccacttgaggcrgctcccatatccttttgacttgccatgatcattctttaagccctgccttaccttctgtcacaaaaagatgttcagatgtaaattgatagcccttaggcatgataaagcaatgtccattaatgaaatacttgggatgcaatcaagtctaatgatggagattcagcccatgaaatccagaggtttggggttaattttacctcattcctcactgtgtaatgtcagtcccatcttaaatttcattaagcctcatattagttcacagttttgggggactttggggtagaatgcaataggatcatgcttaattaacattgtgtctgacacatggttgaaccaaaattcaaatacattctgagcatcaacaagaagagtaattggaaataaaataagaattactatccatccttaatgtacattcatactcaaggaacactctttgccattctaggcaccagaccttaacagagagatcacagatcttgctaaggtgaaaatagagtacttgtgtatatgatatataaaaagatgggtacaaatatgca

SEQ ID NO: 38567 - DNA, 1652 bp, Homo sapiens
tgcacatatccttagaatagacgtctcacttctaggctattacatagaaagtaactcagacatatgtagagatataaagtagatttaactctttaagaaatgtaactttttcatttcattttaatattttgacctaagttcaaacttacagaggagtttcaagaataatacaaagaattcacccaggtagaccaaatgttaatccgtttgcctgtgctcttttgctctttctctgtctacaccaaattatttttctgaaccaattaaaaataaactgaaaacatgattttccttcaccctttagatacattagggagtttcctaaaaacaagaatatcttctcacttaatcagactataattaccaaaatcaggaaattaatattggtactacatcactatctaagctactaacctatgcaaattttgtcaattgtccaatcttaatctgtgtagtataagtaggtgccatctcagacactgcacagtaatgtcatgcgtctttatctcctttaatctggaagatttctctctttttcaggacatttcacacctttgaagggtactagtcagttattttgtggaaattcccttcatttgagttctgctgaagtgtcttcataattagattcaacttacatgtttctggcagaaattccacagaagtcatgctatgtcctcagctcatctatcaggcatatgatgtccatttgtctcactagagcatcattcactttgatgacttggataagattatgttggccagctttcttccatttacaagttactacctagctctttgcaattaagaagtattttgggagaggtaatttcagattttgcaaatatgccgttattccccacactcacccactagttttaatatctatttaataattctttcttaaacccattatttttctgatgattgtcaaatcatgcttttctaattatgtacgagatggctttctaatctaggaagagtgtttccttctctctcttttattattcatttatttatattagcattgactcactaattattattttactcaatggcttattatttaatttggagctcaaaatatcccagatttagccacttgaggcggctcccatatccttttgacttgccatratcattctttaagccctgccttaccttctgtcacaaaaagatgttcagatgtaaattgatagcccttaggcatgataaagcaatgtccattaatgaaatacttgggatgcaatcaagtctaatgatggagattcagcccatgaaatccagaggtttggggttaattttacctcattcctcactgtgtaatgtcagtcccatcttaaatttcattaagcctcatattagttcacagttttgggggactttggggtagaatgcaataggatcatgcttaattaacattgtgtctgacacatggttgaaccaaaattcaaatacattctgagcatcaacaagaagagtaattggaaataaaataagaattactatccatccttaatgtacattcatactcaaggaacactctttgccattctaggcaccagaccttaacagagagatcacagatcttgctaaggtgaaaatagagtacttgtgtatatgatatataaaaagatgggtacaaatatgca

SEQ ID NO: 38568 - DNA, 1652 bp, Homo sapiens
tgcacatatccttagaatagacgtctcacttctaggctattacatagaaagtaactcagacatatgtagagatataaagtagatttaactctttaagaaatgtaactttttcatttcattttaatattttgacctaagttcaaacttacagaggagtttcaagaataatacaaagaattcacccaggtagaccaaatgttaatccgtttgcctgtgctcttttgctctttctctgtctacaccaaattatttttctgaaccaattaaaaataaactgaaaacatgattttccttcaccctttagatacattagggagtttcctaaaaacaagaatatcttctcacttaatcagactataattaccaaaatcaggaaattaatattggtactacatcactatctaagctactaacctatgcaaattttgtcaattgtccaatcttaatctgtgtagtataagtaggtgccatctcagacactgcacagtaatgtcatgcgtctttatctcctttaatctggaagatttctctctttttcaggacatttcacacctttgaagggtactagtcagttattttgtggaaattcccttcatttgagttctgctgaagtgtcttcataattagattcaacttacatgtttctggcagaaattccacagaagtcatgctatgtcctcagctcatctatcaggcatatgatgtccatttgtctcactagagcatcattcactttgatgacttggataagattatgttggccagctttcttccatttacaagttactacctagctctttgcaattaagaagtattttgggagaggtaatttcagattttgcaaatatgccgttattccccacactcacccactagttttaatatctatttaataattctttcttaaacccattatttttctgatgattgtcaaatcatgcttttctaattatgtacgagatggctttctaatctaggaagagtgtttccttctctctcttttattattcatttatttatattagcattgactcactaattattattttactcaatggcttattatttaatttggagctcaaaatatcccagatttagccacttgaggcggctcccatatccttttgacttgccatgatcattctttaagccctgccttaccttctgtcacaaaaagatgttcagatgtaaattgatagcccttaggcatgataaagcaatgtccattaatgaaatacttgggatgcaatcaagtctaatgatggagattcagcccatgaaatccagaggtttggggttaattttacctcattcctcactgtgtaatgtcagtcccatcttaaatttcattaagcctcatattagttcacagttttgggggactttggggtagaatgcaataggatcatgcttaattaacattgtgtctgacacatggttgawccaaaattcaaatacattctgagcatcaacaagaagagtaattggaaataaaataagaattactatccatccttaatgtacattcatactcaaggaacactctttgccattctaggcaccagaccttaacagagagatcacagatcttgctaaggtgaaaatagagtacttgtgtatatgatatataaaaagatgggtacaaatatgca

SEQ ID NO: 38569 - DNA, 1652 bp, Homo sapiens
tgcacatatccttagaatagacgtctcacttctaggctattacatagaaagtaactcagacatatgtagagatataaagtagatttaactctttaagaaatgtaactttttcatttcattttaatattttgacctaagttcaaacttacagaggagtttcaagaataatacaaagaattcacccaggtagaccaaatgttaatccgtttgcctgtgctcttttgctctttctctgtctacaccaaattatttttctgaaccaattaaaaataaactgaaaacatgattttccttcaccctttagatacattagggagtttcctaaaaacaagaatatcttctcacttaatcagactataattaccaaaatcaggaaattaatattggtactacatcactatctaagctactaacctatgcaaattttgtcaattgtccaatcttaatctgtgtagtataagtaggtgccatctcagacactgcacagtaatgtcatgcgtctttatctcctttaatctggaagatttctctctttttcaggacatttcacacctttgaagggtactagtcagttattttgtggaaattcccttcatttgagttctgctgaagtgtcttcataattagattcaacttacatgtttctggcagaaattccacagaagtcatgctatgtcctcagctcatctatcaggcatatgatgtccatttgtctcactagagcatcattcactttgatgacttggataagattatgttggccagctttcttccatttacaagttactacctagctctttgcaattaagaagtattttgggagaggtaatttcagattttgcaaatatgccgttattccccacactcacccactagttttaatatctatttaataattctttcttaaacccattatttttctgatgattgtcaaatcatgcttttctaattatgtacgagatggctttctaatctaggaagagtgtttccttctctctcttttattattcatttatttatattagcattgactcactaattattattttactcaatggcttattatttaatttggagctcaaaatatcccagatttagccacttgaggcggctcccatatccttttgacttgccatgatcattctttaagccctgccttaccttctgtcacaaaaagatgttcagatgtaaattgatagcccttaggcatgataaagcaatgtccattaatgaaatacttgggatgcaatcaagtctaatgatggagattcagcccatgaaatccagaggtttggggttaattttacctcattcctcactgtgtaatgtcagtcccatcttaaatttcattaagcctcatattagttcacagttttgggggactttggggtagaatgcaataggatcatgcttaattaacattgtgtctgacacatggttgaaccaaaattcaaatacattctgagcatcaacaagaagagtaattggaaatmaaataagaattactatccatccttaatgtacattcatactcaaggaacactctttgccattctaggcaccagaccttaacagagagatcacagatcttgctaaggtgaaaatagagtacttgtgtatatgatatataaaaagatgggtacaaatatgca

SEQ ID NO: 38570 - DNA, 1454 bp, Homo sapiens
agatgcatatttcaggatgcatgtttcaggactgaaggacttactcccagctgctgggagtgccactagtgtcagctggcagcactccccaggaactactctcccctaaagagagttgctttccccacctgccctgaggtagcctgcagccaatgccagatcaatgaggggttataaagtccaacctccttgccccaactgaccacaactctgcaggctgatccagtttagagcctactgtgaagttagcttatgcctttattgacaccgaatcttagaccacattttccctttgccaatccttcttccttccatgcccccacaggtgttgatcccatgattatcactaaaaaataaccctgtgtctcagaggctgctttcccagaaatccaacttacaacagccatcttgttaaagcaaagtcagtccctttgttgatattgttaatagtcccttgttgttatcgtttacgtttttgtaagctacgtttaactgaaagaagaaaaactagggacttgcaattttcccttattaacttgatagctaggagtcatttttgactacttacctaagatctcatacaaatacaaagtaaaataatctcaagactctcccctctcacttttttttttcaggccagatactaagaggaggaagaaaatggacaaagacaaacatacagaaaggaccaatgctatggatattatgaacagcaacctcaatttctgtcatgactacaaggaatggacagcattaataaaatgtaaccttgtcattatttaatgacaacattaagaatctatcaacatgatttaacagatctatatgttaaaggagaaaaagatatgtggatgctatcaatagtagctgaaaagcattttcagaaatctgtaagtagaggaaatgtattcatatgtttctatgttctagaatagatattttgactagacaaaagttgaaatcttgtgtcttatgtttttatttaaatgatagactcaatacgtaagtagtcacaagacatatgatattgtctggatctgtgtctctgctcaratctcatgttgaattggaatccccagcgttggaggtagggcctgctgggaagtgattgaatcattggggtggatccttcataaatattttagcaccatccctttggtgctgttctcgtgatagagttctcacaagatctggttgtttaaaagtgtgtggcacctccccatcctctgtctctggtcatgtaagatgtatctgcttcccctttgcttccaccatgatcaaaagtttcctgaggcccccctggaagctgagtagctgcggccatgcttcctgtagtctgtggaactgtgaaacaattaaaactttttcctttataaattacccagtctcagatatttctttataggggggcaagaatgaacaaatacaacacatgaaagagaagggtggaaatg

SEQ ID NO: 38571 - DNA, 1454 bp, Homo sapiens
agatgcatatttcaggatgcatgtttcaggactgaaggacttactcccagctgctgggagtgccactagtgtcagctggcagcactccccaggaactactctcccctaaagagagttgctttccccacctgccctgaggtagcctgcagccaatgccagatcaatgaggggttataaagtccaacctccttgccccaactgaccacaactctgcaggctgatccagtttagagcctactgtgaagttagcttatgcctttattgacaccgaatcttagaccacattttccctttgccaatccttcttccttccatgcccccacaggtgttgatcccatgattatcactaaaaaataaccctgtgtctcagaggctgctttcccagaaatccaacttacaacagccatcttgttaaagcaaagtcagtccctttgttgatattgttaatagtcccttgttgttatcgtttacgtttttgtaagctacgtttaactgaaagaagaaaaactagggacttgcaattttcccttattaacttgatagctaggagtcatttttgactacttacctaagatctcatacaaatacaaagtaaaataatctcaagactctcccctctcacttttttttttcaggccagatactaagaggaggaagaaaatggacaaagacaaacatacagaaaggaccaatgctatggatattatgaacagcaacctcaatttctgtcatgactacaaggaatggacagcattaataaaatgtaaccttgtcattatttaatgacaacattaagaatctatcaacatgatttaacagatctatatgttaaaggagaaaaagatatgtggatgctatcaatagtagctgaaaagcattttcagaaatctgtaagtagaggaaatgtattcatatgtttctatgttctagaatagatattttgactagacaaaagttgaaatcttgtgtcttatgtttttatttaaatgatagactcaatacgtaagtagtcacaagacatatgatattgtctggatctgtgtctctgctcaaatctcatgttgaattggaatccccagcgttggaggtagggcctgctgggaagtgattgaatcattggggtggatccttcataaatattttagcaccatccctttggtgctgttctcgtgatagagttctcacaagatctggttgtttaaaagtgtgtggcacctccccmtcctctgtctctggtcatgtaagatgtatctgcttcccctttgcttccaccatgatcaaaagtttcctgaggcccccctggaagctgagtagctgcggccatgcttcctgtagtctgtggaactgtgaaacaattaaaactttttcctttataaattacccagtctcagatatttctttataggggggcaagaatgaacaaatacaacacatgaaagagaagggtggaaatg

SEQ ID NO: 38572 - DNA, 1454 bp, Homo sapiens
agatgcatatttcaggatgcatgtttcaggactgaaggacttactcccagctgctgggagtgccactagtgtcagctggcagcactccccaggaactactctcccctaaagagagttgctttccccacctgccctgaggtagcctgcagccaatgccagatcaatgaggggttataaagtccaacctccttgccccaactgaccacaactctgcaggctgatccagtttagagcctactgtgaagttagcttatgcctttattgacaccgaatcttagaccacattttccctttgccaatccttcttccttccatgcccccacaggtgttgatcccatgattatcactaaaaaataaccctgtgtctcagaggctgctttcccagaaatccaacttacaacagccatcttgttaaagcaaagtcagtccctttgttgatattgttaatagtcccttgttgttatcgtttacgtttttgtaagctacgtttaactgaaagaagaaaaactagggacttgcaattttcccttattaacttgatagctaggagtcatttttgactacttacctaagatctcatacaaatacaaagtaaaataatctcaagactctcccctctcacttttttttttcaggccagatactaagaggaggaagaaaatggacaaagacaaacatacagaaaggaccaatgctatggatattatgaacagcaacctcaatttctgtcatgactacaaggaatggacagcattaataaaatgtaaccttgtcattatttaatgacaacattaagaatctatcaacatgatttaacagatctatatgttaaaggagaaaaagatatgtggatgctatcaatagtagctgaaaagcattttcagaaatctgtaagtagaggaaatgtattcatatgtttctatgttctagaatagatattttgactagacaaaagttgaaatcttgtgtcttatgtttttatttaaatgatagactcaatacgtaagtagtcacaagacatatgatattgtctggatctgtgtctctgctcaaatctcatgttgaattggaatccccagcgttggaggtagggcctgctgggaagtgattgaatcattggggtggatccttcataaatattttagcaccatccctttggtgctgttctcgtgatagagttctcacaagatctggttgtttaaaagtgtgtggcacctccccatcctctgtctctggtcatgtaagatgtatctgcttcccctttgcttccaccatgatcaaaagtttcctgaggcccccctggaagctgagtagctgcggccatgcttcctgtagtctgtggaactgtgaaacaattaaaactttttyctttataaattacccagtctcagatatttctttataggggggcaagaatgaacaaatacaacacatgaaagagaagggtggaaatg

SEQ ID NO: 38573 - DNA, 688 bp, Homo sapiens
aataagaaaattgtatttcttggagtttccaccctctcttgggttcaaacttgagcaactcattccaaaatatgtaaccaccagggcagacacaaagcaagatatcactgakttactttgttaactatcttttgtaatgtataacagctatttcattatgtttaatatcatcacactatattttatatattataaaacaattttaagacaaagattatactggtgaactattttacaggaattggagttttttttctgaccaaatatctgtacggtattttcatccaatttgacaaaagagttcttatccagaagaaaatattttatgactgaagaaaacagatataatgtacatagatgaaatttcaccagatgatatgaaaaccagtaaataattggctagcatatatagaaactatttttcaaatgaagaaaaatgtcttttaatattttggcatccaactacatgtactcatcattgccatgctcttcatccatggatgggtgttatttctttaggcacaattccaatgaacatgatatagtagtacagaaagtagtgagggaagcctgataaatatagatatttgtagatggatttagtatttatggaaaaatttctttttgaataatggatttgagatctcttttaattttcttattgggttataatttacatgtaataaaa

SEQ ID NO: 38574 - DNA, 688 bp, Homo sapiens
aataagaaaattgtatttcttggagtttccaccctctcttgggttcaaacttgagcaactcattccaaaatatgtaaccaccagggcagacacaaagcaagatatcactgagttactttgttaactatcttttgtaatgtataacagctatttcattatgtttaatatcatcacactatattttatatattataaaacaattttaagacaaagattatactggtgaactattttacaggaattggagttttttttctgaccaaatatctgtacggtattttcatccaatttgacaaaagagttcttatccagaagaaaatattttatgactgaagaaaacagatataatgtacatagatgaaatttcaccagatgatatgaaaaccagtaaataattggctagcatatatagaaactatttttcaaatgaagaaaaatgtcttttaatattttggcatccaactrcatgtactcatcattgccatgctcttcatccatggatgggtgttatttctttaggcacaattccaatgaacatgatatagtagtacagaaagtagtgagggaagcctgataaatatagatatttgtagatggatttagtatttatggaaaaatttctttttgaataatggatttgagatctcttttaattttcttattgggttataatttacatgtaataaaa

SEQ ID NO: 38575 - DNA, 688 bp, Homo sapiens
aataagaaaattgtatttcttggagtttccaccctctcttgggttcaaacttgagcaactcattccaaaatatgtaaccaccagggcagacacaaagcaagatatcactgagttactttgttaactatcttttgtaatgtataacagctatttcattatgtttaatatcatcacactatattttatatattataaaacaattttaagacaaagattatactggtgaactattttacaggaattggagttttttttctgaccaaatatctgtacggtattttcatccaatttgacaaaagagttcttatccagaagaaaatattttatgactgaagaaaacagatataatgtacatagatgaaatttcaccagatgatatgaaaaccagtaaataattggctagcatatatagaaactatttttcaaatgaagaaaaatgtcttttaatattttggcatccaactacatgtactcatcattgccatgctcttcatccatggatgggtgttatttctttaggcacaattccaatgaacatgatatagtagtacagaaagtagtgagggaagcctgataaatatagatatttgtagatggatttagtatttatkgaaaaatttctttttgaataatggatttgagatctcttttaattttcttattgggttataatttacatgtaataaaa

SEQ ID NO: 38576 - DNA, 540 bp, Homo sapiens
ctccttgaatggagacgcctactctatgaacccagatgaacatattccacccctttgttgcacacatttctctctccttggcatggctttgtccgtttcatgtgcttcctcccaatttttccttacttttcacgtattttacatatacctatccttctgtgattggtgctggccgaatctttagttgcataatgtgtaatgtcacttcagcccctgattagttgcaggccaagayttcacctctacctccaattggttcttttcagtactgtgtccctttctgagtggtgctttctccaagatgtcccttggagtcaacgcactcctcccacttcaaagtccataaaaaccctgaacttagccctgcagccaacaaccctcttttgggtctcctctgcttgctgagaacttttctgttgcttaataatctgactctgccttactcactctctggtgtccacgtcccttattcttcctggtcatgagacaagaacccagagctcactggtggtgggggtaaaagagttgtaacactcccca

SEQ ID NO: 38577 - DNA, 540 bp, Homo sapiens
ctccttgaatggagacgcctactctatgaacccagatgaacatattccacccctttgttgcacacatttctctctccttggcatggctttgtccgtttcatgtgcttcctcccaatttttccttacttttcacgtattttacatatacctatccttctgtgattggtgctggccgaatctttagttgcataatgtgtaatgtcacttcagcccctgattagttgcaggccaagacttcacctctacctccaattggttcttttcagtactgtgtccctttctgagtggtgctttctccaagatgtcccttggagtcaacgcactcctcccacttcaaagtccataaaaaccctgaacytagccctgcagccaacaaccctcttttgggtctcctctgcttgctgagaacttttctgttgcttaataatctgactctgccttactcactctctggtgtccacgtcccttattcttcctggtcatgagacaagaacccagagctcactggtggtgggggtaaaagagttgtaacactcccca

SEQ ID NO: 38578 - DNA, 603 bp, Homo sapiens
cccatctcagaaaaaaaaaagttacagaatgcagtttaagggccaggcgcagtggctcacgcctataatcctagcattttgggaggccaaggcagatggatttcttgaggtcaggagttcaagaccagcctggctaacatggtgaaaccccatctctactaaaaatacagaaaattagccaggtgtggtgatgcatgcctgtagtcccaggtactcaggaggctgaggcaggagaatcacttgaacccaagaggtggacgttacagtgggccgagatcgcaccactgtactccagactgggtgacagaacaagactccatctcaaaaaaaaaagaaaaagaatgcaatttaagatttctttgtggatttagtttatccttagtgtatttccccctagtgatatacagcaaaatgctgtattttaaaatcacctaaaataattatttctggtgtagttgtgccactaacttgttagttttcaatttttaaggacraatatttatataatttttatatattatatatatttttatttatataatttacatataatttttacatatatatataacactttgttttttttttttgagacagagtctc

SEQ ID NO: 38579 - DNA, 1478 bp, Homo sapiens
gcatttcaatacaaatactaaaattggatacacttgatctgtatttagatttcaatttacaattgaaagagcagattgttctaaacatacttaaaagtttttcaatacctgaattaagtattaggttttaaaatttaaattaattaaaattaaataaaatcttaaaattttcttgcattagctacacttcaagtgctcaagagttatgtagctatcggctactgtattggacaatataacattaagtaactgttataatgcttctcaaatattccaaattattggtaatttttgtctcctttgtcagtgtttttttaaaagatttattgacatctctcctactattattatatctataagaccttacattctgaaattgtgtgtgtgtttcaccccctgtttatttttttcctctttctgggactcctgttatagggagccatgttcttaactattactttccgtctcaatctcttcatcttgctgagtccttcctgatttgttcttccactgaatccaccctactattcagtccctcaattatgctctttattccaacaattaaagtctgtttgtggctgtgtgttcttgttttgtttttcctgatctgtttgagaatatttattaagcttcctttaattcatgccctgcctgaactcccctaccatctcatctagtgtgtgtggctcagttattgggctggccctgaccctttcatatcctcctgagcccacatgcatgtggaaacaccggctgccttggctggtctgacatccctgggagaaggagcaaaggcccaggtgcaggccttgcctgcctcgtggtgaggatgagcctgggggatgacatcggggtgcgtggcttccatgtttattgtgggctggacctcccctgagtgacccaccctctgtgccaggtgacagaggagctctggagagctcccagagccctactctttttctacagctgcctgccttaaaatcatccccaccttgcttargtgggagctcgggaggagagtgctttagggctgccagagtaccagctggttcaacaccgggggactgatgctttgctgaggtgatggggaagctcttattttcttgagggaagttcagggaaggaaaagcacataactccacaaccccagccagcctcccttttggtacctggccctcctgaccctaggctatcatttcccagattctttttcgagaatcagcaaccttctaccttccatctgtggctcaccacatttgggtttaataaaagaatccaacatctccattttgttagttcatcttgccaggaaaagcgaacctcataaagtgccattttaagaatgaaatcatgtcttttgcagcagcatgaatggagctggagaccattattctgagttaaataactcagaaacaggaaatcaaatactgcatgtcctcacttgtaagtgggagctaaacaatgggcccacatggaca

SEQ ID NO: 38580 - DNA, 810 bp, Homo sapiens
ttatgaaaatgtcagttctaaatatcacttgacagatgtttttcccaggcttttattgggacggacatcaggccaactttctcccacagacaaggtcttctgtggtggggtaagtccsctgcagacacatgcctgccaatcatttttaacacaacaatctccattttccccaagttccttcaaataaggactgaacatttactgcatttgtgttaacgttttccctttttcactgatcgggttggccaagccctttttgtcgcttttattttagttttggggtacatgtgcaggtttgatatataggtaaattacctgtcatgggggtttggtgtacagattatttcatcacccaggtaatcagcatagtacctgatagggagttttttttttttcaccctcctcccaccctccaccctcaagtaggacccaggttatgttgttcccttctttgtgtccatatgtactcagtgtttagttccttcttatacttgagaacatgcagtatttgattttctgttcctctgttagtttgtttaggataatagcttccagctccatccatgttgctgcaaaggttatgatcttgttctttttatggctatgtagtatttcctggtgtacatttaccacgtttctttatccagtctaccatttatgggcatttaggttgattccatgtctttgctattgtgaatagtgctacaatgaacatatgcatacatgtgtctttatggtagaatgatttatattcctttaggtgtatacccaataaggggatttctgagttgaatggtaattctgttttaa

SEQ ID NO: 38581 - DNA, 625 bp, Homo sapiens
taaaaaattcttttcatagaatactttttcacactaaagattcccacagtgggaaaataacaatttattacttatagttttatgtttgtggacagattgttttagaacaagtaaaacacacttaagaattaagtctcaatttggaatttgtartattttgatgcatctacaaggacgacctagtccttaagtggaacttctgtatattcagaagctctttaagcttttcttcacaggatttagaaattcataatgtgagaaatcggcatttcctaattttaaactttccctagtatatgtagtcatcagtagctggtatctaccaaacaaagagggaagtttttgaaaattaaacccggctaattttctgcaaagtttttattcatgaattaacagtatttccctttgtccatttttcccagggcaaatatagaagcagtttggtcaggtactggcagtaataaagctggattctctttaagagattgatgaggtcgagcgcggtggttcacgcctataatcccagcactctgggaggccgaggcaggcggatcacttgaggccaggagttaagagaccggcctggccaacatggtggaacctcgtctctactaaaaatgcaaaa

SEQ ID NO: 38582 - DNA, 1311 bp, Homo sapiens
ttagagtagatttgaacacctgctgtggcatgtggagctgcccctttgctacctgacttaccttctctcaagagtctcacaactcttccaaggcctgtctgaattgtctatttctaggtaatgtgatcaagctggagaaacagaagtcagatctggggaggcagctaaagactctgactgagcagatacaggggagatgtggcaggagccttcaccaccatcttcctataaattacccctccaaagtcgggatcactctctctatcctgctttatcttggaacattttcatgacatgggccctgaaactgtaagttcttgccagcaggaagtaaagtcaaagcagtcatttgttgtcaggatggagagctctcataacctgaaggtgtaatttccaccagtgccttttcctagcagcaagacaccgtgaaagcagggcctcactaagcactgctggctgttctttcttggtgactgatacaggggctctggagtctctgctcaggcaccagccctggcaggcatctgacacagggttgggctctggcattttcagaaggagaccatggaatggaggtggttccagccagatctgcagactgcggtggcagtggccaacaatgtcaagtgagaagcccagcaggagctgggcactgtgaagaggaaactgctgaactgctggaggaggaggagaaggaggaggagaatgcctggctgcagaaggagctgggggatgtgcagggctgcggcagggtggtttccagcagagctgcccctccgtgagtctagtgggcacccaggccatgcttgcttttcacttaattactgtgcgtggggctccctggtggggatgagacgcttcatgtctctctgtgcaaggctctgctgtttcttttctgggatcagtctgcattaccagtgctaccgcatcactaggaacattccatccagtgcccagtttctgccatgcttagcagcataaggggctgctaagctcctcacttacatatgaagggcsagttctagccaagtatcctgctaggcttaaagaatagaagtcctgtctaggatgctccttgaatcttagtatttattagtgcagggagtgcacactgataaatacgagcccaccaccttgcacaggtcactcccatgcagtgggagaagctggaatcactcctgaggggaggagccaccaaataaggacacattcctcccggcccagggatgtgtctacttatttgacaacacccatgggctacttcaacaggccttgacataactcactttattttaaaaagagtggaaaaca

SEQ ID NO: 38583 - DNA, 1311 bp, Homo sapiens
ttagagtagatttgaacacctgctgtggcatgtggagctgcccctttgctacctgacttaccttctctcaagagtctcacaactcttccaaggcctgtctgaattgtctatttctaggtaatgtgatcaagctggagaaacagaagtcagatctggggaggcagctaaagactctgactgagcagatacaggggagatgtggcaggagccttcaccaccatcttcctataaattacccctccaaagtcgggatcactctctctatcctgctttatcttggaacattttcatgacatgggccctgaaactgtaagttcttgccagcaggaagtaaagtcaaagcagtcatttgttgtcaggatggagagctctcataacctgaaggtgtaatttccaccagtgccttttcctagcagcaagacaccgtgaaagcagggcctcactaagcactgctggctgttctttcttggtgactgatacaggggctctggagtctctgctcaggcaccagccctggcaggcatctgacacagggttgggctctggcattttcagaaggagaccatggaatggaggtggttccagccagatctgcagactgcggtggcagtggccaacaatgtcaagtgagaagcccagcaggagctgggcactgtgaagaggaaactgctgaactgctggaggaggaggagaaggaggaggagaatgcctggctgcagaaggagctgggggatgtgcagggctgcggcagggtggtttccagcagagctgcccctccgtgagtctagtgggcacccaggccatgcttgcttttcacttaattactgtgcgtggggctccctggtggggatgagacgcttcatgtctctctgtgcaaggctctgctgtttcttttctgggatcagtctgcattaccagtgctaccgcatcactaggaacattccatccagtgcccagtttctgccatgcttagcagcataaggggctgctaagctcctcacttacatatgaagggcgagttctagccaagtatcctgctaggcttaaagaatagaagtcctgtctaggatgctccttgaatcttagtatttattagtgcagggagtgcacactgataaatacgarcccaccaccttgcacaggtcactcccatgcagtgggagaagctggaatcactcctgaggggaggagccaccaaataaggacacattcctcccggcccagggatgtgtctacttatttgacaacacccatgggctacttcaacaggccttgacataactcactttattttaaaaagagtggaaaaca

SEQ ID NO: 38584 - DNA, 1311 bp, Homo sapiens
ttagagtagatttgaacacctgctgtggcatgtggagctgcccctttgctacctgacttaccttctctcaagagtctcacaactcttccaaggcctgtctgaattgtctatttctaggtaatgtgatcaagctggagaaacagaagtcagatctggggaggcagctaaagactctgactgagcagatacaggggagatgtggcaggagccttcaccaccatcttcctataaattacccctccaaagtcgggatcactctctctatcctgctttatcttggaacattttcatgacatgggccctgaaactgtaagttcttgccagcaggaagtaaagtcaaagcagtcatttgttgtcaggatggagagctctcataacctgaaggtgtaatttccaccagtgccttttcctagcagcaagacaccgtgaaagcagggcctcactaagcactgctggctgttctttcttggtgactgatacaggggctctggagtctctgctcaggcaccagccctggcaggcatctgacacagggttgggctctggcattttcagaaggagaccatggaatggaggtggttccagccagatctgcagactgcggtggcagtggccaacaatgtcaagtgagaagcccagcaggagctgggcactgtgaagaggaaactgctgaactgctggaggaggaggagaaggaggaggagaatgcctggctgcagaaggagctgggggatgtgcagggctgcggcagggtggtttccagcagagctgcccctccgtgagtctagtgggcacccaggccatgcttgcttttcacttaattactgtgcgtggggctccctggtggggatgagacgcttcatgtctctctgtgcaaggctctgctgtttcttttctgggatcagtctgcattaccagtgctaccgcatcactaggaacattccatccagtgcccagtttctgccatgcttagcagcataaggggctgctaagctcctcacttacatatgaagggcgagttctagccaagtatcctgctaggcttaaagaatagaagtcctgtctaggatgctccttgaatcttagtatttattagtgcagggagtgcacactgataaatacgagcccaccaccttgcacaggtcactcccatgcagtgggagaagctggaatcactcctgaggggaggagccaccaaataaggacacattcctcccggcccagggatgtgyctacttatttgacaacacccatgggctacttcaacaggccttgacataactcactttattttaaaaagagtggaaaaca

SEQ ID NO: 38585 - DNA, 682 bp, Homo sapiens
atggcaatctaataaacgactgatgtggtttggctgtgtccccacccaaatctcatcttgaattgtagttcccataatccccacatgtcgtggaaggacccagtgggaggtaattaaatcatgggggcagttacccccacgctgttctagtgatagtgagtgagttctcacaagatctgatggttctataaggggcttttcccccttcgctgggcacttctccttcctaccaccaggtgaagaaggatgtgtttgcctccccttctgctatgattgtaagtttcttgaggcttccccagccctgtgcaactgtgagttgattaaacctctttcctttataaatcacccggtcccgggcagtactttatagcagcatgagaacagactaatacaaggaccaagatgactttttatttatttattttattttattattttattttttattttatttattttacgkttctggcataattgagtatacaactagaagaaaataaagctagctcctatggcagacaccgctagttccctacccaattttcattcagaatcttgattttgtttagggcagcaatgtgcccagacaaatctatttaccaccctagactctcttgaaaataagagtggccatgtcccacttggtgagacacaattagaagtctaatgggtacagtttcca

SEQ ID NO: 38586 - DNA, 682 bp, Homo sapiens
atggcaatctaataaacgactgatgtggtttggctgtgtccccacccaaatctcatcttgaattgtagttcccataatccccacatgtcgtggaaggacccagtgggaggtaattaaatcatgggggcagttacccccacgctgttctagtgatagtgagtgagttctcacaagatctgatggttctataaggggcttttcccccttcgctgggcacttctccttcctaccaccaggtgaagaaggatgtgtttgcctccccttctgctatgattgtaagtttcttgaggcttccccagccctgtgcaactgtgagttgattaaacctctttcctttataaatcacccggtcccgggcagtactttatagcagcatgagaacagactaatacaaggaccaagatgactttttatttatttattttattttattattttattttttattttatttattttacgtttctggcataattgagtatacaactagaagaaaataaagctagctcctatgrcagacaccgctagttccctacccaattttcattcagaatcttgattttgtttagggcagcaatgtgcccagacaaatctatttaccaccctagactctcttgaaaataagagtggccatgtcccacttggtgagacacaattagaagtctaatgggtacagtttcca

SEQ ID NO: 38587 - DNA, 1308 bp, Homo sapiens
tagccatttaaagttgccttaaggtgaaattttagaaactcatcctattttttcccaatgatttatatgactagggcttgagtaacttatggaaaaattccttgggtttaattttcttttctttttttytgagatgaggtctcactctgtcaccaggctggagtgcaatggcacgatcttggctcactgcaacctctgcctcctgggttcaagcaattcttctgcctcagcctcccaagtagctgggactacaggcaagcgccaccacgcacagctaatttttgtgtttttagtagagacggggtttcaccacattggccaggctggtctcaaacttctgacctcaggtgatccacccgcctgggtctcccaaagtgttgggattacaggcatgagccactgggcttggcacaggtctttcttttttcttttctttttttttttttttttttttttttttgagacggagtctcagtctgtatcccaggctggagtgcagtggtgcgatctcagctcactgcaacctccgcctcccaggttcaagcaattctcctgcctcagcctcctaagtagctgggaatataggcacgtgccaccacgcctgggtaattttttgtatttttagtagagatggggtttcaccgtgttagccaggatggtctcgatctcctgaccttgtgatctgcctgcctcggcctctcaaagtgctgggattacaggtgtgagccactatgtccggccactaaaagttgttaacgatgatgatattacttagtatcatcaaagtaactcatataacatgaagggacttgccaaatcagatcgaatagcgtgttctaactcttttaatcctttttactactttttctttaacagtaaccaatttttttttttcttacaaagaaggtaaggtgaaggaattcagcattaggagaaataatttattccaggatttagataacaaatttaatatatcatggaagttacaatatatcccattacttcctatttttttcaaaagttatttcctatttctctcaaaattatttgtctaaaatctatggagagaaacagttaataattttttagttgcttgttatacttgcttagaaaaacctgatttacagtgcttttgtttgcatacataaaagttgttagcagcccaattccaagagaaattcctgttagaaaataagttccagttaattgaaagaaaaaaaaatcaaagaggattatataagctaacaatgacacaaattaaaagtaaacatatacaataataaaagctaacaaaaaataagtaactga

SEQ ID NO: 38588 - DNA, 1308 bp, Homo sapiens
tagccatttaaagttgccttaaggtgaaattttagaaactcatcctattttttcccaatgatttatatgactagggcttgagtaacttatggaaaaattccttgggtttaattttcttttctttttttttgagatgaggtctcactctgtcaccaggctggagtgcaatggcacgatcttggctcactgcaacctctgcctcctgggttcaagcaattcttctgcctcagcctcccaagtagctgggactacaggcaagcgccaccacgcacagctaatttttgtgtttttagtagagacggggtttcaccacattggccaggctggtctcaaacttctgacctcaggtgatccacccgcctgggtctcccaaagtgttgggattacaggcatgagccactgggcttggcacaggtctttcttttttcttttctttttttttttttttttttttttttttgagacggagtctcagtctgtatcccaggctggagtgcagtggtgcgatctcagctcactgcaacctccgcctcccaggttcaagcaattctcctgcctcagcctcctaagtagctgggaatataggcacgtgccaccacgcctgggtaattttttgtatttttagtagagatggggtttcaccgtgttagccaggatggtctcgatctcctgaccttgtgatctgcctgcctcggcctctcaaagtgctgggattacaggtgtgagccactatgtccggccactaaaagttgttaacgatgatgatattacttagtatcatcaaagtaactcatataacatgaagggacttgccaaatcagatcgaatagcgtgttctaactcttttaatcctttttactactttttctttaacagtaaccaatttttttttttcttacaaagaaggtaaggtgaaggaattcagcattaggagaaataatttrttccaggatttagataacaaatttaatatatcatggaagttacaatatatcccattacttcctatttttttcaaaagttatttcctatttctctcaaaattatttgtctaaaatctatggagagaaacagttaataattttttagttgcttgttatacttgcttagaaaaacctgatttacagtgcttttgtttgcatacataaaagttgttagcagcccaattccaagagaaattcctgttagaaaataagttccagttaattgaaagaaaaaaaaatcaaagaggattatataagctaacaatgacacaaattaaaagtaaacatatacaataataaaagctaacaaaaaataagtaactga

SEQ ID NO: 38589 - DNA, 1308 bp, Homo sapiens
tagccatttaaagttgccttaaggtgaaattttagaaactcatcctattttttcccaatgatttatatgactagggcttgagtaacttatggaaaaattccttgggtttaattttcttttctttttttttgagatgaggtctcactctgtcaccaggctggagtgcaatggcacgatcttggctcactgcaacctctgcctcctgggttcaagcaattcttctgcctcagcctcccaagtagctgggactacaggcaagcgccaccacgcacagctaatttttgtgtttttagtagagacggggtttcaccacattggccaggctggtctcaaacttctgacctcaggtgatccacccgcctgggtctcccaaagtgttgggattacaggcatgagccactgggcttggcacaggtctttcttttttcttttctttttttttttttttttttttttttttgagacggagtctcagtctgtatcccaggctggagtgcagtggtgcgatctcagctcactgcaacctccgcctcccaggttcaagcaattctcctgcctcagcctcctaagtagctgggaatataggcacgtgccaccacgcctgggtaattttttgtatttttagtagagatggggtttcaccgtgttagccaggatggtctcgatctcctgaccttgtgatctgcctgcctcggcctctcaaagtgctgggattacaggtgtgagccactatgtccggccactaaaagttgttaacgatgatgatattacttagtatcatcaaagtaactcatataacatgaagggacttgccaaatcagatcgaatagcgtgttctaactcttttaatcctttttactactttttctttaacagtaaccaatttttttttttcttacaaagaaggtaaggtgaaggaattcagcattaggagaaataatttattccaggatttagataacaaatttaatatatcatggaagttacaatatatcccattacttcctatttttttcaaaagttatttcctatttctctcraaattatttgtctaaaatctatggagagaaacagttaataattttttagttgcttgttatacttgcttagaaaaacctgatttacagtgcttttgtttgcatacataaaagttgttagcagcccaattccaagagaaattcctgttagaaaataagttccagttaattgaaagaaaaaaaaatcaaagaggattatataagctaacaatgacacaaattaaaagtaaacatatacaataataaaagctaacaaaaaataagtaactga

SEQ ID NO: 38590 - DNA, 657 bp, Homo sapiens
tgcataggaggtggagaatctgttcgtaattctagcagcaatattgcaccttggagacattcggtttactgccctgaatgaggggaactccgccttcgtttctgacctccagctcctggaacaaggtcagtggaacatgaccttctgacattaaccacattgatgtgcaattttgtagatctaccagtagatggcgacatagtacagaaaagccagttggcttaaaccctttcctctatagtagaattcagtgagggggggaaattgtctactttgttttttcttaaaatctgttgtggaaatgagtagcaagatgtacttttatgttctcattctgtgcaccacattagcaacactgattctttagcacatacttgttgtttatttatattgttctaagtacccttcaccccactacccagtgtattttgggagcatgttattagctcaacattttaaacagaatgtaattaattccctttcaaagatcttgccaamaatctctctctttgaagttgcctcgttagtcgctcccagatttttaaaaaataccttaaaaccacagattgtcaggaaacaacatatcttcacctatatcaaagagatttaaccaggtacctggaaaaaaacaattccataccatctgtgaggacaggg

SEQ ID NO: 38591 - DNA, 957 bp, Homo sapiens
ctgggaagagtacaatggtccagctccttctctgcagtgttgttctctgatgttgcaagtcatttartctttcccaatgttcttgtaatgagatggttcagataggtggtttttgatagcactcttgaccattgtgtcatgattttctactcaactgtgaactcctcaagggcagagactaaatatcagtcaaggttacttgcctagcatctatcattctccttacacggagtggacccatatgtggttgttgaatggatatttgactaacagaggctgtggtggatggatagaagagaggtgggggacttattgcatgcaaacaaattgacattgaggtgtaggacacaagtctagcaaggactggttttttccaggcactttagatttttagttattcccttatcccgcagggcagttgcactcacatctcaccctggtccaagcttaggaggtcttagagaggcaagttcctggctgtattagaccaatgttagacctggtgtatattagataagtgagctgcactcttcaccatttctctggttaagcatgaagggttgtaacgaagggagatgggtgacaccaagtacagttgccattggcagagggatgcccaggctgggacaagaggaaaaagaagaggggattctgtcatccatctgtgtctgggataaagaaggcagagaggagagttacttaggctggcagtgctaaggagagggatttctgaatggctctaggtgagcttgtggtttgggtggctgtagagagagagttgtcttgaccttgagctgtggcaggagctggttatctgtggtgggcaaataggattcagcaactgagtggccatgacccaccttgcttttcatgatttgaaatagctgtctcctgttctgtagccaggaaactcagtcttctatactctactcaaagtgttgcctcctccatgatgca

SEQ ID NO: 38592 - DNA, 667 bp, Homo sapiens
ttgagggctaggacacaagtctagtgggggctggttttttccaggcattttaattttttacttattccctcatcctgcagggcagctgcactcacatatgaccctagtcgagacttaggaggtcttaggggggcaagttccaggctgtattagaccaatgttagacctgttgcatattagatgaatgagctgcaaagcaatgtaccatttctctttgatatagatgacatttctcacctactggaactatctaggtagyattttgtccaatctaaggagctgtgtgactttaggcaagtcacttaacctctctgagttcagaacttttatcttggaagttaggaaagggatccctgtgaaattgttatgaggatcaaatagataagaaacagctctgaaaagtcaaagtgttctagagtgactaagattctataacaaccattaagattagcagagatggactatggcaaacactagaaggaagctaagaactctataaggccttaaataggctgtactttctttcaccacttgtgctggcctgcccattcttctctactgctttttctctgtgtagtgtgtgtatgtttcattttacacacacacacacacacacacgagttgtccagatccatctgtacctacatagattgccccaaacagagat

SEQ ID NO: 38593 - DNA, 1172 bp, Homo sapiens
gaataaataaatgaataatataccctttattctatgaaactgggattccaactctttaattattatgctgagcaagtggctttaatatgggaggattatatgagagccagccctaaaccttttctctagttccagattgagtgcagattctttatgaaagttaagttaatcaacattgaaccttaaatgaagcttaaataatctttgacttgccacagctcagttccctccttctcttcccttcccttcccttcccttcccgttccttcctccytccctccctttctctctctctctctctcttcctttctttcctctctcgctctctttcccttatttttttttttctgagacagagtcttgctctgtcaccaggctggagtgcagtggcgtgatctcggctcactgcaacctccgcctcctgggttcgagtgattcccctgcctcagtctcctgagtagctgggactacaggtgtgcaccaccatacctggctaattttttgtattttagtagagtcagggtttcaccatgttggccaggatggtcttgatctcctgacctcatgatctgcccgcctcagcttctcaaagtgctgggattacaggtgtgagccaccgcgcctgacctttttttgttttttgtttgtttgagataaagttttgttctgtctccgagactggagtacagtggcaggatcatatttcactgcagccttgatctcctgggctcaagaaatcctcctgcctcagtctcctgagtagctaggatacaagggcacaccaccacagctggctaatccatagctccttaaccctcacctctcacccctgtaataactgtttaaccagcctagctccgagcccattttttccccatttctccttctttcacatgtacaatgcctttagtttgtgtacctaaattgctgttaaacagactctttcctattctccagcagaattctggctatcccagtgttcctccagcatggcctttactcgttctgattcaatgaggaatgggaaagttacacttttcattctttccagatatttctggaccattgtgtcacgagttacttttatgtattaattctcccaatatttcatctgttaaaatgcaaattatccttttataccgtgctatccataaatatctgggtgaacttat

SEQ ID NO: 38594 - DNA, 1172 bp, Homo sapiens
gaataaataaatgaataatataccctttattctatgaaactgggattccaactctttaattattatgctgagcaagtggctttaatatgggaggattatatgagagccagccctaaaccttttctctagttccagattgagtgcagattctttatgaaagttaagttaatcaacattgaaccttaaatgaagcttaaataatctttgacttgccacagctcagttccctccttctcttcccttcccttcccttcccttcccgttccttcctccttccctccctttctctctctctctctctcttcctttctttcctctctcgctctctttcccttatttttttttttctgagacagagtcttgctctgtcaccaggctggagtgcagtggcgtgatctcggctcactgcaacctccgcctcctgggttcgagtgattcccctgcctcagtctcctgagtagctgggactacaggtgtgcaccaccatacctggctaattttttgtattttagtagagtcagggtttcaccatgttggccaggatggtcttgatctcctgacctcatgatctgcccgcctcagcttctcaaagtgctgggattacaggtgtgagccaccgcgcctgacctttttttgttttttgtttgtttgagataaagttttgttctgtctccgagactggagtacagtggcaggatcatatttcactgcagccttgatctcctgggctcaagaaatcctcctgcctcagtctcctgagtagctaggatacaagggcacaccaccacagctggctaatccatagctmcttaaccctcacctctcacccctgtaataactgtttaaccagcctagctccgagcccattttttccccatttctccttctttcacatgtacaatgcctttagtttgtgtacctaaattgctgttaaacagactctttcctattctccagcagaattctggctatcccagtgttcctccagcatggcctttactcgttctgattcaatgaggaatgggaaagttacacttttcattctttccagatatttctggaccattgtgtcacgagttacttttatgtattaattctcccaatatttcatctgttaaaatgcaaattatccttttataccgtgctatccataaatatctgggtgaacttat

SEQ ID NO: 38595 - DNA, 642 bp, Homo sapiens
tcagttgttatgtatctttagttctccttaatcttagacatttcctgtatctttctattttattttgtgatattgaaatttatgaagtgtacacatgtggtgtcttgtagggtgttttacctgatgtttccttatgattagatgagggctatgtgctttttagccagacacatataaccctcagttttatagatcctcgtaataattattgctatcattttacagatgaggacttggagatacagggaagcaacttccccaaggtcatgtaacttatgattggcagaaccaagattcacaccttgggcatcattccagagtccagggtcttgacccttcaccgttgctctttcacatgggcaggagactgaagttattgtataattaatatgtaattattatgtgccagaacctctctgtggctttcacatgtggtgtagtatttaatctgaataccaccccacaagaaggtaatatccactccactataatggagtggatatttatatttatagtggagtgrctattaccttcttgtgggatggtatttaagatttagagccaaggccccaccccaggccaatcaaataaaaatctctgggctgagttccaatatctatgcctcgcttgattttttaagca

SEQ ID NO: 38596 - DNA, 703 bp, Homo sapiens
ggattacaagtgtgagccatcatacccagccaaaggaagacaattctataacaattaataagggggaagaatctacctaacactcacctcattattcttggtgaaaagaagcctgaagcaaaggcatctctgtctatcaccattgcattcagagagggtatatatcacaggagttcagaacacaggctctagattcagagtcttggatttgaatcctggacttaacaacacttactagctgtgggacctaatctgtgcctctgtaatgctgtctctctgcaaggaattgcttatcccactgcatagctggcttgatctgctagtgataacaggaatgcaatggaaaggacaattaccttagaccctgcagggatgtccaagggagagaatacagtcatttgtttttagtttctgtttctggttgggccagtaaagccccttcctcatccctctttttcacttattactagagacagaaactaaaaatcatggcttcagactctaaaagcctaaacaaaacaaamcagaacaacaacaacaacaaaataaggcaggttggacaagcttgctggtattacagggatgaaggttaccccataacacccaagacatagttctctgagaaaattttaaaaatgaaatcatgcccagacacaaatttctcagaaaaaaaattgatataggaattacagccaaatatcca

SEQ ID NO: 38597 - DNA, 1070 bp, Homo sapiens
ctggaggaggattatatgggcactggggcaaggcagggacatcttggcagcctccccaccgcacgcttttcttgcaagtcctttgaacggcacctgctccttagctgctgcctggcractttgagggtttcagtgagatggggtgagtgcttcccagccagcaaagtgcgttgacagtggctggcttgccccccctcccccccgccccggctctggaagcttctccccctgggtcttccagtctcatgtctggacacagacaggagaggtgaggaggagcagcaggggtggcccgggcagttcctgtgacctggaggcctggcaagttgttctgacggccaggcccatccttggggaggcctctgaggacgcctggaaccccaggcccgccctgccttgttttctggtcctggcctgggggggtcgtggtctcgctggtgcagcctcctccgggcaggccccgcctctgctcccttcccctcactccatctgattcggccccgtttccttgtccactccacgttcttctgagcgtgtctctgggacatggttaaggttaagaagcggcctctgaacgagggagaatgtactgaaattgcctaagtgaacttcaaacacaggaagaagcgctcagtcgatgttcatggtgagaacgagggttgatcttttgaatgagtcacgggtttgagagagacctaagaaccattcgatctgaaaactagattcactttgaacaaaatatctcaggtgctaaatactccagttagtgtggggaaatgtctctgagaacgaaagctctgactgaccggagcctgctacagtggatctgaaagatgctcacgaataattctcgctgcagagcttagtaaaccaacaatacaaacgattttctgtaacgacctcccgtaaagcagccactcccctcacagcgctgagcaggcgtaaccgccagggtcctcccccttctgaagccgcggcttccttgcaggccggtgtccggcgttgatcctttaactgaccatgggcagttttagttcacgagtgtggattcttgggatacggtcgggggc

SEQ ID NO: 38598 - DNA, 572 bp, Homo sapiens
ggcttagaacaatgaagtctggcctctgaggaagaaattgattgcaccctgaagattaaccgggagccacacggggtgcgggggtctgcacgatgtgtccagatgaacaggtaccgaggggcctcctcacggtagcctttgttaggtgcgttccaagcccaaggtaatagatcaggckcctggagaagatgggaagcagcatagatctgcactcagagcagtcaggtaagaaggatgaggcctcccttacctaaccggagagacctgcctgacacccggaaaggccgcatggccaggtgagaactggttaggtcaggagaatggggttggctctgcacaagggttattgccaaaaagcaaaggggtaaagaagtgggcctggaaggggcggtcttctaactatcggtatcatggttattgttttttataacagtactattgaaattaaatcaggaaaatatttgacttgatagcgttctgccctcaaaacagatgtttttcccttgaaatgtatgttatagacatgactgatttatgagcattcaccatgtggccagccctatgctgagcac

SEQ ID NO: 38599 - DNA, 594 bp, Homo sapiens
ccaggctggagagcagtggcgcgatctcagcgcaatcttggctcaagctccgcctcccaggttcacgccattctccttcctcagcctcccgagtagctgggactacaggcgcccgccaccacgcctggctaattttttttgtatttttagtagagacggggtttcaccgtgttagccaggatggtctcgatttcctgacctcgtgatccrcccgtctcggcctcccaaagtgctgggattacaggcgtgagccaccgcgcccggccgaatatttgcatttatttctacccaatacctagaaacagtactacctttgtccattttaaagtaaaagtctcagttatggcttttcagttcccaaatgtgtgaattcagtccccagtccctcatgggggctgattgatgctatagattctcaaaggaagctttttctccaccttcaattaaagccagtgctgaaaccaacaagtatctctcctttatgcctctggggagcgtaatcggaaaaccagaatttccacgcatcctctgtggttttatgctttatccatcgaggagggtaggctgactcgatgcctttcactctactcattc

SEQ ID NO: 38600 - DNA, 594 bp, Homo sapiens
ccaggctggagagcagtggcgcgatctcagcgcaatcttggctcaagctccgcctcccaggttcacgccattctccttcctcagcctcccgagtagctgggactacaggcgcccgccaccacgcctggctaattttttttgtatttttagtagagacggggtttcaccgtgttagccaggatggtctcgatttcctgacctcgtgatccgcccgtctcggcctcccaaagtgctgggattacaggcgtgagccaccgcgccmggccgaatatttgcatttatttctacccaatacctagaaacagtactacctttgtccattttaaagtaaaagtctcagttatggcttttcagttcccaaatgtgtgaattcagtccccagtccctcatgggggctgattgatgctatagattctcaaaggaagctttttctccaccttcaattaaagccagtgctgaaaccaacaagtatctctcctttatgcctctggggagcgtaatcggaaaaccagaatttccacgcatcctctgtggttttatgctttatccatcgaggagggtaggctgactcgatgcctttcactctactcattc

SEQ ID NO: 38601 - DNA, 594 bp, Homo sapiens
ccaggctggagagcagtggcgcgatctcagcgcaatcttggctcaagctccgcctcccaggttcacgccattctccttcctcagcctcccgagtagctgggactacaggcgcccgccaccacgcctggctaattttttttgtatttttagtagagacggggtttcaccgtgttagccaggatggtctcgatttcctgacctcgtgatccgcccgtctcggcctcccaaagtgctgggattacaggcgtgagccaccgcgcccggccgaatatttgcatttatttctacccaatacctagaaacagtactacctttgtccattttaaagtaaaagtctcagttatggcttttcagttcccaaatgtgtgaattcagtccccagtccctcatgggggctgattgatgctatagattctcaaaggaagctttttctccaccttcaattaaagccagtgctgaaaccaacaagtatctctcctttatgcctctggggagcgtaatckgaaaaccagaatttccacgcatcctctgtggttttatgctttatccatcgaggagggtaggctgactcgatgcctttcactctactcattc

SEQ ID NO: 38602 - DNA, 1203 bp, Homo sapiens
  misc_feature (1)...(1203): n = A,T,C or G
tccattagaaatgaaaaagaatttataacaggtaaaaggggaaaggaaaggaaacatgagcatcttatgtttgtactgctcaccatagcagcagctaaaagcagaggtaaactaagaggtgaacttggggtccagaggtgtctgccacagtcaaccgtatgatnnnnnnnnnnnnnnnnnnnnnnnnnnnnnnnnnnnnnnnnnnnnnnnnnnnnnnnnnnnnnnnnnnnnnnnnnnnnnnnnnnnnnnnnnnnnnnnnnnnnatgtttttccattaactactttctaagctataaaatcaatgcttttcatcacctggcccacaacgtccttcctagatttatgtttcacgatggctttacatgagccctcttcctagtcatgcctgtttacacactgtcctccaccagactgcagatttctcagccacttcctctgccacttccacttgcaaattccacttgccacttcccctacctggagctctctcatctccatgccccctctgctcacctgaaacctgtgcagcctttgagactctggctcaaatctcttgtggtaagtagaataatagccccctatgtatgttgacatcctaattcttgtgactatgttaccttacatggcaaagggactttgcagatgtgattaagattaagaatcttgagatgggagattatcttgggttatttggataagcccaatgtaatcacactaatccttataagatagaggcaggagggtcagagtcggaagaaggagatgtgatgatgaaagccaaaatcaaagtgatgcaaagccacaagccaaggaatacaaattgcctctaaaaacctaaaaaagacaagaaawcagattatctcccagaacctccagaagaagcatggccctgctcactcatgttatacttctgcttttggaacttggaactgtaaaagaataaatctgtattgtttcgggtcactgatggtaatttattgcagcagtaataggaaaatcatacatctgtctttgactgtagaatctttcctaattgtttctctaagctcccatggcaagagttttccttactgctttattttggctcataacagttatttgccattttatgaacagtaaaaaatatagccctgactcccttgtgactaggggacacaaatgggagattgaaaggtggcttttggcaatgtctctggcagcaat

SEQ ID NO: 38603 - DNA, 548 bp, Homo sapiens
agatactacaacaaactacaaaatcctagtggcttaacacaacaaaggctggtgtgggttttccaccacttggtgactcaaggattcagccaccctttgtattgtgatacaccgtatgaatatgtatamcccaagcatggcgtggcagagaaaagaagggtgaaggagttccactagagtgtaagtgttctcatccagagttggtgctaagaactttacatatataacccgtctcattcaattgtcaaaatactcctacaacatatgaaaatattcctattttacagagaagaaattgaggcacagaagtgaattaacttgctcaagggcacaaagacagaaaatgacagctggtatctgaaaccatagctgtttcatttcaatgttcatgttctttccactatgctaaaaatataatctctaagactaatgtcctggactgtacttttaatgtatgcgcaatcctggattctgccacaaaaattttacaaaaatgctaatgatcatttatgtagagcttcatatgggtcaggcattgtttttagtca

SEQ ID NO: 38604 - DNA, 543 bp, Homo sapiens
attagtacattagtattattacttttttggcaaaatgtttccaaatactttaaaatgtgcatgccttttaatttarcaatattgtttctacgtttccttttcattttgtaacaaaaggggtcttgctctgtcgtcaggctggagtacactggtgcaatcataccatcctgcagcctccaacacctgggctcaattgatcctcccgcagcagcctccaaagtagctggagccaccaagcccagtaggaatttttgttaaaaaaagaattcaacaagttctcaaagacacatgtataaggatattctatgtattattatttacaatagtgaaatactgggaacaacttaaatgttcattaatagagggatgaatattacagaacaccatgaagccgttaaaaatgttggtgggcaactggatttgctaatatccagaacacatgtccacaacgtagttttaaatgagaaaagattaataaatataggattgagaaaataagcatgggggtaattatgtctagatgataggattaagggtgaacct

SEQ ID NO: 38605 - DNA, 602 bp, Homo sapiens
ctggctaaatttactatttgagtactaatgatcttgccatctcagttatcagtagcctcaaagcttgaagtttccttttttttttctgagacagggtctcaccctgtctctcaggctggagagcagtggcgcaatctcaactcactgcaaactctgtcccctgggttcaagtgatcctcccacctcagcctcccaagtagctgggaatgtgggtgccctctcggctaattgctgtatttttggtagagaaggggttttgccacgttctccaggctggtctcaaactcctggcccaggctcccaaagtgttgggattacaggtgtgagccaccatgcctagccaagctttgcaatttttatggaactgggtcattgaaatgtttgaaacttggagatttcttcttgtttcaatcccaaycaatttccaatctctatgagagttttaaaagagtctctattagtggcagtgaaattcacttaattatcaccaattgatttcaatagactacctggtggaaacctctcataagaactttaaaaacttttcctaaaagaaacttttaaaatatgatagcagaaactcacagaaccttcaattaaca

SEQ ID NO: 38606 - DNA, 546 bp, Homo sapiens
tcaataggcaggcccaaggagagaaaaatggggaagggccagttggtggagcaatcagaacacatgcaacattcattaagttcgccataagggtgcagktcatggcaccctaaaaagacttacaataggaacatcagagattatagatcaccataacagttataataataatgaaaaagcttgaaatattgtgagaagtatcgaaatgtgaaagagacaagacttgagcatatgttgttagaaaaatgatgctgacagacttgctttactcagggttttcacaaatatacaatttgtaaaaaatacagtatttgcaaaatgcaataaaggcacaatgaaacagggtacgtctgtattagcatttttcataaagcctaggcagtgtctagtaacacatttgactttaatgttctcatgaagaaaagttccacaggtctttatgacgtggctttctactgttaggcactttggtattaaaattatcctcaaaatccagaaaaaaatggcctacgtactgccatgaaaacttcaaacaacttcagacac

SEQ ID NO: 38607 - DNA, 614 bp, Homo sapiens
caatgttttcctgttcctcagctatcacagtacttgagttttctcgtggctagcataggctagagyctgaaagacttgggttcaaataacgtatctgtataactttgaatatattaattatttttgaacttcattttccttgtctataaaatagaaatggtgatgtctacctcctggtagtttttgactaatgagttctattaaagcactccacattttgacacacagttaagttaaaatgaattaagttagcaattaatctgaatcagttttatttttaaactcaaagagaaaagtagttatgttctcattttcttaccaaaaaggatttaaaagtttataaaaacatatagcatgaaatgaattaaaaattagaaaaacaaggtaaaagaatatgataaaaaagaaaattggagccaggagaaaagttaatagaacacaactgcatgctgttgacagttgttcctcagatgcatactagtgacacttaacaaaaagctactatatagtttaataagaagcattcttgacaccaccactacctcacactaaacataaagtttcaaagagctgtatcttatgaccctacacagactgattattatgctaaagag

SEQ ID NO: 38608 - DNA, 1219 bp, Homo sapiens
cattcaaccaaccttgactgaaaatatttggaaaaaaaattccacaaagttccaacaggcaaaacttgaatttgctacattctgaatactatgttgaatccacacaaataaaatgatgtgtaggcactgtagtaggtattataaataatctagaaatgacttaaagtatataggagactgtgtgtaggtcacatgcaaatactatatgccattttttataagagacttgaacatccctggattttgttatctgcaggggtcttgggaccaatcctccgtgtctactgagagatgactatcctttaagcaacaaaacacttattctagaaaaaatggcagcagtggcaacagagttattcaatctctccaaatcactgtctacaaagagaactaactagaagcaaaacccaaaaatccatagccaacactcacaacaaggtaacaagatatccccacaaaccccaaagtacaagctctgtgtattctcctttcctttcaaaatgctatcaattttataaacattccatataacaaaccaagacagcctagagtttttttttaatcctagttatagtaagttacaactaaataaggtattctcataggagttgagtagtgcaacatgtagaaagctaattatttccataagctggacattacacttctacacagcatgagaaactatgcctctgagaaagttccttaactttgctggtcacccacaagtggccacaatggtcttgatgttgttaccttagactcaggaaaaaaatgaactttctaagaacatttgaaacctaatatttttacaagtaaaaaaagttatgcaattgattaaagtcttttgtgaatcacaygtaaaacattaaaaatgattgtacactaagactgctacattttacttgtttttttaaaaacaaggtagtgtaattatcagtataaaataatacttgtttactaaaagaagcaatgccataacatgatatcagagaacactacttgcaataggtaatactactacttcccaactgtagtagttgtcattttcctctttttcctattagccacagccacactgagtgtttctcagtcaaacatatcaagagcattaccctggagagttagggtaaaggtctttggaatttactgtacgtgagatgggctcgttacagaattttaggcagaagcatagtacgatctcacttatattttaaaagga

SEQ ID NO: 38609 - DNA, 600 bp, Homo sapiens
agtagttattttccctattacagtaacagtgactaaactaacgtacaaaggaaataaggcaataaataaaaatatgtccctctgtccacaaagactattgagagacataaggtaagattctggtggatagaatcttccttctgttgtgtttttgtacctggtgtacagtctattctttcttttcttcccttcatttctttttccttctttcctttttcctttgttctctcctcctttcctcccttcttctttcttattgtgattttaaatgttcatttccattaggggccacaacaggactatttcataaagtaagatgtatatctgctatcacatttcttcagaaaccttccttttgtaccctgggtgcatattatacatttatttaagaaaatatagaatatgattttatgcatatattcatggatagctttactaaaaatacaaataataggagtaaaargtccatgtcacattggagataaaatgtttactcaggcaaaaaatatgcataaaagcagcaaaaatccaaatgccaaaacattattaaagtattggagcattgacaacttagtttcttaggaattgggctgcaactga

SEQ ID NO: 38610 - DNA, 605 bp, Homo sapiens
tgtattgatattacaggatcactagmagtatagatctagtagcacttaatttcaacaagatagttcatattttattctttagaggagatgaagaaatggtagtaggcctagatgaattcacagctgactgcacaagcttatctatactaagtttctatgtagaaattaagggagaaattctacattaatttaagatataaacagcagaaaactttcttagtaagaatgtgtacaccacccatttaatatataatctctcaagaaaagtctttaatgaaactaatctatgcttttaaactagtgtctaatcataatgattaatatcaagtaatcattaatatgaattgatctaatggtgtttcttaaatatagtaaacacaaacactagaaagcatatacttagaaataccagactcttttaccctaagagggtaaaaatgaaacatcactgctgaggtgagtgttcagagttggtaagacttgactcctccttttaagctaccaagcctgtttttttgttcctatctgatatgctcctgatctgtcttcagtgccaaaatctcccctgaaatgaccagtgatgggacaagatatattctcttctt

SEQ ID NO: 38611 - DNA, 605 bp, Homo sapiens
tgtattgatattacaggatcactagaagtatagatctagtagcacttaatttcaacaagatagttcatattttattctttagaggagatgaagaaatggtagtaggcctagatgaattcacagctgactgcacaagcttatctatactaagtttctatgtagaaattaagggagaaattctacattaatttaagatataaacagcagaaaactttcttagtaagaatgtgtacaccacccatttaatatataatctctcaagaaaagtctttaatgaaactaatctatgcttttaaactagtgtctaatcataatgattaatatcaagtaatcattaatawgaattgatctaatggtgtttcttaaatatagtaaacacaaacactagaaagcatatacttagaaataccagactcttttaccctaagagggtaaaaatgaaacatcactgctgaggtgagtgttcagagttggtaagacttgactcctccttttaagctaccaagcctgtttttttgttcctatctgatatgctcctgatctgtcttcagtgccaaaatctcccctgaaatgaccagtgatgggacaagatatattctcttctt

SEQ ID NO: 38612 - DNA, 605 bp, Homo sapiens
tgtattgatattacaggatcactagaagtatagatctagtagcacttaatttcaacaagatagttcatattttattctttagaggagatgaagaaatggtagtaggcctagatgaattcacagctgactgcacaagcttatctatactaagtttctatgtagaaattaagggagaaattctacattaatttaagatataaacagcagaaaactttcttagtaagaatgtgtacaccacccatttaatatataatctctcaagaaaagtctttaatgaaactaatctatgcttttaaactagtgtctaatcataatgattaatatcaagtaatcattaatatgaattgatctaatggtgtttcttaaatatagtaaacacaaacactagaaagcatatacttagaaataccagactcttttaccctaagagggtaaaaatgaaacatcactrctgaggtgagtgttcagagttggtaagacttgactcctccttttaagctaccaagcctgtttttttgttcctatctgatatgctcctgatctgtcttcagtgccaaaatctcccctgaaatgaccagtgatgggacaagatatattctcttctt

SEQ ID NO: 38613 - DNA, 605 bp, Homo sapiens
tgtattgatattacaggatcactagaagtatagatctagtagcacttaatttcaacaagatagttcatattttattctttagaggagatgaagaaatggtagtaggcctagatgaattcacagctgactgcacaagcttatctatactaagtttctatgtagaaattaagggagaaattctacattaatttaagatataaacagcagaaaactttcttagtaagaatgtgtacaccacccatttaatatataatctctcaagaaaagtctttaatgaaactaatctatgcttttaaactagtgtctaatcataatgattaatatcaagtaatcattaatatgaattgatctaatggtgtttcttaaatatagtaaacacaaacactagaaagcatatacttagaaataccagactcttttaccctaagagggtaaaaatgaaacatcactgctgaggtgagtgttcagagttggtaagacttgactcctccttttaagctaccaagcctgtttttttgttcctatctgatatgctcctgatctgtcttcagtgccaaaatctcccctgaaatgaccagygatgggacaagatatattctcttctt

SEQ ID NO: 38614 - DNA, 582 bp, Homo sapiens
tcctctaatttccttctgtccaaaatgaggagcgttcgccattctctactttacatttccttctttttgtgataatcacttctgagcttactcagtgtcacttcatgcacactgattccatgaaaaaagtgtggtcctattatactatatgccttaatgatttcttcttcaggctgaagatgtactctgtttagctgycactgaagataatattatttaaacttatgagctatctttattattttttcctggttatttgctagtatttttacatttcttgtaagttaagaaaaagaaatccttttaggttactgagaaatcaacaccttcttggccatagcttttcttattccaagcctggaaaaaacctcctgaccaccccacctctgggctatccattcttttctatactaggtgtctaatgatgaggccggtggttaattgttcctttctagtttgttttgagttataattttgaataacttctgctcttcttttaaaatggaatagacatttaatctgtcttgattgatagatccaatcaaaagcaggtcaatgatttcaatatttataaatatttat

SEQ ID NO: 38615 - DNA, 1104 bp, Homo sapiens
caggacaaagacccatttccaatggcaaatgtgacaaatggaggtttttrgtggcaaaacataggtacgggcaagaaaaaggctggctgtagatgaacgcctctgaaaaggctatgaaggaagttatccactttaaatacgtgagtgtaaaaaaaatcaaccaaacaaaacagaacgggagcatttagataattcactctcctaatctcatggtaaataaatagtgttaaaccatgtctattgccacaggagttctggttttacttattttacagcctgcctttccccctctgggtagtaccaggaggaaataaaatccactttctttttcactcttccactatggcggctttgtctctcttgggtatttgggcttctgtgtatttgcaaggcttatttttcaatagagcgggcagggtttacaaagtcgaggaatttccatctccagcgctgttaaatcacggctgaaatggctagatcatttgtttgttgtaaaagggggaaaaacacattggttattacagaagtggctgtttccagcccatctgaacaggaagactgcagcctctggcaatgactgaattcaggggactcaggacatcttggtgtcatttaattatctcaagacccaagccccttattctgctacattctgtgcttctccacgtggggacttcctctgggtcttggctaacgcacaggaatttgatgtttagaaagtcactttcctgtccttataaacagtcccaccataataacctggcttctggcaccagaaattcatttaaatttcgctcagcttgctttcacattaagatttaattagtaaactcattacaaaggcaggaaatctctgactttcccctaattctcttttaggcctcagccatgacccagcctgtccctctgtcttttagacatttgcagaaagttttctctaaacattgttatttatgtcactgtaagtccaagataaaatattgttcttcgcttttgaaaatagatggaagtaacctagtcacttagcatttagggtttcgagttctttatttagaaaatattcctcgttcgtatttttaaacttgctagactgagagtttgttt

SEQ ID NO: 38616 - DNA, 1104 bp, Homo sapiens
caggacaaagacccatttccaatggcaaatgtgacaaatggaggtttttggtggcaaaacataggtacgggcaagaaaaaggctggctgtagatgaacgcctctgaaaaggctatgaaggaagttatccactttaaatacgtgagtgtaaaaaaaatcaaccaaacaaaacagaacgggagcatttagataattcactctcctaatctcatggtaaataaatagtgttaaaccatgtctattgccacaggagttctggttttacttattttacagcctgcctttccccctctgggtagtaccaggaggaaataaaatccactttctttttcactcttccactatggcggctttgtctctcttgggtatttgggcttctgtgtatttgcaaggcttatttttcaatagagcgggcagggtttacaaagtcgaggaatttccatctccagcgctgttaaatcacggctgaaatggctagatcatttgtttgttgtaaaagggggaaaaacacattggttattacagaagtggctgtttccagcccatctgaacaggaagactgcagcctctggcaatgactgaattcaggggactcaggacatcttggtgtcatttaattatctcaagacccaagccccttattctgctacattctgtgcttctccacgtggggacttcctctgggtcttggctaacgcacaggaatttgatgtttagaaagtcactttcctgtccttataaacagtcccaccataataacctggcttctggcaccagaaattcatttaaatttcgctcagcttgctttcmcattaagatttaattagtaaactcattacaaaggcaggaaatctctgactttcccctaattctcttttaggcctcagccatgacccagcctgtccctctgtcttttagacatttgcagaaagttttctctaaacattgttatttatgtcactgtaagtccaagataaaatattgttcttcgcttttgaaaatagatggaagtaacctagtcacttagcatttagggtttcgagttctttatttagaaaatattcctcgttcgtatttttaaacttgctagactgagagtttgttt

SEQ ID NO: 38617 - DNA, 1104 bp, Homo sapiens
caggacaaagacccatttccaatggcaaatgtgacaaatggaggtttttggtggcaaaacataggtacgggcaagaaaaaggctggctgtagatgaacgcctctgaaaaggctatgaaggaagttatccactttaaatacgtgagtgtaaaaaaaatcaaccaaacaaaacagaacgggagcatttagataattcactctcctaatctcatggtaaataaatagtgttaaaccatgtctattgccacaggagttctggttttacttattttacagcctgcctttccccctctgggtagtaccaggaggaaataaaatccactttctttttcactcttccactatggcggctttgtctctcttgggtatttgggcttctgtgtatttgcaaggcttatttttcaatagagcgggcagggtttacaaagtcgaggaatttccatctccagcgctgttaaatcacggctgaaatggctagatcatttgtttgttgtaaaagggggaaaaacacattggttattacagaagtggctgtttccagcccatctgaacaggaagactgcagcctctggcaatgactgaattcaggggactcaggacatcttggtgtcatttaattatctcaagacccaagccccttattctgctacattctgtgcttctccacgtggggacttcctctgggtcttggctaacgcacaggaatttgatgtttagaaagtcactttcctgtccttataaacagtcccaccataataacctggcttctggcaccagaaattcatttaaatttcgctcagcttgctttcamattaagatttaattagtaaactcattacaaaggcaggaaatctctgactttcccctaattctcttttaggcctcagccatgacccagcctgtccctctgtcttttagacatttgcagaaagttttctctaaacattgttatttatgtcactgtaagtccaagataaaatattgttcttcgcttttgaaaatagatggaagtaacctagtcacttagcatttagggtttcgagttctttatttagaaaatattcctcgttcgtatttttaaacttgctagactgagagtttgttt

SEQ ID NO: 38618 - DNA, 902 bp, Homo sapiens
atagacagatacaaatgataaaccaaaaatcagggcacagcagctcacgcttgtaatcccagcactttgggaggccaaggcaggaggattgcttgagtccaggagtttgaaaccagcctgggaaacatagtgaaacctgtctctacaaaaaattagcctggtatggtggtgcatgyctgtaatcccagctatttgggagactgaggtgggaggatcacctgagactgggagatcaaggctgcagtgagctgtgattatgccaatgcactcttgcctgggtgacagagcaagatcctgtctcagagaaaaaaggagaaaaaaatcaggatcaagggaaagtcccaagtcaattcctgcttccaaggagcttataattaattgggaatccagtataactcttacacaaggggaaaaatatccatattcctaatggagcaatattcaaatacgtagaaatcaatgagatggaaatgaagcgcttcatttctgaagggacacagggcgaaagggataaatgtgtgttcacggggaaaacatcccaaacataaaatagcttgagtcgatatatttttgtcggtacatttggagaccaaaaggttctgactcagagtggaaaatgaataatttttgtatgagtgaggataagttacagccacataaccagatagggccctgagctgcagggagggcaggaagtaggttgtacactttgctcagcataaactcgtgcagaaacacagaaggatgtgcattaagcttttcttttccattttgttggttgctttcagtaatgttagatgaatcagtcatgccaacctttaaaagttagggagagaaagatttgaagagagaacggaggtacttaacagctccactgaagctcactggattagatgagcttc

SEQ ID NO: 38619 - DNA, 902 bp, Homo sapiens
atagacagatacaaatgataaaccaaaaatcagggcacagcagctcacgcttgtaatcccagcactttgggaggccaaggcaggaggattgcttgagtccaggagtttgaaaccagcctgggaaacatagtgaaacctgtctctacaaaaaattagcctggtatggtggtgcatgcctgtaatcccagctatttgggagactgaggtgggaggatcacctgagactgggagatcaaggctgcagtgagctgtgattatgccaatgcactcttgcctgggtgacagagcaagatcctgtctcagagaaaaaaggagaaaaaaatcaggatcaagggaaagtcccaagtcaattcctgcttccaaggagcttataattaattgggaatccagtataactcttacacaaggggaaaaatatccatattcctaatggagcaatattcaaatacgtagaaatcaatgagatggaaatgaagcgcttcatttctgaagggacacagggcgaaagggataaatgtgtgttcacggggaaaacatcccaaacataaaatagcttgagtcgatatatttttgtcggtacatttggagaccaaaaggttctgactcagagtggaaaatgaataatttttgtatgagtgaggataagttacagccacataaccagatagggccctgagctgcagggagggcaggaagtaggttgtacactttgctcagcataaactcgtgcagaaacacagaaggatktgcattaagcttttcttttccattttgttggttgctttcagtaatgttagatgaatcagtcatgccaacctttaaaagttagggagagaaagatttgaagagagaacggaggtacttaacagctccactgaagctcactggattagatgagcttc

SEQ ID NO: 38620 - DNA, 619 bp, Homo sapiens
taaatcagacttctaagaaagtgggctatgcattctttgtggtacctaggagggagggtagcctgctggctcctggaagcaccagtttctccccttggcagtgcattttgtagcagtctacacccaagaatgattcagaaactgcttgaagccatactcccagcttctccacagttacgaccatcacgggcacacgctgttctatagacctgaaatgaattgcccttcaggaacacttgatgcccgtacctcatccctttcctgactggtcttaggagccacactgctctctcccctgcaaaacgcaccccatgtcatccaccaagaacccctcagagtcttcacgcctgatcctgtgtgttaagcaaacctgctcctcctactctaggagcagtgggggtcaaggggaaagtgaatgaaggtcgccaagtgggtcagggagagggaatcttgttcacaggtaaaaccttaaaaaataggattttttaaaaaagcatatggaaactataccaccataacttctgtttccaactagaaatagacccctatttttgtgaggtkatgaaaaggtcagtgttttacactagacactctatacttcccttcttgattacatcaa

SEQ ID NO: 38621 - DNA, 1185 bp, Homo sapiens
tgcattaagagaaagattactcatgttgaattgattttgcctacctgttaaaaccctgaaacactaacttgcaatcaacagagcaagcactgctggctgtgctgattgtgtataaatgaacagccagaagtaaattcagtgttatacaaacaagccacagaaaacacgatcagttttggaaatgtaaaaaarttgtgtaagtttgtctcataagtaggggtagctcttttctggaggatgttggggttcatttcctcatcaagaatgttttaaacgctgaaaacaatcttgtttttatatatcgagtgacatgaaatacttgtcttaatagtgctaaaatgcaacggaattgttacacaacttgaggtagatctgagtttcatttccttcttattttaggtctggatattacacttagcaacatacagtaagcttgaaatctctctcattatattttatcatcaagcaatcagtacacagaacctgagggaaaatggtccaacaggacagtcctcctggctggatatccaccatttgcccctgcagaatattaccttctctccctttcctcctctgtcccaggagactgatctataatggttacatcaattggttggacccatagcaagcactgacaggagatgaaagggaggatggagtggctgggaatatttgtttcctgcacagtcacctaagctgatggcttctcttgacctacctatattcacagctttggtgggaagaccactctccacccatccctctctgtcactagattctgttaactactttctctccttgtgcctgcatgcctcagaagggtagtatcacctactgcttatcacctaatcccagggtgctgcactgtccttggggtttctcaacatttgccaacaccgtttttaaacaacccatttctaaacactctaagttgactgcacccttggttactttctgggaccctgactgctaaacctctgtgatagagtatcctcagattttcaaaggcatgtctgtggcacctcaagctgaatcaaaaagtcgtagatgctaataagactctctaaagtggagcaagcccatttggaggaaaagacagttactgcatctcctgggctggggtggaggagggattgaaagagacaatggagcagagcaggatgattgcacagaagatgagagatg

SEQ ID NO: 38622 - DNA, 578 bp, Homo sapiens
caaagttaccaaaattacagaaattgtttattatggtcatatatacagggtctgacttactagcctttaaatgcaaaagtagtggttgcttacactttgctgcagcattagcgcttacttggggggactgctgggtggcagagcccccaaagaacagcctctcccattgggagttctccaagatcattgtctttctcattttggagtttgtgtttcctacaggatctattctgacaaagctgtcctgtggcctcacaatcacgtctgtcagggtagcatggttgtccaggacaagtrtgtatatcagtggctcctggcaggtgatgattacataagcatcctgccagccacccgagtggaaacgatggtcccagcacttctgagagaagagaacatgacgggggtgcagcatgcggctggggtgcacaggctttctggcctggcagagatcttttccagtgaagtgatttttcacattgcaggaggaaacacgagaaaaggcttcttcatctgccagactcagggtgccttaaaacacaaagtgcttcaactgtgtttgagctttgagggggttgggg

SEQ ID NO: 38623 - DNA, 578 bp, Homo sapiens
caaagttaccaaaattacagaaattgtttattatggtcatatatacagggtctgacttactagcctttaaatgcaaaagtagtggttgcttacactttgctgcagcattagcgcttacttggggggactgctgggtggcagagcccccaaagaacagcctctcccattgggagttctccaagatcattgtctttctcattttggagtttgtgtttcctacaggatctattctgacaaagctgtcctgtggcctcacaatcacgtctgtcagggtagcatggttgtccaggacaagtgtgtatatcagtggctcctggcaggtgatgattacataagcatcctgycagccacccgagtggaaacgatggtcccagcacttctgagagaagagaacatgacgggggtgcagcatgcggctggggtgcacaggctttctggcctggcagagatcttttccagtgaagtgatttttcacattgcaggaggaaacacgagaaaaggcttcttcatctgccagactcagggtgccttaaaacacaaagtgcttcaactgtgtttgagctttgagggggttgggg

SEQ ID NO: 38624 - DNA, 578 bp, Homo sapiens
caaagttaccaaaattacagaaattgtttattatggtcatatatacagggtctgacttactagcctttaaatgcaaaagtagtggttgcttacactttgctgcagcattagcgcttacttggggggactgctgggtggcagagcccccaaagaacagcctctcccattgggagttctccaagatcattgtctttctcattttggagtttgtgtttcctacaggatctattctgacaaagctgtcctgtggcctcacaatcacgtctgtcagggtagcatggttgtccaggacaagtgtgtatatcagtggctcctggcaggtgatgattacataagcatcctgccagccacccgagtggaaacgatggtcccagcacttctgagagaagagaacatgacggggktgcagcatgcggctggggtgcacaggctttctggcctggcagagatcttttccagtgaagtgatttttcacattgcaggaggaaacacgagaaaaggcttcttcatctgccagactcagggtgccttaaaacacaaagtgcttcaactgtgtttgagctttgagggggttgggg

SEQ ID NO: 38625 - DNA, 589 bp, Homo sapiens
gattaaaactaagaaagtccaaggaaaagtgggaacagttaattactctaccatttattatcatcctgaagagagtaaatataataaaatgattaagaatataagccctagtgttagactacctggattcaaatcctgcatcctatctcatactggcaaagcaactagacaaattactcaacttttctgtgcttctgttgtcttatctataaaataggggaaataaaaatacctaaacactgaggattagatgaaatagtatatgtaaatacctaggtcaatacctagcacagagcactcaatcaataaattctcacctcatatgtattatttctattctttcccacagtttgcctctaaattatatgtggcttagtatttttattttctaattttgatatcaagttagaggattttggtatctttggagagtgacttcacaggataagaaagaaaagaaccctagcatcagtctctgcaagtgttctttctctgagacctaagctgctgagaagagtgcactgggctgtctttaagtctggctcatttattttgtggcactaggcatgtcartttccctctctgggtt

SEQ ID NO: 38626 - DNA, 455 bp, Homo sapiens
gcttctcaaccttctggagtcaggaggactgaatttggtactgcccaggaatattctatgggattggattgacttcaggcagttggctacctattctcgacccctttgccttcccttgattctcacttctttcattttctgcaccatctgaggttgctggttaagcagtttcaaaggagcgtttcaagttcttcccgttttctttctcggcagcagcctgggtcccgagtgacaacagaaacgtgctkccctctggtggccaccattgagcatagcgcctcagctgggacgcaggagtcactctttcagacacttgaagctgacgctaccgtgctaagtctccggcagctgaaacgcttcctcactttctgagtgccttgagttcagttagctgaacccttctctttcccccagggcctggagacctcctgacacactcggtgtgggtggggggg

SEQ ID NO: 38627 - DNA, 1024 bp, Homo sapiens
ctgtgaggtaaagtcaaggatggcttccctgggctcaagctggggaccagcagtgcctatagggcccttcccatggctgcttctgcttttatattttgttggctccctaaatccatgtcagccctaggtaaggttaaatccttctccatgctctggactttccagttctctagtggagatatgtgttcagagacagacttttccccctctcacactttgggaactcacagttttttgactgtctcacagagtttgcagtggcaagctgcttctctcacaggtacaatgattcttgaagaaacaatttgaaagcatttgcaaatggttgtagcagtccatgggggcaataacactaggtccttgtcaaagttgtgtatgtcttaaaactttttgtgcaattttgtacaatactaagaatgctatggctaattaaacaggaataactaataagagttgattaataataaacttttctgtttgttttatttttaactttcattttaaattaaggggtacatgtgcaggttttctatataggtaaacacttgtcatgagagtttgttgtacagagtatttcgtcacccaggtattattaataaatagtacccattagttatttttcctgattctytccctcctcccaccctccacccaccaataggacccagtgtctgttgttcccttctatgtgtctatgtgttctcatcattaatgaacatatggttaagcagaagagttgcacctctgattataagtctaagttctacacaattaccagctctgtcaccttaacaagccttacctggggtaaagtcagtgttcattatttagatgaaaattgtttcaactatttaatataaagtgatttcaaaaagtcagatttgtttttttctttacaatagacacgggtcaggaatggtacatctatgactgtaaggcttccaatattactgaggatagagtaaaagagtttttaaaagtcttatttaaaaaaaaaagtcttgtcatttaaatgatgaataat

SEQ ID NO: 38628 - DNA, 582 bp, Homo sapiens
gtttgtgctatcatataaaacatcaatttaaatcttatagttaccttaagaaattgtcagtaactcaattccatccatacattgattctatcaatcaatatcaaagaaaggaagagaaggctttataaaagataagtaaacatttataaatcagctaatgagcaaagaaatgcaataaaaagacacaaattagatcgaataagcactaagatttctgtaaccatgagactgtgagctcctcctcccaatctttacatttcatactctacattcttttgtcagtcatttatcttctttctcacaatgctgatagagaattccaatgtgaaatcaatcagcatttattgaatatcttccatgggtcagtcactgtgtttagtgcttctgcagttctaacctaaccacaacttattatgatattgcaattttcacctatcttcactttttcwttgaagaagcttacattcagagaggtggcttgtcttgctcacagaaaggtagaattcatcagaagacatattaataaatgtatatgagagaaatcagaggaacagtattattcccagtacactggtcccagcc

SEQ ID NO: 38629 - DNA, 1291 bp, Homo sapiens
  misc_feature (1)...(1291): n = A,T,C or G
cnnnnnnnnnnnnnnnnnnnnnnnnnnnnnnnnnnnnnnnnnnnnnnnnnnnnnnnnnnnnnnnnnnnnnnnnnnnnnnnnnnnnnnnnnnnnnnnnnnnncatagatatttaatcaaagttttgaaattccataatcagttaaaatatctggtagttatattgaaagttgcccttggctgtgggaagatgacttagtcaccattttcactgctttttacctgaacagttagggcccattactgggccctttagcttcaaagcagaaacttaaattaagtttttaactctatgctcaaatcccctcattgatatattgggacataatactaacctttaatggttttgctagcatgagtgataatgaatgtaaagaatctarctctttgatgggtgaggcatgtctcttctgtcaggtgactcatatcaggtagggccattatagctcctcttatgctagtcgaaggaagagccctcatccaaggggaaggcaaagtaaggacatattctgatgagaagtcccatttagtataagtgggaatggttatatcctacttggagctctctttggaacagtttcccaagtagactcaggtgtagatcactggataggaggagaagctgaagtagagagagagagagagagctatttcattaaaacaaaacaaaacaaaacctcttaagactaggaccaaacatgtcctcagaacagaagatgtcttaaaggtcaaggggtattgaccaccatttctcaacagtacatatccacacatctacagtcacatctatgtctccaggacaccagtttattggacactgtgaggccctcaattttactaaataggatatgggagtggagtccgtccagcagaacgagctttcagaagtgcttagtggcaaagtgtgataaaagcagcaaaactcagagctcctggagaggcatcatctagcagaagacactgggcacagaagaagaataaagaaaccacagacacacccagcaatcaaccagcagatactctgaattgcttgaggtcactggggctataccctgtcagcattccctagtaaaactttctggacacttataggctttttcttgggcttttgacctatattagcatataatgttacattgaaacttatattaaattaaacaacttttttttaatgacacttccctttaaaagtgaacaatgtaatggctttgggcttccaagctgtctttttcttttgctctagtttttaagtgcagtcaatatttttgaaaatgcctcagagcactgaatgca

SEQ ID NO: 38630 - DNA, 658 bp, Homo sapiens
gagcccaggacaacagcccttatatttagctctgggaagatggtctgcacgggagccaaaaggtatgaggaatcatccctccacccctaccagagaaacaatttagtatgtaaaacaaggaagcatagaattaatgtgctaaagcacatagtagaagcaaaatgcctttctttgctgaagactttattcaatgaaatgccacattttgggttaaaaacactcctataaatactgacttgggccaggcatggtggctcacatctgtaatcccagcactttgggaggcctaagcaggaggatcgcttgagcccaggagtttgagaccagcctgggcaacacagtgagactccatctctgttaaaaaaaaaaaaaaaaaaaaaaagagaaatctaaaaagtagctggatgtggtggtgcatgcctctagtcctagctacttgggaagctgaggtgggaggatcacctgagcccatgagtttgaggccgcaatgagctatgatcataccactgcagtccagtctgagtacagagcaagacctgtctctattamcaacataataaatactgacatatccccattttacagtttccctattaaaccgaggggacttaactgcgctgctacaacttgtttctaaggtgaattttttttaagttac

SEQ ID NO: 38631 - DNA, 658 bp, Homo sapiens
gagcccaggacaacagcccttatatttagctctgggaagatggtctgcacgggagccaaaaggtatgaggaatcatccctccacccctaccagagaaacaatttagtatgtaaaacaaggaagcatagaattaatgtgctaaagcacatagtagaagcaaaatgcctttctttgctgaagactttattcaatgaaatgccacattttgggttaaaaacactcctataaatactgacttgggccaggcatggtggctcacatctgtaatcccagcactttgggaggcctaagcaggaggatcgcttgagcccaggagtttgagaccagcctgggcaacacagtgagactccatctctgttaaaaaaaaaaaaaaaaaaaaaaagagaaatctaaaaagtagctggatgtggtggtgcatgcctctagtcctagctacttgggaagctgaggtgggaggatcacctgagcccatgagtttgaggccgcaatgagctatgatcataccactgcagtccagtctgagtacagagcaagacctgtctctattacmaacataataaatactgacatatccccattttacagtttccctattaaaccgaggggacttaactgcgctgctacaacttgtttctaaggtgaattttttttaagttac

SEQ ID NO: 38632 - DNA, 1151 bp, Homo sapiens
tcctgtctgaatacaaatgaaacataagcccgagaccttaaaaaataatccttttgtttgaaatgatcagagagaaagacttctcacttaaaaataaatcttaaactttcaggaaccattcaagtttagtgtaaactgtattctgaatatagagaatttttgcttttgcttgtttttgtaatcctacgtgatttgtatttaaaaagactgggtaagattaagaagacggaggagcaaagggctcagattcaagacctaattagcttgtagaatcaccagttttcgatggtgatgtggagattaacagggagggacgggctaatatgaatcatggctcttggctgtaaatcatcagtgattacgtcctttaccaaagtaagaaaacaggtttgtagggaggcagaagtcagtttccaacactttgagtttgtggtgtcctggaatgtcacctgatacctagtaagtagttctggatctttgggtatggaacttgagaaaggaatcctggctagagagagaattcagggcagtttatcagtagatagcctagtaaaatcatccttgagaatcactggtctatttaatctcacctataaactcacttttctctgtagtttagaggcatattcaaacactaattactctgatatgatcctcccaacacatcaccttatatatcccctatccmccaaaagaaacttgaagggaagtcctaaccatctacctagttcaaattctcttagagcatggcccagggtagggaaggtacgttagccacgtgattaacttttcagaaggatacaattctgattttgcacgttcactttggttgttttcactattggtaaagtataatactattaaccatattaatcctcacggcattagatgggtactataattctatccatttaacacgagagaacaggcgcagagagattaaggaacttgccccaagtcacacagctattaagcaggtgagtgagccaaaattcaacctagttccaagacccagccccttcaccctactttgtttgctgtagtttagccagattttaaagcatccacagcaagttaaattcccttattccgctcccattccgttttcccagaatccttagggtatggtattacaattttctgcacaagtt

SEQ ID NO: 38633 - DNA, 1069 bp, Homo sapiens
tgcatgaaggaagcattgcaaagcaaaatgtttactataacaaagtgatgcaatccagaggaatttctgaagtttgatatttaatggaggagtcaaaattgttactcwccctctgcaaccccaacaaataatgtgcatatacacagaataagagagagtgaatataataatgacatataagtttggtattaactgtaaatcttagattttatttttataattggattatattataggaagtgatggttcacaaatccagtcactcagaaggtctggtgaagagcaatcagatcataggagaacatctatattaggaaaatcaagttcatgctcattacacaggaaaaagagctcatattttcattttcttcttgcttgtgtttttatttgctctgtaatatcggctggatgtttttagttctcagtatcaagttcctgagtcagaactaacaagaagtttgcaaaatgcactctatcctttactgctggtgggattatgaaatggaaaattctaaaaggcaatattgaaataattttacatgcccttaaaaatatcaatatgctttgaaagaatgatttcacttttctgaatttatctcaaggacaaaatctgaaattcatctaaatattcctatagggagatttattttgaaataactaaacagtgaaaacaaataatgataagtacagttaagtaaatgatggtatatacatatgctgtgataccacgaaaccattaaattacatgtatgtaatatattccatcacatatcatacaatgggaaatggtaaataaaaaagctaccccaaacttttcatagaatataatagaaaaaatatatgcttagaaaaaatattggaggaaaaatatggaaataatgatttctctcaaagtggaattatgaatgttcctaagttattttttttttactctttgttatgctttatttatataactactctatagactcctttagaattggtggttatagaaaaaaatatactgagttcaccaaactgtttcattttctggggcacagaatgaaactacatttctcagcccccatgc

SEQ ID NO: 38634 - DNA, 1069 bp, Homo sapiens
tgcatgaaggaagcattgcaaagcaaaatgtttactataacaaagtgatgcaatccagaggaatttctgaagtttgatatttaatggaggagtcaaaattgttactctccctctgcaaccccaacaaataatgtgcatatacacagaataagagagagtgaatataataatgacatataagtttggtattaactgtaaatcttagattttatttttataattggattatattataggaagkgatggttcacaaatccagtcactcagaaggtctggtgaagagcaatcagatcataggagaacatctatattaggaaaatcaagttcatgctcattacacaggaaaaagagctcatattttcattttcttcttgcttgtgtttttatttgctctgtaatatcggctggatgtttttagttctcagtatcaagttcctgagtcagaactaacaagaagtttgcaaaatgcactctatcctttactgctggtgggattatgaaatggaaaattctaaaaggcaatattgaaataattttacatgcccttaaaaatatcaatatgctttgaaagaatgatttcacttttctgaatttatctcaaggacaaaatctgaaattcatctaaatattcctatagggagatttattttgaaataactaaacagtgaaaacaaataatgataagtacagttaagtaaatgatggtatatacatatgctgtgataccacgaaaccattaaattacatgtatgtaatatattccatcacatatcatacaatgggaaatggtaaataaaaaagctaccccaaacttttcatagaatataatagaaaaaatatatgcttagaaaaaatattggaggaaaaatatggaaataatgatttctctcaaagtggaattatgaatgttcctaagttattttttttttactctttgttatgctttatttatataactactctatagactcctttagaattggtggttatagaaaaaaatatactgagttcaccaaactgtttcattttctggggcacagaatgaaactacatttctcagcccccatgc

SEQ ID NO: 38635 - DNA, 535 bp, Homo sapiens
tagcgttttaccattagataataaattatttaatttattaggtgaatatgttaatataaaaaccttagtttatttttatgatttatgcactacaatgcagtcattaaaatgaaagtatcaaatccagttctactacctataaatatttttataatacattttggagtcaaaaataataaatggcaatattctgtgtatgttatgacttctgcttccacttagaatgtgtacaaactcaggaatacatttctctgatgctaactacacaaaggctggatagtctatacaatcttaccttttattgaaaacatcagaattttgaagtaacaggataaccaggcaaacttaattttgagcccctctgaggagacaggatatactgamccttttactttgggcagaatatgggaggaagaggcaaccacaataaaagtgggtaataagaaagtggctaaatcttaactaattattaaaaaccaagtgaagactcctggaaaagttcagaatccccaagagccccagacacacaaaacaa

SEQ ID NO: 38636 - DNA, 535 bp, Homo sapiens
tagcgttttaccattagataataaattatttaatttattaggtgaatatgttaatataaaaaccttagtttatttttatgatttatgcactacaatgcagtcattaaaatgaaagtatcaaatccagttctactacctataaatatttttataatacattttggagtcaaaaataataaatggcaatattctgtgtatgttatgacttctgcttccacttagaatgtgtacaaactcaggaatacatttctctgatgctaactacacaaaggctggatagtctatacaatcttaccttttattgaaaacatcagaattttgaagtaacaggataaccaggcaaacttaattttgagcccctctgaggagacaggatatactgacccttttactttgggcagaatatgggaggaagaggcaaccacaataaaagtgggtaataagaaagtgkctaaatcttaactaattattaaaaaccaagtgaagactcctggaaaagttcagaatccccaagagccccagacacacaaaacaa

SEQ ID NO: 38637 - DNA, 1244 bp, Homo sapiens
gcacacataagtataactcacagctacctatagaaaggctaactagagaagggacagggtattgtcaggggactcagaaataaatgcacaacactcaagaataataaagtaatagctaacatttattaacgcatactgtgtcccagggatggaaatacatttttatatgaatcatctcaatattttgttgaatagataatatatattccataactgcctttgactttccatgactgaataaattgatcagaaattcaaatagtataccatgcaataatccggaagcaaatagcagaacccagactttaaatcttcatttctcatgacatattggaaaagtttttatttttaatttcaactaaagaatctctgcatggaatttgttaagaatatatcccagccgctgctttttctattcagtgtgaccccaaacaaggaatgtttcacatggttttaggtttctgagtggaagtttagcacagctgtgatatcaaatgaagtaccacctggcctaatcaccgtaacaatatgtcctctgtcctgcacagctagcagatggattgggtatcagcctgatgtcataatctgttaagtttgtaatatggagcattacccacccatttaggattcatctcatcttctctgatggcatgctgtaccctaaatagagagatgacactatcattatatgccactatcactagtcatatggaatcttagtttgcattacttaagaataattatatggtgctctaattcatttggtgaactgtcactccactactgaaaaacttaggtggaattttaacaaatactatgacattcataaagcagattactagtcttcaacatttatttcattcttctcttaattcaagttctaaatatcgactttcttatatatgtgctgctgatctttttggggcattaaatgaaatctcaaaaactatagagttgatgtgactttatacttgcatctcggctgtcatgtaaaatatggtaataaaaamttatcagtaacatatatgtctgtaacatatatgacaaacatttaaaaggacaatatgattggtgataactcaccaaatttttactgtctctcaaatgcaaggcacaatgataatgtgaatgcagaaataaacatgaaattaaatttttccacccttcaaaacgcttttagtctcttctaattcacctcctctctctactacccccagaaatactcatttgagttcatgcaaaca

SEQ ID NO: 38638 - DNA, 579 bp, Homo sapiens
ttattcttattaggcacttaactaatctcaacctcttagttcataagaacctactcattttgggggaagtccattatatttattgtcatctctaaaagttttaaagttctttttcatatttagtcaatgtctgcctctctgcatcttctctccaatggtataattctgtcattgagaatcccagaaactaagtcaaatatcttgcaaatgacaaccactcaaatacttgcagtyagttatcatgttctttctgttggatccttcaaactagacaaccccagtttctttcgctaagctgtagaacacatacttttacagagccttcacaattccagctgcccttccttgcaaattttccagttcagttaagaggcttccaaaatagaacagcctgctccatgtgtaatatgaataagacaaagtacatacagtctgtaaacttcatcatatgtctatataattgaattaacttaagctatttcatattcgttattttatggacttaatgtaaaactggctatttgtaagataaaagtaaataaaacacttagatatttctcctccaaattgctgacaatc

SEQ ID NO: 38639 - DNA, 1442 bp, Homo sapiens
taacttctctgagcctcacgtttcccaaatgtcaaatgcaccatatggatacaaagatctagttttcaaacactttcagcagcagatcctccaaatgtaaaagaggtgacggcagagcctgatgaatttgggaggttctgggacagttggggccccacccaaagacctacctatgtggtcatgctccccctcaagggctggccggctgaattgaaatatcttacatgtaaactttcacgtaaatatcttacatgaaaagttagcataaactcaaattctcaaatgaattgctggcaattgactttctgctagtaaagtttcttaagcaagcatgaatttccctttaaaaatctaaatattgtgcttaccaaatcaagcaagaaatctggttacatagacaaaatggtcatttggcaaagtaattggtgagttttgttagaatgcagaaatgtggtctccaccccagacccactgaatcaggccctgcattttaacaagatctccagagatccctactgtccttcaagtttgagaagtgctaagttaaagcaatcacatttgcatcaccctagctcttgagaaatggtcagcattcaggcccccactccaggggttctctgttggcctggggtgaggtccatccaggtgcccaggtgttgtgaagttcctcaggtgatgtcagtgtggatgcagggcctgactgctgggagggccagcagccacgcttgtctaaatgtcttcatcttctccctcttctttcattcccttggggaccttgaatttccaagctctggcagatgctctcactggagcctgatttctgtcacctaaagctgacagtcacaagccgacagccagggagatgcatccctttcaaagcaactgagtggcgtgtcagttcatactttgcatggggctaaccactgggaggataacagtcgcagaagcgacccagtggggacagaggcagggccagccttcactgaccacttacttcttggaccatctcagggcaattggtctgggcaagagagccctgtccaagcaaagatcacagggcagccggggcaagagggaggctgctggggctagaagaaggggctgtaatgaggaccaggggatagagtaggagcttagagcctccatccttgactcaaagccaagattctgaatgctcttcaagctctgcttctcaagctccagcctacatcagaattaccttggggcttttaaaaatacagactacatgactacatagctgtcaccgtggctgctgtcggtgcaggggaacccccatccccagacgtccccggatgaattgctcccaaaaggcaaagccgtgaagactgaggaggagctggaggaggatgacgatgaggagctagaggagaccctgtcagagagactatggggcctgayggagatgtttccggagagggtcc

SEQ ID NO: 38640 - DNA, 539 bp, Homo sapiens
tgttgtcctctcacctctgtaaaataaacctaagcacggttagaacatacggtttatttaaacgcttccgcctctatttacggtcctcgcagtccacgcaggcagactcaggagcgcgatcctacctgggagtggggtttggagagcgggaaagcactcgcgggaagaaggggcagaatttctgctggccctcggtagtcctctgcccacgtcggtgatccggtctcgcttctccgcgggagctgaacggatccaaatgtttcccagtgggctagcagcttcttagagggactgggagcgcctcccctcagctccrccccccactccagctcccatgtatggaaaataggggtggagcgcgctctgccatgctcggtgcttagagaactagtgaagaggacagtgtggggaggatggaatccgaaacgggaggaggggccggcaaacctggccagagcagcgaagaggacgaatctctactgcaggagcttgcacggcccctggagggtcagggtccggaggagcgcacagtggaggag

SEQ ID NO: 38641 - DNA, 558 bp, Homo sapiens
tgcccattttagagctgggaaaactaaggccactgaaaagtaatgtaacagcccaaagccaccatctgggaagtggtggagcctggatttgaacccagcagtctggttccataatccacactcttaaccccacactgtatggcatgggaaagctgctgccccttctgtcttatgtaggaatcaaatgtatgtgtgagtctttttgtgctgagtgaaaggctttgcaagctcagaagttccattgtgcttttagaaccacccagtgtcctgaagtctcwtgcctttccatgaggagttgagtgaaggggctgaaggaccctcagcctcagcgtgtgctcagatttgccgctctagcagaggatctttgaggaatcattccatctttctgaggctcagtttctaagtctataaaagtcagtgaatgctgggagcaccaagaaaaactgtagggggccactaatagttgctgacatttattgagcactaactacgtgcagggacctgcaggaagccctttaatgaggtatgtcatcaggcacacctgatggtgatgaggct

SEQ ID NO: 38642 - DNA, 558 bp, Homo sapiens
tgcccattttagagctgggaaaactaaggccactgaaaagtaatgtaacagcccaaagccaccatctgggaagtggtggagcctggatttgaacccagcagtctggttccataatccacactcttaaccccacactgtatggcatgggaaagctgctgccccttctgtcttatgtaggaatcaaatgtatgtgtgagtctttttgtgctgagtgaaaggctttgcaagctcagaagttccattgtgcttttagaaccacccagtgtcctgaagtctcatgcctttccatgaggagttgagygaaggggctgaaggaccctcagcctcagcgtgtgctcagatttgccgctctagcagaggatctttgaggaatcattccatctttctgaggctcagtttctaagtctataaaagtcagtgaatgctgggagcaccaagaaaaactgtagggggccactaatagttgctgacatttattgagcactaactacgtgcagggacctgcaggaagccctttaatgaggtatgtcatcaggcacacctgatggtgatgaggct

SEQ ID NO: 38643 - DNA, 650 bp, Homo sapiens
cagccgaagaccagaaaagccatgaagactttctgcttaattcaggggcttacaggattcttcagagtgtgtgtgaacaaaagctttatagtacgtatttttaggatacaaataagagagagactatggcttggggtgasaatgtgctgattacaaggtctacagacaattaagacacagaaacagatgggaagagggtgtccagcatctggtggttggcttctcaagggcttgtctgtgcaccaaattacttctgcttggtcttctgctgagctgggcctggagtgaccgttgaaggacatggctctggtagctttgtgtagcctggcacaggaactttggtgtatccttgctcaggaactttgatggcacctggctcaggaaacttgatgaagccttggtcagggaccttgatgctgcctggttcagggaccttggtgtagcctggctcagggaccttggtacaacctggctcagggaccttggtacagcctggctcagggaccttggtacaacctggctcagggaccttggtacagcctggctcagggaccttggtacagcctggctcagggaccttggtacagcctggctctggaatctttgtgtttccaggttgtggaacctttgagtggcatggctccttggtt

SEQ ID NO: 38644 - DNA, 650 bp, Homo sapiens
cagccgaagaccagaaaagccatgaagactttctgcttaattcaggggcttacaggattcttcagagtgtgtgtgaacaaaagctttatagtacgtatttttaggatacaaataagagagagactatggcttggggtgacaatgtrctgattacaaggtctacagacaattaagacacagaaacagatgggaagagggtgtccagcatctggtggttggcttctcaagggcttgtctgtgcaccaaattacttctgcttggtcttctgctgagctgggcctggagtgaccgttgaaggacatggctctggtagctttgtgtagcctggcacaggaactttggtgtatccttgctcaggaactttgatggcacctggctcaggaaacttgatgaagccttggtcagggaccttgatgctgcctggttcagggaccttggtgtagcctggctcagggaccttggtacaacctggctcagggaccttggtacagcctggctcagggaccttggtacaacctggctcagggaccttggtacagcctggctcagggaccttggtacagcctggctcagggaccttggtacagcctggctctggaatctttgtgtttccaggttgtggaacctttgagtggcatggctccttggtt

SEQ ID NO: 38645 - DNA, 650 bp, Homo sapiens
cagccgaagaccagaaaagccatgaagactttctgcttaattcaggggcttacaggattcttcagagtgtgtgtgaacaaaagctttatagtacgtatttttaggatacaaataagagagagactatggcttggggtgacaatgtgctgattacaaggtctacagacaattaagacacagaaacagatgggaagagggtgtccagcatctggtggttggcttctcaagggcttgtctgtgcaccaaattacttctgcttggtcttctgctgagctgggcctggagtgaccgttgaaggacatggctctggtasctttgtgtagcctggcacaggaactttggtgtatccttgctcaggaactttgatggcacctggctcaggaaacttgatgaagccttggtcagggaccttgatgctgcctggttcagggaccttggtgtagcctggctcagggaccttggtacaacctggctcagggaccttggtacagcctggctcagggaccttggtacaacctggctcagggaccttggtacagcctggctcagggaccttggtacagcctggctcagggaccttggtacagcctggctctggaatctttgtgtttccaggttgtggaacctttgagtggcatggctccttggtt

SEQ ID NO: 38646 - DNA, 650 bp, Homo sapiens
cagccgaagaccagaaaagccatgaagactttctgcttaattcaggggcttacaggattcttcagagtgtgtgtgaacaaaagctttatagtacgtatttttaggatacaaataagagagagactatggcttggggtgacaatgtgctgattacaaggtctacagacaattaagacacagaaacagatgggaagagggtgtccagcatctggtggttggcttctcaagggcttgtctgtgcaccaaattacttctgcttggtcttctgctgagctgggcctggagtgaccgttgaaggacatggctctggtagctttgtgtagcctggcacaggaactttggtgtatccttgctcaggaactttgatggcacctggctcaggaaacttgatgaagccttggtcagggaccttgatgctgcctggytcagggaccttggtgtagcctggctcagggaccttggtacaacctggctcagggaccttggtacagcctggctcagggaccttggtacaacctggctcagggaccttggtacagcctggctcagggaccttggtacagcctggctcagggaccttggtacagcctggctctggaatctttgtgtttccaggttgtggaacctttgagtggcatggctccttggtt

SEQ ID NO: 38647 - DNA, 509 bp, Homo sapiens
ccaggcactcgaagtgtaggaaggtgtaaggatgagcataaggatgctcagaacagcactgcttaggcaccaggggcaaaatattgacccataagtgaccacagcttcactccatcaactcttttaaggaaacttctgtgtccgtgccttttgtggagatgacagggcaagagaagcaagagaaatggaagaggccgagggcaacttttattttcatcagaaaagatttagaattgcctgtgacaaatagaaaagagccccaaaggcaggggagccccggggaaagaggtgagcattggagttttgagggagatagtacagagtgactgggaagtagagagtaagaactacagggtacttctagaaagttgtactccctgttacgtaatgagatcgcytatcatcgaagagcttccaaaattttaaagttggctttcattttactcagtagtcaacgacttagcctcatgtggaaatgtgactgatttgggggtgtcttaatgcctctt

SEQ ID NO: 38648 - DNA, 726 bp, Homo sapiens
atttttttagagatggggtttcatggtgttagccaggatggtctggatctcctgaccttgtgatccgcctgcctcggcctcccaaagtgctgggattacaggcgtgagccaccgtgcccggccttacactttttttttcttattcacttttgcagtgtttctcaaactagggcctgtgaactctagggggttgcagacatgctggaggtccacaaattctatacgaattttgaaatgagaatctagaacattttataatctataaagacaaaacattttttgcagtgataatccaycactgaaaggctttttaaagaataagacaagtttctcaggtcagactggaaatgtgtctgaagacccaagttggggaaagaatggcttgtcttcaaaaggtaactgtacaatcttcaggtttaagagacagcatcctgtgggctcttcctccatcatacagggcaatggataggtgactctgtttgttgcacttgttccatctttggttcacaaagtctgtttcctgtgtggatccttcctcctcacttaaagggtaaacaccatcagttgggagctttcccaggaggcaggaagactgtgaagctgctcctggcccagacaccatcagggcaggtcggaggctgagtcgtgcccacagagtcctggcatttcctcctctctacctttcactccctgcccacccctgctctccagaaagaagttcagcaa

SEQ ID NO: 38649 - DNA, 1157 bp, Homo sapiens
atgttcaaataatgccaattcctttgacctcttccttttactagacataagctactagaacagacactttcattctttagatactacaaaagtcagcatgcaagttggcccatccccttttcatagcaattaagaaagatgaatatcattaattgggtttccacttacatttttattctcaaggctaacatttgtgtttattactggatcacagataagggtacatgagggaatatgggtgagcctagctccccagtgtgaaatgcaaaacacagaaattttggagagattgtaaactctgaattgccttttatctcccaaaggcctggaacaaaggcaagctagcrcaatgaatacatgtcttaattgcttttctcatactgcagacagagcctctgtcctaaatatgactccacgtgcttggggcagatgactgggtgagccaggaaccaaccaaaactttaaaactaatagtattgttttaccttctaaacaatctacataaaaggccacccattaataaatgcagcaatgagtaaagctgtcattagcttccattgagagacacagatacaacctccctccttccacctacgttctctttcttgccagagagaaaattcagaatctacctgaagcaatagcagtgctgattttaatgaaaatgactgatctctgagattgagattacttgttgccctgccctaatgaagcacctggaaccacagaaacctagaattagaagggtggtaaaaagtaatagtccaacctgcccccaaagaggaatcatctctgagattccggcccaattggggatccagtttgtactagaactatctaaagggcaaggcactcactgacatgctgggtgtctggtgctgtcactgttgggccactctgcagattacgtaatccttccttactgtcagctggagtgcccgtcttcacttccctgcttggccctcatcctgtcagctggaagagcataaaatgtaatctgccttccaaagatgatcattgtactctatccaaggcttgtcttcagttctttgaatcacattttgtgacacttcatactctcaccaccctccccaggagagcctttgccacgcttaagatatggcacccagaacaggatccatcagacctctggatgc

SEQ ID NO: 38650 - DNA, 1157 bp, Homo sapiens
atgttcaaataatgccaattcctttgacctcttccttttactagacataagctactagaacagacactttcattctttagatactacaaaagtcagcatgcaagttggcccatccccttttcatagcaattaagaaagatgaatatcattaattgggtttccacttacatttttattctcaaggctaacatttgtgtttattactggatcacagataagggtacatgagggaatatgggtgagcctagctccccagtgtgaaatgcaaaacacagaaattttggagagattgtaaactctgaattgccttttatctcccaaaggcctggaacaaaggcaagctagcacaatgaatacatgtcttaattgcttttctcatactgcagacagagcctctgtcctaaatatgactccacgtgcttggggcagatgactgggtgagccaggaaccaaccamaactttaaaactaatagtattgttttaccttctaaacaatctacataaaaggccacccattaataaatgcagcaatgagtaaagctgtcattagcttccattgagagacacagatacaacctccctccttccacctacgttctctttcttgccagagagaaaattcagaatctacctgaagcaatagcagtgctgattttaatgaaaatgactgatctctgagattgagattacttgttgccctgccctaatgaagcacctggaaccacagaaacctagaattagaagggtggtaaaaagtaatagtccaacctgcccccaaagaggaatcatctctgagattccggcccaattggggatccagtttgtactagaactatctaaagggcaaggcactcactgacatgctgggtgtctggtgctgtcactgttgggccactctgcagattacgtaatccttccttactgtcagctggagtgcccgtcttcacttccctgcttggccctcatcctgtcagctggaagagcataaaatgtaatctgccttccaaagatgatcattgtactctatccaaggcttgtcttcagttctttgaatcacattttgtgacacttcatactctcaccaccctccccaggagagcctttgccacgcttaagatatggcacccagaacaggatccatcagacctctggatgc

SEQ ID NO: 38651 - DNA, 599 bp, Homo sapiens
ttttagtggagatgggctttcaccaagttggccagactggtctcgaacttctgacctcaggttatccacctgccttggcctcccagagtgctgggattacaggcatgagccaccgcacccagcccacaaaatgcttttgattttaagtttcctttaaaaaaaaaatttcatgtagaggggtaatgtgctgatgtcgtaacaaggtccaagggtggcacatcacacgtatgagtgtgaacaccgatcatcatgtgtatgaactayaaagaatctgttttaagtttccatagctaaaaatgttggaaattttattctgactcctccactttaaaaggtgagaaaacggaggctcagagagaggaaatctgagatcctccttaacatctgttctggggtctggtgaggctctgagtctgacctcaaggcttctgactgcacatgagatccacagagctagatccactccctgtcatcccatcacttgaaaggatgagggcagcaggccttgcctcatgtacaggggtgactcagagagggcagccttctcccccgagccaggttggtgaggctcggacagagcccagcactcccaaatgacc

SEQ ID NO: 38652 - DNA, 391 bp, Homo sapiens
gccccacatagaagtcattcaagcaggctcatttgcccagagaaatacccaagatcctgggagaggaaccaaagggaaaaggagacagagaagaaaagggaaaggtagctgtggccaaaggctgagattcccycccagccgcttagccaaagcactagaaatttgctgcaggattaaaaaaataaaaatattcaccaggagtcatgagtactgatttccaacacaattaaaatcctcctaaaacagcactggaagcctccagcacacaaataagttatattccagttgtctgtagctgggaatggatttacccataaaaacagtatgataaatctcctaaagcagctcacacaaattaaatcacttacactggcaacgagaagaaagagaa

SEQ ID NO: 38653 - DNA, 469 bp, Homo sapiens
tttcaagcttattccactcttgccctgagaaccttctttctcagaaagtataccccacactcatgttcatctagaacctctgttataatgtgtactcttttaataattcattgttcttgtttctatatatcgcttttcttaattttgactcaccttgtctctgaattgcattctttgcattttagaatttacaagtaactgcttgcttctctgtgtttctagattcaagaacaagaattgattgcctaactaactcaggcagagctttcaaaccagaacactccactaatatctagacaagctatgatttggctgctattgggtcatgaattccctatccagaagtagggaagtggcagtcatatgatacacatgtgacrgcccctcagctaacacagtgaataggaaagtctcccacagaagtgactttaagtattgtctaaaatcttcatggcatgacaaatacact

SEQ ID NO: 38654 - DNA, 1035 bp, Homo sapiens
atatttattatcatatctggatttaattcaaaaattcatctaatgtaacagctaacatgaattcgagtagattttgccaacttggcatttatttatccctttatttcttttcatttcatttctttttattgtttttgtttttattttgaattggtggtgggatggggaggattagtaacctgattttttcttggaaattcaccactccttcatcctaagtctatgcagttgaggtaagcttaaagctaccaaacactttcacaggtaggcttgtgcccaaaaccaggttaatgaaaattctaaaacttggattgaaaaccactggaaaagaatagcctctttccagccaggctaggtggctcacatctgtaatcccagcactttgggaggccgaggcgggcggatcacgaagtcaagacattgagaccttcctggccaaaatggtgaaaccccgtttctactaaaaatacaaaaaattagctgggcatggtggcgcacacctgtagtcccagctactcaggaggcttgaggcaggagaatcgcttgaacctgggaggtggagttgcagtgagcagagattgcggtactgcactccagcctggtgacagagtgagactatgtctcaaaaaaaaaaaaaaaaaaaagaaaagtgtctttgctcttttgactcttttgatgctcagctgtgagaataatacctaaagctatttagggcttctagaacaggaaaacctacctaagaaccaagccaacaaagaggaaatagtcaacagatggtaagagatggtttcctgaccatattactttaggactttgatcaagccatgcctagacttttcaatcttcttgggtaaaattttctggttttgcttaattgagtagacttttttgttatgtgtaactaaaacagccttaattactacactagtatcattttcatggaaaggaccacaaattccccagaaaagactgccttctaacaaatctactaagtctttcmaaagtagttctagaagtcagtaatacaacaatgca

SEQ ID NO: 38655 - DNA, 1323 bp, Homo sapiens
aagctcctggaaaacacataaaacctggtgagagatattggttaatctccagaatggtgtcaatagggtgtataaactaagtgcagtttggcacaagatactagaggcattttttcatattatataattcaaggtgacgttatagaattaataccaaatactcaaagaaagaaaaaagaaaactatgactgaaagcctaggtatttagctacatttttagcatgatttttatataaaaaaaagaatatccaggcaagcacactaagcacattgagtaagtaaggttaaaataaatgaagtatgtaaataatttatttttctgtgaaatactgtgcagtgttatacaatttacagagtacagggcatcacatataagtgtttgaaatctcattaaaacataatatgggtctactgatagatcagctaaaatctgaattctagaaaatatctctaattttgaataatgaagaaatrgacattaacatctattaccttatggcttacctgttccttgtggcccatgagtttatactgtattaggaccttcctaccaagagggaaaataaaatagaacctcccaagagacttgaaatttttctagcctattccagtttaaatgttatgtattgcttttatgaacaaacataaggaaaatgcattttggaacaagaaaataacaaaaataatccagttcaaggctctcattttatagacaaataaattaagcaacagacaatcctccaacagaagttacaagaagcattatgattttccatcccccattccataattaaaagagtttgcaactctgcggatctagccacttggtatcataatatctggccatattatagccttgtgagtaaccagaaattctagttcttcatagagtaattttctgactctatttagcatcttgtttgattacataccaaagggagatgtcatattccactgccctgattttaatctgagcaaaactgaattttttaaaaaagaattgtcagtctggagacatattggataacaaccactccagacagcttaggtgatatgtctgaaagatatttggtttcttaccaaaaacatagcccaagactctaattgtagttatcttcttttgagaaatggatggtaaatgacaagatgatactaaaccctcataacacaaagtcatgaaatttattgattcacctcaaaactgctggagttttcatatgtcagggctttcaagtagtagtgtactgtctgtatatcatgcacgttaaggttttattaaaaattcaatgaaatatttatatctcagttataaaccccttatgg

SEQ ID NO: 38656 - DNA, 1323 bp, Homo sapiens
aagctcctggaaaacacataaaacctggtgagagatattggttaatctccagaatggtgtcaatagggtgtataaactaagtgcagtttggcacaagatactagaggcattttttcatattatataattcaaggtgacgttatagaattaataccaaatactcaaagaaagaaaaaagaaaactatgactgaaagcctaggtatttagctacatttttagcatgatttttatataaaaaaaagaatatccaggcaagcacactaagcacattgagtaagtaaggttaaaataaatgaagtatgtaaataatttatttttctgtgaaatactgtgcagtgttatacaatttacagagtacagggcatcacatataagtgtttgaaatctcattaaaacataatatgggtctactgatagatcagctaaaatctgaattctagaaaatatctctaattttgaataatgaagaaatggacattaacatctattaccttatggcttacctgttccwtgtggcccatgagtttatactgtattaggaccttcctaccaagagggaaaataaaatagaacctcccaagagacttgaaatttttctagcctattccagtttaaatgttatgtattgcttttatgaacaaacataaggaaaatgcattttggaacaagaaaataacaaaaataatccagttcaaggctctcattttatagacaaataaattaagcaacagacaatcctccaacagaagttacaagaagcattatgattttccatcccccattccataattaaaagagtttgcaactctgcggatctagccacttggtatcataatatctggccatattatagccttgtgagtaaccagaaattctagttcttcatagagtaattttctgactctatttagcatcttgtttgattacataccaaagggagatgtcatattccactgccctgattttaatctgagcaaaactgaattttttaaaaaagaattgtcagtctggagacatattggataacaaccactccagacagcttaggtgatatgtctgaaagatatttggtttcttaccaaaaacatagcccaagactctaattgtagttatcttcttttgagaaatggatggtaaatgacaagatgatactaaaccctcataacacaaagtcatgaaatttattgattcacctcaaaactgctggagttttcatatgtcagggctttcaagtagtagtgtactgtctgtatatcatgcacgttaaggttttattaaaaattcaatgaaatatttatatctcagttataaaccccttatgg

SEQ ID NO: 38657 - DNA, 1323 bp, Homo sapiens
aagctcctggaaaacacataaaacctggtgagagatattggttaatctccagaatggtgtcaatagggtgtataaactaagtgcagtttggcacaagatactagaggcattttttcatattatataattcaaggtgacgttatagaattaataccaaatactcaaagaaagaaaaaagaaaactatgactgaaagcctaggtatttagctacatttttagcatgatttttatataaaaaaaagaatatccaggcaagcacactaagcacattgagtaagtaaggttaaaataaatgaagtatgtaaataatttatttttctgtgaaatactgtgcagtgttatacaatttacagagtacagggcatcacatataagtgtttgaaatctcattaaaacataatatgggtctactgatagatcagctaaaatctgaattctagaaaatatctctaattttgaataatgaagaaatggacattaacatctattaccttatggcttacctgttccttgtggcccatgagtttatactgtattaggaccttcctaccaagagggaaaataaaatagaacctcccaagagacttgaaatttttctagcctattccagtttaaatgttatgtattgcttttatgaacaaacataaggaaaatgcattttggaacaagaaaataacaaaaataatccagttcaaggctctcattttatagacaaataaattaagcaacagacaatcctccaacagaagttacaagaagcattatgattttccwtcccccattccataattaaaagagtttgcaactctgcggatctagccacttggtatcataatatctggccatattatagccttgtgagtaaccagaaattctagttcttcatagagtaattttctgactctatttagcatcttgtttgattacataccaaagggagatgtcatattccactgccctgattttaatctgagcaaaactgaattttttaaaaaagaattgtcagtctggagacatattggataacaaccactccagacagcttaggtgatatgtctgaaagatatttggtttcttaccaaaaacatagcccaagactctaattgtagttatcttcttttgagaaatggatggtaaatgacaagatgatactaaaccctcataacacaaagtcatgaaatttattgattcacctcaaaactgctggagttttcatatgtcagggctttcaagtagtagtgtactgtctgtatatcatgcacgttaaggttttattaaaaattcaatgaaatatttatatctcagttataaaccccttatgg

SEQ ID NO: 38658 - DNA, 966 bp, Homo sapiens
aaatatatgtatctgctttcatcctctttttttctaaatagttggtattaactagcatcttgacaaaaaatacaattatatgtatttccttaacaaaaggaagaaaatatacctagaatggaaaaatcaatttgtgagatctatatttgtcatgttataaagtattttcactctgagaattaccaggattaattgacctcatttgttctccatgtggcagtattcagaccttcaatagatgtattccccttcccccaacaagtgaacaataatttcttaaaaagctccttttggaaacattcccagatttaagtaaatacgttgaaaatagaactgagaaaatagtgcttttcaaagggaagatcataaaggtaacttttagatggaaactaatttttgttgaattaaacagaaatgtgttaccagaggcctgtgaaataccagcccaatggtgagtagtgaatgagtacacagctcatgaagactccagcaggaacttcgaacattactttaaagatggaggtgggtatagctccacacagttctcaaaataaacacacttgggtctattgtatggcctgagtagcagtgcccttagtaaaaacataggtgaactgggatccatcaacttatagccacaattgaaagaaaaccaattttgttaatgkaggtaggttcccagaaagattacatgatattataattaactacttaagaaagacaggcaggatatgagtaagtgtgctaggttcaattctaaagttgtgacagaagcaataagcagtcaaaatagcaaatgactctgacgtttttgttttttaatttgagagtaatgggggtttttttgcattgcaaaaagtcaaagaaaaacattaagagaaagtctatatttgttacaacaaacttattgcaatgaaacacagggaaaaatggtccagaatgtgtccgggaaatttcttctatgca

SEQ ID NO: 38659 - DNA, 503 bp, Homo sapiens
tctatcctctgaagagaataataaaatattattggagagaaattttaagaaccaaaacaaatgggaagatatgttcatgggatagaagattcaatattgataatatttcaattctctttaatgattcaatgaagttccaatagaaataccaaacatcaagagattattaagctatgatttttaagatataattggtacaagggaaagagatttatcaatgaaagaaacagaatcgacaacccagcagtagacccacacatatttggacacttacgggtaaggttgtattacacatcagtgtaacagcctttttaataaatggtacaagatctattggatattcatagtggagataaaatggaacttggcctatcttttacattatatagaaatgtaatttctggtgtattgtagatctaaatctaaaagcaaaayaataaaatttctagaagtacagcacaatattttcatgaccttgggacaggcatagattcctaaaacag

SEQ ID NO: 38660 - DNA, 579 bp, Homo sapiens
gaaacaacttctctccggtgaatcaagatttcttcagtggacacttagtcccagctctgatagcccttacccctgtttcctgccacagtgtgggtcatatgtattctttatcatatgaggagagtgctaattaatgtgtcatttattttgtgagcatgctaatamatatattcatattccaatttagtgaaaaaaaactgatctagagatgccccttttcgaggtgacagcatggctctggagagatggccacaggaaccatggcagtggaccaggttgctgggagaaggcaaaaggggaggcacccaagctgagaaggggctaagcactcagcccctgggaccaccaacagcaggcctgagacacatgcaggaaaccagacagcctggatgaaatttctttcaagcaaggccagtggtccctgacagaacaccagaggtttccccctaaatcctttcgcatctgtaccatttccatcttagttggagctctttgttctcatccttgcaatacgcagagaaaaaaaaatcacaggttgttgattgtttgaagatagggtattgctctgtcactcaggct

SEQ ID NO: 38661 - DNA, 579 bp, Homo sapiens
gaaacaacttctctccggtgaatcaagatttcttcagtggacacttagtcccagctctgatagcccttacccctgtttcctgccacagtgtgggtcatatgtattctttatcatatgaggagagtgctaattaatgtgtcatttattttgtgagcatgctaatacatatattcatattccaatttagtgaaaaaaaactgatctagagatgccccttttcgaggtgacagcatggctctggagagatggccacaggaaccatggcagtggaccaggttgctgggagaaggcaaaaggggaggcacccaagctgagaaggggctaagcactcagcccctgggaccaccaacagcaggcctgagacacatgcaggaaaccagacagcctggatgaaatttctttcaagcaaggccagtggtccctgacagaacaccagaggtttccccctaaatcctttcgcatctgtaccrtttccatcttagttggagctctttgttctcatccttgcaatacgcagagaaaaaaaaatcacaggttgttgattgtttgaagatagggtattgctctgtcactcaggct

SEQ ID NO: 38662 - DNA, 538 bp, Homo sapiens
ttcaacaaaaaggtaaatttaaaatgcagactttgttacttgycaaagaagattcatgaaaaatttatatccaattattttccaaatagttaatttaatttggctttttaccacattccttcctttctttcccgacttctttaatgtaatttaaaccctggaaaacattctttagaaaccaagaggaaaagaagaacacatatcaaaaaagacatataacttaaaatggtacatttcacatctaaaatgggtttgaagaaacgcaactttatatcattaaaaaataagatcatctgatttcctttatttcttttttaaattatgtaatcagatgattttatattttttggggggggcggaatattggtttcttttacttgatgttttcagttttctctggcattcaagtttcttttttgtgttcagtgtttcaaatacaatttgtatttaaggattttaaaataccaaactgtaaatgagtacagtggatctttttctgttaggatgttaatattatacaatgaaatctataaagtgt

SEQ ID NO: 38663 - DNA, 538 bp, Homo sapiens
ttcaacaaaaaggtaaatttaaaatgcagactttgttacttgtcaaagaagattcatgaaaaatttatatccaattattttccaaatagttaatttaatttggctttttaccacattccttcctttctttcccgacttctttaatgtaatttaaaycctggaaaacattctttagaaaccaagaggaaaagaagaacacatatcaaaaaagacatataacttaaaatggtacatttcacatctaaaatgggtttgaagaaacgcaactttatatcattaaaaaataagatcatctgatttcctttatttcttttttaaattatgtaatcagatgattttatattttttggggggggcggaatattggtttcttttacttgatgttttcagttttctctggcattcaagtttcttttttgtgttcagtgtttcaaatacaatttgtatttaaggattttaaaataccaaactgtaaatgagtacagtggatctttttctgttaggatgttaatattatacaatgaaatctataaagtgt

SEQ ID NO: 38664 - DNA, 625 bp, Homo sapiens
tctcaatatctcaatcatggcaccttaaaaatgggtttgatcatcagaaatataaaaatatcctttggaatctagacttataaataagatacagattaaaactaagtaatagcaacaggactatggcagatttcatttctctaagacggccaccaccttatatcacatctatattccctctacttgtgcttaggcagatctttgtgactgtgtcaatcaaccaagaatggaggaagtgtcacttkgagacttacgaggctgggtcatacagatgccacacacttctgtcttattctcttgggatgcttgttcctgaaatccagccactgtgctgcaaggaaactaaccaggagagttcatgcctcggtgtcccagatgacaacctttgttgaccccagacaggtaagtgagccttcagatgacttcaaagcctacctgtggagtcatttccagcctgtgaattatttcagttgatgctgcattgagcagagatgaagtgtctctgtcaagctctgcctaactgcagatttgtgagtaaaataaatgactgttggtttgttaagccactaagtgtggggtgatttgccactcagaaatagacaactggaacagattttggtacctg

SEQ ID NO: 38665 - DNA, 1084 bp, Homo sapiens
tccttcctcctcctccagattctggccgcatcactccagtcggcctctgtcttacgtgacctccttcctctgtacctctgtcttcacgtgacctccttcctctgtgtctgtgtcttcacgtgacctccttcctctgtgtctctgtcttcacgtgacctccttcctctgtacctctgtcttcacgtgacctccttcctctgtgtctgtgtcttcacrtgacctccttcctctgtgtctctgtctgcttatgaggacccctggcatgttggattagggcccagccgacttcagggtgacctcatcttagtcaaattacatcgtcaatggctccatttccaaagaggtcacattcataggtactgggggttaggacttcaacatgtatttttgagggaagacaatttaacccatatcacgggccagtggaaaatgcaaaggtaaaactgagaaaaccaagtctgtgatgactcaaaataatgtggtccatacactgaggcctctaatgtgtggcttcatctgaggacagcggctcctctatgacatcgtcacacacacccagtccttggtggggcctgggcagctgagggcttgaggaacattctccatccatgactatggaaggtcagtgaagcaggggcaggaggtacatcgttctgtgagaatcaggactggtcagaggttctgctctgatctgttccaactcattgacacatgagcacttgagctccaacttctctgccatggagctggagcacaagcagaaaccacagaaatgtcccagggattccagtacttcggcatcagagctacgcctcccacaaagcatttagctctgagagaggttaacaaccacaaaaaccgcaacacacttcctttgttggatcatatgtctgaaatttaaaaatcagtctccatatggcttggctaatctgcctcagttcctcattttttattcccccaccctcatatatataacttggattacacagtcacattttgttcagttgtattttgcatctactagtgtagctgccttgccttgcacactctctgttccttgagaacagtccgttcttagattctc

SEQ ID NO: 38666 - DNA, 1084 bp, Homo sapiens
tccttcctcctcctccagattctggccgcatcactccagtcggcctctgtcttacgtgacctccttcctctgtacctctgtcttcacgtgacctccttcctctgtgtctgtgtcttcacgtgacctccttcctctgtgtctctgtcttcacgtgacctccttcctctgtacctctgtcttcacgtgacctccttcctctgtgtctgtgtcttcacatgacctccttcctctgtgtctctgtctgcttatgaggacccctggcatgttggattagggcccagccgacttcagggtgacctcatcttagtcaaattacatcgtcaatggctccatttccaaagaggtcacattcataggtactgggggttaggacttcaacatgtatttttgagggaagacaatttaacccatatcacgggccagtggaaaatgcaaaggtaaaactgagaaaaccaagtctgtgatgactcaaaataatgtggtccatacactgaggcctctaatgtgtggcttcatctgaggacagcggctcctctatgacatcgtcacacacacccagtccttggtggggcctgggcagctgagggcttgaggaacattctccatccatgactatggaaggtcagtgaagcaggggcaggaggtacatcgttctgtgagaatcaggactggtcagaggttctgctctgatctgttccaaytcattgacacatgagcacttgagctccaacttctctgccatggagctggagcacaagcagaaaccacagaaatgtcccagggattccagtacttcggcatcagagctacgcctcccacaaagcatttagctctgagagaggttaacaaccacaaaaaccgcaacacacttcctttgttggatcatatgtctgaaatttaaaaatcagtctccatatggcttggctaatctgcctcagttcctcattttttattcccccaccctcatatatataacttggattacacagtcacattttgttcagttgtattttgcatctactagtgtagctgccttgccttgcacactctctgttccttgagaacagtccgttcttagattctc

SEQ ID NO: 38667 - DNA, 1084 bp, Homo sapiens
tccttcctcctcctccagattctggccgcatcactccagtcggcctctgtcttacgtgacctccttcctctgtacctctgtcttcacgtgacctccttcctctgtgtctgtgtcttcacgtgacctccttcctctgtgtctctgtcttcacgtgacctccttcctctgtacctctgtcttcacgtgacctccttcctctgtgtctgtgtcttcacatgacctccttcctctgtgtctctgtctgcttatgaggacccctggcatgttggattagggcccagccgacttcagggtgacctcatcttagtcaaattacatcgtcaatggctccatttccaaagaggtcacattcataggtactgggggttaggacttcaacatgtatttttgagggaagacaatttaacccatatcacgggccagtggaaaatgcaaaggtaaaactgagaaaaccaagtctgtgatgactcaaaataatgtggtccatacactgaggcctctaatgtgtggcttcatctgaggacagcggctcctctatgacatcgtcacacacacccagtccttggtggggcctgggcagctgagggcttgaggaacattctccatccatgactatggaaggtcagtgaagcaggggcaggaggtacatcgttctgtgagaatcaggactggtcagaggttctgctctgatctgttccaactcattgacacatgagcacttgagctccaacttctctgccatggagctggagcacaagcagaaaccacagaaatgtcccagggattccagtacttcggcatcagagctacgcctcccacaragcatttagctctgagagaggttaacaaccacaaaaaccgcaacacacttcctttgttggatcatatgtctgaaatttaaaaatcagtctccatatggcttggctaatctgcctcagttcctcattttttattcccccaccctcatatatataacttggattacacagtcacattttgttcagttgtattttgcatctactagtgtagctgccttgccttgcacactctctgttccttgagaacagtccgttcttagattctc

SEQ ID NO: 38668 - DNA, 1178 bp, Homo sapiens
tcccatggaacattaaggacgttggcatgaagggaacacagcagcacacctcttagctgcagtgccctctgtggtttactcaagacaccccctggcacatatgttcatcaccactgcagtgaactgcttctgtgcttcatgagcagcatcctctaccaaggttcttggtcactaaaacgacaagatattctcgtggttccaccatgagtggttccattacgtttctccatgacccactggtggcagcatgtggcactcatgccatctcctccaaggtttaaatctcagacttgcagcctcctcaatatttctttttttttctttcctgtttctttttctttttttgagaaggagtcttgtgctgtctcccgggctggagcgcaacggcgcaatctcagctcactgaaacctccacctcccaggttcatgcaattctcctgcctcagcctcctgagtagctgggattatgggtgcacaccaccatgcccagctaattttttttttaaatatttttagtagagatggggatttcactaggttggccagsctggtcttaaactcgtgatcctcccgcctcggcctcccgaagtgctaggattataggcctgatccacctcgcccagcccttcttcgatatttctaagtttcttccttgttcatcattccctcggccctgggaagatttgctggtctgtggctgctccctctgtatcccttgcaatcaggttttacctcttagatattctttccattttcccttttcaaattcttctgactggatcctgactggtaaatataacttgcttcttaaaaagtttttcttgggtgtgaacttctcacaatagcctctgtaatttattaaaatacttattaagttaaagcttagaattaaatggagttctcatgctaccgtatgggttttaaactaatccttttgtggaactgaagaactcttctgtgtattgttatatgtacacactcattctctgggactttttactgtcattattgttttaaatgttttaccacagtaccaaagttttctaggtttgctctaacaacaattgactacaactgggtggcataaacaataggaatttagtctctcatagttcttgatttcacatttgtagagttaaatgcataggggaaaccctgagaaacctgtaggggaatcc

SEQ ID NO: 38669 - DNA, 550 bp, Homo sapiens
atttattttcatttttatttttgagacagagtctcactatgttgcccaggctggagtccaagacccatagtggatggytgaaagcatggatagtacctaatcatacacacacacacacacacacacacacacacacacacacacacagacacacacactgtgttttttgcatatatatatggaacatatatatacacatacctatgatataatttgtaaaatttgtacatatatacctatatatatacacacacatatatattatatgtatacatttgtgtgtgtatacacacacacatattctgatatacacacacatgcctatataggtataagtataggtgtaagtataaactttatatacttataaacctatttgttgatatatatatacctgtatatatacctatgataaatatatatacctctatatatatatctatgataaagttcaacttaaaagttagtcaagataagagattaataataataactaataattaaataaaacaattataactatgctggcctcacaactcttgtgctttgg

SEQ ID NO: 38670 - DNA, 550 bp, Homo sapiens
atttattttcatttttatttttgagacagagtctcactatgttgcccaggctggagtccaagacccatagtggatggctgaaagcatggatagtacctaatcatacacacacacacacacacacacacacacacacacacacacacagacacacacactgtgttttttgcatatatatatggaacatatatatacacatacctatgatataatttgtaaaatttgtacatatatacctatatatatacacacacatatatattatatgtatacatttgtgtgtgtatacacacacacatattcygatatacacacacatgcctatataggtataagtataggtgtaagtataaactttatatacttataaacctatttgttgatatatatatacctgtatatatacctatgataaatatatatacctctatatatatatctatgataaagttcaacttaaaagttagtcaagataagagattaataataataactaataattaaataaaacaattataactatgctggcctcacaactcttgtgctttgg

SEQ ID NO: 38671 - DNA, 683 bp, Homo sapiens
tgaactttttcttcccacctaaacgttcttttcaaagtcttggttatgtcagagtaaaagtggtctttacagtggcccagaaagtactatgccattccccatcctctgaccttacccactgccactcccctccttactcaatcagcttcagctacccgggcctccctgctgttcttcaacacaccaagaacacttcagcttcaggacatttgcacttggagttgcctttgcctgcaatattcttctcatagatatctagatagccacttggcttgcttcatcacattctgtctctaatccatcctatgtaaactagaaaacaccctctcctatcccctgcatttcctctcaaatcctgctacatcaagagctaaatcaagtccctcaaaaactgttttgtcgacttctggcagttgccactataaccactggagattaattcccatccaagaagctgagcctccgacagagtccatgttggtgcctcactgtcctcatctccccaccactcaactcattcttcagaacttgttcttcctagatgcacttccatctcccccacagagcattttaaattttcccacttcgtcatcattgcagagttttgactgaygggtgatgacaaatttcttcaaagacgttgatttttatgcagggtctatgctttatattttaaaagtaaa

SEQ ID NO: 38672 - DNA, 643 bp, Homo sapiens
gcattaactctacccacaataattttaattttaattttctttaaagtagagcatgtccttaggagtaccctatgaagtaatttaagggcataatttaagtaataattatgttttttgtttaataattatgttataaatagctaatttaagtaataattatgtttttcataaaatctctgattttaacagttgtctcacccacaccaactaaacaatagtttaagtgattttcaagtattctaaagcattcaaacttgttttatctttttaaaatacaatcaatgactctttcttttcacacttctcatttcattsgtttatctaataataaattgtgtatttgccaaaacaagcacaactggtgtgagccagtctgggcacaaacactgctgactctacctaagcagagaaatttaactgttggtagcagaaatatgtcagtaccaaagagtcaaatagctctttctctgcaggtatccagaatgtcatggttatcatacagtttgatataaagaatgaaaagcatcccagtcacttcaatgcttcttggagtctaacttgtgtttcttttagaaagaatcaaattcaagttcatcctgtataattaaaattacacaaatctccactgcttataacatagagg

SEQ ID NO: 38673 - DNA, 1299 bp, Homo sapiens
tattagttaaaggttcgatcagttctgtcctagaagtttgctaattagctggaaagacagaatttgtatatcacatgcctaacagcaatatccatcaactagccagaaccaaaaccatgaatattggatcatactgatccatcctggttgtaaatagacaaggcccccatagccaagaatggggctactgcatgcacttgcatggcttgtgtcagaaaggtgccttccttcagtggtgagggaccactgaagttcagccattctctgtcggggcatctgtgcagagcacacaccttttttaaattgtaccatggcttgccatcctttgcactgtgcagcacagtcagcaaatcttatggagaaggcaagatttaagttgagatgtgggtcagactgggagatacgattgccaggaggcggggctggagcagatcagccagctgggggtagatagacaacatgcagagagctgtggcaggccaggttcctctacagggggctgtccaatagaaagattttatctggattttccagtagccatattaaaaggagtaaaaagaaacaggtgaaattatttttagtaatatattttaactttatatctccaaaatactatcatctcaacatctaaaaaatgttaaatgattattaatgagatagtttacattattttttgtattatgtctttgaaatttggagtacatttcacactgacagcatatctcaaatcagatgctaaattttatcctgagtacttgctgtttatatttcgtaaaatgtaaagttgaaaacatagattcatatacccaagttattctaaacacttaaaaaatgaatcagagtatcagtttttaaagtcaaattaatgaaaatgaaatcactgtgttcctccaaacacaagtccatttcaggtgctcagaggactctgggtggctctgtgagccacctctggcgtctgctctgtgggcaatgtgactatggagggactggggcaagccagtgctaggcacatggtgtgcctgaaaggcattaaggagacattgaagttttcaggaagataaatctcatacaaagtttgtaataaggaggaactacagacagagaaagagagagaaaccttagaatccaccaactcccatatgttgaacacagacatggcctagttcttttggtcactaagactggttatgctgcatttaaccaaacactttcttgaagaataaartatcagacaaaaggaagcttttctctttctatttagtatgattttttctacaagtttattgaggtgttgatgca

SEQ ID NO: 38674 - DNA, 658 bp, Homo sapiens
gtagtagatagtatgtaatttataactttctctagtrgtatgcagtattaaaagctttaataaagatgaggttaattaaggtttgatataatcagaggtatatatataagaaagaactttacagcattgctgaaatggatgattatgagtttagttgggtctggaggtaagagatattaaaaatgtgtaaagaacttgggggaagagttctagggactgaggagatgagaagggcaagtaacagattcagtgagtcaagaagtaggttgaggaaaagaggttttggtcagcaagggattttcagaattggaatgcaagggatctgcatatttattaaatccaagatggagtagaattagataattaaaactgaaagacagaaactcatgattccaaggtcttagaaagattcattgcttgaatgttttagtaaactcaaagatcatttctagtgctgacattctttgcttctgtaagtctgtgatgtcacagagatgggtgaaatggatatggtagaaaaattctgaattactttttgaaatcattgaacaaggtggagaaggtccagaagcataccatgaactacagaagaaggaaagatggagtaatctgatgcaactggtctgtatgaaatgcatagaccattgccctagctgaa

SEQ ID NO: 38675 - DNA, 621 bp, Homo sapiens
aaataataatatgttgttctattactcttcactgttagaaatctactttttcatattgtaccattctgaattaggatgtggacagcagcagttttgacatggttattttgtcttcataagtgccttaaacttgtggaataagtgtcaaggcctggaagaaaatccttcagaccatagtggaacactcttttagaaaatactcaatgataaaaggagataccatagaggagaaaacattgatattgatgactatgagtcaaagctgttctgatagaacagctggatagcctaggttttcttctagggtttttatggttttaggcacatgtatacatacataacaaacctgcactttgtgcacatgtaccctagaacttaaagtagtaaaaaaaaaaaaagaacagctggctagagggrctctgaacataaaagtgattttaaaataccttaacaaatttattttactcatgaatttttatgtatgtataaaatttgtacatgataaaaatcaacacttgatatttaaaacagtttcttcaggtcaaccatgatggctcacgtctataatccaagtactttgggaagctgaggcaggcaaatcgcttgaggccagaagataga

SEQ ID NO: 38676 - DNA, 621 bp, Homo sapiens
aaataataatatgttgttctattactcttcactgttagaaatctactttttcatattgtaccattctgaattaggatgtggacagcagcagttttgacatggttattttgtcttcataagtgccttaaacttgtggaataagtgtcaaggcctggaagaaaatccttcagaccatagtggaacactcttttagaaaatactcaatgataaaaggagataccatagaggagaaaacattgatattgatgactatgagtcaaagctgttctgatagaacagctggatagcctaggttttcttctagggtttttatggttttaggcacatgtatacatacataacaaacctgcactttgtgcacatgtaccctagaacttaaagtagtaaaaaaaaaaaaagaacagctggctagaggggctctgaacataaaagtgattttaaaataccttaacaaatttattttactcatgaatttttatgtatgtataaaatttgtayatgataaaaatcaacacttgatatttaaaacagtttcttcaggtcaaccatgatggctcacgtctataatccaagtactttgggaagctgaggcaggcaaatcgcttgaggccagaagataga

SEQ ID NO: 38677 - DNA, 576 bp, Homo sapiens
tttcttatattctttttagatctatctctttttcatgctttgtcttgcagactcacttgaagaataacaaaccactaccaacttaacactcctttataaacaatggggacctagagtctaaagaactttgaagaaatgatcaaaattaaggatttaaaagaccctatgtaatattatccaattgttgtttgtttgttagatggtagttgacttaaaagtataaagactgggatactactatttttaaccaattattcactgtgtaaatcattctgggtgatgatcaaactcatagaaaacatattttaaactccaaataagataawtttatcaaagtcaacaggcaacatggcagcatagcagcataagtggatccttatttgagttaaatttaactgtgtgcatagaggctaccaatgatttttaggtgctctttagagttctttaattccacacccacttgctatctctcactgataaacttttggcttcttgatgctttatgattataatcagctgagtatcatcatatggaaatgcacatatgataatgtgcaaaatacttgccttatacaa

SEQ ID NO: 38678 - DNA, 1044 bp, Homo sapiens
taatgtaatttattattttaaaaaagtttttcagctgggcatggtggctcacgcctgtaatcccagcactttgggaggctgaggcagatggatcacctgaggttaggagtttgagaccagcctggccaatatggcaaaaccccctctttactaaaaatacaaaaagttagccagacgtagtggtgcgtgtctgtaatcccagctacttgggaggctgaggcaggagaattgcttgaactggggaggcggagactgcagtgagctgagatcatgcccctgtactccagcctgggtgacagagtgagacccgtctcaaaaaaaaaaaaaaaaaaggtttttcattgcctagctattatgtcacaaagatttgcaaactctcagtgccatagagcaacatatatttatttagcttccacatcagtggaagtggggctgggcctacagggaaggcttcgctggatgtggctctcatcctcttcctggtattagcaggctgtcttgtgggctcttctcatggaatggcagaaactcaagatgtcaagtgagggacatctatgaaactagcacattgtcaacttcctccttcattggccaaagcaagtgacaaagtcaagggatagggaagtacattctactcatggatgtgggggtaggggagggggttaatatttctgattaataatctattctacaacagttaccataaatatatatatttaggccaggcacggtggctcacgcttgtaatctcagcactttgagaggccgaggagggcagatcacttgagtccaggagctcgagaccagcctggccaacatggtgaaaccccatctctactaaaawtataaaaattagccagttgtggtggtgggcgcctgtaatcccagctactcgggaggctgaaacaggagaactgcttgaacccagaaggcggaggttgcagtgagctgaaatcgtgccactgcactacagcctcggtgacagagagagactctgttaaaaaaatatatatatatgtaaaaaatatatatatatatttagag

SEQ ID NO: 38679 - DNA, 1044 bp, Homo sapiens
taatgtaatttattattttaaaaaagtttttcagctgggcatggtggctcacgcctgtaatcccagcactttgggaggctgaggcagatggatcacctgaggttaggagtttgagaccagcctggccaatatggcaaaaccccctctttactaaaaatacaaaaagttagccagacgtagtggtgcgtgtctgtaatcccagctacttgggaggctgaggcaggagaattgcttgaactggggaggcggagactgcagtgagctgagatcatgcccctgtactccagcctgggtgacagagtgagacccgtctcaaaaaaaaaaaaaaaaaaggtttttcattgcctagctattatgtcacaaagatttgcaaactctcagtgccatagagcaacatatatttatttagcttccacatcagtggaagtggggctgggcctacagggaaggcttcgctggatgtggctctcatcctcttcctggtattagcaggctgtcttgtgggctcttctcatggaatggcagaaactcaagatgtcaagtgagggacatctatgaaactagcacattgtcaacttcctccttcattggccaaagcaagtgacaaagtcaagggatagggaagtacattctactcatggatgtgggggtaggggagggggttaatatttctgattaataatctattctacaacagttaccataaatatatatatttaggccaggcacggtggctcacgcttgtaatctcagcactttgagaggccgaggagggcagatcacttgagtccaggagctcgagaccagcctggccaacatggtgaaaccccatctctactaaaaatataaaaattagccagttgtggtggtgggcgcctgtaatcccagctactcgggaggctgaaacaggagaactgcttgaacccagaaggcggaggttgcagtgagctgaaatcgtgccactgcactacagcctcggtgacagagagagactctgttaaaaaaawatatatatatgtaaaaaatatatatatatatttagag

SEQ ID NO: 38680 - DNA, 906 bp, Homo sapiens
  misc_feature (1)...(906): n = A,T,C or G
ctttaggatgttttggagaatattttaatgtccaaatttactcagtagttttataaaaatagctacacattcamgtccaatttgaagtggtaaagtactttgaaaatcctttaagtttatctgaagtgcagctaaaatgtagtactcaagttcagcaaatgggtgcaatttgtttccaggtttgaattgtttcaattttgtttgtgtgtcagcctaggctaccccagttaaatcagtcttggaaataaaaggacaagtccaattaaataagtttattttgcgctagcatttggcccttgctaagagaagagtcttttctgtgaagtaaaggaaaaacagattgagaagtgccatgtcaatgatgcttatgggttaaaaagatgctaacacagtttaacaccttagggtccaaaaagggcggaagggcacagaatgttctgtctctctcctcctatgattatttgaacaatatgttaaattgtattcttattccaaccccaagggagtgactcagaaggagataacagaaggaaaggaaaggttcagatgaagaatcattctggaatgtttgacaacgtttaaaagcactgggttagacagcatcatttcttccatcactcttcgtaaactgaaatctttgaatgtatcctgttgctcgaacaacgtttgttttaccttagaaatccaagggttcatttattcttttaatgctaggggcaaaactctatcaaaagttactgataaattcagattgttttcattactttaagaggaccagtgagattgttatggactaaatgtttgnnnnnnnnnnnnnnnnnnnnnnnnnnnnnnnnnnnnnnnnnnnnnnnnnnnnnnnnnnnnnnnnnnnnnnnnnnnnnnnnnnnnnnnnnnnnnnnnnnnnca

SEQ ID NO: 38681 - DNA, 906 bp, Homo sapiens
  misc_feature (1)...(906): n = A,T,C or G
ctttaggatgttttggagaatattttaatgtccaaatttactcagtagttttataaaaatagctacacattcaagtccaatttgaagtggtaaagtactttgaaaatcctttaartttatctgaagtgcagctaaaatgtagtactcaagttcagcaaatgggtgcaatttgtttccaggtttgaattgtttcaattttgtttgtgtgtcagcctaggctaccccagttaaatcagtcttggaaataaaaggacaagtccaattaaataagtttattttgcgctagcatttggcccttgctaagagaagagtcttttctgtgaagtaaaggaaaaacagattgagaagtgccatgtcaatgatgcttatgggttaaaaagatgctaacacagtttaacaccttagggtccaaaaagggcggaagggcacagaatgttctgtctctctcctcctatgattatttgaacaatatgttaaattgtattcttattccaaccccaagggagtgactcagaaggagataacagaaggaaaggaaaggttcagatgaagaatcattctggaatgtttgacaacgtttaaaagcactgggttagacagcatcatttcttccatcactcttcgtaaactgaaatctttgaatgtatcctgttgctcgaacaacgtttgttttaccttagaaatccaagggttcatttattcttttaatgctaggggcaaaactctatcaaaagttactgataaattcagattgttttcattactttaagaggaccagtgagattgttatggactaaatgtttgnnnnnnnnnnnnnnnnnnnnnnnnnnnnnnnnnnnnnnnnnnnnnnnnnnnnnnnnnnnnnnnnnnnnnnnnnnnnnnnnnnnnnnnnnnnnnnnnnnnnca

SEQ ID NO: 38682 - DNA, 1031 bp, Homo sapiens
aatcccagaatttagggaggctgaggtgggaggattacttgggctcaggcccaggagttcgagaccagcctgggaaacatagggagaccctgtctctacaagaaaaaaaaaaaattagctaggtatggtggcctgcccctatagctacttaggaggctgaggtgggaggatcacttgagatcaggaagttgagcctgcagtgagccatgattttgctactgcagtccagcctaggcaacagatcaagaccctgtctcaaaaaaaaaaaaaaaaaatcttaagcgaagaggtcaagttgaactatagattatttaaaaagaaaggaagatttagagggcacattggagacaggaaagcagttgaaagaaatgacgaagaacatacacattcattaaatatttgttgaatttcttgagggcaggtgccaatcataaccatcttttaatccttagaacctatccctgtctgctatatactagacacgatgcaaatgtttgtcataataaaatgagactgttgtaaatgacttttaattatttcccactgagggaagggtgtgatgaaagatccttttctcttttgtttagaggaaatgagaaagaagaatagcttagggcacttggaaggatataattcaattctacaaacatttcacactatctattgggttaaccatgggtgagtgtagacccacatcagtgcattcttttccccagtcaattagattcaggractagtatttcctttgaagcagattctgtccattctcccaacactagggaaatacatctatagcagggaatctttttttttttcaatggatatagtctgcccaacattcttcctataagattattcaaatagaagttttgttaacagaaatcacatataataagtcagtcagtcattgggctatagaagctgaaatttctcatgctgcaaattcctccacttttagatatttagatatttcactcctggtggctgagtagtgaagtcgcctctatgttcaatttctcctccgcttaagt

SEQ ID NO: 38683 - DNA, 611 bp, Homo sapiens
ctcctaatataattatattactctcttatttatctttgcaactttaagtaaaatatttataccattttttaaatcagctgtacacactatctcttatttgcttcatcattgttctctttkctctccctaaacttttatcacctgtatttttagcatcagaatcaatgagattacattcagatacttatgataattaaatattccatcctttattatgtattggttttaaaattcaaaattaataaggtgcttaccttattcctacaatgatgtgaccatgagattttggtttttgttttcctttgatgtttctaattccctttcctgccatacctttattgataatgttgttctaaatgatcaagaatataatcaaatcctaacctcctttacccccagataattctcttttggaacttctagtctctgaattgttcagtattgaatactgtctactagctctcttccttgctttctacatttggagctattttttcctggtttccatgttgtcctcctttttgctttattccctcattttgctggtacacatcctcaagtaactgccaaagaaagaatatgtggtaaataatttcccctaatctttgcat

SEQ ID NO: 38684 - DNA, 611 bp, Homo sapiens
ctcctaatataattatattactctcttatttatctttgcaactttaagtaaaatatttataccattttttaaatcagctgtacacactatctcttatttgcttcatcattgttctctttgctctccctaaacttttatcacctgtatttttagcatcagaatcaatgagattacattcagatacttatgataattaaatattccatcctttattatgtattggttttaaaattcaaaattaataaggtgcttaccktattcctacaatgatgtgaccatgagattttggtttttgttttcctttgatgtttctaattccctttcctgccatacctttattgataatgttgttctaaatgatcaagaatataatcaaatcctaacctcctttacccccagataattctcttttggaacttctagtctctgaattgttcagtattgaatactgtctactagctctcttccttgctttctacatttggagctattttttcctggtttccatgttgtcctcctttttgctttattccctcattttgctggtacacatcctcaagtaactgccaaagaaagaatatgtggtaaataatttcccctaatctttgcat

SEQ ID NO: 38685 - DNA, 611 bp, Homo sapiens
ctcctaatataattatattactctcttatttatctttgcaactttaagtaaaatatttataccattttttaaatcagctgtacacactatctcttatttgcttcatcattgttctctttgctctccctaaacttttatcacctgtatttttagcatcagaatcaatgagattacattcagatacttatgataattaaatattccatcctttattatgtattggttttaaaattcaaaattaataaggtgcttaccttattcctacaatgatgtgaccatgagattttggtttttgttttcctttgatgtttctaattycctttcctgccatacctttattgataatgttgttctaaatgatcaagaatataatcaaatcctaacctcctttacccccagataattctcttttggaacttctagtctctgaattgttcagtattgaatactgtctactagctctcttccttgctttctacatttggagctattttttcctggtttccatgttgtcctcctttttgctttattccctcattttgctggtacacatcctcaagtaactgccaaagaaagaatatgtggtaaataatttcccctaatctttgcat

SEQ ID NO: 38686 - DNA, 1303 bp, Homo sapiens
gcattgaagatactttgttgacttcgaaataaagcaaaacagaaagactgcgagacacagagaaaggtgaagtttgatcaatagtcccagtttgattcattctgaaaggaggtagagaagaggtaaatgcaaaagcagagtcaaatgaaggaaaacaacaaaccatttgccagaaaatataagacacattctgtactgaccaagggctctcagctcagcaagaggggttccagggtcaggatgaaaagctggggtcagggtgtggtgagtattgacactccaccattaaagagagtccagatggacacagactagagggtacaagcaatttccacagcagggaaagtttctctcaactcctggtagggagaggaaccatcaccttaccattaaaaatatttgagaatgcaaattgtaccgttgatgaatgagttaataacaataacaggtggctcatgcctgtaagcccagcactttgggaagtcaaggagggcagactgcccaggaactcaagaccagcccgagcaacatggcgaaaccccatctctacaaaaaaaacacaaaaattttctgggcatggtggcgcatgcctgtagtcccagctactcaggaggttgaggtgggaggatcacttgaacctggaaggtcaaggctgcagtgagccataaccacaccactgcactccagcccgggtgacagagtaagaccctgtctcaaaaaacaacaacaaaaaagtaaaaaaccaaaaataaataaataacaaaacaaaaataatagctaacattttcatgtagtgcttgttctgtagcaggcaatgttctaagcactttacatatattaacttatctaagttcaccctatgagtacctatgaggtaggcactgttatcgttattctatatatgagataattgaggcatagggagattaagtgacttgcctgggtctcacaggaatggcagagccaagatgaatcaatcaattaatgcagccacttgtgatgytctgccttagcagatagaaacacatgctattttttgcccttataatgtagaaatagactttacactcagcagtccacttcagacctcagtactgagtgctcgtcagtattcatacagaatagagccttctcacccttgctgtatcgcattttgtgcttatttatcacttacaacacacacaatttgtcacattttatctcccatttctttcttattgtatatatttatggggtacaatgtgatgttttaatatatatatatatatatatatatatatagtggaatcattaatttaagcta

SEQ ID NO: 38687 - DNA, 1303 bp, Homo sapiens
gcattgaagatactttgttgacttcgaaataaagcaaaacagaaagactgcgagacacagagaaaggtgaagtttgatcaatagtcccagtttgattcattctgaaaggaggtagagaagaggtaaatgcaaaagcagagtcaaatgaaggaaaacaacaaaccatttgccagaaaatataagacacattctgtactgaccaagggctctcagctcagcaagaggggttccagggtcaggatgaaaagctggggtcagggtgtggtgagtattgacactccaccattaaagagagtccagatggacacagactagagggtacaagcaatttccacagcagggaaagtttctctcaactcctggtagggagaggaaccatcaccttaccattaaaaatatttgagaatgcaaattgtaccgttgatgaatgagttaataacaataacaggtggctcatgcctgtaagcccagcactttgggaagtcaaggagggcagactgcccaggaactcaagaccagcccgagcaacatggcgaaaccccatctctacaaaaaaaacacaaaaattttctgggcatggtggcgcatgcctgtagtcccagctactcaggaggttgaggtgggaggatcacttgaacctggaaggtcaaggctgcagtgagccataaccacaccactgcactccagcccgggtgacagagtaagaccctgtctcaaaaaacaacaacaaaaaagtaaaaaaccaaaaataaataaataacaaaacaaaaataatagctaacattttcatgtagtgcttgttctgtagcaggcaatgttctaagcactttacatatattaacttatctaagttcaccctatgagtacctatgaggtaggcactgttatcgttattctatatatgagataattgaggcatagggagattaagtgacttgcctgggtctcacaggaatggcagagccaagatgaatcaatcaattaatgcagccacttgtgatgctctgccttagcagatagaaacacatgctattttttgcccttataatgtagaaatagactttacactcagcagtccacttcagacctcagtactgagtgctcgtcagtattcatacagaatagagccttctcacccttgctgtatcgcattttgtgcttatttatcacttacaacacacacaatttgtcacattttatctcccatttctttcttattgtatatatttatggggtacaatgtgatgttttaatatwtatatatatatatatatatatatagtggaatcattaatttaagcta

SEQ ID NO: 38688 - DNA, 1354 bp, Homo sapiens
caaaccaggcttgggcaggcgagtctcccagccctccctccagcctggctctgggtgcagacccacggtcatggggaccttgagcacgtggggtcttcttttaggagggtttgtggaactgtagctctttacatagcccagagacattctccctttaaagtttttgggtaatgctcaattccatctttaaagaggtgggagttttaatagcacagctgtaatagaatcacatttcgagtttttgagacaggatcttgttctgtcacccaggctggagtgcggtagcatgatcacagctcattgcagcctccaccttctgggcttaagtgatcctctggtctcagcctctggagtaactgggaccagcatgagccactgcagctggctaatagttttttgtagagatgaagtctcactatgttgcccaggctggtctcaaactcctgggttcaaacaagtgtcctacctgggcttcccaaagtgctgggattacagatgtcagtcactacatctgtcccacatttatatttaaatagaagtagcatcctatagtctcaatttctgatcaaatgtgaaacaatcaaaatgtcagtctgagagttgatctaatataatagtaaaggctcacttataggctaaatacttccatcaaataaatcttaaagtaacattttctaattcaggttttgttttgttttttactaatccccttctaaacccacttaatttgtatttaattcatattcccaataataaaatcaaggaactacggaaacattgcatattccactaaactgtgtttacaatattaacaaaatctatttactccatagaataagcaaaaactcagacaagaattgactcactgggttcgctttgaggactgttatattccatttagaggtaggatttccttatttctttcgtagccacacctttggagatgtggccaagcattctttacacraaacaagaaacacttgcaaagcggttcaaattcaaaggttcccttatacagttgaatccaagactgctgtcagaaaccaaacatttatcaacgcaaatgctcaaggtactgagtggaaaaaaggttcttagatctaaaaagtccaatctacccttccatagcaaggagctggggctctgcatgatggtagatgacttccaacgtgatctttccccccatgctaccagctgagaagacctcatactgaaggtcttcacagagacaagatgcctcatctccctggccttattttgtggcagctttcgggacattgttttcagttataacttttcagactctttcaccccatgggggttgtgttcccatattagaattaatataaatgca

SEQ ID NO: 38689 - DNA, 1354 bp, Homo sapiens
caaaccaggcttgggcaggcgagtctcccagccctccctccagcctggctctgggtgcagacccacggtcatggggaccttgagcacgtggggtcttcttttaggagggtttgtggaactgtagctctttacatagcccagagacattctccctttaaagtttttgggtaatgctcaattccatctttaaagaggtgggagttttaatagcacagctgtaatagaatcacatttcgagtttttgagacaggatcttgttctgtcacccaggctggagtgcggtagcatgatcacagctcattgcagcctccaccttctgggcttaagtgatcctctggtctcagcctctggagtaactgggaccagcatgagccactgcagctggctaatagttttttgtagagatgaagtctcactatgttgcccaggctggtctcaaactcctgggttcaaacaagtgtcctacctgggcttcccaaagtgctgggattacagatgtcagtcactacatctgtcccacatttatatttaaatagaagtagcatcctatagtctcaatttctgatcaaatgtgaaacaatcaaaatgtcagtctgagagttgatctaatataatagtaaaggctcacttataggctaaatacttccatcaaataaatcttaaagtaacattttctaattcaggttttgttttgttttttactaatccccttctaaacccacttaatttgtatttaattcatattcccaataataaaatcaaggaactacggaaacattgcatattccactaaactgtgtttacaatattaacaaaatctatttactccatagaataagcaaaaactcagacaagaattgactcactgggttcgctttgaggactgttatattccatttagaggtaggatttccttatttctttcgtagccacacctttggagatgtggccaagcattctttacacgaaacaagaaacacttgcaaagcggttcaaattcaaaggttcccttatacagttgaatccaagactgctgtcagaaaccaaacatttatcaacgcaaatgctcaaggtactgagtggaaaaaaggttcttagatctaaaaagtccaatctrcccttccatagcaaggagctggggctctgcatgatggtagatgacttccaacgtgatctttccccccatgctaccagctgagaagacctcatactgaaggtcttcacagagacaagatgcctcatctccctggccttattttgtggcagctttcgggacattgttttcagttataacttttcagactctttcaccccatgggggttgtgttcccatattagaattaatataaatgca

SEQ ID NO: 38690 - DNA, 1354 bp, Homo sapiens
caaaccaggcttgggcaggcgagtctcccagccctccctccagcctggctctgggtgcagacccacggtcatggggaccttgagcacgtggggtcttcttttaggagggtttgtggaactgtagctctttacatagcccagagacattctccctttaaagtttttgggtaatgctcaattccatctttaaagaggtgggagttttaatagcacagctgtaatagaatcacatttcgagtttttgagacaggatcttgttctgtcacccaggctggagtgcggtagcatgatcacagctcattgcagcctccaccttctgggcttaagtgatcctctggtctcagcctctggagtaactgggaccagcatgagccactgcagctggctaatagttttttgtagagatgaagtctcactatgttgcccaggctggtctcaaactcctgggttcaaacaagtgtcctacctgggcttcccaaagtgctgggattacagatgtcagtcactacatctgtcccacatttatatttaaatagaagtagcatcctatagtctcaatttctgatcaaatgtgaaacaatcaaaatgtcagtctgagagttgatctaatataatagtaaaggctcacttataggctaaatacttccatcaaataaatcttaaagtaacattttctaattcaggttttgttttgttttttactaatccccttctaaacccacttaatttgtatttaattcatattcccaataataaaatcaaggaactacggaaacattgcatattccactaaactgtgtttacaatattaacaaaatctatttactccatagaataagcaaaaactcagacaagaattgactcactgggttcgctttgaggactgttatattccatttagaggtaggatttccttatttctttcgtagccacacctttggagatgtggccaagcattctttacacgaaacaagaaacacttgcaaagcggttcaaattcaaaggttcccttatacagttgaatccaagactgctgtcagaaaccaaacatttatcaacgcaaatgctcaaggtactgagtggaaaaaaggttcttagatctaaaaagtccaatctacccttccatagcaaggagctggggctctgcatgatggtagatgacttccaacgtgatctttccccccatgctaccagctgagaagacctcatactgaaggtcttcacagagacaakatgcctcatctccctggccttattttgtggcagctttcgggacattgttttcagttataacttttcagactctttcaccccatgggggttgtgttcccatattagaattaatataaatgca

SEQ ID NO: 38691 - DNA, 519 bp, Homo sapiens
acctcgtgatccgaccgcctcagcctcccaaagtgctgggatgacaggcgcccgccaccacgcccggcccattattatttctttagagacggggtcctgctctgtcacccagcctagagtgcagtggtgcaatcatcgctcaccgcagcctcgacctcctgggctccagtgatccttccacctccctctcccaaagtgctgggatcacaggcctgagcctccgcgcccggccacctcctcttacagtagttcccaacccattcttcggcctcactgcatggctcacacggaaacatctcagtttaccaccgcacgatgtaagtgygttctacactcaccaaagagaaaagaagtctgaaggataaggcagagaagagaaaggttgtaggtaggaggattggtgagcagggaagagatatgatggaagaggcggagggaaagacggtaaaggggcgaagaaatgccaagtgaagatgtgtaggcacacagaagaaccgaacccagaaccagaaaggggaa

SEQ ID NO: 38692 - DNA, 570 bp, Homo sapiens
tacagaggtttcctccaagaccatctgcatctcctttaaaacttttctgtctaaaatgttcagtacagtgtctggcacagaagactttaggcacatcaagtttactaactagagggactaaatatgagttttcaaaacggagtttaatgtacttagttttattaaaccctggacagaaaaactggaaggaggaagagttggcaggtacgaaaaccagaagcagaagcttttacactacataaytgcctctgccccccggcaccccgactcctagaactaatatttctctaactttaaaagcacaataagaattttaatcagggtatatttttctctacccacagaatatgacaggttattaagtacagatttttttccagaatcttctcataaaccttaagagattaaaaattgtatctcccaatccctccttatctgtatggcaaatatttatccatccttcaggacccaattcagtccttgcctgtcccattgcctcttttggtcacatagttaaagggtttgaaatctccaaaccagaacagcgggaggggaccaggctggcgacgg

SEQ ID NO: 38693 - DNA, 570 bp, Homo sapiens
tacagaggtttcctccaagaccatctgcatctcctttaaaacttttctgtctaaaatgttcagtacagtgtctggcacagaagactttaggcacatcaagtttactaactagagggactaaatatgagttttcaaaacggagtttaatgtacttagttttattaaaccctggacagaaaaactggaaggaggaagagttggcaggtacgaaaaccagaagcagaagcttttacactacataactgcctctgcccyccggcaccccgactcctagaactaatatttctctaactttaaaagcacaataagaattttaatcagggtatatttttctctacccacagaatatgacaggttattaagtacagatttttttccagaatcttctcataaaccttaagagattaaaaattgtatctcccaatccctccttatctgtatggcaaatatttatccatccttcaggacccaattcagtccttgcctgtcccattgcctcttttggtcacatagttaaagggtttgaaatctccaaaccagaacagcgggaggggaccaggctggcgacgg

SEQ ID NO: 38694 - DNA, 570 bp, Homo sapiens
tacagaggtttcctccaagaccatctgcatctcctttaaaacttttctgtctaaaatgttcagtacagtgtctggcacagaagactttaggcacatcaagtttactaactagagggactaaatatgagttttcaaaacggagtttaatgtacttagttttattaaaccctggacagaaaaactggaaggaggaagagttggcaggtacgaaaaccagaagcagaagcttttacactacataactgcctctgccccccggcmccccgactcctagaactaatatttctctaactttaaaagcacaataagaattttaatcagggtatatttttctctacccacagaatatgacaggttattaagtacagatttttttccagaatcttctcataaaccttaagagattaaaaattgtatctcccaatccctccttatctgtatggcaaatatttatccatccttcaggacccaattcagtccttgcctgtcccattgcctcttttggtcacatagttaaagggtttgaaatctccaaaccagaacagcgggaggggaccaggctggcgacgg

SEQ ID NO: 38695 - DNA, 486 bp, Homo sapiens
ggagggattgtgaggattaaatgagaaaatacatgtgggccttggaatgactcagggcatataggaagcttagtaaatggtagcaagatcataattattaccatagttcgatcaactgtaagacccactcaataaacagtccacaccattatgttacgtaccactaagaaaaaacactaccaattaaactgtcagcctgtgtattataaatcagatatctcagaattaatgaaatacagtatcactacatatacctctaggtttccrgaagtaagtcacagtgtacgtaactagtgacaaagattctttacttggccaaactcagaggagattctttacttggccaaattcagaggagattcacgcctctgaatctcctaggtccatccgtgttgttcctcaaaatccagttttagcaaaagaaccctgcctagccggtttcgccagaacctcggtactcagaatcttcatgttcctcatccttca

SEQ ID NO: 38696 - DNA, 1368 bp, Homo sapiens
cataatgtatacatattatatatgaacagagtagaaatatacagctaaaattgttttaatatacaaaccaaaatgacattttaaataaaagagaagcatatgacatcatccaagtagaaggaactgctaagagtcatctagttcaaactctaatctggtccattacctttcaagcattcaagtaagttttctgtcctgttttttaaaggcctctaggattgtataatgtatatcaagtgtaaggctttccaaaatcatcctttattcacttatgcaaaataagaaagaaaacaatgtgagaaaagatgaatattctcaaatctggcagtgyctgctgataacttctcactgttagatcagagagttattggtactgtttgtcattcatgtcctgaaatcttcaagtacaccaggaactgcacatgttcccaaaccaccatttcaaattagcaccaacagattggagttaatggcacatataacacattctgcagaatttaaagctttcaggccagctctaataggtagctgtgccttgatttgtggttattatcctacaataacataaaaattagctatccaggtaaagagtggctctccattttttagttggctacccacccccaattccaaaagcataggtccatcatgttcagattttaaagttgaaagaaaggtagacaccttagacacctcatggaggagcccggagacagttgtgaataatgctgccccatctgagatagaaccttcttttgttatgtactgggcacttaaagaaaaaaagtacaactctgtaatggcaaaagaaaggtgcaaaaaaatgcaggatagaagcagggccttgagaatatatctgggagttggaggaagaaggtgggaaaaaggctgagacaatgtacagcatgggctctgcagactgggcagggagaacataacaaccagtaggcaagataaggaatacagttaaatgaatcaatgagtgagtaaatgaatgaatgaaccaacataggaaccaatgaacatacaaataaaatgaatgaataagtgaatgagtgggcatataaatgaatgaagttgctgaatggtaggctggaactaagatgcagacagtcctaaatgtcatgtaatgagtctgaattcatccaaaaaagcagaatgagaaagacatttcttagacttctgcagagcacagtctgcccaactgtatgcacagacctaactaaaagcaatgagagttcacggaaagtttttaactctattaaatcagtcactgtggaagatcattcagggaacagtaggcagaggataagaaacagaagtcttacaacaggtccaaggacaacgagctaagcaattgggttgttg

SEQ ID NO: 38697 - DNA, 632 bp, Homo sapiens
ccacaggttggacaagcttgacctaggccgagaccaatttgccatctattacacttgatttcttcttaggaaattgtgcctgacacatgggcatatggttgcgccagaatggagtcatacggaacttctgtagtatctggcgttgtgctttccagtacctctatggaggtttggaccataatcttgagagacactatcttgaatgccataattccaaatgttgaaattttgaaagattaaaatccctaaagtctagttttatttatttatttattttgagacagagtcttgccctgtcacctaggctggagtaccgtggcgtgatcttggcttgctgcaacctctgcctccgggtctccagcaatctttccacctcagcctcccgagtagctggggctgcaggtaggagccatcatgcccggctaatttttgtattttttgtagagatcgggttttgccatgttgcccaggctggtcttgaactcctgggctcaagcgatctgcccgccttggcctcccaaagtgctgagattataggtgtgattcactagctccagcctaaaatccctaaattctaaaatcccmaaatcacaattctgagagaccaaaatttcaaaaatataattgtggaa

SEQ ID NO: 38698 - DNA, 1082 bp, Homo sapiens
  misc_feature (1)...(1082): n = A,T,C or G
annnnnnnnnnnnnnnnnnnnnnnnnnnnnnnnnnnnnnnnnnnnnnnnnnnnnnnnnnnnnnnnnnnnnnnnnnnnnnnnnnnnnnnnnnnnnnnnnnnntggggtttgcagtagcaggagttctctgacttggttggaaaaagatcgcgttctaagagattggaaagcttcataggccattgatagggcggtcagatatgaaaaatgtaaaggtggtcatgtagaaatgagaaaggatcaaatgtgttcaaatttatttatgagaaaaatggatttttaaggcagtgtttcaggaactacagtactaaataaaaggactgatatgtatatgtcactgtttttttaaattaaaaatatttcaaatcataaaagtacattatagaaaatatcgttaagtaaaagtattaaataaaaatcacccattagctcaccatctagaaataataattattattttgcagtacatatttccagtttttctatgtatgtatcagtataaatcatttaaaaatggcttttttttgttttttttttttaaattgagacagagtctctgttgcccaggctggagtgcaatggcatgatctcagctcactgcaacctccacctcccgggtgcaagcgattctcctgcctcagcctcctgagtagctgggattataggcaygagccaccacgcccagctaatttttatacttttagtagagacagggtttctccaagttgcccaggctggtctcaaactcctgacttcaagtgatccacttgcctcggcctcccaaagtgttgggattactggcgtgagccaccgcgcctggcctgaaaatagtttttaataaacccagtggacctgtaggtgattgatgtgaaccggatcattatgcttccgtgacatttcttggtttgaagtgtggtaagttagagcaactgagattttcataaacacttcatttctgggtttcatctgaacattgtcatcctcattttgctgatacttcctcctttcccaaggtcagcaggccgtgacagctggtactgccatgtttttgatggcctaattaaatatttcatataaaatgca

SEQ ID NO: 38699 - DNA, 556 bp, Homo sapiens
tcttggctctttggcagggctctggaggggaagtgagtaagccattgggatgtcactgtggtaatgtggacagggttttctggttttgtctccttccctgtggcctttttccatgtccccccaacccctggacttccacrgctgggccagacatttcccttcttagacaaatagactcgcttcatcccctccatagctgcagaggagaaatccttggtttgggtcccagtttttccatataggctattcttgtgctttatgcagacagaaacattagtacagtatgtacagaattagcagtatagtaataagtcattttaaccaacagatgtaaaaaatgcttcagcatacctttgtaatactaggcctgattacagaatgggagtggtctgtataagtgagctgtggtagaaaatacaacccttcagaataagttaaatgtaattaacttcactttaccagagtcatttttgttcccacagttacccgagtactaatttctaaacttgatgtgtcaagaatgtggcagaatggtgtcaacttaatggccaagaaa

SEQ ID NO: 38700 - DNA, 1197 bp, Homo sapiens
gttctttcttgggagctctggggyccggggtgtagccatcctccccttgaggctgcctggaggctgagggtcaggagcgagtggggctgggggctaggttgctgcccctcagcgtgtctccccaggatctgcaggagccatgtccctggctctctcaggggacatacccaattttaggggtgtgagtggaggccagtcactgtcctcaagtactcagcaaagagcccccaatcccgctggtgaagttctcaccccaccccctgcttcctcatccaatcagggacaaggtggggacagtgacccaggaattgctgcagccctggaaatcccttggggcttaagcctcaaatgaaaagtgagtaaaatctaacaaaaaggcaacattgtccattactgactcacgtggatcttcgaagaaggcacccagtgcacatctgctggggaacagggaagaaatcagatcagaccccacacagccccgccgggagccccgcagcaggaggggacagagaagacaggtcaaagagggtgtcctgaacccccaaagaggcccgtagcccctgggcagatgagtcacaggcagcacagaagcaaggctcagagcgagggcactgctggagagagcgtggcagaggcagaagcagctgggactgtccacggaggaacagacaagggagacatgggccagccatgcgacgcaggatgactcagtctttaaaaggcgggaaactctgacatgtgtgacaacacggctgaaccttgaggacatgagccaagtgagatcagccggtcacaaaaggacaaatcctgtgtgactacacttctacgaagtccctggagtggctacgtccatagagactgaaagcagaaaggggggtgccaggggctggggaggggctatggggagcgactggaaatgaggatgatgacggctgcacaactttgtgaatgtacccaatgccactgaactctacacttaaaaatggtttcaggacgtgaaattgtatgtggcttgtatttgatttcatttacaaagacccagtctggcagcagttgggctctgcactctgcacggagcatggtcctcagccctacatgcagtcaatgaccctctccctcacactagtcacatctacagagggggaggctgaggccaaaacagctgtgaccagctccagcccagagcgagggcatgat

SEQ ID NO: 38701 - DNA, 621 bp, Homo sapiens
aggcccttccagcccctgaaactcccctgccccaccccacaccagcttatccataatgggcctgagaccagaaaaccaaaggtgtgggctgccgagctgcccgccttaacgcggaccagacatcattactccagtctccattagcagtgaacgcagaggygacgttcaccttctcactgagccatgagtgcatctgccttggccatctcggaagctagcagatcgcagaaggaaagcaacatgtgagtggcgcgggtggtcctcatgggccccagcagcatttgtcattgatggaactgatgaccgagaccaggatgggggcgctggctgcctccaccaagcatgcgtctggctgtccacattgctggactcggctgctgcggctaagatgctttcatgtcccacgttgggctggttttcgtggcaaacgttagccctgaaatgtaagtcctgcaccgcacgttcagcaaggactccctcaggtccgggccaagccttgacatacatgctgggcacccacttctccaggcagagttctcatccctctggctcaccagctcagaacggcacgctcagtaaatgccagtgcttaggacgtatccatgtgaggtcttggtacaa

SEQ ID NO: 38702 - DNA, 621 bp, Homo sapiens
aggcccttccagcccctgaaactcccctgccccaccccacaccagcttatccataatgggcctgagaccagaaaaccaaaggtgtgggctgccgagctgcccgccttaacgcggaccagacatcattactccagtctccattagcagtgaacgcagaggtgacgttcaccttctcactgagccatgagtgcatctgccttggccatctcggaagctagcagatcgcagaaggaaagcaacatgtgagtggcgcgggtggtcctcatgggccccagcagcatttgtcattgatggaactgatgaccgagaccaggatgggggcgctggctgcctccaccaagcatgcgtctggctgtccacattgctggactcggctgctgcggctaagatgctttcatgtcccacgttgggctggttttcgtggcaaacgttagccctgaaatgtaagtcctgcaccgcacgttcagcaaggactccctcaggtccrggccaagccttgacatacatgctgggcacccacttctccaggcagagttctcatccctctggctcaccagctcagaacggcacgctcagtaaatgccagtgcttaggacgtatccatgtgaggtcttggtacaa

SEQ ID NO: 38703 - DNA, 356 bp, Homo sapiens
ctgcaggcttctccccaagccgggctgcagacctgagcagggagtagtttgcctgactcttcttggaatgttccagaactcagtggctgcacctgccttgtctgtccctgtccctgggttcatccaggccggccatctagcaccctccgtcaccctctgcgtgcacctgggttcatccaggccggccatctagcaccctccatcaccctctgcgtgcactgcgtgcccaggcccgcctcgtggagccttcaaaagccctgrcggtgcacctgatgcatccaaggcacctggcataggcagaggagggggaggggggcagacgtgggcagatgggcactgcagggaaagggatgcgg

SEQ ID NO: 38704 - DNA, 808 bp, Homo sapiens
atagggaaggagaaaaagagggaaggacacagagggagaggaagggttggaggaagagagggagagaggaaagagagagagagggaggagaaagacaatcataaatttcaatgatcagtcactttcaccactatcatcacaagctgggtttatttaattcaaaataaagtatgtgcccgttgaaaaaaatgcttgcaatgtaatcttatatatgctgcaaaataaagtgtgcctgcacttgaaaacagagaaatgattcattaaaatctgcatctgctttaaatcagkcattttaatttgcttggtagactaggagtgtggggttataaagaagttatttcatcatatttttcaggatattcaaaagcttctcaatatctaaggaaaaaaatctatatagaagaaagatttcagtttctactgtgttcctaaaaattatattctgtttcaatatgctgactcagtaaatgagtcttaacttttgcaaaaaatgggttaaatagatattagagagatgctctgtgagaatgtatgttttctaagaaaatacagcttttccataacatgtggttatgaaatatactacagaattggagatgtattttaactctgtgcttgtgtgtgtggtggagcctgggtcctggacagtgatgtcatgctacagaggaaataaagctgggaaatgaagctgaaatagtgagactcaaagaatgactgtaatgtgtagattacattgagcgaatgcaagaagggaggaggctgagaatatttatgcaacaaagccaatgattcaaaatgttccatactt

SEQ ID NO: 38705 - DNA, 739 bp, Homo sapiens
tttttcactcttctacagtgtagtggccactgctgggataggatgggtacgcttatttttgtttatttttttctgtctccagaaattagctatgtcagtttttcacataaaatgttacttttcttctgccaaagttgaggtttgtcaaaattcttattttgagaactgggttgcaattgtgaaagcaatttaaatgaaatactcctgtgagtctgtgattttcccatttttcatcacatagattttcaatatgtaaatgaaataacaatgtctgtagacaatgagaratttagatcagttaactgtgccttttcactgaactcatatttcattacatgatccaagcagtttttgcaatacaatacaaactgtaatcagttcaaagagtagaataattatccgagtcttgcaaatatgtttccaaaaccattatttccacaaaatatccagctggtttgccaattttccactcattctatttccactcaacaataccaactccttccagctattccacctttttctggcttttcagataacttagttattagaaaatgagagaaacttcactcaacttatgttgatgaccccttgcgccatctgccctatgtaaccaagtgagtgcttaatatttagaaaagacagctgccaattatttcaaagttctgaactcccggaaaaaagaagcagttgtctaaaagaagctcatatcttcaaccttactgaaggaaaatatggt

SEQ ID NO: 38706 - DNA, 618 bp, Homo sapiens
gggaggctgagctgaggcaggagaattgcttgaacctgggaggcggaggttgcagtgaaccaagtttgcgccattgcactccagcctgagtgacaagagagaaactccatctcaaaaaaaaaatttttttttcatattttccaactttgaggtcctattttggaggcagatcttcagatttgactataatacaccttagctatccaaataatattattatttaacatgtttacttcagctgggccctcactaatggctggaaatccatgttaatctcttgctattttctgaagacacctcccaaaacaaataktctaaaccttctctatgcaagattccgaaatttccccaccctcagcttatgatcacacatctcagtttattgagagaatttcagttatgatgcatgagagctcccattttcattctttctatcctaaaaaatatctactttatggaatcaaaataaaaatactgattgtaaaagaaagcagaaaaagattaaaaaaagcaaagatggaataaatagaaaatagatgtaaatgaaatggagaaacatcacaatagatcttacagacaataaaaggttaataatattatgcttactttgaagccaaa

SEQ ID NO: 38707 - DNA, 618 bp, Homo sapiens
gggaggctgagctgaggcaggagaattgcttgaacctgggaggcggaggttgcagtgaaccaagtttgcgccattgcactccagcctgagtgacaagagagaaactccatctcaaaaaaaaaatttttttttcatattttccaactttgaggtcctattttggaggcagatcttcagatttgactataatacaccttagctatccaaataatattattatttaacatgtttacttcagctgggccctcactaatggctggaaatccatgttaatctcttgctattttctgaagacacctcccaaaacaaatagtctaaaccttctctatgcaagattccgaaatttccccaccctcagcttatgatcacacatctcagtttattgagagaatttcagttatgatgcatgagagctcccattttcattctttctatcctaaaaaatatctactttatggaatcaaaataaaaatactgattgtaaaagaaagcagaaaaagattaaaaaaagcaaagatggaataaatagaaaatagatgtaaatgaaatggagaaacatcacaatagatcytacagacaataaaaggttaataatattatgcttactttgaagccaaa

SEQ ID NO: 38708 - DNA, 1078 bp, Homo sapiens
caggaatgaaattatgccccagtgccctggcaaagtgcccagtatcctatgtaaatctagtaggggatcattaatggaaggaagagagaaaggaaggaaggatggaaggaaggaagtatgggaggaagaagagagggaggaaggaaagaaggaaggaaggaaagaaggaagggagggagggaggaaagaagggagaagtgaagcagattcactgtgcattggttaccaacttgtctgagtctggtgagaaagaacacccacacacacagcaggttacatgaagcggagttatgacttacagataggcagcaaggcataaccaaagcctatgattcattgggagctggycccccaaggctcaggaaagctgcccagggtggatgaaatctcatctgtgcaggcctcacttgcactgcagctgagggaccccagaaagcagcccaccctgggttttataccccaaggttgatgattcactggactgaagcattgaaggctattctgtttctaaggagcaatggaacaaagtctgggttgttctggccagttcctccctatctcaggatgttgtattcccagcatattctacagttattcttgagaactacaggcaaaaaagggaagagaacagggttgattcaaggccacccagagaactatactgcagtagagaggaaagcattcacattcaccctcattcattcctaccctctcctctgactttgagctccattgtttgatgcacgtgtgtgtgtgacagcaatggaaaactaattttgacaagatccccatttagacaccatgtatctaatgacagcattgtctaagagatattaagcacagttgcatccctgtgtcaagatccaattaaaaaaattttttttgagacaaggtcttgctttgtcacccaggctgcagtgcagtggcatgatcaccactcactatagcctccacctcaaaggatccccgccctcagcctcccaagtagcttacaccaccatgcccagctgatttttaaaaaactttttgtagaaacagggtctcactatgttgcctaggctggtctcaaactcctagg

SEQ ID NO: 38709 - DNA, 1184 bp, Homo sapiens
attagttaaagcttgactaagtccattaggaagacaaagactggctgttgaatcattacacttactaggatcctaaaaaaaataacttgggaagattatttgaaagttactggctttatcaggaaatttttttttcwttttctttctttttttttttttttaaatgtgctgtttttcctagccctagctagttaggagtttgcaggtgtaaagtcctccccctccccttccctgtctctctccagggggttgtatgtgagaaggtgttgctttctcactcagagagcatatatgtgctaccctgttggatgcctgctgcgagcccagagaacccccgtgctcattgaatggaataagcctattggatggctggaattttgcagccccataatgccaacttttcacttaaagcatctttcctatccacaatgggagtgaagcagtatatgtacttggtctagatttgtattgttttaaaactcgtgtcttaaaaattttgtgatttcctattaaggtttggtttaagcctaaggcaggatagtgctgtgtctgcttagtaggaatgtgcttttacttttaaaatgtttactattagaagtgcagatttacccccaacttttaagattgctttaaatcacttgccccagtctgggtaggcataggtgtgggcatgccctcccacatactcacagatacaaacacacacaatatcctggcatcttggtgcctctttttacctgccctggcccaagatcatgtaggaatatgaatttaggggctgatctcaacaacctcatgaggttttctttactctctcccaaaaaacagttacctaaaatgaagggcagtgggaaggcttttcacaaggggaaaggtggatttttctatttcttgacctgagaggttgttacttgtatatttactatgttcattcgctataccatgtatattttatgcttttttttttcttctttttgagacatagtctcgctctgtcgcccaggctggagtgcagtggtgctgtctaggctcactgcatcctctgcctcctgggttcaggcaattctcctgcctcagcctcccgagtagctgggcctacaggcacatgccaccatacctagctaatttttgtatttttagtagagatggggtttcactgtgttggccaggctcccgaccttgtg

SEQ ID NO: 38710 - DNA, 1184 bp, Homo sapiens
attagttaaagcttgactaagtccattaggaagacaaagactggctgttgaatcattacacttactaggatcctaaaaaaaataacttgggaagattatttgaaagttactggctttatcaggaaatttttttttcattttctttctttttttttttttttaaatgtgctgtttttcctagccctagctagttaggagtttgcaggtgtaaagtcctccccctccccttccctgtctctctccagggggttgtatgtgagaaggtgttgctttctcactcagagagcatatatgtgctaccctgttggatgcctgctgcgagcccagagaacccccgtgctcattgaatggaataagcctattggatggctggaattttgcagccccataatgccaacttttcacttaaagcatctttcctatccacaatgggagtgaagcagtatatgtacttggtctagatttgtattgttttaaaactcgtgtcttaaaaattttgtgatttcctattaaggtttggtttaagcctaaggcaggatagtgctgtgtctgcttagtaggaatgtgcttttacttttaaaatgtttactattagaagtgcagatttacccccaacttttaagattgctttaaatcacttgccccagtctgggtaggcataggtgtgggcatgccctcccacatactcacagatacaaacacacacaatatcctggcatcttggtgcctctttttacctgccctggcccaagatcatgtaggaatatgaatttaggggctgatctcaacaacctcatgaggttttctttactctctcccaaaaaacagttacctaaaatgaagggcagtgggaaggcttttcacaaggggaaaggtggatttttctatttcttgacctgagaggttgttacktgtatatttactatgttcattcgctataccatgtatattttatgcttttttttttcttctttttgagacatagtctcgctctgtcgcccaggctggagtgcagtggtgctgtctaggctcactgcatcctctgcctcctgggttcaggcaattctcctgcctcagcctcccgagtagctgggcctacaggcacatgccaccatacctagctaatttttgtatttttagtagagatggggtttcactgtgttggccaggctcccgaccttgtg

SEQ ID NO: 38711 - DNA, 1184 bp, Homo sapiens
attagttaaagcttgactaagtccattaggaagacaaagactggctgttgaatcattacacttactaggatcctaaaaaaaataacttgggaagattatttgaaagttactggctttatcaggaaatttttttttcattttctttctttttttttttttttaaatgtgctgtttttcctagccctagctagttaggagtttgcaggtgtaaagtcctccccctccccttccctgtctctctccagggggttgtatgtgagaaggtgttgctttctcactcagagagcatatatgtgctaccctgttggatgcctgctgcgagcccagagaacccccgtgctcattgaatggaataagcctattggatggctggaattttgcagccccataatgccaacttttcacttaaagcatctttcctatccacaatgggagtgaagcagtatatgtacttggtctagatttgtattgttttaaaactcgtgtcttaaaaattttgtgatttcctattaaggtttggtttaagcctaaggcaggatagtgctgtgtctgcttagtaggaatgtgcttttacttttaaaatgtttactattagaagtgcagatttacccccaacttttaagattgctttaaatcacttgccccagtctgggtaggcataggtgtgggcatgccctcccacatactcacagatacaaacacacacaatatcctggcatcttggtgcctctttttacctgccctggcccaagatcatgtaggaatatgaatttaggggctgatctcaacaacctcatgaggttttctttactctctcccaaaaaacagttacctaaaatgaagggcagtgggaaggcttttcacaaggggaaaggtggatttttctatttcttgacctgagaggttgttacttgtatatttactatgttcattcgctataccatrtatattttatgcttttttttttcttctttttgagacatagtctcgctctgtcgcccaggctggagtgcagtggtgctgtctaggctcactgcatcctctgcctcctgggttcaggcaattctcctgcctcagcctcccgagtagctgggcctacaggcacatgccaccatacctagctaatttttgtatttttagtagagatggggtttcactgtgttggccaggctcccgaccttgtg

SEQ ID NO: 38712 - DNA, 1194 bp, Homo sapiens
cttgagcctgagagacagaggttgaagtgagctgagaccacaccactgcactccagactgggcggcagatgagaccctgtctctaaataaataaataaataaatagataaataaataaatacaacaacaacaaagaaatgtaaaatacagccaggcacggtggctcaygcctataatcccagcactttgggaggctgaggcaggtggatcacctgagatcgggagttcaagaccagcctgaccaacacggagaaaacttgtctctactaaaaatacaaaattagctgggcgtggtggcgaatgcctgtaatcctagctactcgggaggctgaggcaggaaaattgcttgaacccaggaggcagagcttgcagtgaaccgagatcgcgccattgcactccagcctgggcaacaagagcaaaacgccatctcaaaaaagaaagaaagaaagacagaagtataaaacacaatatctgaccagctaaggatatcataactaatcaatgccacaagactaacacatagaatataacagcaaataaaacaatctgacagtaagacaatgtggcatatccttatgtatagccctagagggcagaactccaatccagaggaaaataaatgaaggcattgcagccataaaaaggaatgagatcatgtcctttgcagggacgtggatggagttggaagacattatctgcagcaaactgacgcaggaagaaaaaaccaaacaccacatgttctcacttataagtgggagctgaatgatgagaacacatggacacatgaggggaacagcacacactgggcacctatgggggttgggaagaaggagagcatcaggaggaatagctaatggatgctgggcttaatacctaggtgacaggacgatctatgcagcaaaccaccacggcgcacatttacctagataacaaccctgcatatcctgcacatgtacccctgaactaaaaagaaaagttgaagaaaaaataaataaataaataaaactatataaacatgaaaaaataataataataaatggaggcactgatattcagctttcataggatggggtagtctacaccacaagaacaaacagagcttgaactctcaacagcttaacacataaaagtttgtatcttgctcattcaaagttcaatgcaggccaggatgctatttgccatgtggtgactaag

SEQ ID NO: 38713 - DNA, 1194 bp, Homo sapiens
cttgagcctgagagacagaggttgaagtgagctgagaccacaccactgcactccagactgggcggcagatgagaccctgtctctaaataaataaataaataaatagataaataaataaatacaacaacaacaaagaaatgtaaaatacagccaggcacggtggctcacgcctataatcccagcactttgggaggctgaggcaggtggatcacctgagatcgggagttcaagaccagcctgaccaacacggagaaaacttgtctctactaaaaatacaaaattagctgggcgtsgtggcgaatgcctgtaatcctagctactcgggaggctgaggcaggaaaattgcttgaacccaggaggcagagcttgcagtgaaccgagatcgcgccattgcactccagcctgggcaacaagagcaaaacgccatctcaaaaaagaaagaaagaaagacagaagtataaaacacaatatctgaccagctaaggatatcataactaatcaatgccacaagactaacacatagaatataacagcaaataaaacaatctgacagtaagacaatgtggcatatccttatgtatagccctagagggcagaactccaatccagaggaaaataaatgaaggcattgcagccataaaaaggaatgagatcatgtcctttgcagggacgtggatggagttggaagacattatctgcagcaaactgacgcaggaagaaaaaaccaaacaccacatgttctcacttataagtgggagctgaatgatgagaacacatggacacatgaggggaacagcacacactgggcacctatgggggttgggaagaaggagagcatcaggaggaatagctaatggatgctgggcttaatacctaggtgacaggacgatctatgcagcaaaccaccacggcgcacatttacctagataacaaccctgcatatcctgcacatgtacccctgaactaaaaagaaaagttgaagaaaaaataaataaataaataaaactatataaacatgaaaaaataataataataaatggaggcactgatattcagctttcataggatggggtagtctacaccacaagaacaaacagagcttgaactctcaacagcttaacacataaaagtttgtatcttgctcattcaaagttcaatgcaggccaggatgctatttgccatgtggtgactaag

SEQ ID NO: 38714 - DNA, 544 bp, Homo sapiens
acaccagctcctgcaggaaagagcaggcggttcccatggtcacgtccagagtcaccttgcccaggaggagttgcaccctttcggacttgcagatgggcagcttgccaacctgaccctctgtcaggtcagctagggtagaagcattctttgccagcctggcttcctggtcgttctcctgcttgatgagtaccacctctctgtccttgccctgtacctctgccttgatgggcttgatgtcctggataggtgggtggccagggagggtgtctggmaactggaggaacagcaattcctcctccttggtgaggctcagctccctgggcagctctgccacggatatgtccttcgggaggcccgggggtcttcctggctgctctggaaggagcctttatcttggcctcctcctcatcttgtagctcctctttcagtttcacagtaggtacccccacctctttcttggggccagccagccaaggtttaacatctggttcattgttttcttccttaaaaagccaccctgagtgagccagtggcagctgcacag

SEQ ID NO: 38715 - DNA, 881 bp, Homo sapiens
aagacagggacgcaattaaacagttgctaaaaatcaaatgaattaatggttaaattaagtttagcttaaagctgcctccttagatattttaagwtcagcctaaaggtttcttcttacatagcgatctgtaactcaactggatgtgtaaacaggctgtaacttactcttctatcaagcattcagttccagccaatcaaaggtggccagctggtcaaactgtgtttaaataaggcaaacactcagctggaaccaatccagctatttctgcacctttcttccttccattttctatacatcactttgctttttctgttcctaaatcttcgaccatgtggcagcaccagagtctctctgaacctattcttctttcaggggctgtccaatttgtgaatcgttttttggttaatcaaactcgttaaattcaatttgtccaaggattttccactaacagaatgaacttcttcgcatcctgggacagaaggaagtgccccagcaggcttagaacacctatcactgtttattgtttcctcaacttcacggcaaagcatcagcttcactattttaccattagctgaagtccaacagtgctattattattattattttgagatggagtctcactctgtcacccaggctgaagtgcagtggcgctatctcggctcaccacaacctctgcctcccgggttcaagcgattctcccgcctcagcttcccgagtagttgggattacaggcccgcgtcactacgcacggctaatttttttgtatttttagtagagacggggtttcaccgtgttggcccggctggtcacaaactcttgacctcaggttatctgcctgcctcagtctccaaaagtcctgggattacaggagtgagccactg

SEQ ID NO: 38716 - DNA, 881 bp, Homo sapiens
aagacagggacgcaattaaacagttgctaaaaatcaaatgaattaatggttaaattaagtttagcttaaagctgcctccttagatattttaagatcagcctaaaggtttcttcttacatagcgatctgtaactcaactggatgtgtaaacaggctgtaacttactcttctatcaagcattcagttccagccaatcaaaggtggccagctggtcaaactgtgtttaaataaggcaaacactcagctggaaccaatccagctatttctgcacctttcttccttccattttctatacatcactttgctttttctgttcctaaatcttcgaccaygtggcagcaccagagtctctctgaacctattcttctttcaggggctgtccaatttgtgaatcgttttttggttaatcaaactcgttaaattcaatttgtccaaggattttccactaacagaatgaacttcttcgcatcctgggacagaaggaagtgccccagcaggcttagaacacctatcactgtttattgtttcctcaacttcacggcaaagcatcagcttcactattttaccattagctgaagtccaacagtgctattattattattattttgagatggagtctcactctgtcacccaggctgaagtgcagtggcgctatctcggctcaccacaacctctgcctcccgggttcaagcgattctcccgcctcagcttcccgagtagttgggattacaggcccgcgtcactacgcacggctaatttttttgtatttttagtagagacggggtttcaccgtgttggcccggctggtcacaaactcttgacctcaggttatctgcctgcctcagtctccaaaagtcctgggattacaggagtgagccactg

SEQ ID NO: 38717 - DNA, 803 bp, Homo sapiens
ccaaagagacaggctttgggctcagcccaagaccaaacctaacaatcctttagactttggcaggtgcaggagcagcctatattgtggctgcgtgctccagttgtacacctgctcttagctcactgtggcctcttgaagaggaaactatcttttttttcttcctatatcaggaaggttgagaccccaagaaatctaacagaggaaaaacatagtttcagggagttcagtggtataactttcccagagggggcccagattcaagaaacaattgaggagcctcagctttttaaagtagcagatagagaatctttactaaactacatgggaagtagccctttctcagtgcttagagatggtatggacagatttggaaggtccctagcaagaatgcatggaacacatcactaggtgagcctcagggcatgtgcccttggaaatatgcctggaatatttagggaatcaggacacaaaggaaggcaaaggggaggcgagacatgcccaggggagccaggctgagcaatagtagtaaaatgttgatcatatagatgggcttatctaattcatgggggagaatatagacaagacttacttgaacaatttactttatatctctgtggtagtttgtactgggtcaacttggttaaacggggagctttgtctcccataataccctccctttacggttctagttgagaggatgccagaaaaaactctgcatacaattagacagtggcagttagcaatggccattgctctctgaaggtcctggtcacatggtggcaactagacatasaggtgccaga

SEQ ID NO: 38718 - DNA, 2554 bp, Homo sapiens
taaagctgccacttcctgggatcaactcctatgaagaatatggacatccattccattcttcagytgcgaattgatctctagccctggtctgaccttttaccttaccatggcctgatcctaagcctggctacatcctaacccataatactgactgactcaaaaccttcctgatttccttaattagaccattcttccctagatccatgctgtggtcagcaaaggcactgagtgaaagggtaaggtctcagtgctaccctcccataccttcaggacagcgaagtttggtgctcaggaccggtcatgggtcagggagtatctggagaaagaatgtggtttctgcaggaaggagtttctgagtagtccatcctctcagctccatctctatgtcagcagaggctggagggaacttgagccagttatgatttgatgatttgtgctaatatttgcctaaaattaatagagttggaaattaatagaaatggtagcgggtagcaatgaaatgaaattcccactcagaacctggctagcagcccactgttctggggacccttggggtggctctttgctttgcagctgtatttgcttctgcttctaagatatattcttttgtttctttttactttcttcaggagaggagataagctgggaagcaggatagtgaacaaagttggaagacacactggagtggaaaactctcagggcagagatttgtcaggatatgttaaaacctgtaatgagcaacccccacatttcagtgacttaacacaataaaacttcatttctcatttactcaaaggccaacgtgaaagtacctgattgaacagctgtcctgggcagatcttctctatgggacaactcagggatctaggctccttttgatgtgtgaattcattgttttctagagacttgggaagctccagagtcctggagatctcttctggattgtctataaaagatatccaaagaagaaagggagagtgtggagaattacatggatattttagaaatcaagcacaacagttgtgtctaagcccattagtcccataccctcacttacttgcaagggggaaatgtggcttagccaggtgcctaggaatagggaatgggtttggcaactgtccagcctgtctatactgcaggacagcaagagacctaggaatactcaatttgggtcttggctaggaaatgccttatagatgcattgtgaaaagagcagagagattgtctgccctgaaccccccactagaactgtacccaggcccagcggatgcttccatgacttttcatgtttgctctttcttccagaccaggcccaacatgaacatttccaccatggcttagctaaaaaagggctagaattgggaatgccatttgggaatgtgctggtgacagttggtgacaattccaactcactcagctctgggaatgcaataggaaaattaaggtgggtatcaggggctcagctaacactgttctaaccttcatagagagtaagcaatccctccctatagaatctacctcatgccaatgggaatctcttaccttcctttatcagtgcctgaaattccacccctataatctgggtctgctaactccaagaaccagtgtgtttctcattatattaaattcatctcctagtagaggtgacgtacaaggtcactatctcctccagccccttagatctgcttagccattgtgggatggtgaactaggaggagtaggggagtcatccagtggggatactcggtggtgatggaaagaaaggtgagaaagttccagggataaactttgctaacctgacaagtgctctggctgccaaatggagcagcgcgtgctaatgagagagatttcctaacgcagaattaaaataggccagtccattcagaggaagtgacctgtaatcaactttagaggccaggcagtgttgcatgactccaatcccaattagggaggctgagacaactcctgctgggatgtcaaccctccagctcatgaataagatggcccagagccattttccatttcctttctcctgggccaagattcaatctctggagaagacagtgaaggaggacttcccttgatgatgattccctggagaaatggaaggatggagaaagcaaaaaattccaactgtcccaggaaaaatattaggaagtgaggctggccttctctactttggagttctccatgcctgaccatttgggctcctacaactctcccttcctctcttctctgtgagttagtcacttaatctttctgatcttacattttcccatttgtaaaatggtgataataaccctgccccctttggggattgagtgtctgtgaagctcccattcatcttctcctttgtgtccctattgtctttgatttattcctctgtagagtagtgtttggtaatttagttgcttaccggtcttattcctatctggagatagtgaacttcttgggtttttcagtgactgtaacatatttgtctttttatgctcagcagccagcgcagtgctcgcttcttgaagtggttcagtgaatgttgagttagtggatgaaa

SEQ ID NO: 38719 - DNA, 2554 bp, Homo sapiens
taaagctgccacttcctgggatcaactcctatgaagaatatggacatccattccattcttcagttgcgaattgatctctagccctggtctgaccttttaccttaccatggcctgatcctaagcctggctacatcctaacccataatactgactgactcaaaaccttcctgatttccttaattagaccattcttccctagatccatgctgtggtcagcaaaggcactgagtgaaagggtaaggtctcagtgctaccctcccataccttcaggacagcgaagtttggtgctcaggaccggtcatgggtcagggagtatctggagaaagaatgtggtttctgcaggaaggagtttctgagtagtccatcctctcagctccatctctatgtcagcagaggctggagggaacttgagccagttatgatttgatgatttgtgctaatatttgcctaaaattaatagagttggaaattaatagaaatggtagcgggtagcaatgaaatgaaattcccactcagaacctggctagcagcccactgttctggggacccttggggtggctctttgctttgcagctgtatttgcttctgcttctaagatatattcttttgtttctttttactttcttcaggagaggagataagctgggaagcaggatagtgaacaaagttggaagacacactggagtggaaaactctcagggcagagatttgtcaggatatgttaaaacctgtaatgagcaacccccacatttcagtgacttaacacaataaaacttcatttctcatttactcaaaggccaaygtgaaagtacctgattgaacagctgtcctgggcagatcttctctatgggacaactcagggatctaggctccttttgatgtgtgaattcattgttttctagagacttgggaagctccagagtcctggagatctcttctggattgtctataaaagatatccaaagaagaaagggagagtgtggagaattacatggatattttagaaatcaagcacaacagttgtgtctaagcccattagtcccataccctcacttacttgcaagggggaaatgtggcttagccaggtgcctaggaatagggaatgggtttggcaactgtccagcctgtctatactgcaggacagcaagagacctaggaatactcaatttgggtcttggctaggaaatgccttatagatgcattgtgaaaagagcagagagattgtctgccctgaaccccccactagaactgtacccaggcccagcggatgcttccatgacttttcatgtttgctctttcttccagaccaggcccaacatgaacatttccaccatggcttagctaaaaaagggctagaattgggaatgccatttgggaatgtgctggtgacagttggtgacaattccaactcactcagctctgggaatgcaataggaaaattaaggtgggtatcaggggctcagctaacactgttctaaccttcatagagagtaagcaatccctccctatagaatctacctcatgccaatgggaatctcttaccttcctttatcagtgcctgaaattccacccctataatctgggtctgctaactccaagaaccagtgtgtttctcattatattaaattcatctcctagtagaggtgacgtacaaggtcactatctcctccagccccttagatctgcttagccattgtgggatggtgaactaggaggagtaggggagtcatccagtggggatactcggtggtgatggaaagaaaggtgagaaagttccagggataaactttgctaacctgacaagtgctctggctgccaaatggagcagcgcgtgctaatgagagagatttcctaacgcagaattaaaataggccagtccattcagaggaagtgacctgtaatcaactttagaggccaggcagtgttgcatgactccaatcccaattagggaggctgagacaactcctgctgggatgtcaaccctccagctcatgaataagatggcccagagccattttccatttcctttctcctgggccaagattcaatctctggagaagacagtgaaggaggacttcccttgatgatgattccctggagaaatggaaggatggagaaagcaaaaaattccaactgtcccaggaaaaatattaggaagtgaggctggccttctctactttggagttctccatgcctgaccatttgggctcctacaactctcccttcctctcttctctgtgagttagtcacttaatctttctgatcttacattttcccatttgtaaaatggtgataataaccctgccccctttggggattgagtgtctgtgaagctcccattcatcttctcctttgtgtccctattgtctttgatttattcctctgtagagtagtgtttggtaatttagttgcttaccggtcttattcctatctggagatagtgaacttcttgggtttttcagtgactgtaacatatttgtctttttatgctcagcagccagcgcagtgctcgcttcttgaagtggttcagtgaatgttgagttagtggatgaaa

SEQ ID NO: 38720 - DNA, 2554 bp, Homo sapiens
taaagctgccacttcctgggatcaactcctatgaagaatatggacatccattccattcttcagttgcgaattgatctctagccctggtctgaccttttaccttaccatggcctgatcctaagcctggctacatcctaacccataatactgactgactcaaaaccttcctgatttccttaattagaccattcttccctagatccatgctgtggtcagcaaaggcactgagtgaaagggtaaggtctcagtgctaccctcccataccttcaggacagcgaagtttggtgctcaggaccggtcatgggtcagggagtatctggagaaagaatgtggtttctgcaggaaggagtttctgagtagtccatcctctcagctccatctctatgtcagcagaggctggagggaacttgagccagttatgatttgatgatttgtgctaatatttgcctaaaattaatagagttggaaattaatagaaatggtagcgggtagcaatgaaatgaaattcccactcagaacctggctagcagcccactgttctggggacccttggggtggctctttgctttgcagctgtatttgcttctgcttctaagatatattcttttgtttctttttactttcttcaggagaggagataagctgggaagcaggatagtgaacaaagttggaagacacactggagtggaaaactctcagggcagagatttgtcaggatatgttaaaacctgtaatgagcaacccccacatttcagtgacttaacacaataaaacttcatttctcatttactcaaaggccaacgtgaaagtacctgattgaacagctgtcctgggcagatcttctctatgggacaactcagggatctaggctccttttgatgtgtgaattcattgttttctagagacttgggaagctccagagtcctggagatctcttctggattgtctataaaagatatccaaagaagaaagggagagtgtggagaattacatggatattttagaaatcaagcacaacagttgtgtctaagcccattagtcccataccctcacttacttgcaagggggaaatgtggcttagccaggtgcctaggaatagggaatgggtttggcaactgtccagcctgtctatactgcaggacagcaagagacctaggaatactcaatttgggtcttggctaggaaatgccttatagatgcattgtgaaaagagcagagagattgtctgccctgaaccccccactagaactgtacccaggcccagcggatgcttccatgacttttcatgtttgctctttcttccagaccaggcccaacatgaacatttccaccatggcttagctaaaaaagggctagaattgggaatgccatttgggaatgtgctggtgacagttggtgacaattccaactcactcagctctgggaatgcaataggaaaattaaggtgggtatcaggggctcagctaacactgttctaaccttcatagagagtaagcaatccctccctatagaatctacctcatgccaatgggaatctcttaccttcctttatcagtgcctgaaattccacccctataatctgggtctgctaactccaagaaccagtgtgtttctcrttatattaaattcatctcctagtagaggtgacgtacaaggtcactatctcctccagccccttagatctgcttagccattgtgggatggtgaactaggaggagtaggggagtcatccagtggggatactcggtggtgatggaaagaaaggtgagaaagttccagggataaactttgctaacctgacaagtgctctggctgccaaatggagcagcgcgtgctaatgagagagatttcctaacgcagaattaaaataggccagtccattcagaggaagtgacctgtaatcaactttagaggccaggcagtgttgcatgactccaatcccaattagggaggctgagacaactcctgctgggatgtcaaccctccagctcatgaataagatggcccagagccattttccatttcctttctcctgggccaagattcaatctctggagaagacagtgaaggaggacttcccttgatgatgattccctggagaaatggaaggatggagaaagcaaaaaattccaactgtcccaggaaaaatattaggaagtgaggctggccttctctactttggagttctccatgcctgaccatttgggctcctacaactctcccttcctctcttctctgtgagttagtcacttaatctttctgatcttacattttcccatttgtaaaatggtgataataaccctgccccctttggggattgagtgtctgtgaagctcccattcatcttctcctttgtgtccctattgtctttgatttattcctctgtagagtagtgtttggtaatttagttgcttaccggtcttattcctatctggagatagtgaacttcttgggtttttcagtgactgtaacatatttgtctttttatgctcagcagccagcgcagtgctcgcttcttgaagtggttcagtgaatgttgagttagtggatgaaa

SEQ ID NO: 38721 - DNA, 1301 bp, Homo sapiens
ctgagttggtctagtcccaaagctcctggtcctctcctgacatcacttaaacagagaaacagaactccccttgggcttctaggggcgctgggttcaggaggcacagccactccctttgttcttcctggcagctgccccaccagcagtgagcccatcccacctctgggttttctttttcttttttcttttttttgagacagagtatcgctctcttgcccaggctggagtgcaatggcgtgatcctggctcactrcaacctctgcctcccaggttcaagcaattctcctgcctcagcctcccaagtagctgggaatacaggcgcccacaaccacgcctggctaattttctgtatttttagtagagacggggcttcgccatgttggccaggttggtcttaaactcctgacctcaggtgatccacccgcctcggcttcctaaaatgctgggattacaggcattcgccactgcgcccggcagcctctgggttttcacaaggctggtctggcgaggaggctagtcctcctcctctctccatagggggcatttcccctggagctcagcctcaactcagcctagaaccttctccaagggtgttcctgtgattgcctgctccactggggtttgaggggtgatagcggcttctggagtgtgcgtgctcggagcatgcttcattctgcttacaccaggccgtgtggcatttgctggcctgtatgtcctcaagggcgccttgcagggcatgccacatcaggttcagctccacgtccatccatccagactgctcagaagggctggggtggggcttgctagctggagagagtatcagaatgaccccaaactcctgggagaaaccctaaagagctgcttggccatctctttcaactccttcaagtctttgctcacaaagtccctttcaggcttgaagtcagatgatgttggtgccctgcccaggggtccccaggtgctgtgttggcagtcagaggctagctgttgccccttctctggacaactgccctcagtcaatgggagctgcttcaactgggtccatgacacctgcttcccaaggggacagcctgcagccaatgacagactgatgtggtgatagagaaggccggcccccttgcctcagcacagtccagttctgcctttcttgccccagggatccctgtggggtcgggctaaggccaagctttgcctcaaccacaccctggctttagctcttcccctctggcttcccgccctccctcacaggtgtctcctgaaattcctctttcaaaaaattcctaactgggcacagtgatgca

SEQ ID NO: 38722 - DNA, 584 bp, Homo sapiens
tcttcacatgatgaggacagagatcatctctcatctcttcttattttttataatattttatttatttattttttgagacagggtctcactctgtcacccaggctggagtgcagtggtgcaatcatagctgactgcagcctcaacctcctgggctcaagtggtccttccaactcagcctcctaagtagctgggaccacaggcacatgccaccatgcccggctaatttttgtatttttgatagagatggggtttcaccatgttgcccacactggtcttgaactcctgggctcaaatgatcctcctgccttggcctcccacagtgctgggatcacaggggcaagccaccatgccaagctcatgtctcttcttattagggygctaaatcccataatgagggctctaccctttggactaattacctcccaaagccccatctcaaaatactatcacgttggggattaaggcttcaacatatgcattttggagggacacaaaaagtcagtccatagcaattagcaagccttctggggaggtttgctgtgtgttcactacagttagaggcacagagaaaactcacactgaag

SEQ ID NO: 38723 - DNA, 1219 bp, Homo sapiens
cagcagcacagcgacttcccttcatccctgcaggcccaggggtagtggtggcttcctgctgatgcaagctctgggtacctccccatccctcactgccttcctcacccctgctcccaacttcggcattactaccagcatttgagggagccatctatttcctccccattccccaaacaatccaatgggcagttactttgagtctctgagattccattttccccattagtagcattcctttagagaaattcttgtggaaagtaagtcaagcgaagtaatgcacaggaatgtccacaatatcgataaggtggaaaccccaaatgtccatcgatagatgaatgtgtacagaaactgtggtccttacatgcagtggaatattacttggccttaaaaagaaaggaagcactgatatatgctacaatggatgaaccttgcaaacattatgctaaacaaaagaagccacatgcaaaaggtcacatatttgtgattctatttatatgaaatattcagaatagataaaccacagagacagagtacagattggtggctgccatgggctaagggcttgggggttacataaagaaactgcttaatggataaggggttttactttggagtgatgggaatgttttggaactagatcaagatggtggtggcatcatattgggaaggtaytaaattcaccttaaaatgggtacttttatgttaggtgaattccacttcaataaattatctttctaaaaaaagaacatcaaaaaggaaaacccacccaagctttaaaatggaaaaaggaaaagccaccaaaaaccataaaatgttaaatataatagataacagaatttttctgatcataataaaaaacatatatagctaatgaaacaacacgtacgtagcaagacaaaattttaatgtaactaacacaagggcaaaatgaaagggccaggctatgagctggttgggttgagacgggaagagatttcagttggtggcaagaaccggcaggagccaggcctttgtctgaagaatgaaggtcagggctttccaggccagaggagggcacaaataaagtttctaaagtaaaagtgtcaaagccttgggaatgggggtgagcagtctataggcgcagagggaggaggagatggagagtggggatagttggccaaagccaaattatccagactctcaaagagtaggtccaagcttcctactagaggggaacagg

SEQ ID NO: 38724 - DNA, 1219 bp, Homo sapiens
cagcagcacagcgacttcccttcatccctgcaggcccaggggtagtggtggcttcctgctgatgcaagctctgggtacctccccatccctcactgccttcctcacccctgctcccaacttcggcattactaccagcatttgagggagccatctatttcctccccattccccaaacaatccaatgggcagttactttgagtctctgagattccattttccccattagtagcattcctttagagaaattcttgtggaaagtaagtcaagcgaagtaatgcacaggaatgtccacaatatcgataaggtggaaaccccaaatgtccatcgatagatgaatgtgtacagaaactgtggtccttacatgcagtggaatattacttggccttaaaaagaaaggaagcactgatatatgctacaatggatgaaccttgcaaacattatgctaaacaaaagaagccacatgcaaaaggtcacatatttgtgattctatttatatgaaatattcagaatagataaaccacagagacagagtacagattggtggctgccatgggctaagggcttgggggttacataaagaaactgcttaatggataaggggttttactttggagtgatgggaatgttttggaactagatcaagatggtggtggcatcatattgggaaggtattaaattcaccttaaaatgggtacttttatgttaggtgaattccacttcaataaattatctttctaaaaaaagaacatcaaaaaggaaaacccacccaagctttaaaatggaaaaaggaaaagccaccaaaaaccataaaatgttaaatataatagataacagaatttttctgatcataataaaaaacatatatagctaatgaaacaacacgtacgtagcaagacaaaattttaatgtaactaacacaagggcaaaatgaaagggccaggctatgagctggttgggttgagacgggaagagatttcagttggtggcaagaaccggcaggagccaggcctttgtctgaagaatgaaggkcagggctttccaggccagaggagggcacaaataaagtttctaaagtaaaagtgtcaaagccttgggaatgggggtgagcagtctataggcgcagagggaggaggagatggagagtggggatagttggccaaagccaaattatccagactctcaaagagtaggtccaagcttcctactagaggggaacagg

SEQ ID NO: 38725 - DNA, 1219 bp, Homo sapiens
cagcagcacagcgacttcccttcatccctgcaggcccaggggtagtggtggcttcctgctgatgcaagctctgggtacctccccatccctcactgccttcctcacccctgctcccaacttcggcattactaccagcatttgagggagccatctatttcctccccattccccaaacaatccaatgggcagttactttgagtctctgagattccattttccccattagtagcattcctttagagaaattcttgtggaaagtaagtcaagcgaagtaatgcacaggaatgtccacaatatcgataaggtggaaaccccaaatgtccatcgatagatgaatgtgtacagaaactgtggtccttacatgcagtggaatattacttggccttaaaaagaaaggaagcactgatatatgctacaatggatgaaccttgcaaacattatgctaaacaaaagaagccacatgcaaaaggtcacatatttgtgattctatttatatgaaatattcagaatagataaaccacagagacagagtacagattggtggctgccatgggctaagggcttgggggttacataaagaaactgcttaatggataaggggttttactttggagtgatgggaatgttttggaactagatcaagatggtggtggcatcatattgggaaggtattaaattcaccttaaaatgggtacttttatgttaggtgaattccacttcaataaattatctttctaaaaaaagaacatcaaaaaggaaaacccacccaagctttaaaatggaaaaaggaaaagccaccaaaaaccataaaatgttaaatataatagataacagaatttttctgatcataataaaaaacatatatagctaatgaaacaacacgtacgtagcaagacaaaattttaatgtaactaacacaagggcaaaatgaaagggccaggctatgagctggttgggttgagacgggaagagatttcagttggtggcaagaaccggcaggagccaggcctttgtctgaagaatgaaggtcagggctttccaggccagaggagggcacaaataaagtttctaaagtaaaagtgtcaaagccttgggaatgggggtgagcagtctataggygcagagggaggaggagatggagagtggggatagttggccaaagccaaattatccagactctcaaagagtaggtccaagcttcctactagaggggaacagg

SEQ ID NO: 38726 - DNA, 625 bp, Homo sapiens
acaatgggaggggtgcgggggaagcaggaccgggcagagggagaagttgagctgtgatacagtcacagcagaggcctctactgatcttatagggagctttggagctgggagggctctcaatgttgtctcgaatccaggtgggggactgaggccttgtgcccctgcatggaccagtcattgcgtacatgatgccccagggacaggacatatacctgagccaggcagctctctttggctgagggcaattcctggctgtgaacctcccacaaccaacatcatcagtagctgggtgaatgagcaccttgaccctgaagctagacatgggaagtgcactgtagtgtccactataaataggctttggaacacgcacagtgcaggcacatgcaggcctgtacacayagacccgcgcacacacacactcccagccctgcccaagcctctacagctctacccactctcccaccagctggggcaacagaaaggccagtgtgaggaggaagcccacctcaatgcaacctccacagaacagaaagcagctgactctattttgttttcgggataccttcatcagtctggaagtgcctggaagacgaaggggagttatcccttctgtctcaatgaaatg

SEQ ID NO: 38727 - DNA, 462 bp, Homo sapiens
  misc_feature (1)...(462): n = A,T,C or G
atgctattgctaaatgaactgcatatttttctccataaattggtttttgaggactaagactcttttacaaytcagcaataaataaataaaattataagacaattaactgtggttaatgangaaaaactacatttatttcaagtgatgtgggattgactaaaagtcttaccaaactgattgctgaataagtagtgatattcagtatgaattggtcttatcaatattattggttcctgactgaaaaatttgctcttatttgaataaataaggaaatgactggattcattcttctctttgtgttaatttcccctaggacccattttatctataacttctggtgagttagataaagctcaaatatttcatctctttatcaaatgaggtagctaagtagttttcctgtgtataaataaccttggtgccctgatatagtacaatactattggttgtttcacaatgaaa

SEQ ID NO: 38728 - DNA, 535 bp, Homo sapiens
tttaaatagcaagaggaaaatcaaatgctcaatttaagtatataaatgctatatataaagtaaatttgattgaactagtttcttcagctwtatctcagaggtttaaacttacagccatgtattggtattaatatatggagagctgactgggcacagtggctcacaactgtaatcccagcactttgggaggctgaggtgggaggatcactttagcctgggagctggagacctgcctaggcaacatagtgaaactccatctctacaaaaaaatttaaaaattagcctgctctggtggcacccatctatggtcctagctactcaggaggctgaagtggaaggatcacttcagcccaggaggttgaggttgcagtgagctgagatcatgccaccgcactccagcctaggtaacagagtgagatcctatctcaaatataaatatatatatacacacacacacacatgcatacacacacatacatgtatccactatatgtatatatgtatatatgtatacatgtgtgcgtgtgtgtatata

SEQ ID NO: 38729 - DNA, 535 bp, Homo sapiens
tttaaatagcaagaggaaaatcaaatgctcaatttaagtatataaatgctatatataaagtaaatttgattgaactagtttcttcagctatatctcagaggtttaaacttacagccatgtattggtattaatatatggagagctgactgggcacagtggctcacaactgtaatcccagcactttgggaggctgaggtgggaggatcactttagcctgggagctggagaccwgcctaggcaacatagtgaaactccatctctacaaaaaaatttaaaaattagcctgctctggtggcacccatctatggtcctagctactcaggaggctgaagtggaaggatcacttcagcccaggaggttgaggttgcagtgagctgagatcatgccaccgcactccagcctaggtaacagagtgagatcctatctcaaatataaatatatatatacacacacacacacatgcatacacacacatacatgtatccactatatgtatatatgtatatatgtatacatgtgtgcgtgtgtgtatata

SEQ ID NO: 38730 - DNA, 830 bp, Homo sapiens
atccttcagcttactcaaaactaaagacagttggatttggtcatttaaacacattttaatttttttatttatacataatatacatatttatggggtacatgtaatagtttgatatatgcatataatgtgccgtgatcagatcttggtatttaggatacccatcacctcaaacatttatcatttatttgagttggcagcatttaaaatcttctcttcttgacattttaaacatatagccaacctcaaaagtaagaattttaaaaatcctttgtgccttaaattaaaaaggacattaaaattagagtacaatattggaattgacatcaaataatctatgcaaatattataataaatgcccaaagtagagaagcctacacactcactgagaatcaagagtcaaatgttcacatcgatgcckccaattgatcttgtcccaaggtaaactacttatcttgtggatttccaaacttagtgaatttcattcacccaattacccaagccagattcagggattggcaaactttttctgtaaagactcatacagtaaacagttgaggctctgcaggccagatggtctctgtcactcaactctgtctcttgcagtgcaaaagcaaccacagacaatgcataaatgaacagccatggctgtattcctataaaactttattcataaaaacaggcagcagatcagatttgcaccaagggttatggtttgcttacccctgctaattagggaatctaggctcctccaacttatttaatccttattaaaaattgcactataaccagttccctcttctaatgcgttaactactcaaatttatgatatt

SEQ ID NO: 38731 - DNA, 665 bp, Homo sapiens
gaaaccccgtctctactaaaaatacaaaaaatgagcctggcgyggtggggggcgcctgtggtcccagctgctggggaggctgaggccggagaatcgcttgaacccggggggcggagcaggttgcagtaacgcatctgcaaagcaggaagcatcaagcaatgctggcaacaccacgagaagcggcgagggagaattcttccctaggctgcagggggcaggcggccctttcggcgcggtgactttggacttccagcttccagaagcctgagagaatgtgcctgtggtcggaggccacccgggccgtgctagcgtgttagggcagctccgagaaacccgcccagcgtggccgtgcatttcccttaagcccaggcctcggctgacagatgcgaagcggtaagaagagaaggaaaggccagctctctgtgtctctggccgggatgggtaccccccacgcggggaaggagagctgctccttctgccttttctgctgatgacaagtgaaatgacgagagtgaggaaagccgatggccgcggccggccacacgctgcaggactcgggagctggtgcacggagctcggaaaggtgatggcactgcccggaggggcagctctctggattttgagaaaggcacgtcttccccagtctagtttcagacccagaggaa

SEQ ID NO: 38732 - DNA, 665 bp, Homo sapiens
gaaaccccgtctctactaaaaatacaaaaaatgagcctggcgtggtggsgggcgcctgtggtcccagctgctggggaggctgaggccggagaatcgcttgaacccggggggcggagcaggttgcagtaacgcatctgcaaagcaggaagcatcaagcaatgctggcaacaccacgagaagcggcgagggagaattcttccctaggctgcagggggcaggcggccctttcggcgcggtgactttggacttccagcttccagaagcctgagagaatgtgcctgtggtcggaggccacccgggccgtgctagcgtgttagggcagctccgagaaacccgcccagcgtggccgtgcatttcccttaagcccaggcctcggctgacagatgcgaagcggtaagaagagaaggaaaggccagctctctgtgtctctggccgggatgggtaccccccacgcggggaaggagagctgctccttctgccttttctgctgatgacaagtgaaatgacgagagtgaggaaagccgatggccgcggccggccacacgctgcaggactcgggagctggtgcacggagctcggaaaggtgatggcactgcccggaggggcagctctctggattttgagaaaggcacgtcttccccagtctagtttcagacccagaggaa

SEQ ID NO: 38733 - DNA, 665 bp, Homo sapiens
gaaaccccgtctctactaaaaatacaaaaaatgagcctggcgtggtggggggcgcctgtggtcccagctgctggggaggctgrggccggagaatcgcttgaacccggggggcggagcaggttgcagtaacgcatctgcaaagcaggaagcatcaagcaatgctggcaacaccacgagaagcggcgagggagaattcttccctaggctgcagggggcaggcggccctttcggcgcggtgactttggacttccagcttccagaagcctgagagaatgtgcctgtggtcggaggccacccgggccgtgctagcgtgttagggcagctccgagaaacccgcccagcgtggccgtgcatttcccttaagcccaggcctcggctgacagatgcgaagcggtaagaagagaaggaaaggccagctctctgtgtctctggccgggatgggtaccccccacgcggggaaggagagctgctccttctgccttttctgctgatgacaagtgaaatgacgagagtgaggaaagccgatggccgcggccggccacacgctgcaggactcgggagctggtgcacggagctcggaaaggtgatggcactgcccggaggggcagctctctggattttgagaaaggcacgtcttccccagtctagtttcagacccagaggaa

SEQ ID NO: 38734 - DNA, 665 bp, Homo sapiens
gaaaccccgtctctactaaaaatacaaaaaatgagcctggcgtggtggggggcgcctgtggtcccagctgctggggaggctgaggccggagaatcgcttgaacccggggggcggagcaggttgcagtaacgcatctgcaaagcaggaagcatcaagcaatgctggcaacaccacgagaagcggcgagggagaattcttccctaggctgcagggggcaggcggccctttcggcgcggtgactttggacttccagcttccagaagcctgagagaatgtgcctgtggtcggaggccmcccgggccgtgctagcgtgttagggcagctccgagaaacccgcccagcgtggccgtgcatttcccttaagcccaggcctcggctgacagatgcgaagcggtaagaagagaaggaaaggccagctctctgtgtctctggccgggatgggtaccccccacgcggggaaggagagctgctccttctgccttttctgctgatgacaagtgaaatgacgagagtgaggaaagccgatggccgcggccggccacacgctgcaggactcgggagctggtgcacggagctcggaaaggtgatggcactgcccggaggggcagctctctggattttgagaaaggcacgtcttccccagtctagtttcagacccagaggaa

SEQ ID NO: 38735 - DNA, 540 bp, Homo sapiens
catccagccactccctgactccagggatccctggcacactgagttaatgctgtccttgggctacatgtaagggaaattctggactcattgatgggctacaggacacctcagctggagggccacaccatcactgtgaagtcctttccttagctgatcccaccaactgttgccatccttctccatccttccaggtacagcctagggtctctgccagcccaaagcagcgagcctgctcttcccacattttctttttcctctaatagaaaatcagtggcttgaggaggatcaggagtcaggttgaaaggccagcagaacagtcaaagtgcctgccagtcttctgcctcacctkgagatgaagactggcccagcaaagcctccagcatggccttgtggcctccccctccacccacagcaccagcagcagtggtggaaccccagacagaatcaactgttcctagggtgtgtcctccaaaggagaactcccttcatactgtgcagctttggttaggaccggcagaatttgccagaatgtataacctc

SEQ ID NO: 38736 - DNA, 582 bp, Homo sapiens
gtccatgcatgtttctgaatcatatggctgagctataatccccagaaaccagggacagctgtccgtggacggacatgcttttctggaaggatctctccactggacaccttacagctggtgggaattacctgagccatggtgatatggaaaaacccacatcagtcaggatgctatgactaatagagtctaatatagttctttaaaagaggtaattaatttgttagcacaaaatggccagaatgatttatagaaataaaatagatactgcatataaataagtacttactgttgatgtcatcattggaggcagtgtagacatgcataaacagatggaaaatggggctgttgattagatactagttctgccctctattgccttgggaaaattaaccactctaagctkcagttttttaatgtgcctgatggagataatgttttctacttgtctgcatcgtggtgcatggcacaagcaggtaccttaaatatttgtttccttttctttttccatcataaataaggatttattatgtgctgtaacaaattattcttcatgatgattacttaattattttttattgactt

SEQ ID NO: 38737 - DNA, 616 bp, Homo sapiens
ttgttacttctgcagctctgaaaaactagctcacacaatggatgccccagaccaaagggcaggcactcttatcacaaaactgccttaatttccatttaaaattttctatttaaaattacttcaaggctggttggaagggcaagacttcaaaaacaacacattcctttttaattaattggaggcgggtgactataggaatgttttagctttgccgttaatatgagtgctatgaatttgtaatagtgacatcttcctatacttgtgcagtaagatgtttgttagcaagaatgtttggagaagcaagatgttccctggtgaactgaattccctgggtagccctttaagcaatttggggcaatgtaataaaaagcagaagattaagagttctgcgttccagacctagttttggcacaaagagttgtgtgacctrgggcaagtaattttccctctctgggtcttaatcttgttatttttaaagtgaataaattagaaaagatgggcttgaaagacactctgttcctaaaatgtggctaggagaaggtgaaaataactaaatcttttatttgcacctaaaaattccaatggctgagtagagactccacaagctactacagtc

SEQ ID NO: 38738 - DNA, 623 bp, Homo sapiens
gtagcaaataaaggcaggaacataaaaccaaatactgcatgttcttacttataagtgggaactaaacattgaatacacatggccataaagatgggaayaatagacactagggactactagagggggtagagtgggagtggggtgagcattggaaaactacctattgtgtactatgctcactacctgggtgacggtgatcatttatataccaaacctcagcgacatggaatttacccatgtaacaaaccagcacatgtacccccaaaacaaaaataaaagttgaaaaaggagagagatggctttagaatctatcaccacaaagaaaagaatacttaatgttaagggaaaatgctagtgataaaatgttgtgaatagagcatgctgcaaaatgtatcggttgtataattccaataattaaaaaaaaaaaacctagaaagaaaccaaaacattatcagaagttatctaattacttttataaatagaaaaaaatatttttcaaagtaattcaatgacagggaatttcatcttctccaagaaattgtcttcttccactctcaaaaagagaattctataactcattgtgtcttttttccctccttgccttcttagaagctcaaagatca

SEQ ID NO: 38739 - DNA, 492 bp, Homo sapiens
tcaaaacaacttaygatcatagcaaaaataattaacaagaggaaagatgggcatcagaataaggttgataaagggcagcgatggaagagaaagttgtatcaagagttccagaggctgtgaggcaagccccttccccactctcaggccattctaacctaccatcttcaatggtatcaggtgctcacacctataaagcccacctctaaatctgactctgccttggggaccttgtcctgcattcctgcacatcctgtgggatacactgtgatgccccacacgtaggagatgctcagcagatgtctagtgaaatgaattgttgacccagctcatttctaacaggcagcctttccagagaatgacagcgaatgtgtactctctgtgtttgaagactgtgtgatgttaattgaagtgcctgcaagtcaaaataagaatgacagtttattttaaaaaaatattttaatggggatcctgaaagtgaaaacaaatccttca

SEQ ID NO: 38740 - DNA, 492 bp, Homo sapiens
tcaaaacaacttatgatcatagcaaaaataattaacaagaggaaagatgggcatyagaataaggttgataaagggcagcgatggaagagaaagttgtatcaagagttccagaggctgtgaggcaagccccttccccactctcaggccattctaacctaccatcttcaatggtatcaggtgctcacacctataaagcccacctctaaatctgactctgccttggggaccttgtcctgcattcctgcacatcctgtgggatacactgtgatgccccacacgtaggagatgctcagcagatgtctagtgaaatgaattgttgacccagctcatttctaacaggcagcctttccagagaatgacagcgaatgtgtactctctgtgtttgaagactgtgtgatgttaattgaagtgcctgcaagtcaaaataagaatgacagtttattttaaaaaaatattttaatggggatcctgaaagtgaaaacaaatccttca

SEQ ID NO: 38741 - DNA, 1007 bp, Homo sapiens
tccacagaaacctcctgaataactgggattaaaggtgtgtgtgcaccaccacgcccggctaaaactatttttgtaatgtttattactgagaacactgaaataaactcattaaatgatggttaattggtggagcaggttaactggctgtaagagataaggatcatcgttggatattaaaatgatacattcaaaagttttaaatgctgttcactggaatatgcaaaaaccgtgacttgtgactctatcagaggccacagtcggggcagtacacagttatcctcacaaacagtgactctatgttgaaggctgacaaaaggaatgagataggaacagttttaatgggcacacagagacactgttaggcagtgttggtggttgcgtggtaatcacttctgatgtgtatggttttgtttagagcctattaattctttcaaatatgtgcctaaaattcttgtgctaaatttaacatcaaccagaaagggctaccactgcgatattctgaaaatgggcaggaaggagagatgtttccagtgcatcctcagcacaattggaagccacacaacggagatgacaagagttggaaatgacaaagaaacctgtcaagtggaaaagcttttaattctgatctacccattgtgccagatctgwggcaccaccagaaatagcagcgggtcctggaagcaatggtcactgcctgaatatataatggaaacgggaggaaacagggaggtggaggcggttatgcctcattcctttcagctacccttacgtctacaggaagtaacagccaggactgtcatcttttaggacaaaggagaatgatgtaagaaaagtctgaaatacgaagatctcaaaaaatcctccctaagtcatggagacagcctgcatgacacctcatctgatttattttttgaacctcaacagctcatcatgcaatttccttgcttgtgtatctcctttttttcccgggaacgagacacactttctttttccgccatcaggatcca

SEQ ID NO: 38742 - DNA, 1114 bp, Homo sapiens
gctaccacctgcaggttagtgtggatttcacttggcatgttgcgtttccyaggaataaacgtttttcagttcagtgaaggctaattcagagctgccccctcccacctccgtcactctaaataaaaaatgtgtttgctaaatgctgtggactgaattatgtccccctaaaagtcattatggtgaagctctctctaccccattgtgatgcctttgggaggtgatgaagcctagatgagatcatgagggtggagtttgcatgatggaatcagtgcccttataagagacaccagcgagcttggttcctcttcctctctccatccacacacactaaggagaggccatgaggcatggcaaggaggcagccgtctgcaatccaaagagagaacccagaccccaaccctgccagcaccttgaccttggactttcagtctccattactgtaagaaaataaattccttttgtttaagccactgggtctgtggctttttgttagggcagccagagctgactaatacactaagaaaatgcaggttcaggccaggcacggtggttcatgactgtaatcccaccactttgggaggctgacgtgggcagatcacttgaggtcaggagttcgagaccagcctggccaacatggtgaaactccatctctactaaaaactacaaaaaattagctggacatggtggcgcatgcctgtaattccagctacttgggaggctgaggcacaagaatcgcttgaaccccaggatgcaaaggctacagtgagccgagatcgtaccattgcactccagcctaggtgaccagcgtgaaactccccatctctaagaaaatataaaagaaaaagaaaaaagaaaatacagcctcaagaccagccttccagcctctttttccaaataaactgttttccctatgaccctcctacatagaatttctgacacccaaacagcttaacccttacctgtacttgtgtagaaaattacctagatgcaccagtagctcccagagcaccaccaaggcgagccatcccagggtcgcggagcagaaagacacacagtccaaaaggttaacaagcttaggataggatgcaagtgggacagaaggagcacactgtct

SEQ ID NO: 38743 - DNA, 1114 bp, Homo sapiens
gctaccacctgcaggttagtgtggatttcacttggcatgttgcgtttcctaggaataaaygtttttcagttcagtgaaggctaattcagagctgccccctcccacctccgtcactctaaataaaaaatgtgtttgctaaatgctgtggactgaattatgtccccctaaaagtcattatggtgaagctctctctaccccattgtgatgcctttgggaggtgatgaagcctagatgagatcatgagggtggagtttgcatgatggaatcagtgcccttataagagacaccagcgagcttggttcctcttcctctctccatccacacacactaaggagaggccatgaggcatggcaaggaggcagccgtctgcaatccaaagagagaacccagaccccaaccctgccagcaccttgaccttggactttcagtctccattactgtaagaaaataaattccttttgtttaagccactgggtctgtggctttttgttagggcagccagagctgactaatacactaagaaaatgcaggttcaggccaggcacggtggttcatgactgtaatcccaccactttgggaggctgacgtgggcagatcacttgaggtcaggagttcgagaccagcctggccaacatggtgaaactccatctctactaaaaactacaaaaaattagctggacatggtggcgcatgcctgtaattccagctacttgggaggctgaggcacaagaatcgcttgaaccccaggatgcaaaggctacagtgagccgagatcgtaccattgcactccagcctaggtgaccagcgtgaaactccccatctctaagaaaatataaaagaaaaagaaaaaagaaaatacagcctcaagaccagccttccagcctctttttccaaataaactgttttccctatgaccctcctacatagaatttctgacacccaaacagcttaacccttacctgtacttgtgtagaaaattacctagatgcaccagtagctcccagagcaccaccaaggcgagccatcccagggtcgcggagcagaaagacacacagtccaaaaggttaacaagcttaggataggatgcaagtgggacagaaggagcacactgtct

SEQ ID NO: 38744 - DNA, 1114 bp, Homo sapiens
gctaccacctgcaggttagtgtggatttcacttggcatgttgcgtttcctaggaataaacgtttttcagttcagtgaaggctaattcagagctgccccctcccacctccgtcactctaaataaaaaatgtgtttgctaaatgctgtggactgaattatgtccccctaaaagtcattatggtgaagctctctctaccccattgtgatgcctytgggaggtgatgaagcctagatgagatcatgagggtggagtttgcatgatggaatcagtgcccttataagagacaccagcgagcttggttcctcttcctctctccatccacacacactaaggagaggccatgaggcatggcaaggaggcagccgtctgcaatccaaagagagaacccagaccccaaccctgccagcaccttgaccttggactttcagtctccattactgtaagaaaataaattccttttgtttaagccactgggtctgtggctttttgttagggcagccagagctgactaatacactaagaaaatgcaggttcaggccaggcacggtggttcatgactgtaatcccaccactttgggaggctgacgtgggcagatcacttgaggtcaggagttcgagaccagcctggccaacatggtgaaactccatctctactaaaaactacaaaaaattagctggacatggtggcgcatgcctgtaattccagctacttgggaggctgaggcacaagaatcgcttgaaccccaggatgcaaaggctacagtgagccgagatcgtaccattgcactccagcctaggtgaccagcgtgaaactccccatctctaagaaaatataaaagaaaaagaaaaaagaaaatacagcctcaagaccagccttccagcctctttttccaaataaactgttttccctatgaccctcctacatagaatttctgacacccaaacagcttaacccttacctgtacttgtgtagaaaattacctagatgcaccagtagctcccagagcaccaccaaggcgagccatcccagggtcgcggagcagaaagacacacagtccaaaaggttaacaagcttaggataggatgcaagtgggacagaaggagcacactgtct

SEQ ID NO: 38745 - DNA, 1114 bp, Homo sapiens
gctaccacctgcaggttagtgtggatttcacttggcatgttgcgtttcctaggaataaacgtttttcagttcagtgaaggctaattcagagctgccccctcccacctccgtcactctaaataaaaaatgtgtttgctaaatgctgtggactgaattatgtccccctaaaagtcattatggtgaagctctctctaccccattgtgatgcctttgggaggtgatgaagcctagatgagatcatgagggtggagtttgcatgatggaatcagtgcccttataagagacaccagcgagcttggttcctcttcctctctccatccacacacactaaggagaggccatgaggcatggcaaggaggcagccgtctgcaatccaaagagagaacccagaccccaaccctgccagcaccttgaccttggactttcagtctccatwactgtaagaaaataaattccttttgtttaagccactgggtctgtggctttttgttagggcagccagagctgactaatacactaagaaaatgcaggttcaggccaggcacggtggttcatgactgtaatcccaccactttgggaggctgacgtgggcagatcacttgaggtcaggagttcgagaccagcctggccaacatggtgaaactccatctctactaaaaactacaaaaaattagctggacatggtggcgcatgcctgtaattccagctacttgggaggctgaggcacaagaatcgcttgaaccccaggatgcaaaggctacagtgagccgagatcgtaccattgcactccagcctaggtgaccagcgtgaaactccccatctctaagaaaatataaaagaaaaagaaaaaagaaaatacagcctcaagaccagccttccagcctctttttccaaataaactgttttccctatgaccctcctacatagaatttctgacacccaaacagcttaacccttacctgtacttgtgtagaaaattacctagatgcaccagtagctcccagagcaccaccaaggcgagccatcccagggtcgcggagcagaaagacacacagtccaaaaggttaacaagcttaggataggatgcaagtgggacagaaggagcacactgtct

SEQ ID NO: 38746 - DNA, 1119 bp, Homo sapiens
tgactggataatttatgggcaagaccaacaaccacatccatatctcaaattcattaataatcgagagagggactcagcccagaatcactcagagggtgagtcctcagggaaggaatctgttcaaataatcagagcctttttaaaaataaaaataataataaattatgatttttctcagcagtacctttccaatacagggagggctgtttcttactacccaaagggaacattttgaagggtgcctgagatttttcatgtgaatatctatatgaaaggaccagacatgatcatagaatgaaggaaaacgtgagcagcgagaaaattaggggttaagaaaatgtcccaaatttcaaaagggtatgtttcggaaattgccattgataacaattggtagctttgataatagcattgatagcttggtagmaaatgataggaaaattccagaatagatcattaaagagatggtgtttgaaccttagagataaaaggggctcctgttgagaaccagggtgagccgctaagagcaagagatgtgtattaaatactttctcttttgaaaagtgtgccaggatgctttgcaacatctatcacactgtgctttggacaagaaggttgaagttgggctgataaccattccaatagacttgctaacggcaccaaggaaggtgaacctggaaagtctccatgccctgtggtctgctccttgctctcactcattcaactcaacaaatggttctgcagtaactcaacatacatgaatacagcctggattttatgcagggtgctcttccaggcaagggatagaaagaagttgttggatccctgtcttcataaggcttataatgcagtggtggcaaagggcaagtgcacaagtaaccacaatgcaaggcagagtagcaaagccacaagaaaagaagtaccagctgtgcatggaggcttgcacctgtagtcccagctactagggaggccgaggcaggaggatagcttgagcccaggagttggaggctgctgtgagctatgactgtgccactgtaccctagcctgggtgacagagcgagaccatatctcttaaaacaaaacagaagttccaagtgccagggagacctatgaagacaaaag

SEQ ID NO: 38747 - DNA, 1119 bp, Homo sapiens
tgactggataatttatgggcaagaccaacaaccacatccatatctcaaattcattaataatcgagagagggactcagcccagaatcactcagagggtgagtcctcagggaaggaatctgttcaaataatcagagcctttttaaaaataaaaataataataaattatgatttttctcagcagtacctttccaatacagggagggctgtttcttactacccaaagggaacattttgaagggtgcctgagatttttcatgtgaatatctatatgaaaggaccagacatgatcatagaatgaaggaaaacgtgagcagcgagaaaattaggggttaagaaaatgtcccaaatttcaaaagggtatgtttcggaaattgccattgataacaattggtagctttgataatagcattgatagcttggtagcaaatgataggaaaattccagaatagatcattaaagagatggtgtttraaccttagagataaaaggggctcctgttgagaaccagggtgagccgctaagagcaagagatgtgtattaaatactttctcttttgaaaagtgtgccaggatgctttgcaacatctatcacactgtgctttggacaagaaggttgaagttgggctgataaccattccaatagacttgctaacggcaccaaggaaggtgaacctggaaagtctccatgccctgtggtctgctccttgctctcactcattcaactcaacaaatggttctgcagtaactcaacatacatgaatacagcctggattttatgcagggtgctcttccaggcaagggatagaaagaagttgttggatccctgtcttcataaggcttataatgcagtggtggcaaagggcaagtgcacaagtaaccacaatgcaaggcagagtagcaaagccacaagaaaagaagtaccagctgtgcatggaggcttgcacctgtagtcccagctactagggaggccgaggcaggaggatagcttgagcccaggagttggaggctgctgtgagctatgactgtgccactgtaccctagcctgggtgacagagcgagaccatatctcttaaaacaaaacagaagttccaagtgccagggagacctatgaagacaaaag

SEQ ID NO: 38748 - DNA, 635 bp, Homo sapiens
aaaatttctaattttttaaatattattttttgtttcactaggaggtaacataaatttaaacttcaagtaaaatctatttaaaattagaattgttttgttaaagttaaagccttttgttgttgtttttaacttaccattgttcatcttgcaaaaaaaaaaaagtttcttacctacttccgagtatatttatgctttatgtatcttgattttgacacgtgacttgcctctctctggcccacatagccaaagccagctgaaagaagtttctccacagccgggtgcagtggttcatgcctgtaatcccagcactttgggaggccaaggtgggcggatcatgaggtcaggagattgagaccaccctggccaacatggtgaaaccccgtctctactaaaaaattcaaaaattaactgagcatggtggcacttgcctgtaatcccagctacttgggaggctgaggcaggagaattgcttgaaccagggagtcagaggttgcagtgagccgagatcacaccactgcactccagcctggtgacagagtgaaactccgtttcmaaaaaaaaaaaaaaaaaagtttctccacttcagaggggatgtgtagaattttgagaagctgaatagctattcagcttgtgct

SEQ ID NO: 38749 - DNA, 1471 bp, Homo sapiens
tgcatttgcatttgctcttcttctgcctacagcatcacccacacacctatctggtctggccaactcctcctgatcctccaaggctccccagaagcttctcctcctttttgaggccttctctggacaccaaccacgcaccagcttcctcaccagcaagattcatcacttctcccttctgcccctctggactgcaccgtgtttattcatgtgtctgacgcctgagcaaagtggagttccttaaagtcccggagctgtgacactcatctccatagcagcagccccaggtccttcaagacagccgtgcctctagggcctctgttaataaaggaatgaaatgcacatcctctttttacaatgccatctttgaaaaggtctgcccatgaagaaagcacaaacaaatgcctttttatttaaaactccctttgtaaaaatcactctccttttttcctgaaacctgcatcttttaaaagtccttttgggttcttccccctgtaaaactatcttgacacctagccatgtatcacggcacatgaagcagctacaacactgcagttggaaaaacattatgctgtgaaggaagaaactctatctgccaagacacttaaaggcttgctacagatatcatgagaatgccatgctggccacaatgaaagcagcttggacactcctttacagcctgtgatcattttcacaaacatttcctaaattctacatagtaaaactttctttccaaggaggacaaattgtttaaaaagggggaggaacatattcttttctggttttgtttttctgtagttaaactctgagctttaaaaacacagcctatacccccccatccttagracacccaaacagaaagtcatttggaagtaaaaaggaaaaaagtggccaggactcaagacaaatggctcccaataaaggagatggattcagagaaaaaaaaaaaaaatattctttcagtgcagattccactactgttacttgagtttccattctgttttcaatgtgaggcaaataaaattgtagaagtgagagcctcccatgtcgtggaagggagttggattcagaatcaggttctaactgcagaaacacaggccagatctcataaagaccagcccaagccacgctgacagctggccctcctcaagcctaaactagagctccaaaactgaagaccccctaaaaataacaaagaaagagcattcagctgctccatccaaactcaagcacaaaagaaagcgggggtaaaaatcgtttccatatttcacataaacacagatctcactgcgacagctaggaatgcatgagtcaaccaaggactgacaataattactgcacacatcgaggccccccactacaattcaagacgagaatgtgcaacacagaacgaaaattatggacgtctctattgggaaatgtttgtgcttacatatttcaagatggctcttttaaaaaaaataaagtgtccttt

SEQ ID NO: 38750 - DNA, 1471 bp, Homo sapiens
tgcatttgcatttgctcttcttctgcctacagcatcacccacacacctatctggtctggccaactcctcctgatcctccaaggctccccagaagcttctcctcctttttgaggccttctctggacaccaaccacgcaccagcttcctcaccagcaagattcatcacttctcccttctgcccctctggactgcaccgtgtttattcatgtgtctgacgcctgagcaaagtggagttccttaaagtcccggagctgtgacactcatctccatagcagcagccccaggtccttcaagacagccgtgcctctagggcctctgttaataaaggaatgaaatgcacatcctctttttacaatgccatctttgaaaaggtctgcccatgaagaaagcacaaacaaatgcctttttatttaaaactccctttgtaaaaatcactctccttttttcctgaaacctgcatcttttaaaagtccttttgggttcttccccctgtaaaactatcttgacacctagccatgtatcacggcacatgaagcagctacaacactgcagttggaaaaacattatgctgtgaaggaagaaactctatctgccaagacacttaaaggcttgctacagatatcatgagaatgccatgctggccacaatgaaagcagcttggacactcctttacagcctgtgatcattttcacaaacatttcctaaattctacatagtaaaactttctttccaaggaggacaaattgtttaaaaagggggaggaacatattcttttctggttttgtttttctgtagttaaactctgagctttaaaaacacagcctatacccccccatccttagaacacccaaacagaaagtcatttggaagtaaaaaggaaaaaagtggccaggactcaagacaaatggctcccaataaaggagatggattcagagaaaaaaaaaaaawatattctttcagtgcagattccactactgttacttgagtttccattctgttttcaatgtgaggcaaataaaattgtagaagtgagagcctcccatgtcgtggaagggagttggattcagaatcaggttctaactgcagaaacacaggccagatctcataaagaccagcccaagccacgctgacagctggccctcctcaagcctaaactagagctccaaaactgaagaccccctaaaaataacaaagaaagagcattcagctgctccatccaaactcaagcacaaaagaaagcgggggtaaaaatcgtttccatatttcacataaacacagatctcactgcgacagctaggaatgcatgagtcaaccaaggactgacaataattactgcacacatcgaggccccccactacaattcaagacgagaatgtgcaacacagaacgaaaattatggacgtctctattgggaaatgtttgtgcttacatatttcaagatggctcttttaaaaaaaataaagtgtccttt

SEQ ID NO: 38751 - DNA, 1034 bp, Homo sapiens
tgagaacaaacttcaaccacagtgaccactgaccaccccacaactcccttcttactacttgtgttaaagatttttttttaaaggggggcaggggttggtcctgagcatggtggctcccatctgtaattccaacactttgggagaccgagccgggaggatcactgcagaccaggagttccagaccagcctgggcaataccacaagacccatctctacaaagattttttttttaattagccaggtgtagtggcatgtgcctgtggtcccagctacttgggaggatgacacaggatgatcactcaagcctcaagccctggagtttgaggctaaaatgagctatgatcgtaccactgctttctaacctgggcaagagagcaagaccctgcctcttatttaaaaaaaaaaaaaaggctgttataagaactcttcaaggaataaggaagaaatctcaagggaaatgtctcacttattttgctaagaattgcctgatgctgttgctaggtggtgcttataaatataagcacacaccgtaagactggttttttactttaattagtggcaaagacaagccttctcaaattaagtgtcatcattccagaatgtaaataaaacagctggagtacataccagaccagatagcccaatactacaatagcaggactctagcaaagtttgaaaacacatttgcagctacgtgctagaacagtgcttctctaattgtgatgggtgcacgaatygccaggggatcttattaaaatgcagattctgattcggcaggcccaagcttctgcatctctaacaagctcccaggtgatgctgaagttgctggtcacagaccaggtaccagacaggggccaacagttgacagcaaaaaccatcctatgccatgctcactgcaagcccaggtactattttttaaaagtgaggaaatatggctcaaactaatttacccaaggaaagctcacgaaatttgcaagaggcatttatcactccgctaatcaagaaccttcctgatcagctgcaagttctgcccc

SEQ ID NO: 38752 - DNA, 1172 bp, Homo sapiens
ttagacatttgagcctgtaacaggagactattccttaattttccacaactagctccttgcatttggaaatactataaccatttgggatgggagagcggtggaaagaaaaagaacgtagaaaagcaggaagtgtttcagtctacttcaacatcaaaagggaaaggatgaaaattaataccaatcagggtttcctgtaggcagtcagatgatttcataggattttgagaacactcccaaaggtctcatagaacaggaaaactcacacttactgccaaaaagtcagcaaagtgattgttgaaatccacaaccagctcacaaatgatagcgacagtcattgttttacagtaattgttttaatacatgcgcattccattctgggaaaactcccagatcaaatctctttttccgttcgagttctgtataacttttgcttttggttacaaaggaatgggcttctatccgtttcttttccacttttttycccattctcctgggcctagtcccagagaaacagctggagtaacaggcaggtggcaagagggatttcagaagctggaggagcctcagtttagggagccacagaaagcccttgggtggttaaaccagtgttacctgagtccaaggaaatctctgctgctagtggagagaacccaagggagaacctgaataacactgggaaattaaggccacagacttcacttctgtcctgctccaagttacatcccctgggtgtaccgctcagcggccagccagatggagtatggggtttctatctatttaatatttctcctagcacgaaaggacaagagacatagggcccacttcataaagcaccttcttaaggtttaagaaggacaggaatacaaatgcaatgctggtctcacctgggaggaccacgcagtgccatcgaaggggccaagtgtgccaactgtgtcactccttttccagagtcacctcctctgcctttgcgtccatgtcttcttgtgagataacttcatttccactaaagtgctggcctaagatttcccttttcttggaaaattcatgtttccaagaggaacacttcgcgatcccaactaactttattatcccaatctcttacccagtttataactggccctgtaaccttgagcaagtcagcttctttgggtggaaaggaacattaaggatcc

SEQ ID NO: 38753 - DNA, 1172 bp, Homo sapiens
ttagacatttgagcctgtaacaggagactattccttaattttccacaactagctccttgcatttggaaatactataaccatttgggatgggagagcggtggaaagaaaaagaacgtagaaaagcaggaagtgtttcagtctacttcaacatcaaaagggaaaggatgaaaattaataccaatcagggtttcctgtaggcagtcagatgatttcataggattttgagaacactcccaaaggtctcatagaacaggaaaactcacacttactgccaaaaagtcagcaaagtgattgttgaaatccacaaccagctcacaaatgatagcgacagtcattgttttacagtaattgttttaatacatgcgcattccattctgggaaaactcccagatcaaatctctttttccgttcgagttctgtataacttttgcttttggttacaaaggaatgggcttctatccgtttcttttccactttttttcccattctcctgggcctagtcccagagaaacagctggagtaacrggcaggtggcaagagggatttcagaagctggaggagcctcagtttagggagccacagaaagcccttgggtggttaaaccagtgttacctgagtccaaggaaatctctgctgctagtggagagaacccaagggagaacctgaataacactgggaaattaaggccacagacttcacttctgtcctgctccaagttacatcccctgggtgtaccgctcagcggccagccagatggagtatggggtttctatctatttaatatttctcctagcacgaaaggacaagagacatagggcccacttcataaagcaccttcttaaggtttaagaaggacaggaatacaaatgcaatgctggtctcacctgggaggaccacgcagtgccatcgaaggggccaagtgtgccaactgtgtcactccttttccagagtcacctcctctgcctttgcgtccatgtcttcttgtgagataacttcatttccactaaagtgctggcctaagatttcccttttcttggaaaattcatgtttccaagaggaacacttcgcgatcccaactaactttattatcccaatctcttacccagtttataactggccctgtaaccttgagcaagtcagcttctttgggtggaaaggaacattaaggatcc

SEQ ID NO: 38754 - DNA, 1172 bp, Homo sapiens
ttagacatttgagcctgtaacaggagactattccttaattttccacaactagctccttgcatttggaaatactataaccatttgggatgggagagcggtggaaagaaaaagaacgtagaaaagcaggaagtgtttcagtctacttcaacatcaaaagggaaaggatgaaaattaataccaatcagggtttcctgtaggcagtcagatgatttcataggattttgagaacactcccaaaggtctcatagaacaggaaaactcacacttactgccaaaaagtcagcaaagtgattgttgaaatccacaaccagctcacaaatgatagcgacagtcattgttttacagtaattgttttaatacatgcgcattccattctgggaaaactcccagatcaaatctctttttccgttcgagttctgtataacttttgcttttggttacaaaggaatgggcttctatccgtttcttttccactttttttcccattctcctgggcctagtcccagagaaacagctggagtaacaggcaggtggcaagagggatttcagaagctggaggagcctcagtttagggagccacagaaagcccttgggtggttaaaccagtgttacctgagtccaaggaaatmtctgctgctagtggagagaacccaagggagaacctgaataacactgggaaattaaggccacagacttcacttctgtcctgctccaagttacatcccctgggtgtaccgctcagcggccagccagatggagtatggggtttctatctatttaatatttctcctagcacgaaaggacaagagacatagggcccacttcataaagcaccttcttaaggtttaagaaggacaggaatacaaatgcaatgctggtctcacctgggaggaccacgcagtgccatcgaaggggccaagtgtgccaactgtgtcactccttttccagagtcacctcctctgcctttgcgtccatgtcttcttgtgagataacttcatttccactaaagtgctggcctaagatttcccttttcttggaaaattcatgtttccaagaggaacacttcgcgatcccaactaactttattatcccaatctcttacccagtttataactggccctgtaaccttgagcaagtcagcttctttgggtggaaaggaacattaaggatcc

SEQ ID NO: 38755 - DNA, 1172 bp, Homo sapiens
ttagacatttgagcctgtaacaggagactattccttaattttccacaactagctccttgcatttggaaatactataaccatttgggatgggagagcggtggaaagaaaaagaacgtagaaaagcaggaagtgtttcagtctacttcaacatcaaaagggaaaggatgaaaattaataccaatcagggtttcctgtaggcagtcagatgatttcataggattttgagaacactcccaaaggtctcatagaacaggaaaactcacacttactgccaaaaagtcagcaaagtgattgttgaaatccacaaccagctcacaaatgatagcgacagtcattgttttacagtaattgttttaatacatgcgcattccattctgggaaaactcccagatcaaatctctttttccgttcgagttctgtataacttttgcttttggttacaaaggaatgggcttctatccgtttcttttccactttttttcccattctcctgggcctagtcccagagaaacagctggagtaacaggcaggtggcaagagggatttcagaagctggaggagcctcagtttagggagccacagaaagcccttgggtggttaaaccagtgttacctgagtccaaggaaatctctgctgctagtggagagaacccaagggagaacctgaataacactgggaaattaaggccacagacttcacttctgtcctgctccaagttacatcccctgggtgtaccgctcagyggccagccagatggagtatggggtttctatctatttaatatttctcctagcacgaaaggacaagagacatagggcccacttcataaagcaccttcttaaggtttaagaaggacaggaatacaaatgcaatgctggtctcacctgggaggaccacgcagtgccatcgaaggggccaagtgtgccaactgtgtcactccttttccagagtcacctcctctgcctttgcgtccatgtcttcttgtgagataacttcatttccactaaagtgctggcctaagatttcccttttcttggaaaattcatgtttccaagaggaacacttcgcgatcccaactaactttattatcccaatctcttacccagtttataactggccctgtaaccttgagcaagtcagcttctttgggtggaaaggaacattaaggatcc

SEQ ID NO: 38756 - DNA, 1172 bp, Homo sapiens
ttagacatttgagcctgtaacaggagactattccttaattttccacaactagctccttgcatttggaaatactataaccatttgggatgggagagcggtggaaagaaaaagaacgtagaaaagcaggaagtgtttcagtctacttcaacatcaaaagggaaaggatgaaaattaataccaatcagggtttcctgtaggcagtcagatgatttcataggattttgagaacactcccaaaggtctcatagaacaggaaaactcacacttactgccaaaaagtcagcaaagtgattgttgaaatccacaaccagctcacaaatgatagcgacagtcattgttttacagtaattgttttaatacatgcgcattccattctgggaaaactcccagatcaaatctctttttccgttcgagttctgtataacttttgcttttggttacaaaggaatgggcttctatccgtttcttttccactttttttcccattctcctgggcctagtcccagagaaacagctggagtaacaggcaggtggcaagagggatttcagaagctggaggagcctcagtttagggagccacagaaagcccttgggtggttaaaccagtgttacctgagtccaaggaaatctctgctgctagtggagagaacccaagggagaacctgaataacactgggaaattaaggccacagacttcacttctgtcctgctccaagttacatcccctgggtgtaccgctcagcggccagccagatggagtatggggtttctatctatttaayatttctcctagcacgaaaggacaagagacatagggcccacttcataaagcaccttcttaaggtttaagaaggacaggaatacaaatgcaatgctggtctcacctgggaggaccacgcagtgccatcgaaggggccaagtgtgccaactgtgtcactccttttccagagtcacctcctctgcctttgcgtccatgtcttcttgtgagataacttcatttccactaaagtgctggcctaagatttcccttttcttggaaaattcatgtttccaagaggaacacttcgcgatcccaactaactttattatcccaatctcttacccagtttataactggccctgtaaccttgagcaagtcagcttctttgggtggaaaggaacattaaggatcc

SEQ ID NO: 38757 - DNA, 649 bp, Homo sapiens
  misc_feature (1)...(649): n = A,T,C or G
tttggtttgtaggaggtacccagtgaaaacttataaacaaataaataacaaaattctaggatatatctatttccaacaaaattggaatctttatcttaaatagaccttgaggccaggcgaggtggctcatacctgtaatcccagcactttgggaggctgaggcaggcggatcacctgaggttgggagtccgagactagcctgaccaacatggagaaaccctgtctctactaaaaatacaaaattagccgggcgtgatggygcatgcctgtaatcccagctactcaggaggctgaggcaagagaatcacttgaacctgggaggtggaggttttggtgagctgagatcacgccattgcactccagcctgggcaacaatagcaaaagtctgtctcaaaacaaaagaaaacaaaacaaaccttgaattaaactagtttnctgnnnnnnnnnnnnnnnnnnnnnnnnnnnnnnnnnnnnnnnnnnnnnnnnnnnnnnnnnnnnnnnnnnnnnnnnnnnnnnnnnnnnnnnnnnnnnnnnnnnntttaaatttcagaactcattctttgttatgacaactgtgttcacacagatttttaatgttttacccctaccttgcacttcctttttgggtaaatacatttttttttttttt

SEQ ID NO: 38758 - DNA, 546 bp, Homo sapiens
caggctggtctcaaactcctgggctcaagcaatcctcccacctcagcacccccactacctgagactacaggtgtgcaccaccatgacyggctaattaaaaaaatttttttttgagaagggatctcaccatattgcccaggccagtctcaaactaccaggctcaagcaatcctcccacctcagcgcccccaagcagctgagactacaggtgtgcaccaccatgtctggctaattaaaaaaaaaattttttttagagaaggggtctcactatattgcccaggctggtcttgaactactgggctcaagcaatcctcctgccttggcctcccaaagagctgagattacaggcatgagccaccatgtccagcctttttttctttaaattgacaagctattcctaaattttatatggaagtggctgcctaaggattgatcaccatcatgaatgacacaataactacttgaatcaggaagtttatgaccagccaactccttgagatgaacaaatcgtcattgatgtccttcaccctggaaagttatcagtacc

SEQ ID NO: 38759 - DNA, 547 bp, Homo sapiens
atgaagaaagttagggggactgcaaaggccaatggtggtgctggcaaaaagccamaggaataaagatgctgcatgacgttatctgcagccactgtgtggacttttcataagaagattaataagctaataactttcatgtggcaaaaaagtttatatgaaagtgcaaagaatccagaatagtgaaacaattttgataaagaaaaagttgaaggatttacctgattctaaaacttactacaatgccacagtaatcaagaaagcattataaagacagaacaatagatatttagataaatggaagactagaaagtccaatagcagacttcacacttttgttgttgttgttgttgttgttgtttttgagacagagtctcactctcacctaggctggagttccgtggcataatctcggctcactacaacctctgcctcccaggttcaagcaatactcctgcctcagcctcctgagtagctgggattgcagatgcgtgccaccacacctggctaatttttgtatttttttttttagtagagacgggctttgcca

SEQ ID NO: 38760 - DNA, 547 bp, Homo sapiens
atgaagaaagttagggggactgcaaaggccaatggtggtgctggcaaaaagccacaggaataaagatgctgcatgacgttatctgcagccactgtgtggacttttcataagaagattaataagctaataactttcatgtggcaaaaaagtttatatgaaagtgcaaagaatccagaatagtgaaacaattttgataaagaaaaagttgaaggatttacctgattctaaaacttactacaatgccacagtaatcaagaaagcattataaagacagaacaatagatatttagataaatggaagactagaaagtccartagcagacttcacacttttgttgttgttgttgttgttgttgtttttgagacagagtctcactctcacctaggctggagttccgtggcataatctcggctcactacaacctctgcctcccaggttcaagcaatactcctgcctcagcctcctgagtagctgggattgcagatgcgtgccaccacacctggctaatttttgtatttttttttttagtagagacgggctttgcca

SEQ ID NO: 38761 - DNA, 577 bp, Homo sapiens
tggcgtgatctccaaacaattctcatgcctcagcctcccaaataccagggattacaggcatgtgctacaatgcccggctatttttttggtattttcaatagagatagggttttactgtaaggctggtcttgaacttccaacctcaagtgatccgcccgccttggcctcccaaattgctgcgattacagkcatgagccaccatgcccaaccaagaaatacgtttttaataattatttttatatttaccatattttataactgtgattaatgatcagaaatatacattacatttacgatttcatttcttatacacttttaaaaatctctgccccaccccacaggtgtttagaccagatgtttttgcgcagataaaggaacctgcacagggtcttgcttgggcatgcccgcaacagactggagaccgtcatgcactggaggaatgggatggaggcaccaggaatttgggccttaggcagggaaggagcttggcctcttcagctcatatatggtggcctggtattcaatttgtgaggtggaagcctcctggtcacgtgtccgaaattggtgggttcttggt

SEQ ID NO: 38762 - DNA, 577 bp, Homo sapiens
tggcgtgatctccaaacaattctcatgcctcagcctcccaaataccagggattacaggcatgtgctacaatgcccggctatttttttggtattttcaatagagatagggttttactgtaaggctggtcttgaacttccaacctcaagtgatccgcccgccttggcctcccaaattgctgcgattacagtcatgagccaccatgcccaaccaagaaatacgtttttaataattatttttatatttaccatattttataactgtgattaatgatcagaaatatacattacatttacgatttcatttcttatacacttttaaaaatctctrccccaccccacaggtgtttagaccagatgtttttgcgcagataaaggaacctgcacagggtcttgcttgggcatgcccgcaacagactggagaccgtcatgcactggaggaatgggatggaggcaccaggaatttgggccttaggcagggaaggagcttggcctcttcagctcatatatggtggcctggtattcaatttgtgaggtggaagcctcctggtcacgtgtccgaaattggtgggttcttggt

SEQ ID NO: 38763 - DNA, 577 bp, Homo sapiens
tggcgtgatctccaaacaattctcatgcctcagcctcccaaataccagggattacaggcatgtgctacaatgcccggctatttttttggtattttcaatagagatagggttttactgtaaggctggtcttgaacttccaacctcaagtgatccgcccgccttggcctcccaaattgctgcgattacagtcatgagccaccatgcccaaccaagaaatacgtttttaataattatttttatatttaccatattttataactgtgattaatgatcagaaatatacattacatttacgatttcatttcttatacacttttaaaaatctctgccccaccccacaggtgtttagaccagatgtttttgcgcagataaaggaacctgcacagggtcttgcttgggcatgcccgcaacagactggagaccgtcatgcactggaggaatgggatggaggcaccaggaatttgggccttaggcagggaaggagcttggcctcttcagctcatatatggtggcctggtattcaatttgtgaggtggaagcctcctggtcacgtgtcygaaattggtgggttcttggt

SEQ ID NO: 38764 - DNA, 734 bp, Homo sapiens
ccccacaccacccagactatccccataaaaatctcagcatgactattgtgaaaaaatatgtgtatgtctacatatacatataaacagacatatatgaacatatgtgtgcatgtctacattttcaatagaccttttttaaagaagttttagattcacggcaaaaaagagcagaagtaaagagtamcacatatggcctgaccctccacccccatccacgtccactgtcaacatccctcaacagagtggtaggtttattacaatcaattaatctacattgacaaattatctgcccaagtccacagtttacattagtggtgtttactcttggtgttataaattctatgggtttggacatatttatccctacatgtatctactactacagtatcccacaaaatagtttcaccaccctacaattcactgtgctttacctatatttccctccccactaactcctgacaaccatggatctttttaccatctccatagttttgccttttccagaatgtcacatagttaagattctacagtatgtagccttttcagattggtttctttcgcttagtaatactcatttaaggttgttctatgtcttttcatgacttgatagctcatttgtttttagcactgaataatattccatagtcaggatgtaacacagtttagttatttattcacatgctgaaggatttctggtttgcctctgagaatttggaatagtgaaaaaggtgcca

SEQ ID NO: 38765 - DNA, 734 bp, Homo sapiens
ccccacaccacccagactatccccataaaaatctcagcatgactattgtgaaaaaatatgtgtatgtctacatatacatataaacagacatatatgaacatatgtgtgcatgtctacattttcaatagaccttttttaaagaagttttagattcacggcaaaaaagagcagaagtaaagagtaacacatatggcctgaccctccacccccatccacgtccactgtcaacatccctcaacagagtggtaggtttattacaatcaattaatctacattgacaaattatctgcccaagtccacagtttacattagtggtgtttactcttggtgttataaattctatgggtttggacatatttatccctacatgtatctactactacagtatcccacaaaatagtttcaccaccctacaattcactgtgctttacctatrtttccctccccactaactcctgacaaccatggatctttttaccatctccatagttttgccttttccagaatgtcacatagttaagattctacagtatgtagccttttcagattggtttctttcgcttagtaatactcatttaaggttgttctatgtcttttcatgacttgatagctcatttgtttttagcactgaataatattccatagtcaggatgtaacacagtttagttatttattcacatgctgaaggatttctggtttgcctctgagaatttggaatagtgaaaaaggtgcca

SEQ ID NO: 38766 - DNA, 734 bp, Homo sapiens
ccccacaccacccagactatccccataaaaatctcagcatgactattgtgaaaaaatatgtgtatgtctacatatacatataaacagacatatatgaacatatgtgtgcatgtctacattttcaatagaccttttttaaagaagttttagattcacggcaaaaaagagcagaagtaaagagtaacacatatggcctgaccctccacccccatccacgtccactgtcaacatccctcaacagagtggtaggtttattacaatcaattaatctacattgacaaattatctgcccaagtccacagtttacattagtggtgtttactcttggtgttataaattctatgggtttggacatatttatccctacatgtatctactactacagtatcccacaaaatagtttcaccaccctacaattcactgtgctttacctatatttccctccccactaactcctgacaaccatggatctttttaccatctccatagttttgccttttccagaatgtcacatagttaagattctacagtatgtagccttttcagattggyttctttcgcttagtaatactcatttaaggttgttctatgtcttttcatgacttgatagctcatttgtttttagcactgaataatattccatagtcaggatgtaacacagtttagttatttattcacatgctgaaggatttctggtttgcctctgagaatttggaatagtgaaaaaggtgcca

SEQ ID NO: 38767 - DNA, 1331 bp, Homo sapiens
catgactgtatttaagcaactagttttttaaatatgattgcttctttttaaacatatcttcttcctcagcaatgactattttccataagaaacaatctgtttacacattcattccgtgaaatctctcctacctccaaataatttgtatgtttaatacataaaagaatgaatcaacacaaataattttgtttttacagagtcaaagatcaagatggaaaaaaggcattattcgttttatctttctgtttaaagaccaaaacagtgtagacaggtaaggattcctttagttttgaaaggactccagaaaagaaaatatattactttgttaaaaataacagaataaaaaatatttttcattaaaatactgtgggattttaacaattttatttctatattgaacaatatttttaaactgtatttaatagtgtacatgtgggtcagcacaaattttctcccaccacctaaaaaaaaaaaaagaaatggccaaaatcgtataatttttaaaaacccaacaaaactattcatctgttctaagatcaaaaagacttttactggacaggcaatagagaagctctgttttctaacaattatatttttccaaccatgtggatgaagtaatagggaagatgctgtttcaatttctccatctcctttggaagtggttcttgagtaggaaaaaaaaataaaggagtagtacagataatttactggctggaactttcttcctgaggaatatcagacattcctctccatctcctgagtgatttcacataaattcaatttgagagttaataaagaaacacaatagaatgtgggttagccaggttcttctagaaagttttctcttctagttgtactacttgagaagtagtttaataaagtttattccaaactacaaaattttcaatctcgtatcaaaaattcttatttttagctaaataattatttagatggtaactaatctaattcaaactgctttccctaagttaataatatacagagaatagtaaaaataatcattataacaacagattatttttataagtatatatgtattttataaatattggagggttgtggtttatagtcagaaacgcgactgaagatacgattttggttcatatgatttggttcatggaggtgttgatttatccatggtctgtggtcaaagtctggctttagcacatcgagatgtaccatttgaaatgcccacatccattgcagaactgaatagtaggagattcaagccttacttagattctacattatatctatcatatttcttactaaaagttgctttctaggacatccaacyatgaatgacctttata

SEQ ID NO: 38768 - DNA, 3297 bp, Homo sapiens
ctgtatatgaatctctctgaatctgtctccactttctctcttggttgctaaatctatacttagggttaaattgtagcaaaactcagctggagatattcagggcctgagaagaaaggaaagggaacataccactaaggagctgcttgacataaatgtataccccagcagtagttgagggagaatatatgggactgccttctaaaaggatttgaaaaagagagamaacatgaatttggaaagggcatgtttactgattcagattcattcttttgagattcaggattcatcacctaaaaacaactcaaccccagaaaaaaagtaaactcattattagtaggtctgataaataggtaaaaatgatgatttatgctcaatgaaggcatattgcttccaatgtcatgttaattgatgaaagaaaggattaaaagactcagaggagttattatgcaagaggtatatactgtaaggctggaaccatcagatgttctatgtgaaggcctagtggtacatcatataatgagatcacataaaatacactggtgagaagaagcactacccctagaatttcatcatgcctaaggtgaattccttcagtaggttgatgctgatggtaagagagactcttacagacctagccttgtagtttacaatggggataataggctcataaaataagaaaggcaaggtggtaacacttaactgtcagaagctagaagatagacagaagcaaagttagtgtggcagccaggggagactgacctacaggtatttacgaagatacatttataaggatggttgatagaatacgggatccctgtgggtaaattagatcgacagccaataagcaccctactcaacatatactaataaatagatcatgattggatgatcaggaggccaatggctgttgcctcaataaaatagtcaggatctcttgccttatgtctgggtattagccaatttttgaacttggaacatattgatttcatcagaggccaggtccccaaaagggaggaccctataacaccctgccatttgtacatggtcataatacctgcagtcctttgccaaaacatggccatttacttagatgactgaacactggggaaagggaaatatccaaacagttaaaggactgttgaacacagagctgaggatggtacacagttgactatgttacacagttgacaaaggtacatggaaatgaagggcttcattgtgttccctccgttaatttaggaggccaagcaataaatgcagtcctggctaaggtccagatcacagtgagtttgctgtgcccacagagccagtcagtagttgtcactgtagctccagaatttataatcaaaatatgcatacctggtagttagtataagccccatattaatttatgacttgtgagtaaaaacaagttgaagtttctgaaattacccctgacacatacacacataaccaagttagtaaattaaaaacaatattatatccactatcacatcaagaagctatagtcttatgaaaactacaaaggcatggatggagtaccagtttgttggacataccttacaataataagacactgtcttctaagacataatatatacctaaatcaaagatattgatttggttattttctcataagtaaaatatacaggtttgggaattaagggttggaaataggagtagcctactgccatcattccagtgccttacctgtagaccattttctccctgtctccataattctatgttctacatgattaaagttcctagttccctgtgggggaacacttctaccagggaacacaaaaaagtcccattgaattttataccttggctattgcctgggagctttgggtttctcctgctgagggattaaatgtgagttaatgaataaccatcttggcagtggtaattgactttgatcatcataagaatgttgtagcactgttacacaatggggcaggcaggaatatgtttggcacacagatcatccacgccactaaaaccaacagaactattacctgaggatgaaaggactctagaatgaataatggagaagagagataataagtattagttgtaccaaaatcagctgtaggaagtgaggctataatttgttccatttatctttccattctagattttccccagactgaaaggcccacatgaactacaggaaaagctgtccaccaaacatctgtgaaaaaatgaatctgattgcgatacaagggatgaactatggtagatccaaacgcatcccccatacacatccccaggtaagcacttatggtgccatctgttgggagggctctcaatagacagccttcatctctgagttcctcagggatttccacagctgcagagatctgtgttgcctaaggtcatgcccttctaggggaagcctatatctaatgcctgtttcaggtaagggttattcaaagatctagttatttgctctcggtgtaagaacattctgtgggatcccttacttccagagctctccatgaatttggctgaagcccttaggcctgttctgtagtgcaaccttatctctctttccaatcatgcttcctccctttctttccataggttttgatgtcatggctattccttaatattcattctaaacattgcattttgtttcagggtctgcttcctggaaggcccaacctgtgactgtcatttaaaaaatgttctgttttttttttgtccagttccttttttttaaatttacaaaaaaaatctaaaatcaaattaacatcccagattcggtgaatatttgtgttgtttgaacaggtatttacagatgcccactctgtgccagaaaaaaagtgaactctgcagggaagatgacagacaacatcttttcctttgcttagcctagagtctagtgtaatataaataaactaaacaataatcacacaaataattacaattattgtaaaagtgaaagaggaaaaactgtagaatatctctcttagtccaaaatgagttaaggttagattcttaaaacagtaacattattaaaaagaataattactggaaggaaaaaaagtaatggagggacagagtcaacaaacacggaacatagacaaagtctgataaaaacagcaacagtaattacagccacaaccaacaacaaatttatgatatcaccaaaggagaagacagtcttttaaaagctgtcttccatctgttcctaccataaagtagagcttagctcaagagaaataaaaaagattccaattcagttcacttatgaaaacttccaggcaatgttgatttgtcgtgctgcaa

SEQ ID NO: 38769 - DNA, 3297 bp, Homo sapiens
ctgtatatgaatctctctgaatctgtctccactttctctcttggttgctaaatctatacttagggttaaattgtagcaaaactcagctggagatattcagggcctgagaagaaaggaaagggaacataccactaaggagctgcttgacataaatgtataccccagcagtagttgagggagaatatatgggactgccttctaaaaggatttgaaaaagagagaaaacatgaatttggaaagggcatgtttactgattcagattcattcttttgagattcaggattcatcacctaaaaacaactcaaccccagaaaaaaagtaaactcattattagtaggtctgataaataggtaaaaatgatgatttatgctcaatgaaggcatattgcttccaatgtcatgttaattgatgaaagaaaggattaaaagactcagaggagttattatgcaagaggtatatactgtaaggctggaaccatcagatgttctatgtgaaggcctagtggtacatcatataatgagatcacataaaatacactggtgagaagaagcactacccctagaatttcatcatgcctaaggtgaattccttcagtaggttgatgctgatggtaagagagactcttacagacctagccttgtagtttacaatggggataataggctcataaaataagaaaggcaaggtggtaacacttaactgtcagaagctagaagatagacagaagcaaagttagtgtggcagccaggggagactgacctacaggtatttacgaagatacatttataaggatggttgatagaatacgggatccctgtgggtaaattagatcgacagccaataagcaccctactcaacatatactaataaatagatcatgattggatgatcaggaggccaatggctgttgcctcaataaaatagtcaggatctcttgccttatgtctgggtattagccaatttttgaacttggaacatattgatttcatcagaggccaggtccccaaaagggaggaccctataacaccctgccatttgtacatggtcataatacctgcagtcctttgccaaaacatggccatttacttagatgactgaacactggggaaagggaaatatccaaacagttaaaggactgttgaacacagagctgaggatggtacacagttgactatgttacacagttgacaaaggtacatggaaatgaagggcttcattgtgttccctccgttaatttaggaggccaagcaataaatgcagtcctggctaaggtccagatcacagtgagtttgctgtgcccacagagccagtcagtagttgtcactgtagctccagaatttataatcaaaatatgcatacctggtagttagtataagccccatattaatttatgacttgtgagtaaaaacaagttgaagtttctgaaattacccctgacacatacacacataaccaagttagtaaattaaaaacaatattatatccactatcacatcaagaagctatagtcttatgaaaactacaaaggcatggatggagtaccagtttgttggacataccttacaataataagacactgtcttctaagacataatatatacctaaatcaaagatattgatttggttattttctcataagtaaaatatacaggtttgggaattaagggttggaaataggagtagcctactgccatcattccagtgccttacctgtagaccattttctccctgtctccataattctatgttctacatgattaaagttcctagttccctgtgggggaacacttctaccagggaacacaaaaaagtcccattgaattttataccttggctattgcctgggagctttgggtttctcctgctgagggattaaatgtragttaatgaataaccatcttggcagtggtaattgactttgatcatcataagaatgttgtagcactgttacacaatggggcaggcaggaatatgtttggcacacagatcatccacgccactaaaaccaacagaactattacctgaggatgaaaggactctagaatgaataatggagaagagagataataagtattagttgtaccaaaatcagctgtaggaagtgaggctataatttgttccatttatctttccattctagattttccccagactgaaaggcccacatgaactacaggaaaagctgtccaccaaacatctgtgaaaaaatgaatctgattgcgatacaagggatgaactatggtagatccaaacgcatcccccatacacatccccaggtaagcacttatggtgccatctgttgggagggctctcaatagacagccttcatctctgagttcctcagggatttccacagctgcagagatctgtgttgcctaaggtcatgcccttctaggggaagcctatatctaatgcctgtttcaggtaagggttattcaaagatctagttatttgctctcggtgtaagaacattctgtgggatcccttacttccagagctctccatgaatttggctgaagcccttaggcctgttctgtagtgcaaccttatctctctttccaatcatgcttcctccctttctttccataggttttgatgtcatggctattccttaatattcattctaaacattgcattttgtttcagggtctgcttcctggaaggcccaacctgtgactgtcatttaaaaaatgttctgttttttttttgtccagttccttttttttaaatttacaaaaaaaatctaaaatcaaattaacatcccagattcggtgaatatttgtgttgtttgaacaggtatttacagatgcccactctgtgccagaaaaaaagtgaactctgcagggaagatgacagacaacatcttttcctttgcttagcctagagtctagtgtaatataaataaactaaacaataatcacacaaataattacaattattgtaaaagtgaaagaggaaaaactgtagaatatctctcttagtccaaaatgagttaaggttagattcttaaaacagtaacattattaaaaagaataattactggaaggaaaaaaagtaatggagggacagagtcaacaaacacggaacatagacaaagtctgataaaaacagcaacagtaattacagccacaaccaacaacaaatttatgatatcaccaaaggagaagacagtcttttaaaagctgtcttccatctgttcctaccataaagtagagcttagctcaagagaaataaaaaagattccaattcagttcacttatgaaaacttccaggcaatgttgatttgtcgtgctgcaa

SEQ ID NO: 38770 - DNA, 657 bp, Homo sapiens
aaaaattaaatacaatttcatattggctatccaaaaatgattcttacaggccagatgcagcagctcacacctgtaatcccagcaccttgggaggctcaggagggcagatcacctcaggtcaggagctcgagaccagcctggccaacatggtgaaaccccgcctgtactaaaaatacaaaagttagatgggcatggtggcacatatgcctataatctcagcttctsgggaagctgaagcaggtgaattgctttaacccagaaggtggaggttgcagtgagccgagatcatgccactgcactccagccccggcgacagagagagactctggctcaaaaaaagcaaaagcaaacaaagtaataaacaaaaatgattcttacaaatataagggatttaagtatataagagtacaaatatataattatataatttaccaattttacaaatcctgaaaaaaataatcacgttatcagaatggacatttaaatgttaaataaaaacacccttaagttatttttacgttatttgtatattacagctaatggaaaattatatcaagggtaaaaagcaagtttaaagacaagtaacgtcttctagatgagtaataatgtacttaataagttgacctttgcaattacatttcttcagtgtttgtctta

SEQ ID NO: 38771 - DNA, 616 bp, Homo sapiens
acacacacacacacacacacacacacacacacacacacacacacaaattcacacaggttccacaaaagtatctgaattttggacatactgttctgtagagattcgtgcattgattatcctgaaactaaaatttctcctttaccaaaattgtcttaatattcagtaattccctgaaaacatagtaatttacaactacatttattcaaatagctatcataattaaaatagaaactaaaatttttcattatttcagtaacaatcttagaaatcttgattgtcaatagctacagctataaaacatctggacccctcacataactaatctttaccacaaaagactgatattcttgcatctaataagcatttattgagggccttctcgggccaggcactgtggtggacaaaaatttgaaagtagattagcaagttttcatctgaaggatgtactgctcccttaaggaaaatcttaaaacatttaaggtaaaaacacaaaaagaggatgtctttatgttcactgaaaatatacatgtrtgttagtacaactgaagcccaaactattttctatgctatacatacacacacacaaaatctagacacatgaaccagatttagatat

SEQ ID NO: 38772 - DNA, 612 bp, Homo sapiens
tcgtaaatgagcttctcacatctgcctcttatttcattagttaactgtctgcccaaatatctgataagatggaatactagtacctttttacagcttgttctgtcggtctgtacaataaggagatagggtcgttagcaaaatgggcacaaaagagtatttatccactacctacaataaatatgcatgctagtgtctagaaggcatttgagactgtttattgaaatcacctcaagaaacaaaaataactggtttcacttcgattttccatttagcaacaaataatgttaagaccatggcctgccttactgtatgatgcttttactaattacatttatcatcaaaagaagaaaaatgatagtatttctaaaaactatgaatgttcttgttacacagaagttatttttgaaagaggaaaaatctatttattaaattaattttaaaaacagtgaaaaactttagaaaatatttttaaattaccaaacrtcataattaacgtactctcaacagtgtttttaatacttgattacctcattctctatgttggcacttcgaaaaactaccaattaagatctgctttcttatatacatcgttatacagcagtcatactttta

SEQ ID NO: 38773 - DNA, 1369 bp, Homo sapiens
caatcctaaaatccacatgtcattatatatctactgattaaaaaaaagttttatgttttaccactcagaataggaaaaaaatggataactttgacacaggatttttctcagtcaatttacaagttggggacctctggccagtgatgtccctgaccaggcctcactcagccacgctacctgcctcaagagatagcccatccactcagtccactttggctgtgcctggcttgcacactggctcagcccgtggcttgccaggtgtaccccagcctgcccaygttataggtcatacccatattcggcagttcccaagttcttgtcccacatctaagaagaatgaggatacattgccaattgaagggttaggaggacagagaagaagtttattaagtaacaaaacacatctcagcagagaagggacgtgagggtgatcaaccacccagagtcaggtggtttctctcccagtgtggctgagtccagggcttttatgggctcagaaggagtgtgtgctgactggtttgtgagtatgcaaaagaggttaaaacaaaggcaccactcaaaggtgggcacgacagtgtagaaaaccaattagggaagggtagttatatgtaaaataggtgaagggtgagaattaaccagaggaaagcaagctaaatgggaagaagttttctcaatcaggtccatggatttgacttatagcttggcttttgggctttaaactgtccttggcttggaggtggagtttcactcgagagtttcacccttatctacctaggcatttgtctgcctcctgcccctatcaaccacattaattcacttcaccaaatttgacattaagtaatacagtttatttctcaatccataatgtcccactaattttgccatttttaagacatacttttaacatacatgacttcttatatatgtgaacagatattaatacaggtatattataaatcattcagatagagacctcagccaaacctatagattaaactcctctaaagcaaattcaaaagccattgcatgtagtaaatatggttaaatgtcactaagttaaaattaagaataactctatcaaattatgttgtgggaaagtgaaaagagaaattactgtcatgaagaagattttttcccttgtaaagcaaataaaaaattaatgtgaagagtgcatgaatataaaatgttggtgcaaaaataaaaggaaaataatactatgtaaaaaagagaaaacaatattgggttaacaaaaagtcaatggttctcatgagtaaccaaaggcatttaaattatgtgatttacacaaataaaaagtctgacaatactaagtactgggaaggaaagaactttctataaactactgcatatc

SEQ ID NO: 38774 - DNA, 573 bp, Homo sapiens
ctcaaatacttttggaaaacccaaggtttactatcttaaggtaaggggagaagtttgcctttaaaatatttgtatgtgtttttgataattattgaaataattgtcaaaagtaaatctattctaaattgtttgcattgtgctctagtgtgcataaaaattgaataacgtgtattaatcctaactttttatttttaatctatttgcatccattaatagtctcatttttttaaccacggggagtatagaacataatataggtactctaacctgagagtaacaaatgaattttaaaaattattaaaacgattagttatttcagctattttctttctaaatacgttaaatcatttattttctgagattttaaaaaatgtatcargcccattatactcttctacataataacatattttttattatttctaaatctacatacaaattttatacaattggataaaaaaacaagaaacaaaaaaaggtttgaaaaggaaatataggcgtttcatttcgcttaaaacatttcaaattaaattttctaattttccactatatattgtggcatttacaactaca

SEQ ID NO: 38775 - DNA, 714 bp, Homo sapiens
agttatcatgggagtgggaccagtggctttataagaaaaggaagaaagacccaaaccaacatgctcagctccctcacatgtgatgcccgtgccacctcagaatgccacaggatccccactagcaagaaggttctcaccagatgcaaccccttgacccttgaccctggacctctcaccctccataattgtagcaaatgagtttcttccctgtataaattacccagtttaaactattcttttataagcatcagaaaacaaactaaaacaccacccaccctgagctcagaaactgggataaattgttgggagtattttgacattccccaaatgtgaaattcagggtgcacaacaagaattatagattagaaaagaactaattatggagttatgtacatagggaatacagtcccagcaccctatctttgtaccatacattgtttcttacaaagagaccttacaacctagcacgtcagttagaaatactggtagatggcttattaaacgctcatgaatcggtttacgtgatttatttcattgaatcatcacagcaacatcgtgcagtatgtattgttattaactgctccccactgcccctctgccccagttttaccgatgtggggagtaaagtgcaaggacgttggatggtgccatggagyccgcagctggtcactggtggcgagatgagcgccaacacaggcatagtgagtctggaat

SEQ ID NO: 38776 - DNA, 1127 bp, Homo sapiens
ctcgtgatgggagtggttccccataaagggatgaagagccaagggcttgctctctatgccatataaggacgcagtaagaagatgccctctgtaaaccaggaagtgcacccccacccgacaccagatctgctgcaccttgacttgggatgtccagcccccagaactgtgagcaataaatgtgtgttgcttaagccactcgggctttggcacatttgtgacagcagctcaaccagacagaccaagacagaaacccagcaatatcctccacccacttccaaaacggttcatgttctgcgttctcattccatagcggtgggtgacagccatctaccaggtgccctgcccaggaatctctgagtcagcctaggttacggcctctccctcactgtctgcgtcgagttcattgccaagatacactgttggtggtggtggtgctctcacttcccaaataccatgaaattgtgtcctccagctttcatcctttctttcaagccctcaccagtgcccacctgaacacagcacccaactcctgagtggtctcctgaactatccattcccccaacccagccacccccataccacgctkccggcaccagggcgctgtgacacatccttccttccttgccaagctcctgattaaaatgcttctggaggccgggcgtggtggctcacacctgtaatcccagcactttgggaagccaaggcaggtggatcatttgaggtcaggagtttgagaccagcctgaccaacatggtgaaaccccatctctactaaaatacaaaaattagccagccatgatgacggacacctgtaatctgagctacttgggaggctgaggcaggagaatcacttgaacccaggaggcgggggttacagtgagccgagattgtaccactgcactccagcctgggcaatagagtgagactccctctcaaaaataaataataaataaataaaacggcttctggtgctatcctctgcctcaaaataaagcccagccatgccttcctcctatagctcagcaccatctcctctgtgctacctccctcctcacacacccactggcttcccaaacacatgagccatttgacacgtagcacatttgtgtggctgagggaagaggctcc

SEQ ID NO: 38777 - DNA, 1127 bp, Homo sapiens
ctcgtgatgggagtggttccccataaagggatgaagagccaagggcttgctctctatgccatataaggacgcagtaagaagatgccctctgtaaaccaggaagtgcacccccacccgacaccagatctgctgcaccttgacttgggatgtccagcccccagaactgtgagcaataaatgtgtgttgcttaagccactcgggctttggcacatttgtgacagcagctcaaccagacagaccaagacagaaacccagcaatatcctccacccacttccaaaacggttcatgttctgcgttctcattccatagcggtgggtgacagccatctaccaggtgccctgcccaggaatctctgagtcagcctaggttacggcctctccctcactgtctgcgtcgagttcattgccaagatacactgttggtggtggtggtgctctcacttcccaaataccatgaaattgtgtcctccagctttcatcctttctttcaagccctcaccagtgcccacctgaacacagcacccaactcctgagtggtctcctgaactatccattcccccaacccagccacccccataccacgctgccggcaccagggcgctgtgacacatccttccttccttgccaagctcctgattaaaatgcttctggaggccgggcgtggtggctcacacctgtaatcccagcactttgggaagccaaggcaggtggatcatttgaggtcagragtttgagaccagcctgaccaacatggtgaaaccccatctctactaaaatacaaaaattagccagccatgatgacggacacctgtaatctgagctacttgggaggctgaggcaggagaatcacttgaacccaggaggcgggggttacagtgagccgagattgtaccactgcactccagcctgggcaatagagtgagactccctctcaaaaataaataataaataaataaaacggcttctggtgctatcctctgcctcaaaataaagcccagccatgccttcctcctatagctcagcaccatctcctctgtgctacctccctcctcacacacccactggcttcccaaacacatgagccatttgacacgtagcacatttgtgtggctgagggaagaggctcc

SEQ ID NO: 38778 - DNA, 637 bp, Homo sapiens
gagacggagtcttgctctgtcgcccaggctggagtgcaatggcacgatcttggctcactgcaacctccacctcccaggttcaagtgattctcctgcctcagcctccctagcagctgggattacagagaagttagtaacacagcacgaccttccacatcctcagtgttaaggttaggtcctgctggtcatgttggcctactgatggtccctagtcacttttgggatttgctgtggagtcaggatatgaaattctgccttaggtatttattgttctkactctttcaatacatacagaccataaacaggcctatcatgtgagtggaaatgtatgtatgctttctcttctgaatgtggccaggtttttcacagaggtgactgaaagttacaacatgaccattctgcgttagttctcaggtgagcacagatccttaacacagtgtttgctgaaaaggaacactgccaggtgatgttttaatgcaaattcccatttatttacaggatatcaggcaagcagtgaaccaaggagatcaaacaagccctggctttctctgttctcagcatggcctgcctgcttctgctccttatgtctcccatttgcaacttgctctaagtcaacacagattctgcaaacaatcat

SEQ ID NO: 38779 - DNA, 513 bp, Homo sapiens
tgtctggctaaaccttgctaccagcaatgagccagctagggtagaaaaagcctggccaattgaaggttaataattgggaagtaggtcctagctacctacctatagcaatcacagagttcatcagagaagcagaatcaataggatgtatgtgtgcatatttctatattattttgatttttaaatacacataaacacacacacactcatagaaagagagaaagagagaatgattgacagagattgtggaggccggcaagtccaaaatcttcagggtagatctgaaggcyggagacctagggaagagttgatgttgcagttccagtccaaaggctggcaaaattcctggggggaagtgagtcttttttccattaagaccttcaactgattggattaggtccatccacattatggagggtaactgctttactcaaagtctactgatttagtgttaatcacatctaaaaaataccttcacagtaacacatagataatgattgaccagataccaccaga

SEQ ID NO: 38780 - DNA, 1197 bp, Homo sapiens
tttccttaagctttagcaattgcctcttagcaactgtttcaagttatataaggcagatttctgttcctaatgaacagattttgaggcaaggggtatattgttacagttttttttttaactttcctcctcatttattaatggacccgtcaaaagttaaaaatactttgtagaactctactgtagaatagtactatttcaaaattcaacaaagtgatgagtagcaacttatcatctacctctttcacttcttattacacagaatataattataaactggtaagtttttaaataaatattttttcacatatgagtggatggcctgttgaaattcaagtgcaaaacaggccacccaagtggagatttgcagctgctagatggaaacgtgtgactagagtttgggaaagatggtggacggagagtagatatgggagtcatttatgtataggtgctacttcaaactatggaaaagaatgaactcactaggaaaaaggaattatggcatgagatgagaagagagctgaaaacaaagacaggactttgctgaatgttcacatttcggaggaggtgaaagaaacaggaacagcaggaaacacgtggattcattaggaaagatcagagtagcatcttgtaatagaaaccatggtagggaagaattttcaaggacaatgaacattgttagttccatacaggaattttgaaaactgataaaaggtcattgaattcaaaataaggaaatgattagtgaccttggagaaaagcggtttcagtagattggtgaaaacaacagcctgattgggaaaggttaagaaatggagcaaataatgaggaagagatgagtatatagactaatatttgactagtttggtgagaggaaaggaaaaagaagattcctgaaaatagttaaaataaaatgatattattccagcgttattaaaaaagaagaaaattaagcgaactggaatttttcctagaaaaatcctgtttgtctgttttcccagcctagatttatcagatcattgttgattctttaatttcaccatagaatcaactttaaactacctcagtgtctagtggctgaaatattcaacaattaatatttggaaattgtgacagagasagaacatgaatatttgtgataggaaaggatgaaagcaaataaatatttttatattgttctacttgagaatgcccaatgaa

SEQ ID NO: 38781 - DNA, 477 bp, Homo sapiens
ttgcaagtgaaaatgtaaatgaaatactactaggtgctttgagctgtgagcaaaggcctactgagcatttatcaagattatgttcagtggacgttgtttgttaaatgcaaagcagtctactgtgaaaagatgagcaagatatatgtcctaccctcatttgaatactataaagagattaaaaagtattagacattttcaaaaactgtttcaatcatggttaaatcaagtaggactaggctcaactaattaaaagaaaactctggactttcagtggattacacaacacggaaatttatttcttcctaatacacaagaaatcaggaatagkctatataagggtgataatgctggctctatgaaattgtcaggggtctagtctcctaggcatggcccttatgatctaagatgattgtaaattttttttttttactggaatatcttttttttaattttaaggaatgttattttaaaacaaca

SEQ ID NO: 38782 - DNA, 571 bp, Homo sapiens
caccacacctggtccagttttgaaaaaataaattaggaaggggagagcttttctaaatgggatacaaaatctagaagccttaaataaaaagcttataaagatgaaaagctttcttatttacatacaaataaaaaaggcctgcatttgtgtcattcatgataaaggcataatatccctaatataaagagccattataaatcaacaagacgaccttaaagtaaaatggggaaaagctaagaatgaagagttggtcacagaaaagaagtacatacgactggcactagacaaaacaaattaaaacaataattagaaatgatttttcacctattgggttgccaaagatttataggcctgctaatattaattgttgctgaggttggtgggaaacagaggcactctcatacactgactgtgggagtataaatagttagaaacatttagaaggamaactcggcagtatctatcaagattttaaagctacgtacttttgatcccacaattccaactttgaagagtttgtcctacatttatttaagtaactgaagatttctgaaatgtgtgctttatgtgg

SEQ ID NO: 38783 - DNA, 863 bp, Homo sapiens
cttgagcctcagggtttgaggctgcagtgcactatggttgtactggcgaacagccattgtactccagcttggacaacacagcaagactccatctcaaaaaaagaaaaataaattcagaacttttgttgaattccagaagtgtgagttcaaaaaccatatggcaaaatgaatccacgtttttataaacataataaaagagtttattcataaattccactgttacttcaattctatctttaaaaattgcttatttgaaaatattttrttttcttaacttttttgtatagattttgaaatataaaactggcttgggttttttttttctgataaagcacttgcattcttatgtgaaaaattcctcaagccacaaattaaataaaatcccttgaagtctgagacgcttgtcttgacaaaaatctagtaataatctagcatagtcaggggaagccgattctcttggggtaccctcacggtatttatcaacacagtgctagcacagaacaggtctttaaaaatatatatttagtattagactgactgtttgcagcagtgggcaagattttagaggctgagttccaagtttttattattctttcctggaaagaaggatggaggtggagctgtgggggaggctggggtaatgattgcaggtagcaaggatggtctgtcgttctggagggaggctgttctctgacaactcttggcaagcactctttcttccccttcctcttctccatttcaggtcactgtcactgcaaaaggtgatttccttttcccctcaacactcttctaaggacccacagcagggagttaactcatgattagaaattatcccttaggaagaacatctgacaactagctgg

SEQ ID NO: 38784 - DNA, 1285 bp, Homo sapiens
aaggtaagataaagtcagaccaggacatggatcccattcctggtttcagcctctgctgggctctgcatttaaagactaggcctccagaaccacctgaagccaggtgaccccagggtcctacctagaatccttagacaagctatgttttctgagctccacattttttccatgtttgttcaagaagaacataagctcctttggctatctcatttctcctgtacttttctattcatactattctattatttctctcccatgccccagcctccctccatgcctatccccctacatctctctccatctttgtaactctaagctccataacagacaaactattgtattcctagttgcctcctagatatgtgtcctctctggaatgttcttctgcattttccattttgtgttgctataaaggaatacctgagtctgggtaatttataaagaaatgaggtttatttggctcacatttctggagattgtacaagaagcatggcactaacatctgctgctggtgaggccacaggtagctaccactcaggtggaaggtgaagggggataagtcatgtcacatggcgagagaggaagcaagagagagaggggtagatgccaggttctttttatttttattttttattttttgagatggagtctagcagtgtcgcccaggctggagtgcagtggcattatctcagctcactgcgagctctgcttcccgggttcaagcgattctcctgcctcagcctcccgagtagctgggaatacaggtgcctgccaccacacctggttaattttgtatttttagtagagatggggtttctccatgttgatcaggctggtctcgaactcctgacctcaggtgatctgctcacctcagcctcccaaagtgctgggattacaggcrtgagccactgcacctggccgatgccagagtctttttaacaaacagatctcatggtaactaatagagtgagaactcattcatcaccacaaggacagtgccaagccattcatgagggatctatccccatgaccctaacaccacccaccaggcttcacctccagcattgagagtcacatttcaacctgggacttggaggggacaaatactcaaactgtatcatcttctttccgcagatcagggcattctgctacaatcatatgccatgaggaagctttctatgacccgtcaggccagattaagtcctcatattttgtatacatagccacagttgacactaaagtttatctcataccacttgtcacaacaataaatagctgcattggt

SEQ ID NO: 38785 - DNA, 613 bp, Homo sapiens
atgttttaataatrtatatatttaaaagcttgggttctgggctccagtcaagcacatttgaatgcccactccactgctgtagttctatgatgtttagcaggctgcttagcttctctgcacctcagtttcctgctctgcaaaatagggttaaaaatagtacccatccccaaaagtggcataagaaatttatatttggatttaagtctaccattcctttagtttgtggagcgtttccttgttgagttttttgaaaggtcaaaaatggatcatttagttttcacaagcattctcaaaaccctaagtagcttttaatcacactacttttaacgagtctcctttccagactaaactgtcctaatcttggaaatcttgcttcctttggagctggaatcacatgtaccgaagtagaaacaaaaacactctcttcagcatttatgagggaaagtcctgcacagggctcattcgcagcagtctttcctgtggaaagactgaaaaattaaagcagggaagttcaaagacggggctgcagaataaaaacaaaatcccttaaaattacactgatggtttttccagataagcaggtaattcttcgagataatttggagagaattca

SEQ ID NO: 38786 - DNA, 613 bp, Homo sapiens
atgttttaataatatatatatttaaaagcttgggttctgggctccagtcaagcacatttgaatgccyactccactgctgtagttctatgatgtttagcaggctgcttagcttctctgcacctcagtttcctgctctgcaaaatagggttaaaaatagtacccatccccaaaagtggcataagaaatttatatttggatttaagtctaccattcctttagtttgtggagcgtttccttgttgagttttttgaaaggtcaaaaatggatcatttagttttcacaagcattctcaaaaccctaagtagcttttaatcacactacttttaacgagtctcctttccagactaaactgtcctaatcttggaaatcttgcttcctttggagctggaatcacatgtaccgaagtagaaacaaaaacactctcttcagcatttatgagggaaagtcctgcacagggctcattcgcagcagtctttcctgtggaaagactgaaaaattaaagcagggaagttcaaagacggggctgcagaataaaaacaaaatcccttaaaattacactgatggtttttccagataagcaggtaattcttcgagataatttggagagaattca

SEQ ID NO: 38787 - DNA, 613 bp, Homo sapiens
atgttttaataatatatatatttaaaagcttgggttctgggctccagtcaagcacatttgaatgcccactccactgctgtagttctatgatgtttagcaggctgcttagcttctctgcacctcagtttcctgctctgcraaatagggttaaaaatagtacccatccccaaaagtggcataagaaatttatatttggatttaagtctaccattcctttagtttgtggagcgtttccttgttgagttttttgaaaggtcaaaaatggatcatttagttttcacaagcattctcaaaaccctaagtagcttttaatcacactacttttaacgagtctcctttccagactaaactgtcctaatcttggaaatcttgcttcctttggagctggaatcacatgtaccgaagtagaaacaaaaacactctcttcagcatttatgagggaaagtcctgcacagggctcattcgcagcagtctttcctgtggaaagactgaaaaattaaagcagggaagttcaaagacggggctgcagaataaaaacaaaatcccttaaaattacactgatggtttttccagataagcaggtaattcttcgagataatttggagagaattca

SEQ ID NO: 38788 - DNA, 613 bp, Homo sapiens
atgttttaataatatatatatttaaaagcttgggttctgggctccagtcaagcacatttgaatgcccactccactgctgtagttctatgatgtttagcaggctgcttagcttctctgcacctcagtttcctgctctgcaaaatagggttaaaaatagtacccatccccaaaagtggcataagaaatttatatttggatttaagtctaccattcctttagttygtggagcgtttccttgttgagttttttgaaaggtcaaaaatggatcatttagttttcacaagcattctcaaaaccctaagtagcttttaatcacactacttttaacgagtctcctttccagactaaactgtcctaatcttggaaatcttgcttcctttggagctggaatcacatgtaccgaagtagaaacaaaaacactctcttcagcatttatgagggaaagtcctgcacagggctcattcgcagcagtctttcctgtggaaagactgaaaaattaaagcagggaagttcaaagacggggctgcagaataaaaacaaaatcccttaaaattacactgatggtttttccagataagcaggtaattcttcgagataatttggagagaattca

SEQ ID NO: 38789 - DNA, 1676 bp, Homo sapiens
catagcgagttggcaagtggctgtccttgttggcctaatgtgaaagattgcatcacatatactacagttgtcagagacatggctttggagtcagacctccaggttcaagctccagctcagctataatttgctgcatagaattggtcaaggtagttaacctctctgacctgctctctttgtttctgaaaagcaggtaataacgcctgcctcgctaggttgccaaagcataaaataagataatgtttataagaggcctagtgtcatgcctggcacaaagtaggtgctcaataaataatcattgtcattatcattgcttgtcctggaagagtaggtccctggaggccctgggttatactctaaggcagtgcttcaggatctggggatcttgttaaaatgaaggttccaatgccgcaggttggggaccatactttgcatagcaaggtagtttcctggggcacctcaatcacgttcagtcaggagcagcagcatcctttctcctcctcttgctctcccctcgtgctctctgggttgatcagtcatcaaaacacttcccaggctgtccaggcaggatgtagggcaggatgtatggtcactggactcatccagcaccccagtgactgcagccacctgcggatgaggaggggatccggagggaggagggaacttgtctctgaccttgaggattcctaatctgacggggagatggtacaaacacacctcactctccataagcgcctgcagaaaaggcacacaacggcttgcaaaggaacacacagaggcacaggaaggggccacttctggttttctcctctcagagctagaaggctgagagcagagtgcccctgccagccccacaaagggaagcggagtgcagcctgaagctgcaaggtcaggtgatatggcagtagcccagggcagcccgggttaaaggcacactcactcaaggccggctctcatttagtggcaccgcaggttaaatgctgctcccaggccttgggtcccagtgaccaggaaagttttgaaaatgagaacatgtgttgaccctaggactaggacaacagcgcccttgattttgcggaagtcttccctggaagttgggcgtgcttgatattgagacgctgcactttgtgttcttgacggctttgctgcaaattctcacacaccttgcccttgagtaaaaccccaaggattccagacgtcggcaaactcccgagcacaacggtcctttccacctaaacccctgagcacacagtgatttctgcctacattggtgactggtggtcagatggcttgctgggcagcttccccgccccgcttctcgtggaggaagggcctccctgtggtgsgaagaggtgttccctgtggcaacaaacagagaccttgtctctacaaaaaatgtacaaatttagctgggcatggtggcgtcagcctgtagtcccagctagtcgggaggctgaagtgggaggatcacttgagccatgggaggtggaggctgcagtgagccgtgatcatgccgctgcactccgagggaggccacaactagtaggcagggcctgtggctctgtcctcaccttccaccatccttggccaggaagccccctttgtcctctattcccacatctgtacggcagggaggagcccaggccttaagcaaggatgcagggtgccatctctga

SEQ ID NO: 38790 - DNA, 1676 bp, Homo sapiens
catagcgagttggcaagtggctgtccttgttggcctaatgtgaaagattgcatcacatatactacagttgtcagagacatggctttggagtcagacctccaggttcaagctccagctcagctataatttgctgcatagaattggtcaaggtagttaacctctctgacctgctctctttgtttctgaaaagcaggtaataacgcctgcctcgctaggttgccaaagcataaaataagataatgtttataagaggcctagtgtcatgcctggcacaaagtaggtgctcaataaataatcattgtcattatcattgcttgtcctggaagagtaggtccctggaggccctgggttatactctaaggcagtgcttcaggatctggggatcttgttaaaatgaaggttccaatgccgcaggttggggaccatactttgcatagcaaggtagtttcctggggcacctcaatcacgttcagtcaggagcagcagcatcctttctcctcctcttgctctcccctcgtgctctctgggttgatcagtcatcaaaacacttcccaggctgtccaggcaggatgtagggcaggatgtatggtcactggactcatccagcaccccagtgactgcagccacctgcggatgaggaggggatccggagggaggagggaacttgtctctgaccttgaggattcctaatctgacggggagatggtacaaacacacctcactctccataagcgcctgcagaaaaggcacacaacggcttgcaaaggaacacacagaggcacaggaaggggccacttctggttttctcctctcagagctagaaggctgagagcagagtgcccctgccagccccacaaagggaagcggagtgcagcctgaagctgcaaggtcaggtgatatggcagtagcccagggcagcccgggttaaaggcacactcactcaaggccggctctcatttagtggcaccgcaggttaaatgctgctcccaggccttgggtcccagtgaccaggaaagttttgaaaatgagaacatgtgttgaccctaggactaggacaacagcgcccttgattttgcggaagtcttccctggaagttgggcgtgcttgatattgagacgctgcactttgtgttcttgacggctttgctgcaaattctcacacaccttgcccttgagtaaaaccccaaggattccagacgtcggcaaactcccgagcacaacggtcctttccacctaaacccctgagcacacagtgatttctgcctacattggtgactggtggtcagatggcttgctgggcagcttccccgccccgcttctcgtggaggaagggcctccctgtggtgggaagaggtgttccctgtggcaacaaacagagaccttgtctctacaaaaaatgtacaaayttagctgggcatggtggcgtcagcctgtagtcccagctagtcgggaggctgaagtgggaggatcacttgagccatgggaggtggaggctgcagtgagccgtgatcatgccgctgcactccgagggaggccacaactagtaggcagggcctgtggctctgtcctcaccttccaccatccttggccaggaagccccctttgtcctctattcccacatctgtacggcagggaggagcccaggccttaagcaaggatgcagggtgccatctctga

SEQ ID NO: 38791 - DNA, 1039 bp, Homo sapiens
ggtatttctaattctgccccaccaccatagggtctattctagtttcctcgctttctctttttgtaactccattctcccacagtgagaatcatggccctcattgtcctagtggcatttatttattttgtcagtctccctctatgtaattaatagtctgctggcatcctttgccacctccccctgctcattgttgacactctcctcacctgcttggaccctgtyatggactgaatgtttgtgtcccctcaaaatgtacatgttgaagccctaacccccaaagtgatggtgttaggagatggggctttgggaggtagttagatttagatgagttcttgagggcggggcccccctgatgagattagtgtccttatatgaagaggaagaggcactgaacttccttactctgccatgtctgttgtttaagccacccatctatagtattttgttatagcagctgagctaagacaggctctgaaaccccatcctgagctggcctcacctcctgttcagatttcctcctcacctgtcttgggatttgacacccctgctgagtggtcctcctggtggatgccctccacagcctgcttggtttctcatatccatgctgggccactgtgtcaccacccttgcactgatgcctcccttgcttgggcctatggatgccctccacagtctgcttattttttaaaatccgggctgggccactgtgtcaccacccttgcaatgatgcttctcttgcttggccctataaaatgactaaagtttttgggactgggaagaaatgtgataaaccagagatggggtggcaatggggacttaggaacccagtggtatctcttgcggcacttggaagtgtcaactctacacagtctagtttgaaagtcattgaggtagcaaatggacattgtgttatctttagagcagtggtcagagaactatggcccattggccaaatcctacctgcagcctgttttggtacagcctgtgagctaagagttggatttttcttctgtatctttttttcttttagacaggttct

SEQ ID NO: 38792 - DNA, 1039 bp, Homo sapiens
ggtatttctaattctgccccaccaccatagggtctattctagtttcctcgctttctctttttgtaactccattctcccacagtgagaatcatggccctcattgtcctagtggcatttatttattttgtcagtctccctctatgtaattaatagtctgctggcatcctttgccacctccccctgctcattgttgacactctcctcacctgcttggaccctgttatggactgaatgtttgtgtcccctcaaaatgtacatgttgaagccctaacccccaaagtgatggtgttaggagatggggctttgggaggtagttagatttrgatgagttcttgagggcggggcccccctgatgagattagtgtccttatatgaagaggaagaggcactgaacttccttactctgccatgtctgttgtttaagccacccatctatagtattttgttatagcagctgagctaagacaggctctgaaaccccatcctgagctggcctcacctcctgttcagatttcctcctcacctgtcttgggatttgacacccctgctgagtggtcctcctggtggatgccctccacagcctgcttggtttctcatatccatgctgggccactgtgtcaccacccttgcactgatgcctcccttgcttgggcctatggatgccctccacagtctgcttattttttaaaatccgggctgggccactgtgtcaccacccttgcaatgatgcttctcttgcttggccctataaaatgactaaagtttttgggactgggaagaaatgtgataaaccagagatggggtggcaatggggacttaggaacccagtggtatctcttgcggcacttggaagtgtcaactctacacagtctagtttgaaagtcattgaggtagcaaatggacattgtgttatctttagagcagtggtcagagaactatggcccattggccaaatcctacctgcagcctgttttggtacagcctgtgagctaagagttggatttttcttctgtatctttttttcttttagacaggttct

SEQ ID NO: 38793 - DNA, 1102 bp, Homo sapiens
  misc_feature (1)...(1102): n = A,T,C or G
tttyttgggccacattcaaaactgttctgggctgtgggttggacaagcttattctgaatattgaaaaagatactgatttaaaaattaggtcaaaggggttgaatcactaggtatcatgcagagacatagcattttgagtttgagtataatttaatagaaaattaaattctatccacaaaattaatagcatgtgtaaaggcactgagatgggagggagcaagtcttgaacagtggacaattgcctaggttttgcttagctgggacagaagtgtgaataagattgaaggaatgggtctattttatgaaggctttatatggctaacagcttgcatttcatgtctaagaaaatgaatatcacaattatagcagtaataagagcacttcttatacgctaagttaacactgagctaaagagctttccagggattatcaaatgtacttttctgagcttccagcagggaacatgctccacctgctttttcctgtgtaaaattaattggctcttggagaaggtgaaggtagtgaaaataggttgttgacatagtccaggtataaaataggcatgaattaaagaccattctgaaaaatgcacatttgtagactttattaaactgctccaaatgaaatcgcacaagtacaaacttgtgtaattaggaagatgatggtgctgttgacagtaatgaaggaaaacaaggaaattcagaaaataatagcagtgcttgacagactttacagcatttcttggagtgatattctgacaacagaggtactgtgaaatggaaagtgagccgaggtgtagtaacagtttatggtttatcagtattttggagggtgcctatgttttgtagagattttttacaataattaagcaataccttattttggttcttattctattacgtgcttcagaatctgcaaaaatatctagagttaattctctcttacagaattaacacctcagcaaagttattatgttttttcatgatgagcagttattnnnnnnnnnnnnnnnnnnnnnnnnnnnnnnnnnnnnnnnnnnnnnnnnnnnnnnnnnnnnnnnnnnnnnnnnnnnnnnnnnnnnnnnnnnnnnnnnnnnntattt

SEQ ID NO: 38794 - DNA, 611 bp, Homo sapiens
gcatttctatttttgcatcctcagaagagtattaacttttctttctgttgtttctgacctaatactttggatttaaatattgaatgatgtgcaatatgtcttttcaaaatagttagcaatattttttaatgaattcctcagtggcacagtaagttttcaagygtgtgtcatgggctggaaggcattgctttaattgaatatccatgttttctgattataatggtttggaaatcagagccaaatgagaagcatgttatgcccactcaactaaaaaataattgagtctccttttcgaggtttacagataaccaaatccacatgtatcaaacctctgttgtgtacatggtgctgaactcacatcagtaagggagtagatgttaagggatagcttctcctgtcaagggactcaaagtctgtctgaggaagagaatacagtactgacttcacttaaagcatttgatttggcacagaacattaagaatatgtttgctgaggtctgatagtatgatagattatgctctgatcacagttgtttagggccaggaaataaaaaacttcctaaagtattttaaaacagtgttttaagtagatcagggacatatcatgggata

SEQ ID NO: 38795 - DNA, 611 bp, Homo sapiens
gcatttctatttttgcatcctcagaagagtattaacttttctttctgttgtttctgacctaatactttggatttaaatattgaatgatgtgcaatatgtcttttcaaaatagttagcaatattttttaatgaattcctcagtggcacagtaagttttcaagcgtgtgtcatgggctggaaggcattgctttaattgaatatccatgttttctgattataatggtttggaaatcagagccaaatgagaagcatgttatgcccactcaactaaaaaataattgagtctccttttcgaggtttacagataaccaaatccacatgtatcaaacctctgttgtgtacatggtgctgaactcacatcagtaagggagtagatgttaagggatagcttctsctgtcaagggactcaaagtctgtctgaggaagagaatacagtactgacttcacttaaagcatttgatttggcacagaacattaagaatatgtttgctgaggtctgatagtatgatagattatgctctgatcacagttgtttagggccaggaaataaaaaacttcctaaagtattttaaaacagtgttttaagtagatcagggacatatcatgggata

SEQ ID NO: 38796 - DNA, 1660 bp, Homo sapiens
tggtatgtggctggtagattatccagaacaaaacaaaacaaaaattatgctctgccacagttattgagaaacctcaaagaaagtttctaaatactagtcattaagttcaaaaataataaattatcatatgagtayggcaatattataaaatagctaagaaagtggtagagttttgtattcataatctggatggttacttttaaaatgtgttcattgtgatggcatcatactatcattaggtgagttctcaaggccccaaataacatgaagtttacttttaggatagtgaatgtaaatcctgcatcagaatgagttcttaataatgtctaacctttttggccaacttcttgtgaaacctaatagaccatcattgtttttatactgtatgaagtgtgacaaagaataaaacatccactctgcctgtatccttttttgtactatgttcctgcattattagcattatatttaatttgccttttcttagcaaaaatcttttcaagtcacttattccttacataggggttcatttaaatgggtaatataattcataaatccacttaccttggcatgtagaaactgtaatacttgacattaagattagtatgcatcaggcataattcaaaaggttttattcatattttctgattttgtcatcataacagccaaacaagacaagcaatgttagtatctccattttatggatagaaaaaaggcttaatgtgggtttagaggttactcacctagtaagttgctgagcttgaattcaaaaccaggttggtctgatcccaaagtcttctttcttaatcactctaccaatacatcagttaattgagtaatcaatcaaaattcaaccacgcacagttctccatgaaatggaattttaaggcacactcaagatctaagaaaaaggaattaaaacaaaacaaatacaatgttatggacttattgaaggtaaatctctggggaaattcaatgcaattttacatttgtgtataatgtaaggtacaacaaaggtttatctctagcataatggctagcatcagaatgttcttaatcactataatttataagaaaaaatgaacatattatatgaaagctgaaaaccaaaggaatattctagtaaacattcaaccaataaggaaattcaatattgctgcaagggaagctaagaaagggcttttattttaaggccctattcagttaattaaagactttactatatatatattggaaaaatcatgtgatttctatccccaaatttccatgaatgcagtggtgacataaacaactgtgaacttcctataaagaaacaaataaagtagcaaattcaatgatcatctgagtatctgctgacattctcattagaattcttaaacgcaggtggctcatgcctgtaatctcagcactttgggaggcggaggctggcggatcacgaggtcagaagatcgagaccatcctggctaacacggtgaaactccgtctctactaaaaatacaaaaaaattagctgggcgtggtggcagcgcctgtagtcccagctactcaggaggctgaggcaggagactggtgtgaacctgggaggtgaagtttgcagtgagcctagatagcgccactgcactccagcctgggtgatacagcgagactctgtctcaaaaaaaaaa

SEQ ID NO: 38797 - DNA, 1660 bp, Homo sapiens
tggtatgtggctggtagattatccagaacaaaacaaaacaaaaattatgctctgccacagttattgagaaacctcaaagaaagtttctaaatactagtcattaagttcaaaaataataaattatcatatgagtatggcaatattataaaatagctaagaaagtggtagagttttgtattcataatctggatggttacttttaaaatgtgttcattgtgatggcatcatactatcattaggtgagttctcaaggccccaaataacatgaagtttacttttaggatagtgratgtaaatcctgcatcagaatgagttcttaataatgtctaacctttttggccaacttcttgtgaaacctaatagaccatcattgtttttatactgtatgaagtgtgacaaagaataaaacatccactctgcctgtatccttttttgtactatgttcctgcattattagcattatatttaatttgccttttcttagcaaaaatcttttcaagtcacttattccttacataggggttcatttaaatgggtaatataattcataaatccacttaccttggcatgtagaaactgtaatacttgacattaagattagtatgcatcaggcataattcaaaaggttttattcatattttctgattttgtcatcataacagccaaacaagacaagcaatgttagtatctccattttatggatagaaaaaaggcttaatgtgggtttagaggttactcacctagtaagttgctgagcttgaattcaaaaccaggttggtctgatcccaaagtcttctttcttaatcactctaccaatacatcagttaattgagtaatcaatcaaaattcaaccacgcacagttctccatgaaatggaattttaaggcacactcaagatctaagaaaaaggaattaaaacaaaacaaatacaatgttatggacttattgaaggtaaatctctggggaaattcaatgcaattttacatttgtgtataatgtaaggtacaacaaaggtttatctctagcataatggctagcatcagaatgttcttaatcactataatttataagaaaaaatgaacatattatatgaaagctgaaaaccaaaggaatattctagtaaacattcaaccaataaggaaattcaatattgctgcaagggaagctaagaaagggcttttattttaaggccctattcagttaattaaagactttactatatatatattggaaaaatcatgtgatttctatccccaaatttccatgaatgcagtggtgacataaacaactgtgaacttcctataaagaaacaaataaagtagcaaattcaatgatcatctgagtatctgctgacattctcattagaattcttaaacgcaggtggctcatgcctgtaatctcagcactttgggaggcggaggctggcggatcacgaggtcagaagatcgagaccatcctggctaacacggtgaaactccgtctctactaaaaatacaaaaaaattagctgggcgtggtggcagcgcctgtagtcccagctactcaggaggctgaggcaggagactggtgtgaacctgggaggtgaagtttgcagtgagcctagatagcgccactgcactccagcctgggtgatacagcgagactctgtctcaaaaaaaaaa

SEQ ID NO: 38798 - DNA, 2407 bp, Homo sapiens
tgcatctagctgtaatagccaaaggacctgagaccagaagtcagaagaagaaggttcaagcagagactggaaggggcagattgtggaaagataagatgctaagttagagaagaccataacaatgtctatagtttacccctagtcttctgtggtgggggaggtcgctatttaggatgtcattctgtgtgagacaacaagcatgatcatgaccctgaaaataaatgtttcaaccaagtacacatggacataaaaataggaagaggagatgcttgggactactagaggggttaggcagggcaggggatgtggctgaaaaactaccttgaaattatgaaaaataaaaataaaaaataacaaacaaacaaaaaacttagcattaaccaacaatggaaaatcatggtttgaatgagtactttatgactgacctttttcactcaaagcatatctgaactctgaggtttggataaaacaaagaaataaagttttcattatttccccataggagcttcaaatatgtagcaacactgagtggaaaaaaaaatgtactagtagttttctaacagcttgtaccttacctaatattaacccgctgggcatatgggaactgtaaggaatctggacgcaatagtaagctttggttgaaaaaaatgcaccgatcaatagcttgcattactgtaaaaatccttctgggcttaaaattttattttcttgtattatgatagaaaccctgaagagcaagaatgagggctaatcaaagaaatagtagaaaacagcatatatgtcccaatacatgatggtctttatcaagagcattatggtttccacacggaaagctatatagtagtggaatttttttttttttgtcttaagtctccatggtgctatttcagggtgctttttacaaagattttctagcaaccaagtaagctcaacaacatatcttaaaatagaaaaataattattcccatagttgtgtatatatgtacacacacatacctatgtgtatggtactatttgtttctcttttaatgttctacttgaacacttaggaattaatcatttgattttttcctggaatataacttttacttgtattctttatgtcattggctggtgttgtatatgtatctacgaaaattatttttatcataaaatggatatatcactggataaacataaaatataaggaaactaattacatagagccacactgtagctgtttggttttagaatagtttggtatgtgaaatatgtaaacatatgattaatattatgcatttgcagcctgtttcattgaagaatgcaatttatttgcttctttttatttctcttctccaggagaaggaagttgataggagttgactggagtcttagagaatagtagaattaaggaagttaaatcagggtatagggaagagaatggtacatgaggcttaactcatgaaggggagggaaaaagtagctgtagaatgcaagtccagaattagatgtgcacaaggaactcacagattcaagggtctctgcatgtgaggaggcagatctcattaggagaaactcctcccccctgagagatcatacctctcatttttcttccttagtcaacctgtggcaatgattgcagttaaagcaataattcaaaaatgcagacctaaaacctaacccatctatttcccttttaaacccctttgttgactccttttgatctatggtacattttgaacctcttagaatggccttacctggcacttgtatccagtctccagactcaggtcccactaatatgtctcatgccttatattctggcataaaaatctggttgttgtttcctgaccatcctgcatacctgtcttggggatcttctctctgactagatgctttcttcaccttttcctggccaaattaaactcataagattcagctagaacatcacctattccagggaatcctttcctgaaaacctccaggcctaacagcatatgtaaatcactatattcccagaacacttgaaaggatgtcaaaattagattacattgtatatttattattattctcttgaagacagagaccatattaaacttccctataagattctgaccagttctattgtttgtgtactaatagttttaactgggaagggtggcaaataaattgtggagtgcgttgaacttcatacaggcaaaaatttaggaacatacaagtatctcaattgaaaggattatttttatataagataattttatttatattcagaaagatgcttgtgtttacttgtttggggactttctataccaggcaagcccttttacatgtgtgaagtgagactgcaggtgaagccatctggcagatcacatattcggtgttcctagtagcatggataaaagacctttaaataaaatttcaaayctat

SEQ ID NO: 38799 - DNA, 971 bp, Homo sapiens
tctgtctcctggtttgtttcttgtcaaatttacagattattctgcataacttttcaccctgaatctccactctacatgacacaggtaaaaaagcacactgccaagtgcaacactctttctttagagagtaagcatgcggtgcaaattcatgctgtgaggatctgcaaagctccttgaacctatgaacaggtgtgaaaaatgtggtggcaatctggaaaagcatcttttagaaaagcattttttagactattgtattatgtaggcaacaawgaaattgtttacccacaaaacagccattcataatactaatatttttaatgtgaggatataactgtggaatttaagtctatacacagtctccattagagaatgcacaggtaaataattaaaaagtcaaaatcagaatgccaccaatagccacatattttatacataaaaaatatcggccttcttcagtttgtatcacagaaagaaatatttccttgtagcaggctgaaaacagtagaatccagatcctgaatatttaatagaaaataaaatgatatttatttttaagtgcattctacattcaacacaactgcatactcacaacaaatctattgcgttgccctgacatagttactgcaaaggtttttcctttgctgtcccaagggcccaattgatttatctgccagaagcctaaagcccaaaaataagatagctttgagtttacagaggtcatttttcattgtctaaataaaaatttctaaacaaaaatctctcatcctgttaaccgcagggtccttatctccccagaggctacagcaacctgaaagaagccatttcaattctttcatgaagaaagataaaagcaagttttcgattagaaagccaagcaaaaccttcttattaaatggtggtaacagtaactagttgaaaaggcaaaactgttctagaatggaatggggcgggggagtaggaaattattatgc

SEQ ID NO: 38800 - DNA, 971 bp, Homo sapiens
tctgtctcctggtttgtttcttgtcaaatttacagattattctgcataacttttcaccctgaatctccactctacatgacacaggtaaaaaagcacactgccaagtgcaacactctttctttagagagtaagcatgcggtgcaaattcatgctgtgaggatctgcaaagctccttgaacctatgaacaggtgtgaaaaatgtggtggcaatctggaaaagcatcttttagaaaagcattttttagactattgtattatgtaggcaacaatgaaattgtttacccacaaaacagccattcataatactaatatttttaatgtgaggatataactgtggaatttaagtctatacacagtctccattagagaatgcacaggtaaataattaaaaagtcaaaatcagaatgccaccaatagccacatattttatacataaaaaayatcggccttcttcagtttgtatcacagaaagaaatatttccttgtagcaggctgaaaacagtagaatccagatcctgaatatttaatagaaaataaaatgatatttatttttaagtgcattctacattcaacacaactgcatactcacaacaaatctattgcgttgccctgacatagttactgcaaaggtttttcctttgctgtcccaagggcccaattgatttatctgccagaagcctaaagcccaaaaataagatagctttgagtttacagaggtcatttttcattgtctaaataaaaatttctaaacaaaaatctctcatcctgttaaccgcagggtccttatctccccagaggctacagcaacctgaaagaagccatttcaattctttcatgaagaaagataaaagcaagttttcgattagaaagccaagcaaaaccttcttattaaatggtggtaacagtaactagttgaaaaggcaaaactgttctagaatggaatggggcgggggagtaggaaattattatgc

SEQ ID NO: 38801 - DNA, 622 bp, Homo sapiens
agctgggattacagatgcacaccaccacacctggctaatttttgtatttttagtagagatggggttttgccatgttggccaggctggtctggaacgcttgacttcaggtgatccaccttccttggccttccaaagtgctgggattacaggcgtgagccactgcgcccacctctctctctctctcttttttttttttaataattcaattgaaacagttgagagttcagagcttttattttcttccattaattgcaaagagtagaaaattgacaagaggaagactcttcacaattattaggcaaatcagaagatgaagcagaaccactgtagactctaataattacagtataattgatcgcataagtgaaatctcagactatgagttacatgatgatattctagatcaataaaggtatgcatatgatcctgttataaraacagcctgggccgggtgcagtgtctcatgcctgtaatctcagcactttgggagccgaggcaggtggatttcttgagcccaggaggtcaaggctgcagtgagctgtgatgctgccactgcattacagcctgggcaacaggagtttgacaccagcctgagtaacaaggcaaaaaactccatctctac

SEQ ID NO: 38802 - DNA, 585 bp, Homo sapiens
tgaaaaatcagaacaaggcaaagaatgcctgctctctgcatttatatgtaacattgtactgaaagccttagtgcaataaagcaatgaaatgaaataaaagtcataagattagggaagaagtaaagttgtttttatttgcagacaacctgatcattaagtagaaaatcctaaggaatatattaaaaaatgctaaaattaattgaacttatcagaggtgtaggacacaaagtcattatagaaaagcatttttaaaatagatgaacagtttttttaattcatcctcctcctttacttcctcctcgtcttcttcatcttcctcttccacttgtttttgggcaactttagcaggaccttttgcaccatcaagctttctagacttgtagtcagcaacatccttctcatacttctctttcagctttgctgccttggtgattgatatggtttggctctgtgaccccaacycaatctcacctggaattgtaatcctgataatccccacgtgtcaagggtgggaccaggtggaggtaattggatcatggggggcggttgctgttcttgtgatagtgagttctcatgagatctgat

SEQ ID NO: 38803 - DNA, 546 bp, Homo sapiens
atttttattgtaattactagaagttttaatcaaaactgacagtaatttaagcacttgggaacaaagtacacttaaatcttcaactaattttaatgtctaaagctgcttctctcaatagctctgaaatcagtttggcccttgattgccagaaactgcacaaacaaaatggaaactcttaatgattcgtaccgtgtggaatgaatactgactgaagatggcaacaaagaagctgaggaagagatgtagtgtgatctgcaaatcatacttaaagcaagtcagagaagttaaaaaaagtcctctcttattactgcagaaaatgatgcaagccactttaactgcttctattcaacagaactcctacaaaaaaaataaataaaaataaaaaattaaaaaaaaaccagattagttgggtgtaggataacatcatcggtaagatgtttccagaaaatgctcagggaatcatcatctactaacagaacaatgcttgagtggtaggttatgaaccaggacatagggagcaaaatcatgcagatatmattgattctg

SEQ ID NO: 38804 - DNA, 1344 bp, Homo sapiens
taccttgggacagttgcaaggttctcctgagggcgtttaactctgccttctttgccaaggttcctgccagcaaagttattgcctctgttacttctgaggaggtcaccacagcatatgtaggatttctcttcctgtcagggaccaggctgctcccgtctacaaacaaggtccagtctgagcatgggagctacctcctttaggtccaggtggctgaaaaacacttggtctatgacctctagacagttatatatgggttcttccagctcctcagtggtaggtaatagtgtagcaaggtttcaagttcctgtagtttgcagctttactgtggggtcatctaaaaccatggcttgataatctgctcaattggcatgctgtctgccagtagcctcttttttgttgcagtaacaccaacacttgattgggcacgtatattgcgaaaggctgccccaaggtcagcttttcaccttctttgagtagcagtcaagtagtagcagacttctctaagacaagggggccagccctcggctaccatgtcaagctgctttgaaacgtatgctatgagttgtaatacttcgcctaatctttgcattaggactccaatgctaaacccagtctctagtgcacattacgttggaaaggcttatgagaatttggaagctctaaggcaggggaggagattaacttacacttcagttgctccaatgaatgttggtgccttgcttcccactcaaaaaaattatagttggctctttttaacagttcatataagggctttcctattagtctgtagatagggatccaaatctaacaaaatctggccatacctaggaagacccttatgtgctctctggtggtggacatggcaatagaagcaattgcatttcaccttcccatggtcagggctctggtttctttctgtagaagaacccctaaatatttcatagtttgtttacatccttgagsttttttgcttgagagcttgcacccacaagctgccagatggtttaaggttttaatggtgttatcctggtactcttgctcaggggggttagagattagcaaattatccacatattgcaacaataccccattttttaattgtaggttttttaagttctgagccaaagcctctccaaatatagttggtgagttcttaaacccttgagagtacagcccagcaatactgaaactgtgcagtggtctcagggtctgtccattcaaaagcaaacaatagctggctctctacattcacttgtatctaaaagaaggcattttttcaagtctagcaccataaaccattcatgattcccaggcagtgaggaaaacggaaaacctggtgtatgg

SEQ ID NO: 38805 - DNA, 675 bp, Homo sapiens
agagcctttaggtgtgcagcaacctcctggctctgtagtccagtggatggtgagaagcctggggagcaggaggccataaagaggtttggaaggggcagggagggaaagggagaaggactatggccaaggaactgtttactggcggattagagagagtggggccaaagggtagaatttcaaggaactaggggggtgaagtcaagaggtctccacaaacactttctcaacatctcttatgtgccaaatgatagccagggctctgggcacataagatgartataacccagtccctgccttcaagaagctcttggtgtaatgcggcagggaagcaaacagttaggatgctataggaggaggcttagtgttacggatgcctgggaggagctattctgcttgaggtgagggttacaggatgaggggacaagagagaggaggaaggattttccctgttttttccaggaggggtaatcccttgtgcagagtgcaggggtgacagaatatggacccacagttccatgaggtcagaacttaaagtctggggtggaggtgacactgtagaggcaggcaggtgctgggtcctgaagacccccaacgtggaggctgatcctagtggaaaatgagaatgagcttagaccacacagcggcagcagggaggagaggagggaactgatttga

SEQ ID NO: 38806 - DNA, 545 bp, Homo sapiens
caataagaccactaggtgttagtcctagcttacccatttgctatctgctgtatgattttaggcaaatgacatgatcttcttttgccttatgtttttcatctataaaatagtagtaataatgcttccatctcataaagttcttatgaggattaaattattaactctatacaaggtactttgaaaaacacatgagatatagcaagcatctgaatattcaytggccaataaatataaatgaactacactgcaagccttcttaattgttttagggacaacactttttacatcacatttagaattctattctgttttgttccttcattttcacatgttccacaaacatggattttctagtctgcagaaagctttgtgcaatgcactgcacacatctacggagagctgggctgaaatgtgtgcattccagagtgttcagttttgtggatttttctttttcccttttcagtgcctctttcttaattcctggcatttgtctccttccccagtgtgttcccctccatgttttctacttacaggacccctctgtg

SEQ ID NO: 38807 - DNA, 1013 bp, Homo sapiens
tgcattctgattcagcatctctggtttcatatttctttgatgtaaagcactagctgttttctagtgtgtttatgtttacgatgtattgttagcttgtttatgtgttgaaggaggtacacgtatttttatggcagtcgtaagggacattgcatcatttctctggtctcagtacaaactcttggaaactcctgtgtcagagctccatttcagcaatatttactcatcttgtctgttctgggtacaaatgctggaatcagcaactcctaacccaaggaatcaacctggctcttctggagtccttggattaattaccagatggtgacatatgcacagcttcttctctttggtctttgtccctttgagttattccagaatttggctagaacagttcacatttttgtcattggtactgatcttttcttttacctgtagrtgtttgcaaatgcctcagttctgtttatgtattttcatcaaaaagtttccatttgatttaaaacctccaaaaagtcctaactatttctgtaagctagtacctgtgatcctgattttccattgcttctgttgatttatgtcagtgtttttcctgtctttccagtggaacatttttggagagtataggtaagtgtgtgttttcagttagccatcagaaccagaaatgagttttctaaatatttacaacttttgaagaacctactaaaagaacagtaattcagcttagaaattcattttttttcctgtttgctgtcttgcagtataaattttctttcaatttgagggaaggtgttttgaaggcattctgaaggtggtctgtgcagtgatactgttcattgagagaaaagcctctaagtgtcgggctaactaacattaaatgctacatgggtcattttgctatgaagagacattttcttggtgctttatttctgattactcctatttctaattacttggtctctttcaaataatgtggggtcaacgttgaagagctaaatacaaatcagccatttcaatttcca

SEQ ID NO: 38808 - DNA, 1013 bp, Homo sapiens
tgcattctgattcagcatctctggtttcatatttctttgatgtaaagcactagctgttttctagtgtgtttatgtttacgatgtattgttagcttgtttatgtgttgaaggaggtacacgtatttttatggcagtcgtaagggacattgcatcatttctctggtctcagtacaaactcttggaaactcctgtgtcagagctccatttcagcaatatttactcatcttgtctgttctgggtacaaatgctggaatcagcaactcctaacccaaggaatcaacctggctcttctggagtccttggattaattaccagatggtgacatatgcacagcttcttctctttggtctttgtccctttgagttattccagaatttggctagaacagttcacatttttgtcattggtactgatcttttcttttacctgtaggtgtttgcaaatgcctcagttctgtttatgtattttcwtcaaaaagtttccatttgatttaaaacctccaaaaagtcctaactatttctgtaagctagtacctgtgatcctgattttccattgcttctgttgatttatgtcagtgtttttcctgtctttccagtggaacatttttggagagtataggtaagtgtgtgttttcagttagccatcagaaccagaaatgagttttctaaatatttacaacttttgaagaacctactaaaagaacagtaattcagcttagaaattcattttttttcctgtttgctgtcttgcagtataaattttctttcaatttgagggaaggtgttttgaaggcattctgaaggtggtctgtgcagtgatactgttcattgagagaaaagcctctaagtgtcgggctaactaacattaaatgctacatgggtcattttgctatgaagagacattttcttggtgctttatttctgattactcctatttctaattacttggtctctttcaaataatgtggggtcaacgttgaagagctaaatacaaatcagccatttcaatttcca

SEQ ID NO: 38809 - DNA, 1013 bp, Homo sapiens
tgcattctgattcagcatctctggtttcatatttctttgatgtaaagcactagctgttttctagtgtgtttatgtttacgatgtattgttagcttgtttatgtgttgaaggaggtacacgtatttttatggcagtcgtaagggacattgcatcatttctctggtctcagtacaaactcttggaaactcctgtgtcagagctccatttcagcaatatttactcatcttgtctgttctgggtacaaatgctggaatcagcaactcctaacccaaggaatcaacctggctcttctggagtccttggattaattaccagatggtgacatatgcacagcttcttctctttggtctttgtccctttgagttattccagaatttggctagaacagttcacatttttgtcattggtactgatcttttcttttacctgtaggtgtttgcaaatgcctcagttctgtttatgtattttcatcaaaaagtttccatttgatttaaaacctccaaaaagtcctaactatttctgtaagctagtacctgtgatcctgattttccattgcttctgttgatttatgtcagtgtttttcctgtctttccagtggaacatttttggagagtataggtaagtgtgtgttttcagttagccatcagaaccagaaatgagttttctaaatatttacaacttttgaagaacctactaaaagaacagtaattcagcttagaaattcattttttttcctgtttgctgtcttgcagtataaattttctttcaatttgagggaaggtgttttgaaggcattctgaaggtggtctgtgcagtgatactgttcattgagagaaaagcctctaagtgtcgggctaactaacattaaatgctacatgggtcattttgctatgaagagacattttcttggtgctttatttctgattactcctatttctaattacttggtctctttcaaataatgtggggtyaacgttgaagagctaaatacaaatcagccatttcaatttcca

SEQ ID NO: 38810 - DNA, 666 bp, Homo sapiens
agcccacttccgtctgaccccaagcccctgctgttaacccctgccccattgtggggaggttccggcccactctggagttctctggtctgcgtcagtcctcaggagaagaaagaatgggggtgatgctccaaatattgaggctcccatctgtctgtcctgcactaggcagagccaggcttctccatggggcacaggagagagggcaccagatctgaggagcwaataggttcttggtctgagatctcgtgggatcaggttgccagccctgcaaacccccgctcaggtctagaggacatggagctgcctttcagggtgcatttgcttcctctacagactcggactctgtcctctgcctacttgggccgtcccgcactcgggaatgcgtcctacactgtagggcagagcccggcttgactcttcccggttcctaccctaaccaagcctctactttctgggatcaccctgttgggacttttgtccagcatctccatctacctgtcctctgattccttctgttcttctctaactgagcttgagaactaaaggggagggcaaacttctggccttggtggaatccagctccagcatatagtagctatgtgaccttcccctcactagcacactcgtgaatttctcccagcatccgttccctcatctgtaaaatga

SEQ ID NO: 38811 - DNA, 1238 bp, Homo sapiens
tctgaaaatattacattcacttttgcttaataattagctccaattcttgtcaagttttgtaaaatgaaacctgtaaaattgccagtgtccagaaataaagcgttcttggaagaggtttcacttattcaagtaaaagatattttatatcttgtaaaaagtaggggcatgaatcaatctttatatgatctcattgtgaactggggacagtatggcccagcctttgcacagttgtgccacatgacatgaaggcacaactccaactccgggagctttgaagaataacatcaatttttactaatcgtttycttgaaagtggttaacccaagattttattcaatgtagcaaacaggaagtatcccagaaaaaaatgtaccaaacaggaagtatcccagaaaacctctctagatattattttttctctccaaagctccatagtcatgacagtcattgaaaatccctgtattagtttgttttcacactgctgataaagatatacctgagagtgggcaatttacaaaagaaagaggtttgattgaacttacagttccacgtggctggggaggcctcacaatcatagtggaaagcaaggaagagcaagtcacatcttacatgaacggcagcacgcaaagagagagagcttgtgcaggggaattcctctcactagcatgagatcagcatgggaaagacttaccccatgattcaattaccatatcaatccctcttgctattttttgtcattctatcttctctcccactaccctgctctcccacctacttcctcctgtgatactgtcctatgttgttcacgggaagtggctcctcagatttctctcccctgctgctcactgacatcacacagttttttttaatttttattttattttatttttttttgagacagagtcttgctctttcacccaggctggagtgcagtgatgtgatcttggctcactgcaacctctgcctctggggttcaagtgattctcctgcctcaacctcccaagtagctgggattacaggcatgtgccaccacacctggctgacttttatatttttagtagaggtggggtttaaccctgttggccaggctggtctcaaactcctaacctcaggtgatctgcctgcctcggcctcccaaagtgctgggattacaggcatgagccactgtgcccgaccagatctcactgttcttttttagtgccatgctttgtggtcctcccttgcttgacaaagaaatg

SEQ ID NO: 38812 - DNA, 1238 bp, Homo sapiens
tctgaaaatattacattcacttttgcttaataattagctccaattcttgtcaagttttgtaaaatgaaacctgtaaaattgccagtgtccagaaataaagcgttcttggaagaggtttcacttattcaagtaaaagatattttatatcttgtaaaaagtaggggcatgaatcaatctttatatgatctcattgtgaactggggacagtatggcccagcctttgcacagttgtgccacatgacatgaaggcacaactccaactccgggagctttgaagaataacatcaatttttactaatcgttttcttgaaagtggttaacccaagattttattcaatgtagcaaacaggaagtatcccagaaaaaaatgtaccaaacaggaagtatcccagaaaacctctctagatattattttttctctccaaagctccatagtcatgacagtcattgaaaatccctgtattagtttgttttcacactgctgataaagatatacctgagagtgggcaatttacaaaagaaagaggtttgattgaacttacagttccacgtggctggggaggcctcacaatcatagtggaaagcaaggaagagcaagtcacatcttacatgaacggcagcacgcaaagagagagagcttgtgcaggggaattcctctcactakcatgagatcagcatgggaaagacttaccccatgattcaattaccatatcaatccctcttgctattttttgtcattctatcttctctcccactaccctgctctcccacctacttcctcctgtgatactgtcctatgttgttcacgggaagtggctcctcagatttctctcccctgctgctcactgacatcacacagttttttttaatttttattttattttatttttttttgagacagagtcttgctctttcacccaggctggagtgcagtgatgtgatcttggctcactgcaacctctgcctctggggttcaagtgattctcctgcctcaacctcccaagtagctgggattacaggcatgtgccaccacacctggctgacttttatatttttagtagaggtggggtttaaccctgttggccaggctggtctcaaactcctaacctcaggtgatctgcctgcctcggcctcccaaagtgctgggattacaggcatgagccactgtgcccgaccagatctcactgttcttttttagtgccatgctttgtggtcctcccttgcttgacaaagaaatg

SEQ ID NO: 38813 - DNA, 1238 bp, Homo sapiens
tctgaaaatattacattcacttttgcttaataattagctccaattcttgtcaagttttgtaaaatgaaacctgtaaaattgccagtgtccagaaataaagcgttcttggaagaggtttcacttattcaagtaaaagatattttatatcttgtaaaaagtaggggcatgaatcaatctttatatgatctcattgtgaactggggacagtatggcccagcctttgcacagttgtgccacatgacatgaaggcacaactccaactccgggagctttgaagaataacatcaatttttactaatcgttttcttgaaagtggttaacccaagattttattcaatgtagcaaacaggaagtatcccagaaaaaaatgtaccaaacaggaagtatcccagaaaacctctctagatattattttttctctccaaagctccatagtcatgacagtcattgaaaatccctgtattagtttgttttcacactgctgataaagatatacctgagagtgggcaatttacaaaagaaagaggtttgattgaacttacagttccacgtggctggggaggcctcacaatcatagtggaaagcaaggaagagcaagtcacatcttacatgaacggcagcacgcaaagagagagagcttgtgcaggggaattcctctcactagcatgagatcagcatgggaaagacttaccccatgattcaattaccatatcaatccctcttgctattttttgtcattctatcttctctcccactaccctgctctcccacctacttcctcctgtgatactgtcctatgttgttcacgggaagtggctcctcagatttctctcccctgctgctcactgacatcacacagttttttttwatttttattttattttatttttttttgagacagagtcttgctctttcacccaggctggagtgcagtgatgtgatcttggctcactgcaacctctgcctctggggttcaagtgattctcctgcctcaacctcccaagtagctgggattacaggcatgtgccaccacacctggctgacttttatatttttagtagaggtggggtttaaccctgttggccaggctggtctcaaactcctaacctcaggtgatctgcctgcctcggcctcccaaagtgctgggattacaggcatgagccactgtgcccgaccagatctcactgttcttttttagtgccatgctttgtggtcctcccttgcttgacaaagaaatg

SEQ ID NO: 38814 - DNA, 632 bp, Homo sapiens
tcatagtggtggatctctgaggggtcacaggcttcatgggagttactctgaggtctgctgcccatttttgttttccccagtggagaagacagagtatggcaaagtagagtcttgctcattttccatgctccctggagagcacgttaggggcaggagagggttcccctctcccagaggggctcagctgcgcttccgtctacagtctctcatcaccccaaatattgcccagcacctacagtcatcccctccacccatttaagccaagcccctctaactctccaaacataggtgagcagggtggggcctcgcccttcctcctgggtggggttgccctgccctgggaccagcccagctggtccctcctctcctggccagccctggcccaacctgttcttgagtgtgttgagcatgccgtagagcgtcacatcattccactcccaggtgtcgatgtgatcgttgcttatattggcaaagctgtagatgatgtgggtacagaggaagcggtcaagggcatctgggaagcagctcccatcgccttcccggtactgggaccagctggtgtagtagcagaccagtttgtatgcagagcctgaaggagaagtctgggrtggggcccgggccaggattcggca

SEQ ID NO: 38815 - DNA, 564 bp, Homo sapiens
atctccaaacaaacaaacaaacaaacaaataaaaatactggctgctcccacattggtttcttggagctgggacctgccatttaagaactttggctatgcygagacatcatgcagaaaagaagcccaagctagccatgtggaaaggccatgtggtgagagatgcctggtcagtttcagctcccagccattagtcatcccagctgaggccacggacatcatggagcaaagacaagccatccccactgttctctgtctgaatcactgacccacagtacagaaagatacaataataataaactactgttcttaagtcattaagatttgaggtagtttgttacgcatagataaataactggactacaccatgtcagtttcaactcccaaggatttctcccttctttcaattcctggagctcactatactgctgcacgcacttgactgcagaagctgctctaaatatgtctgcagcaagaagggtcagtggtggggttggcatgtttcccctgccccgagacccgccctagcaggttacactgcacacttgaaagttctgggtgaactca

SEQ ID NO: 38816 - DNA, 564 bp, Homo sapiens
atctccaaacaaacaaacaaacaaacaaataaaaatactggctgctcccacattggtttcttggagctgggacctgccatttaagaactttggctatgccgagacatcatgcagaaaagaagcccaagctagccatgtggaaaggccatgtggtgagagatgcctggtcartttcagctcccagccattagtcatcccagctgaggccacggacatcatggagcaaagacaagccatccccactgttctctgtctgaatcactgacccacagtacagaaagatacaataataataaactactgttcttaagtcattaagatttgaggtagtttgttacgcatagataaataactggactacaccatgtcagtttcaactcccaaggatttctcccttctttcaattcctggagctcactatactgctgcacgcacttgactgcagaagctgctctaaatatgtctgcagcaagaagggtcagtggtggggttggcatgtttcccctgccccgagacccgccctagcaggttacactgcacacttgaaagttctgggtgaactca

SEQ ID NO: 38817 - DNA, 1216 bp, Homo sapiens
tgaagaagcaatctactgacatactaataaattttctagcttcaaaacatctaaattttaaaaaagtagaaaaaatgtaaccattgcttcaagcatcttcctgagatactttactggaaacattacatagtagatgaaggtcaggttaagtttctagttccctagaactgctaaactcacttttccagagcaactctactttcatctgctttataacaggatttctcaagagatgttgattaaagaataaagtatagtgttaaaagctatctgtccttgtacagaaaacagatccgtggttgccagggccaatgaggggaggaagaagcaggaggagcatcatgggacttttttcatttatcaaaatgctctatattttgattgtggtrgtgcttgcagaagtatgtgcatttttcaaaattaaaaaaactgtacacctaaatagtgggaaaattatgtgactctaactttaaaaaaatcaaaggatgattaaaccacctgctctacattctggtaagagtctttgtaagaagttgtacatgatatatcacatttccatttatttttactatgccctatctgcctgaggaattagtatgctgtgtacacagattttggttagcagaaaggaagccatggctatgtctctttcactgaaaaaaaaaaacacacaagtaaataactttgtaaataaatactgtctcttaacatcacactctaagtgcttcctatctcttttttacacataaccaaaaaatgtagcaagaaagaattctagaaatgtattgcctccattttcttcctttcatgcctgcttaacttatcaaatataactcttcctttttacatgccactttaattatattatggtaaaataatatttttgtattttttcattattttaattaccttaaattttttgagatttgatttgctttattgttaaggtttatattatagtttatcattttttagtatttcatatgaccttgaaaagaatgtgtattttgctgtagttgagtggaattgtgtataattgtcagttaaataaatttaattgacagagttattcaggtattgcatatctttattttctgattattattgagagaagaatgttgaagtcttcaactatacttgtgcatttgtctgcttcacatttcagtactgtcagtttttgattcacgtattttggaacactcttgttgactgatgc

SEQ ID NO: 38818 - DNA, 1216 bp, Homo sapiens
tgaagaagcaatctactgacatactaataaattttctagcttcaaaacatctaaattttaaaaaagtagaaaaaatgtaaccattgcttcaagcatcttcctgagatactttactggaaacattacatagtagatgaaggtcaggttaagtttctagttccctagaactgctaaactcacttttccagagcaactctactttcatctgctttataacaggatttctcaagagatgttgattaaagaataaagtatagtgttaaaagctatctgtccttgtacagaaaacagatccgtggttgccagggccaatgaggggaggaagaagcaggaggagcatcatgggacttttttcatttatcaaaatgctctatattttgattgtggtagtgcttgcagaagtatgtgcatttttcaaaattmaaaaaactgtacacctaaatagtgggaaaattatgtgactctaactttaaaaaaatcaaaggatgattaaaccacctgctctacattctggtaagagtctttgtaagaagttgtacatgatatatcacatttccatttatttttactatgccctatctgcctgaggaattagtatgctgtgtacacagattttggttagcagaaaggaagccatggctatgtctctttcactgaaaaaaaaaaacacacaagtaaataactttgtaaataaatactgtctcttaacatcacactctaagtgcttcctatctcttttttacacataaccaaaaaatgtagcaagaaagaattctagaaatgtattgcctccattttcttcctttcatgcctgcttaacttatcaaatataactcttcctttttacatgccactttaattatattatggtaaaataatatttttgtattttttcattattttaattaccttaaattttttgagatttgatttgctttattgttaaggtttatattatagtttatcattttttagtatttcatatgaccttgaaaagaatgtgtattttgctgtagttgagtggaattgtgtataattgtcagttaaataaatttaattgacagagttattcaggtattgcatatctttattttctgattattattgagagaagaatgttgaagtcttcaactatacttgtgcatttgtctgcttcacatttcagtactgtcagtttttgattcacgtattttggaacactcttgttgactgatgc

SEQ ID NO: 38819 - DNA, 649 bp, Homo sapiens
tgctttgttttrgttaatgatatcacttttgtctctattctctgcataaaacatatttttggtggtttttattcttgctccatagttagtcacaatgctttattaattcatctttctttcctgtctcagtgccattgtcttatttccaagatctcttattccatgcttcattaagcacttaaccagagtttagtgtcgttatttgtaaatgaaaaaggtaggacccaaaagcagtaaatattactttttataccaagcaaatatatatgctttacatgcacaacttactttaatgctcacaatgttcttgtgatatactttttctcattttggagatcaatcctgatctccaagcactaagtgtattcactattctgacttcagacactaataaataattttacctgatcttcatataaaatgtatatcatactgtaatgtaaaatcataccacatgtattctttgggtatgacttgttttgctggaaaagaatgtctgtagctttatccctgtcattatagttatgtattttttgctttatctgttctcttattaatgacatttaatttttttccattttaaaatattatgagtattattgttattaatattcttgtacatgtgatttgatggatatacataacattt

SEQ ID NO: 38820 - DNA, 649 bp, Homo sapiens
tgctttgttttggttaatgatatcacttttgtctctattctctgcataaaacatatttttggtggtttttattcttgctccrtagttagtcacaatgctttattaattcatctttctttcctgtctcagtgccattgtcttatttccaagatctcttattccatgcttcattaagcacttaaccagagtttagtgtcgttatttgtaaatgaaaaaggtaggacccaaaagcagtaaatattactttttataccaagcaaatatatatgctttacatgcacaacttactttaatgctcacaatgttcttgtgatatactttttctcattttggagatcaatcctgatctccaagcactaagtgtattcactattctgacttcagacactaataaataattttacctgatcttcatataaaatgtatatcatactgtaatgtaaaatcataccacatgtattctttgggtatgacttgttttgctggaaaagaatgtctgtagctttatccctgtcattatagttatgtattttttgctttatctgttctcttattaatgacatttaatttttttccattttaaaatattatgagtattattgttattaatattcttgtacatgtgatttgatggatatacataacattt

SEQ ID NO: 38821 - DNA, 649 bp, Homo sapiens
tgctttgttttggttaatgatatcacttttgtctctattctctgcataaaacatatttttggtggtttttattcttgctccatagttagtcacaatgctttattaattcatctttctttcctgtctcagtgccattgtcttatttccaagatctcttattccatgcttcattaagcacttaaccagagtttagtgtygttatttgtaaatgaaaaaggtaggacccaaaagcagtaaatattactttttataccaagcaaatatatatgctttacatgcacaacttactttaatgctcacaatgttcttgtgatatactttttctcattttggagatcaatcctgatctccaagcactaagtgtattcactattctgacttcagacactaataaataattttacctgatcttcatataaaatgtatatcatactgtaatgtaaaatcataccacatgtattctttgggtatgacttgttttgctggaaaagaatgtctgtagctttatccctgtcattatagttatgtattttttgctttatctgttctcttattaatgacatttaatttttttccattttaaaatattatgagtattattgttattaatattcttgtacatgtgatttgatggatatacataacattt

SEQ ID NO: 38822 - DNA, 649 bp, Homo sapiens
tgctttgttttggttaatgatatcacttttgtctctattctctgcataaaacatatttttggtggtttttattcttgctccatagttagtcacaatgctttattaattcatctttctttcctgtctcagtgccattgtcttatttccaagatctcttattccatgcttcattaagcacttaaccagagtttagtgtcgttatttgtaaatgaaaaaggtaggacccaaaagcagtaaatattactttttataccaagcaaatatatatgctttacatgcacaacttactttaatgctcacaatgttcttgtgatatactttttctcattttrgagatcaatcctgatctccaagcactaagtgtattcactattctgacttcagacactaataaataattttacctgatcttcatataaaatgtatatcatactgtaatgtaaaatcataccacatgtattctttgggtatgacttgttttgctggaaaagaatgtctgtagctttatccctgtcattatagttatgtattttttgctttatctgttctcttattaatgacatttaatttttttccattttaaaatattatgagtattattgttattaatattcttgtacatgtgatttgatggatatacataacattt

SEQ ID NO: 38823 - DNA, 649 bp, Homo sapiens
tgctttgttttggttaatgatatcacttttgtctctattctctgcataaaacatatttttggtggtttttattcttgctccatagttagtcacaatgctttattaattcatctttctttcctgtctcagtgccattgtcttatttccaagatctcttattccatgcttcattaagcacttaaccagagtttagtgtcgttatttgtaaatgaaaaaggtaggacccaaaagcagtaaatattactttttataccaagcaaatatatatgctttacatgcacaacttactttaatgctcacaatgttcttgtgatatactttttctcattttggagatcaatcctgatctccaarcactaagtgtattcactattctgacttcagacactaataaataattttacctgatcttcatataaaatgtatatcatactgtaatgtaaaatcataccacatgtattctttgggtatgacttgttttgctggaaaagaatgtctgtagctttatccctgtcattatagttatgtattttttgctttatctgttctcttattaatgacatttaatttttttccattttaaaatattatgagtattattgttattaatattcttgtacatgtgatttgatggatatacataacattt

SEQ ID NO: 38824 - DNA, 1602 bp, Homo sapiens
tctgtgccaaaatccatcaggccataatgcctccttagagttattttgagattacaatgtaaaaaataatagtgtaatatttataagtctgaaaactattttcataaaattctagtgtattttagctacttacagtatgataaaaatgaatatctgagtttttttattagctctaagctaataacgcttcaggattaatgttaattcctaaaatctccttggagcacaacccaggataatgtaaaaagtaactggagcatgattagaaaagaaaatattctgtgattcagtgatcagcaatgtcaaccttgggacagaagctacaagttacaacttggaataacaggattgtttagtgacaaagatgttaatagagtcaaataggaaagtgtcttagacaagtgagcctttttatttttactttatgtgcccgaagaaactaacctaatattgaggtaatcttttctcatggccatggccaagaaggctraatctgttataatttatacatgtaacactgaaggaactggaataaatgaataaatgttctacatttttggcagtaagaatgaatgaatctggaacagagaaccttggctgaaactgtagtttgtccaaatactaaattccttaaggatgacaacattttaaaaatattagaatgcactgatgatttactatgagccagacacctgaggtagatatgttttatgtgtattttcaggtaagaaaaaaatgtacttcacagaaaattaacctcttcaccctgtttacatattaaactggaagggcataccaatcttatattttatgtagagtctgctggaggcagtatacatttaattaagagcagaggcactgagacagataattttggatttgaattccagttttcccactgtatacatctgcaatcttggacaaagcactttgagcctcagtttttacatctgtatgttcagaaacaataaagtacttgctttataggatttgcttagaaaattaaatacatagaaacaccttaacacaatgcctgacatatagtcattgttcaattagtattaggtcgtattattattaataataatgttagtgacatgtgtaggcagtttggcacataggagttgctcactagagaataaagacctttatgctttatgcatgtctcctgccatagaccatacactaactaattaacctaaacagatgattccattgaaaagatcgcattagagtcacatcaaattaagtttaatttcaaaactatttattgcatgcctcctcctctctcctccttctctttttaaataatcatatttattgagttttctacatatattattaattatcccagtgattacttgagctagacacattattatcatcattgtatagatgaagaaatcaagcaaaaaaaggttaagaaatttacccaaagtcaaatcaaacactttactgtaataagtgggagtaaagtatataaataagtaaaaaataatgtccgagaagttaagaatgaataaaacattattactgccttttagaaacttacattctaatgaggaaaatagtcttatctacaaataatgtgcgtacaagaca

SEQ ID NO: 38825 - DNA, 1852 bp, Homo sapiens
tgcattagaccatctcattctctcctcaatatcccttaactactcttttatatattttttctcctatccactctaaagtatctgtaatatattaaaatccatcttttcattcagtaactctctcttttaatattttgaatctatgctttaggatgtttctttcatttataatttactgtatcatttttaatctgtataaaatttgttgccctttttcatatctggttaattcactttgatgatatcttgttgcttaataacattgtgatatattatatatacttaatattctgtagcagataattctagtgaccatagtcttagcaggtacaattctaaattagtagctctttcaagctatcatttacagttccttgttttctcatgaattcttgacttttctatcatgagctcatattacttccaattttaataatacattttttgagacctcactacaaactatattattgcagagaggatttggtttttcttctcataagtgcttgttagaaacaaacaaaaaatgaccactttagtcatcaacttgtttatttcagaagtacaggatattaagttttctagttccaaatccttttaagagtggacttttcttagaaactgtaaggagatactttcattttttttcaccttcacagtgtgagacaaatatttctctaatcaaagcaaggaattttgtgtatttgttatttattttgtgctagatttgatggtggaaggtgaactatggtttaggaatctctgaatcaaattcacccttatattggccctaggcattgtctcctcctcctgtgcagaacacatcttaatgagagtaatgctctaggatatcaccagaaatcaggtgataagaagcccttagaacaattaccagttcctttacaaattcatttctccccacttacgtttttatcatgcttttgtcctctcatttcttccttattttagacctagtaatacattaaaaaatatgacttcttgtatttcatccagtttgttctcaggacttttgaatcacatgaattaagactcagtttaaaattataaatacagactgcctaggtttgaatcttagctcggccttttgccagctatcagaccctgaacaaattccataattagatgatcctcagtttcttcatctgtaattggattggggggggtggcaaataataatatctgcataatgatttgactgtgaaagatgcattagctaacttatttaaaatacttaggactcaatactgcgggaatacctgagaatattgtagaaagaaaaaggtcctgttattttttttcaataaaataaaataaccagatttcagaatcaaaattagaaaaagtactaattgaataaacataggtgtttaagaaatataaacaatcctctagggattaacgtaaggatgattttaaattggtccattatgtagaatcactgatttcagagaagcacaactgattataattggtaagtcggttgagagttaccatattgcaaaatatcgtaattctgccctttcatcataatgtraggaaacaggatttttaactttaaagacatggaataaggctttccaatgttagagagttattaagatgcttatggcctttaaatgttggaatcagaactcttgtgtttctttttttcctcaaagtaattaaagcagttgctgtattttatgaaacatgaaaaaaccccaacttctgcagtacattatatttccaaaagaacacttttctaatgaagaaaatatattttgagaatttaatgcctgggtttggaaatcattatctcctctggaatgtcataacatgaaataagtgtatt

SEQ ID NO: 38826 - DNA, 1852 bp, Homo sapiens
tgcattagaccatctcattctctcctcaatatcccttaactactcttttatatattttttctcctatccactctaaagtatctgtaatatattaaaatccatcttttcattcagtaactctctcttttaatattttgaatctatgctttaggatgtttctttcatttataatttactgtatcatttttaatctgtataaaatttgttgccctttttcatatctggttaattcactttgatgatatcttgttgcttaataacattgtgatatattatatatacttaatattctgtagcagataattctagtgaccatagtcttagcaggtacaattctaaattagtagctctttcaagctatcatttacagttccttgttttctcatgaattcttgacttttctatcatgagctcatattacttccaattttaataatacattttttgagacctcactacaaactatattattgcagagaggatttggtttttcttctcataagtgcttgttagaaacaaacaaaaaatgaccactttagtcatcaacttgtttatttcagaagtacaggatattaagttttctagttccaaatccttttaagagtggacttttcttagaaactgtaaggagatactttcattttttttcaccttcacagtgtgagacaaatatttctctaatcaaagcaaggaattttgtgtatttgttatttattttgtgctagatttgatggtggaaggtgaactatggtttaggaatctctgaatcaaattcacccttatattggccctaggcattgtctcctcctcctgtgcagaacacatcttaatgagagtaatgctctaggatatcaccagaaatcaggtgataagaagcccttagaacaattaccagttcctttacaaattcatttctccccacttacgtttttatcatgcttttgtcctctcatttcttccttattttagacctagtaatacattaaaaaatatgacttcttgtatttcatccagtttgttctcaggacttttgaatcacatgaattaagactcagtttaaaattataaatacagactgcctaggtttgaatcttagctcggccttttgccagctatcagaccctgaacaaattccataattagatgatcctcagtttcttcatctgtaattggattggggggggtggcaaataataatatctgcataatgatttgactgtgaaagatgcattagctaacttatttaaaatacttaggactcaatactgcgggaatacctgagaatattgtagaaagaaaaaggtcctgttattttttttcaataaaataaaataaccagatttcagaatcaaaattagaaaaagtactaattgaataaacataggtgtttaagaaatataaacaatcctctagggattaacgtaaggatgattttaaattggtccattatgtagaatcactgatttcagagaagcacaactgattataattggtaagtcggttgagagttaccatattgcaaaatatcgtaattctgccctttcatcataatgtaaggaaacaggatttttaactttaaagacatggaataaggctttccaatgttagagagttattaagatgcttatggcctttaaatgttggaatcagaactcttgtgtttctttttttcctcaaagtaattaaagcagttkctgtattttatgaaacatgaaaaaaccccaacttctgcagtacattatatttccaaaagaacacttttctaatgaagaaaatatattttgagaatttaatgcctgggtttggaaatcattatctcctctggaatgtcataacatgaaataagtgtatt

SEQ ID NO: 38827 - DNA, 648 bp, Homo sapiens
tcaaatgtggaagaggatgctacatgcacatacacactcctgttgggattatgatgaatgcgtcgaatcgttgaaaaattgacatctttaaaatatgatcatcttttcaatgtgtcctccaatctataaaatgttattacctccatttatttagggttttaatttattttaaatatctcttatatgttttcttgtatctaatgttcatacataaagaagacaacaaagataaaaattcatactcaggactcagtcactctggtactatagaattttaaatttgtaccagtgatattatttgaaatacttttctgtgataagaaaatggtaactgaacacaaaatttcaatgatmtattttatatattttgaaaaaatttcaatatatattgaaaaaaatttcagtgatctattttatatattttgatgctaaaatagattattaattttatcaactgcaaacaagggcttaataacaccaaatttaaccatgtatatatgtggtagaagacatacctttttgtgacattctgctgtacttgtaaaggaaaattattctgcaattgtaaattacatttttccatctatgctgtcttaaaacctgcaatataacctataatttctctgattggaatgattgcttgaaaaa

SEQ ID NO: 38828 - DNA, 690 bp, Homo sapiens
actgtataaaagctcatttcacattttcctcaatacctaataatgttagcattttaaattgtaatgtgaaagtataaaatagtatttcaytgtggttttatatgtaatattactaataccagcacatgtagaggccgtgttcctgtcatttttattaattatttggggtttctttttatgtgaactgcccaattatatccaggcatcatcatatcctatgccaatttttctactgtgttgtctttctcttatcgattataggtctcaacataatgtgaatactaatcctattttgggttatatactttgcaaatattttttccaggtttttggcttatattcaaattttatttcatggtgaccttgttggtgtagaagattttaactgtgatgtaataaatattatcaatcttttccctaaggtttgtatgtctttttgtttttgtcttgctaaagaaaacttccctagtccaatgtccttaggaagttttgaagtttgccttttacagtaggcctttaatctatgtgaaattattgtgtatgctgtaggtagcatcagtttttttcccatatggattattaatgataacagtgttatttattgagtcatccattctttcatcactaatttgtatatttaggtatcagttttttactatgttcaagtattctattgacttgtttctgcaa

SEQ ID NO: 38829 - DNA, 616 bp, Homo sapiens
gtttacggagggaaaaatgccttatagatatacatttacatttttctttcattgtaaatggattttagtggctcctattttaaaatacaaaagtgagwtggctgaggaattagtgggggtatctctcctcaggtgtctcctatcctcaaggagaggtttttttttttaatttaaaaattttaggaaggacagggtcttgctctgttgcccaggctggtcttgaactcctggcctcaagcagtcctcccgcctctgcctcctaaagtgctggaattacaggtgtgagccaacgagccggccaataattttactctgaaataaatttggtaaacgcagagccacgagggggcgccctggactctggcctggtggtaaatccagcaccttcacaaaggaggaaggatctcctagatgcggggtttggaatgaaataggatcattggctgaacatctgccgggcacctcactgggcacgcacagggcctcacttactcaacgcagacactccctgaagtgggtgcttgtgccccattgtgatgagctcacaggctcaggcaagttcagcaatctgtccagggtcactaaggtaataagtgggaaatgagattcagaccca

SEQ ID NO: 38830 - DNA, 880 bp, Homo sapiens
tgctgatgacaggatttaaaattttatacagtttaaatgaatgtttaactccaccttgtaaatgaccacctgctccctggcttgttttttcttcttcaggattagcatctctgtagatcagagagctcctgctgccttccttccctctctgartcttcatcttcctccctgctatgctcatcatccaccttctggggcagatcctccctggcagcctgagggctgagcctcctctctttctggttcccagttccctcgtccaggaagtggggtctgtccaggctgcctgtttaaccctctgctagccagaagtccctgctctgctcagccactgaaagtagctgcttccccttttcaggagagggcagttggggtggagaccccggcagctgctcagggcctggtgggctcagacgacagtgcagctgagctccggggagggcaggtgaggatggaagagctcatgggcagcgtcctgcaggggaggccctgggctgggggaggaaattgggctccaggtgtggctctgccctgtgtgactcaggacaggtctaccccatagagagtgcctactctgtaataaaagcaggagcttggacagatcatccttgagtcccctctcagcagtgaggttctgggatttggtgactcctgtggctctatcaaggtctctgctctgtctccccatcctgtcctgtcctatcctgtggcctgacgggcactgacagccagtgagcctatttcaggcttcttcagagagaaggccctgggtgtccctgtggccacttcctcagccctcaagggaggaagggactcctcctctctcagtcccctccacgtgaccctctgctttctctgcctctgctcctgagaggggtct

SEQ ID NO: 38831 - DNA, 880 bp, Homo sapiens
tgctgatgacaggatttaaaattttatacagtttaaatgaatgtttaactccaccttgtaaatgaccacctgctccctggcttgttttttcttcttcaggattagcatctctgtagatcagagagctcctgctgccttccttccctctctgaatcttcatcttcctccctgctatgctcatcatccaccttctggggcagatcctccctggcagcctgagggctgagcctcctctctttctggttcccagttccctcgtccaggaagtggggtctgtccaggctgcctgtttaaccctctgctagccagaagtccctgctctgctcagccactgaaagtagctgcttccccttttcaggagagggcagttggggtggagaccccggcagctgctcagggcctggtgggctcagacgacagtgcagctgagctccggggagggcaggtgaggrtggaagagctcatgggcagcgtcctgcaggggaggccctgggctgggggaggaaattgggctccaggtgtggctctgccctgtgtgactcaggacaggtctaccccatagagagtgcctactctgtaataaaagcaggagcttggacagatcatccttgagtcccctctcagcagtgaggttctgggatttggtgactcctgtggctctatcaaggtctctgctctgtctccccatcctgtcctgtcctatcctgtggcctgacgggcactgacagccagtgagcctatttcaggcttcttcagagagaaggccctgggtgtccctgtggccacttcctcagccctcaagggaggaagggactcctcctctctcagtcccctccacgtgaccctctgctttctctgcctctgctcctgagaggggtct

SEQ ID NO: 38832 - DNA, 880 bp, Homo sapiens
tgctgatgacaggatttaaaattttatacagtttaaatgaatgtttaactccaccttgtaaatgaccacctgctccctggcttgttttttcttcttcaggattagcatctctgtagatcagagagctcctgctgccttccttccctctctgaatcttcatcttcctccctgctatgctcatcatccaccttctggggcagatcctccctggcagcctgagggctgagcctcctctctttctggttcccagttccctcgtccaggaagtggggtctgtccaggctgcctgtttaaccctctgctagccagaagtccctgctctgctcagccactgaaagtagctgcttccccttttcaggagagggcagttggggtggagaccccggcagctgctcagggcctggtgggctcagacgacagtgcagctgagctccggggagggcaggtgaggatggaagagctcatgggcagcgtcctgcaggggaggccctgggctgggggaggaaaktgggctccaggtgtggctctgccctgtgtgactcaggacaggtctaccccatagagagtgcctactctgtaataaaagcaggagcttggacagatcatccttgagtcccctctcagcagtgaggttctgggatttggtgactcctgtggctctatcaaggtctctgctctgtctccccatcctgtcctgtcctatcctgtggcctgacgggcactgacagccagtgagcctatttcaggcttcttcagagagaaggccctgggtgtccctgtggccacttcctcagccctcaagggaggaagggactcctcctctctcagtcccctccacgtgaccctctgctttctctgcctctgctcctgagaggggtct

SEQ ID NO: 38833 - DNA, 798 bp, Homo sapiens
acatgaaagttccttctccctgttcctcaccctcactcccgcctgttgaaatactactgtgcttctcaaagctcttcccaagatgcttgttccatggagctctctggatcttaaaggtttagacatgatctctcccacaactgacttttctgaacaccttggacactatgtacggtccctgccacagtttgtcctgggatggtcatgagtcttcctgcaggactaacctgggctctctcaggaggatgtggggctgtggggtaatagggctgaggagaccattggtgcaaatggtctgggccaccttgttcccaacccatggggtcagcagagggagatgcagcacaggggctactgacaaactctctggtgtggctctacctggaaacagggatggacacaatgacctcccttgactatgcgtggcctgaggtcctaattggagacttccttaytccctcatccacctcttattgcgaacctggccattcttccatcatggtatgtgggtgtttctttcctcctgaggggtcctcagcttcttgcagcctctgcttcttatttgagtcccagcttttatgcagagatgacctaactctagtaccatgagctgctgtggcatgtctggtggcctagacccttgggcctcttagtttccctcatggctcaggtgagctcatttcctcattgccacccacagaaaacaaagatctgaacagagtccctgctaagagatggagcactagaaaatagtgctaggtgcctgctggatggtgggtgggtgaggcaggagggaga

SEQ ID NO: 38834 - DNA, 798 bp, Homo sapiens
acatgaaagttccttctccctgttcctcaccctcactcccgcctgttgaaatactactgtgcttctcaaagctcttcccaagatgcttgttccatggagctctctggatcttaaaggtttagacatgatctctcccacaactgacttttctgaacaccttggacactatgtacggtccctgccacagtttgtcctgggatggtcatgagtcttcctgcaggactaacctgggctctctcaggaggatgtggggctgtggggtaatagggctgaggagaccattggtgcaaatggtctgggccaccttgttcccaacccatggggtcagcagagggagatgcagcacaggggctactgacaaactctctggtgtggctctacctggaaacagggatggacacaatgacctcccttgactatgcgtggcctgaggtcctaattggagacttccttactccctcatccacctcttattgcgaacctggccattcttccatcatggtatgtgggtgtttctttcctcctgaggggtcctcagcttcttgcagcctctgcttcttatttgagtcccagcttttatgcagagatgacctaactctagtaccatgagctgctgtggcatgtctggtggcctagacccttgggcctcttagtttccctcatggctcaggtgagctcatttcctcattgccacccacagaaaacaaagayctgaacagagtccctgctaagagatggagcactagaaaatagtgctaggtgcctgctggatggtgggtgggtgaggcaggagggaga

SEQ ID NO: 38835 - DNA, 1308 bp, Homo sapiens
tgcatgtgcttagaattaagcctggtaggttgtggagctcaagaaaggtttccttccctttccaccactcacctccacactgcagctgacccttaatcttgtatctgcagacctcatgctttcccatagtcaagggccatacctctctattcttcggtagtgtgttgggctgggctgcgacttcctaaaagtcctccatccaaggcttatttttctcaggacctccaggaccctgggaaattatctctattccttgaccatccggatataggttctgcctgaccatgggtgttccctaacagggattaagtgggtcacaggtcagaggtcagaagtctggctgatcactgaagggttcacctttcatactttgatgtctgaatgagtcactatttatacctgtgggggaagctgtgggagcaggtcatgctgccttgttgtcttcgtgggatgagacgggaagacctggggctctggtctcagctccacattaaggaaggatatctgaggaccctagggtaaagggtggcatggggaagatcttaccaagtcccctcattgccccagtgtcttcacggtctaggcataccccggagctctgggcttgtccagatcttttcatacacagtgtggactgctggagccagcatggggctctgtgcatggcagcttctcttctccatgtcattctacaattctggtggggttgarttgtgggcttggtcagcttctaagaattatgcaaaggagccagtcaggctcttctgtactgtaagttccttgagggcaggggcttgttttatttttcactcccctgctgccatccccagcacatggtaggcactcagtgcaaatatgtgggttgagtgctgagtgggggagtgactaaagaaatgatgaagtagagactgttcagaagacagcccccaagtgagcaggaggagctcaggagagcactgtggaacattcatgtgcagattggtgactataactcctttttcaaaccaggtgttcctgctgtgtagtcctgggaagggaagaaggttgatattttatgaaaccagggcctgaggatgcagctcctttgtaaaagctccctctccctaacccaccctgtatagtctcttctatgggtgagcccttaggctcacagggaagcatgataaatggcagtagtgaccacaggtgttcatccttctcataggaagctgaccgtggattatgtactcagaggtggtaatcatctgcagaaaggggatgtctggcatgcagaaaaaaacaatagacatccatcagcctgcatgggcc

SEQ ID NO: 38836 - DNA, 1308 bp, Homo sapiens
tgcatgtgcttagaattaagcctggtaggttgtggagctcaagaaaggtttccttccctttccaccactcacctccacactgcagctgacccttaatcttgtatctgcagacctcatgctttcccatagtcaagggccatacctctctattcttcggtagtgtgttgggctgggctgcgacttcctaaaagtcctccatccaaggcttatttttctcaggacctccaggaccctgggaaattatctctattccttgaccatccggatataggttctgcctgaccatgggtgttccctaacagggattaagtgggtcacaggtcagaggtcagaagtctggctgatcactgaagggttcacctttcatactttgatgtctgaatgagtcactatttatacctgtgggggaagctgtgggagcaggtcatgctgccttgttgtcttcgtgggatgagacgggaagacctggggctctggtctcagctccacattaaggaaggatatctgaggaccctagggtaaagggtggcatggggaagatcttaccaagtcccctcattgccccagtgtcttcacggtctaggcataccccggagctctgggcttgtccagatcttttcatacacagtgtggactgctggagccagcatggggctctgtgcatggcagcttctcttctccatgtcattctacaattctggtggggttgagttgtgggcttggtcagcttctaagaattatgcaaaggagccagtcaggctcttctgtactgtaagttccttgagggcaggggcttgttttatttttcactcccctgctgccatccccagcacatggtaggcactcagtgcaaatatgtgggttgagtgctgagtgggggagtgactaaagaaatgatgaagtagagactgttcagaagacagcccccaagtgagcaggaggagctcagsagagcactgtggaacattcatgtgcagattggtgactataactcctttttcaaaccaggtgttcctgctgtgtagtcctgggaagggaagaaggttgatattttatgaaaccagggcctgaggatgcagctcctttgtaaaagctccctctccctaacccaccctgtatagtctcttctatgggtgagcccttaggctcacagggaagcatgataaatggcagtagtgaccacaggtgttcatccttctcataggaagctgaccgtggattatgtactcagaggtggtaatcatctgcagaaaggggatgtctggcatgcagaaaaaaacaatagacatccatcagcctgcatgggcc

SEQ ID NO: 38837 - DNA, 1136 bp, Homo sapiens
acccatgtgaacttcaacatccttcaggacataaagccatgcattatgcccaaattttcattccctagagatttctgaagatgttaccacatgcctttggagaaaaaagcaacagcaaggtaatcaaaaaattttacagagcctgcaggtacactagatgatcacagatgtgttaccagaaaggggttctgatccagaccccaagagagggttcttagacttcacacgagaaagaatttgaggtgagcctataaagtgaaagcaagtttattaagaaagtaaaggaataaaagaatggctcctccataggcagagcagcagcatggactgctcgactaaatatgcttgtagttatatcttgattatatgctaaacaagtggtggattattcataagttttctgggaaaagggcagggatgtcccagaactaagggttcctacccttcttagactatataaggtaacttccggatgttgccatggcatttcttaactgtcatggcattggtgggagtgtcttttagtatgctaatgattataattagaatataatgagcagtgaggatgaccagaggtcactttcattgccatcttggttttggccagcttctttaccgcatcctgttttatcagcagggtctttgtgacctgtttcttgtgccaacctcctatcttattctgtgacttagaatgcctaaccccctgggaatgcagtccagtaggtctcagccttattttacgcaacccctgttaaagatggacttgctctggttcaaacacctctgacagatggatctggatwtacataaaatgacacaaatactgattttctgaatatctgttggtaaaatcaacaactaaaaatgatcctctccctgccctccaaccgcctacccacccattgtcaagccacggaggctccccgcaggggccagcacaaagatctgaatgcagagcttccaaaggtcaggaattagaccctcagctagatgtggctgactccctcccagatccctggcccccagcgctgcctcaatctctgtaggttgctttggaggatgatctgcctggcgtttctctgagaaacagctctcagcttaactcttagaggcactgagcaccctccaagccccag

SEQ ID NO: 38838 - DNA, 1136 bp, Homo sapiens
acccatgtgaacttcaacatccttcaggacataaagccatgcattatgcccaaattttcattccctagagatttctgaagatgttaccacatgcctttggagaaaaaagcaacagcaaggtaatcaaaaaattttacagagcctgcaggtacactagatgatcacagatgtgttaccagaaaggggttctgatccagaccccaagagagggttcttagacttcacacgagaaagaatttgaggtgagcctataaagtgaaagcaagtttattaagaaagtaaaggaataaaagaatggctcctccataggcagagcagcagcatggactgctcgactaaatatgcttgtagttatatcttgattatatgctaaacaagtggtggattattcataagttttctgggaaaagggcagggatgtcccagaactaagggttcctacccttcttagactatataaggtaacttccggatgttgccatggcatttcttaactgtcatggcattggtgggagtgtcttttagtatgctaatgattataattagaatataatgagcagtgaggatgaccagaggtcactttcattgccatcttggttttggccagcttctttaccgcatcctgttttatcagcagggtctttgtgacctgtttcttgtgccaacctcctatcttattctgtgacttagaatgcctaaccccctgggaatgcagtccagtaggtctcagccttattttacgcaacccctgttaaagatggacttgctctggttcaaacacctctgacagatggatctggatttacataaaatgacacaaatactgattttctgaatatctgttggtaaaatcaacaactaaaaatgatcctctccctgccctccaaccgcctacccacccattgtcaagccacggaggctccccgcaggggccagcacaaagatctgaatgcagagcttccaaaggtcaggaattagaccctcagctagatgtggctgactccctcccagatccctggcccccagcgctgcctcaatctctgtaggttgctttggaggatgatctgcctggcgtttctctgagaaacagctctcagcttaactcttagaggcactgagyaccctccaagccccag

SEQ ID NO: 38839 - DNA, 722 bp, Homo sapiens
tgcctggatactgtttctcctcaaggctgctcagctctgtgtctgtcaccttgggcttcctataagagggaaaaaaaatgctggctgctccagcattgagtctgtcaccatgggtcaaggcaagtaggtccagaggatttggtggaaagtggagagatgggatgggaaggaaactaatgatagttctcagcccagaccacataattgggagctggagtagctatatcgtcatcctcttcccatgactrgtttgcttgggattattactaagattagtctattactatttgccttagatactgtgtcctctgagccaagtgaactggagataagggtctggcagtggacaggtagagaggaacatctggattggggcatttcgttcccatctccagttctggtgcatacccatattcttttttttaatgaaatgttttattgagataattatagatgctcacgcagttgtaagaaataacacagagcaatctcttgtaaagtttgtctaccagtttcccctagtggtaacattttacaaaacaatagtactatatatcaccaccaggatatggacattgtacaacctaccaatcttattcagatatctccagttttacttggactggtgtgtgtgtgtgtgtgtgtgtgtgtgtgtgtgtgtgtgtgataagttaatgcatccactgccacggtcaagagactgaacagtttcaacatcacaa

SEQ ID NO: 38840 - DNA, 722 bp, Homo sapiens
tgcctggatactgtttctcctcaaggctgctcagctctgtgtctgtcaccttgggcttcctataagagggaaaaaaaatgctggctgctccagcattgagtctgtcaccatgggtcaaggcaagtaggtccagaggatttggtggaaagtggagagatgggatgggaaggaaactaatgatagttctcagcccagaccacataattgggagctggagtagctatatcgtcatcctcttcccatgactggtttgcttgggattattactaagattagtctattactatttgccttagatactgtgtcctctgagccaagtgaactggagataagggtctggcagtggacaggtagagaggaacatctggattggggcatttcgttcccatctccagttctggtgcatacccatattcttttttttaatgaaatgttttattgagataattatagatgctcacgcagttgtaagaaataacacagagcaatctcttgtaaagtttgtctaccagtttcccctagtggtaacattttacaaaacaatagtactatatatcaccaccaggatatggacattgtacaacctaccaatcttattcagatatctccagttttacttggactrgtgtgtgtgtgtgtgtgtgtgtgtgtgtgtgtgtgtgtgtgataagttaatgcatccactgccacggtcaagagactgaacagtttcaacatcacaa

SEQ ID NO: 38841 - DNA, 892 bp, Homo sapiens
tcccttgagcccaggagttcaagtccagcctagggaacataataagaccctcatctctaaaaaaacaaacaacaaaaaatggggattggattagttatcttggaaatctgttccaaacttaacaattctgacttagtgataagaccaaccggcagtctgtttcaccgttggcaatgaggagaatccttttaatttccccacaactagatccaattgatgaaaacagtaatagaaatggaacactaaaacaaatacatgatgcccaaagaccttagaaattagctgtgaaattcattttaatcattgatgctcacatccttatcacccactaggtgtcactgcagacccacagaccaaataawcttcgggtagaaataactggaaaccagatatgcattgagcaatttgtgttctttttcattaagacgcactgaatgtcaagtgagacatacgtgcttgtgtacagaggtacaaaataataaacacattctgccaaaataagtcaataaccttgcgatggagttctgtcagctagggttatcaaaaatacatatttttaaaagactaatgtagatttcgttataagggggaaaaaaacataaaacttcatactactccctttgtctcatacagagtgatccgcaagtactgtatgttcaattatttttagtattcaggggctgaactttgcctttaaaccacattttaaaaggttaataagtattactgtaatacctaagcctctttagaaaatattacctttagtcatccaaaataattcatattctaagtcagaattattcaaagtagcaggtttctcaaatatctcgctacatgttaatattgctagcctaattcaagttacagcttaacgtgaatagttgcagtgtta

SEQ ID NO: 38842 - DNA, 1179 bp, Homo sapiens
agcaagttagaagagtcctgggttcctggaggttgtcagatctccttctttgtctcagactgtaatgttcaaacttttcatgagggagaaataaacttctaacttacctaatgcactgttacagtgggtctctctgttataacagtggaactttgatgttgccaaaacttataaacagcaaaatgggagcttctcaaaatttaatggacacaagaatcacctagggatcatgttaaaatgctgattctgattcagtagaggtgatagatacattttatttatcagcttggctaagctattgtgcccagtgtttttgtcaaacattagtctggatgttgctatgaaggattgtagaagtgactaatataatcagttgactttaagtaagggagtttgccaccagagatgtggatggaccgttaatggaccatgatgcactgtcaattgaatgcctaaaaagtaaaaagcaaagtttcccagagaagatagagtcctttgttaatactgctacatagaaatcctgcctgagtttccagcctgctggccttttctgtaaatttcaggtttgccagctcccacaactgcatgtgcctgttctttaaaataagtctcttcacacacacacacacacacacacacacacacacacacacacacacacwctctctctctctctctctctctctctctatatatatatatatatatatatatataaaaatagatctatatacatgtatatatacacacataggcatatatacatatattttattgattttgtttctttgtttttatacctactgtttaatacagtaggtataaagcaaatcctgagagtttgcatttctagttagttcccaatgctgctgctctgagcactatgctttgcatagtaagattctagaaaactgtttttcaggaatcatatgcttcagtccagactttgacagaaattttctgtgaaacctcaggaatgccatgcagtacgtagctctcacttcctcatctatgagatgagaatgttggattatatgatccctgtgaccctctcaggatctaatacatggtaactttgtgaccctcttgccaagaggtccaggtgggaaggcaacatggggatagagcttgtggcacggcagaccccagagctgtatcaaagtgtgtggtcatcatgca

SEQ ID NO: 38843 - DNA, 1119 bp, Homo sapiens
tttagacaagacactgaacacagaacaacactgcccattacagtagccactggctaccctccaggagcacacctgtggtttaacaagttgggttgaccactcattgcagtgagggagcactcacaccatgagaaccatgggacatctccataaggggatgttagaacctattataggatgagggctttgattgggtgatttgggggagagtctaaggaggcagaggtttgccctagmgtaggtatcatcagaaaatacggcaatactctgagtgggtatctcaatcaatctgatctagaggaaggccagactagagtgaggaaaaggctggaattgataaacatgtagtagttactcagtgaacaagagaaggggatgtctggggttttgttggttgcacagtgacctggtctgcatccatgtcctgagagattgtttatgtcaagcaggagaaaatgaggattagctgtgccagatcagtttgcaataacgtatagaccaagctctgaacatcaaatccagtttccaggcatcaaagttgcatttagtttcttttacacactgttctgttaaggaaaaaaaaaatcaaggtgtgtaagttatgaaactgtgtgattttggtgattctgcattcgagttaaatgatatttgcatttaaaattggcattgcacagtataaagacaaacactgaaatccatgctaatcattttaatttttaatttttctttacttcagtcaacatggcaaattttaaaatgccatgaatagttgagagagggagaggctgtgaaagaaaagaaaaagctttacattttagtcccacgaatgacctttttttctgctttttgaacaaggtgacctccattttcattttgtgctgggtcctccacatgacgtagctgtttctgttccctgttctttatttcttttaacccttgacagtgccctaaacagatattcttaaatgtcctcattttcctttgtttttcagagatcactagctgctgcgtgttccctgtcagcaaatgtcataggggtcaattccctatggatgcttttagcgatgacacttaggttagacagggaggagtcaacccagcctcccattctcttcccgg

SEQ ID NO: 38844 - DNA, 1119 bp, Homo sapiens
tttagacaagacactgaacacagaacaacactgcccattacagtagccactggctaccctccaggagcacacctgtggtttaacaagttgggttgaccactcattgcagtgagggagcactcacaccatgagaaccatgggacatctccataaggggatgttagaacctattataggatgagggctttgattgggtgatttgggggagagtctaaggaggcagaggtttgccctagagtaggtatcatcagaaaatacggcaatactctgagtgggtatctcaatcaatctgatctagaggaaggccagactagagtgaggaaaaggctggaattgataawcatgtagtagttactcagtgaacaagagaaggggatgtctggggttttgttggttgcacagtgacctggtctgcatccatgtcctgagagattgtttatgtcaagcaggagaaaatgaggattagctgtgccagatcagtttgcaataacgtatagaccaagctctgaacatcaaatccagtttccaggcatcaaagttgcatttagtttcttttacacactgttctgttaaggaaaaaaaaaatcaaggtgtgtaagttatgaaactgtgtgattttggtgattctgcattcgagttaaatgatatttgcatttaaaattggcattgcacagtataaagacaaacactgaaatccatgctaatcattttaatttttaatttttctttacttcagtcaacatggcaaattttaaaatgccatgaatagttgagagagggagaggctgtgaaagaaaagaaaaagctttacattttagtcccacgaatgacctttttttctgctttttgaacaaggtgacctccattttcattttgtgctgggtcctccacatgacgtagctgtttctgttccctgttctttatttcttttaacccttgacagtgccctaaacagatattcttaaatgtcctcattttcctttgtttttcagagatcactagctgctgcgtgttccctgtcagcaaatgtcataggggtcaattccctatggatgcttttagcgatgacacttaggttagacagggaggagtcaacccagcctcccattctcttcccgg

SEQ ID NO: 38845 - DNA, 1119 bp, Homo sapiens
tttagacaagacactgaacacagaacaacactgcccattacagtagccactggctaccctccaggagcacacctgtggtttaacaagttgggttgaccactcattgcagtgagggagcactcacaccatgagaaccatgggacatctccataaggggatgttagaacctattataggatgagggctttgattgggtgatttgggggagagtctaaggaggcagaggtttgccctagagtaggtatcatcagaaaatacggcaatactctgagtgggtatctcaatcaatctgatctagaggaaggccagactagagtgaggaaaaggctggaattgataaacatrtagtagttactcagtgaacaagagaaggggatgtctggggttttgttggttgcacagtgacctggtctgcatccatgtcctgagagattgtttatgtcaagcaggagaaaatgaggattagctgtgccagatcagtttgcaataacgtatagaccaagctctgaacatcaaatccagtttccaggcatcaaagttgcatttagtttcttttacacactgttctgttaaggaaaaaaaaaatcaaggtgtgtaagttatgaaactgtgtgattttggtgattctgcattcgagttaaatgatatttgcatttaaaattggcattgcacagtataaagacaaacactgaaatccatgctaatcattttaatttttaatttttctttacttcagtcaacatggcaaattttaaaatgccatgaatagttgagagagggagaggctgtgaaagaaaagaaaaagctttacattttagtcccacgaatgacctttttttctgctttttgaacaaggtgacctccattttcattttgtgctgggtcctccacatgacgtagctgtttctgttccctgttctttatttcttttaacccttgacagtgccctaaacagatattcttaaatgtcctcattttcctttgtttttcagagatcactagctgctgcgtgttccctgtcagcaaatgtcataggggtcaattccctatggatgcttttagcgatgacacttaggttagacagggaggagtcaacccagcctcccattctcttcccgg

SEQ ID NO: 38846 - DNA, 655 bp, Homo sapiens
cactttgggaagccgaggtgggaggatcgcctgagcccaggatttggaggccagtctgggaaacatagcaagaccccatatctataaaatttatttaaacttagccaggtatggtggtgcacccttgtaggtgttactctggaggtggaggcagggggctcacttgagcccgggaggtcaagactccagtgagctrtgattgcaccactgcactccagcctgggtgacagagtaagacctagtgtcaaaaaaataaaaatgaaaataaaaataaaatcataggaacaaaacacagagccccaccttagccactgacaaactgattgagtggtttgacttatttgaccttgagtttctcatttttaaaatgatattactgatgattcttgcctcacggcattccgatgattaaataagataacatatgctttggaagcttataaaattgtaaattcctaaaatgtgcaacaattgttaatcttgctgtaagaaattaaagatgaatgctcagaaattgagcattcttgagagagggcatctcataatggaaccccaccaacacagtgttctcctgcttaacgagtttgtgtccagtaaataaacgaatgagtgtattgccttgtatgggtccattctcccgacaacagccgggata

SEQ ID NO: 38847 - DNA, 655 bp, Homo sapiens
cactttgggaagccgaggtgggaggatcgcctgagcccaggatttggaggccagtctgggaaacatagcaagaccccatatctataaaatttatttaaacttagccaggtatggtggtgcacccttgtaggtgttactctggaggtggaggcagggggctcacttgagcccgggaggtcaagactccagtgagctgtgattgcaccactgcactccagcctgggtgacagagtaagacctagtgtcaaaaaaataaaaatgaaaataaaaataaaatcataggaacaaaacacagagccccaccttagccactgacaaactgattgagtggtttgacttatttgaccttgagtttctcatttttaaaatgatattactgatgattcttgcctcacggcattccgatgattaaataagataacatatgctttggaagcttataaaattgtaaattcctaaaatgtgcaacaattgttaatcttgctgtaagaaattaaagatgaatgctcagaaattgagcattcttgagagagggcatytcataatggaaccccaccaacacagtgttctcctgcttaacgagtttgtgtccagtaaataaacgaatgagtgtattgccttgtatgggtccattctcccgacaacagccgggata

SEQ ID NO: 38848 - DNA, 641 bp, Homo sapiens
gccatctgctgcagaattccttcttgctcagggaaggtcgggttttgttctcgtcaggccttcaactgattggatgaggctctcccacagtaggggagggtaatccacttttctcagtctgcctatttacatgttaatcacattcaaaaacatttgcagaaatatccagaaaatgtttgaccacgtatctgggcactggccagccaagttgacacaaaataaaccattgcaattggggattcagttttggaaatgttaagtgtgagatgaatattgactataagtggagacgttagatagaaagttggatataagagtgtagaaggcaacagagtgaatcaggctacagatataaatttgtaaatcatcaataactttaaagccaggcctggaacacaccatcaaaggagtgagtgatagaggagcactccgaggaytgagtggggcctttcaccactgagacgactgagagaagagcagcagccatcaaagacgatgaagaaaaagcaacccgtgagataaacagaagaaacacatatgataattactacactgtataatattgagtgaatatacacaaatcaaatacataatgagtgagtaaataagcaaacagcaataaattagaattcactcatata

SEQ ID NO: 38849 - DNA, 641 bp, Homo sapiens
gccatctgctgcagaattccttcttgctcagggaaggtcgggttttgttctcgtcaggccttcaactgattggatgaggctctcccacagtaggggagggtaatccacttttctcagtctgcctatttacatgttaatcacattcaaaaacatttgcagaaatatccagaaaatgtttgaccacgtatctgggcactggccagccaagttgacacaaaataaaccattgcaattggggattcagttttggaaatgttaagtgtgagatgaatattgactataagtggagacgttagatagaaagttggatataagagtgtagaaggcaacagagtgaatcaggctacagatataaatttgtaaatcatcaataactttaaagccaggcctggaacacaccatcaaaggagtgagtgatagaggagcactccgaggattgagtggggcctttcaccactgagacgactgagagaagagcagcagccatcaaagaygatgaagaaaaagcaacccgtgagataaacagaagaaacacatatgataattactacactgtataatattgagtgaatatacacaaatcaaatacataatgagtgagtaaataagcaaacagcaataaattagaattcactcatata

SEQ ID NO: 38850 - DNA, 1985 bp, Homo sapiens
atagttttgccactttctatccattccccttctatcaaaacatgtctgcttctagtcaataattaagggaacttttgattctcttggcttgcaaagcagagatgagacatgattaagccgcagctacttatcatttaaaattcatcagtttttacactgacaaaacaaacaacctgcaacaaggtgccagccccatgctatcaccaggctttgccatcagattcacaatgacccatcttttcctgaataactgaatattaactacataatgatctgcagttatatggatatagggcttcccaaatgcaaagcaaaagtgcagaagaaaaaggtattcatgaaaagaaaaagaattcaaggaaaccctgtggagaaaaaagggttgttataagatctgacggtttgagagtattcagctcttaccaggcagaaaaggaaaaaaaaaaaaacaacagattgtagttgggagcaaataaggaaacttttagagaagcartatctgggtctcagaataaagccaaaaggatatatcatctactataaacgattttcacatcttttgcaatggttatcacaactgcagataatttagtgtagagatatgcttaccctaaatgtcttggtaaggaaggaaaaaaagaagtttccataatagaaatgcataaagaggacccgtgtataagaataagcatttatgacccaatttatttctttgtctgttcttagtacactgttaatatagagaaatacttaataagcaatggactccagcttttacttgggagtaaactccatacctagcaatgtaaaagttttgatctcttaggccagtggttttcaagccatatccaggtcttcaattcacagccctgagtggagtgagtgggtgagaggaaaggccaggtgggcaaggcatcaggccccttacccagtgtgcctcagaaagggtaaggtacagtttacacttcagtggttttcagtgaattcataaagttaaaaaaaatcaccactatctaattacaggtcattttcatcaccccaaagagaaactctgtacccatgacccttcgcctcccacaacccatggcaagcattaatctattttctctatgaatctgcttattctggacatttcatataaacaaattaatataatatatggtcttttatgacttgcttcttttacttagcatcagttcttctagtttatctatatttgagttccaacatgaactcttgcttgtgaaaaaaatgacaaattattcaaaagtgccagttcaattccacagcatacattctttagctaaatattttcaagacatgaaagaccaaagcaaaaccaccaataacaaaaacaacccctttctatcccatgcacaaaataacaaacaactacttgctgtccccaaaagttatagtagttattgaaattagagtttctaataatactcatatttacatgtttttaaaagttagtacacacacagaaatagcttatttttatttccttggggaaaagctagcacaaagagttgtaatctaagagcattaactcattattgccataaactttatgcaatattaaaagaaaaagtgaaaagtaattcatcccaaggaattagggattatattcaggttatcagaatgtaattcttcagctgggatagagccaataaagtgaatttaacccatttttgcaccgaaatgttaaaacatttatatatacttggtccaatttgatttttattatataatagtagtacctaatatttctctattttaaaatgctaaagtaatggtttggtttggaaaaaaagaaaaagaaagaaagaaaaaagagaaccacccacttaccataataaatataatcaaactcaactctgcctttacactaggtataatacatttttcttttttttaaggaaataacttttgatattatgatagaaagataaaattgaaaggaacaatcattactacacaaa

SEQ ID NO: 38851 - DNA, 1283 bp, Homo sapiens
actgctaagcggtacatttcattatcacaagacttattttaaagayattcttaacaggttttttttttttaactataaaacaacctctcagtttttatttaagtttcaatgatttcaacaagttgaaattcagacacatttgaatgccatggataggatgcaatcagtaagaaaagctcagagactttcaagccctaatgaaaatatatgaagctaaaaaaattagcattagcagaattaccaaggagtcaagaatcagtgggatgataagtcatccaaaataaaatggattttgcccaaacctcaccttaaaagctaatgacaaatctaaatgcactggacctactggtaaaacgatgtaaggagagcaggagctgaaacaccacttcaggatgctgaggtcagagaaacagccgtgatgctgcgttttcagtatattggcaaacaccccacatcacatctgaagagacaagactgccaaaaaacaaactaccctaactcaaggtagagctttccaaagaatgaatcagcatttttaaaatatttgatttttatagtcttacgaagtacattgatgctggcaggggtggaaaggattgatcaaaacaactgcttctagatttttttctttgttcttttcgggtgttttgtgtgtgtgtgtgttttatttttgccaatggcatatagttcataaaaaaaaggcacaatttatcttttaaaacagaaattcgatattttttactagaaaattgtaattcttctcactgaaaatatgattcttctcatggaaaacatgtaattttggtttatttccctacatattaatcaatatcaacaagaatacagttgaacctcttgcttttaaaacaactgtatttgcttaaaacctgcaatataaatctgttttgagtggtattaatttaataagctgtttctcattgaggtatttttttcctgttgttgcctcttctcactaaactcatcaaagttaccagtacaaactagtcctatgtaaagctcagcaactaaactatgacattgacaatgaatctacccttgcaattgaaatgctggaagtagctgatgctgttgacctttcaagctacaaaattttgcaaatatcctgtctcttctccctcagctaacatgtctctcaaactacctttctatcctggctaacctttccttgcttatttcctccttctttccttttactatttcctccattaccttgctctatttcacattttctctccatggatggggttactgtacctcactat

SEQ ID NO: 38852 - DNA, 443 bp, Homo sapiens
tcaagaactgatgatgggacaattggatatgaagatgcaaaaaaaattaacactgtaaataaaaattaacacaaaataaattataattcttaatgtaaaaccataagctagaaacttctataaaaaagcatgcaagaaatattggtaaccttgggttaggcaattcgtttattagatatggcactaataacacaatcaataaaagaaaaaattgataatatagtctttatcaaaattaacacttctgctgttataaacatactgttaagaggatgaaaacattagtgataaagagaaaaaaagtattttcaaataacctgtttgattaaaaamaaacaaacaaaaaacacttgtatccagaatatataaagaatcctggcccggcgcaagtaaactgattctcatattagttaaacaattagttggccaggcacggtggctat

SEQ ID NO: 38853 - DNA, 443 bp, Homo sapiens
tcaagaactgatgatgggacaattggatatgaagatgcaaaaaaaattaacactgtaaataaaaattaacacaaaataaattataattcttaatgtaaaaccataagctagaaacttctataaaaaagcatgcaagaaatattggtaaccttgggttaggcaattcgtttattagatatggcactaataacacaatcaataaaagaaaaaattgataatatagtctttatcaaaattaacacttctgctgttataaacatactgttaagaggatgaaaacattagtgataaagagaaaaaaagtattttcaaataacctgtttgattaaaaacaaacaaacaaaaaacacttgtatccagaatatataaagaatcctggcccggcgcaagtaaactgattctyatattagttaaacaattagttggccaggcacggtggctat

SEQ ID NO: 38854 - DNA, 766 bp, Homo sapiens
aaaagttctagaggtatgctgtacaataatgtgcatatagttaataatactgtagctccttctagcaaatcttacctctgtgtctttcagtgttccatttttatattttcagtcctctaataactttttaaatttttcctatattaattttccttggtgtgtttttcttttttggacaggatattgacagacacaagacttggtactaggagtgataccaaaaaagaaagataaaatgggaatctgagattgatgtgggcatgaccctagtcttaaacacactgctgaactcccatccaatggagaatggcatgtaatgacatcacaattagttactactcaatgttgattgcagtgaactgccctattgacccaagtgtgtaaggggatgaagtgactgctgtgataattactatgagtacctcaaagactgagaggtgaaatagctatatttaatttaatgtaattaagctaatttaatgtaaactgggaaatttacatgatgaggccaaagtcttgaaattcacagttcaaacagggagcttataatggtggacctaaaagaatctctcctttgttttaaccatacaaccaagctcactgaaaacaaaatttaattgaaatgcttgcagagtgacaacataagttgaatacatagatacgtcaagggaaagggaagaaactgactgggaagggggaaaactttgagacttgaaatagagaattcctggtgaatttggatgattttraacatgtaaacattcca

SEQ ID NO: 38855 - DNA, 590 bp, Homo sapiens
tttgcatttctaactgtttcccaggtgatgctgacactgcaggtctggggccagcactctgacaaccggtgctctagaatctttctttttcttaacattaaggaagggagggcactaaaaaatatgtcaggcttctccattgmctccaaaatcaaatccaaactcttcatccaaaagcccccataatccaaccccgtcatttcccactacttctcattaggctataaaatcaaaccactatgccctaaacacacctgagatttcaaacatcaggacttccgctggatttcctcactccggctatgccacttccttctacttcttcatgccaaatcctacccagccttcaaggtcctcaaatgctatttcctccataaagcctcctgatctaccactactcaaaaagctacctctccctccccccctcagggctgcacagcacttttcgttcctccccaatgacaggcaccatctgtacctggtccagcgactctaccggtgggtggtgtatcttcgcctgtagactgggagtttcttgaggtcaggggagtgacttgcctatctttgcctcttagccttagcagatcccc

SEQ ID NO: 38856 - DNA, 548 bp, Homo sapiens
aaacctaaagtattcacatagtatgatgtcagtcttatgccttcaagttttctccagagtgtgacttcaattttagatagctgttctttgataatgcactttttacaacgttctttgcttggagacaagtgatacttccctgccgttggattcttacactttacatagggaaaattcacatttctgagtggaattagctgcccctgcctggtctgtttctctctcctgagccatcatgactaccttggattctaggaagaaacacctagattaatgccacctggattttctttaaaatgagtcagactctgccttcattgtctgtgtacaaagaccactggcatgtatctgcagctttttgtttctttgcaggaaatacagggaaaatgaggaatagasgaagaaagcttagaaggggtattgtttatcccatcccattcttccaccaatacaagcaacaaatacccttaaaaacttcagaaggactgcatgcctatcacaaaacaagaaaggagggagaacatttgaaaataaagggtctgtttaat

SEQ ID NO: 38857 - DNA, 530 bp, Homo sapiens
tcatccagagaagatgggataggatgactagatggaaactatgtggctagaatcccaaattacaggcctgaccatcttttcccatggaaacattattagaggtgttttcataaaattacaagtcacatatattctagtagcttttcataagttatcatgsagcacccaagcgatgagtacagtatttctactggaaaatatgttccatgttcccagaaactgacttacagatgaacatttggtaaatactctagtcataatttggggacttcagaaaatacgtaaacatagttttgtaacctattaactcttgaattaatccacatttatcattaaaaagttcaattaactttttcatttgaaagaaaaatctagttgtttctgtttcaccaaaatgaagaacatagttatttatacagtacctgtttaataacatccctatcatttattcattgcaaattgctcaggttgtatatcaccctccaaggagttctcattgcttaagtagatgcatgttcttcatttctggc

SEQ ID NO: 38858 - DNA, 530 bp, Homo sapiens
tcatccagagaagatgggataggatgactagatggaaactatgtggctagaatcccaaattacaggcctgaccatcttttcccatggaaacattattagaggtgttttcataaaattacaagtcacatatattctagtagcttttcataagttatcatggagcacccaagcgatgagtacagtatttctactggaaaatatgttccatgttcccagaaactgacttacagatgaacatttggtaaatactctagtcataatttggggacttcagaaaatacrtaaacatagttttgtaacctattaactcttgaattaatccacatttatcattaaaaagttcaattaactttttcatttgaaagaaaaatctagttgtttctgtttcaccaaaatgaagaacatagttatttatacagtacctgtttaataacatccctatcatttattcattgcaaattgctcaggttgtatatcaccctccaaggagttctcattgcttaagtagatgcatgttcttcatttctggc

SEQ ID NO: 38859 - DNA, 530 bp, Homo sapiens
tcatccagagaagatgggataggatgactagatggaaactatgtggctagaatcccaaattacaggcctgaccatcttttcccatggaaacattattagaggtgttttcataaaattacaagtcacatatattctagtagcttttcataagttatcatggagcacccaagcgatgagtacagtatttctactggaaaatatgttccatgttcccagaaactgacttacagatgaacatttggtaaatactctagtcataatttggggacttcagaaaatacgtaaacatagttttgtaacctattaactcttgaattaatccacatttatcattaaaaagttcaattaactttttcatttgaaagaaaaatctagttgtttctgtttcaccaaaatgaagaacatagttatttatacagtacctgtttaataacatccctatcatttattcattrcaaattgctcaggttgtatatcaccctccaaggagttctcattgcttaagtagatgcatgttcttcatttctggc

SEQ ID NO: 38860 - DNA, 1159 bp, Homo sapiens
acacacaaacacacatacacacacacacacggcacagaactggaacattcagagagctgaaggattcattgtttgtccgggcaggtaccccgtgcagctgcatgaagcaataaaggagctgctgctactcaatgcctaaaagacttccgagcttacaaatatgtgaaaagcttcttccagtgtttattcactacactaaaggtgtgtgtttacttcacagaactgagcccttgttcctttgaggccctattagcaatgcagggatgaaaaggaagtcatagtgttatgttcttagtaggatgactggctcttttggtgagactgtccttccaaaggcagcaaatggagaactccggaggtttagccttgcatttgctttccagagagatagtcacatagcccaagagaatgaaaaagctctttcatgagcccagttttctttttgtgcagatggcagtccagattggcatcacagattctgaaacaaatttttgttccacggatgttatttcaagttccccaaagctgtagcagctgggcagctgcaaagtcattcagtttctctggccccataagcaggctcctccttatcagaatataccccagtttcaagaaagcctattttcccatgaataggacagcaatctttctcttcttttagttacaatttattgcactacctctctttccttgttcattcttttttcagtaaatatttttgaacacctgccttgtgccaggaactaagcatacagtctagtgtataaacagtcaagaaaataggcagttacaatatattaaaaacaactaatatttatttagtgctttatgtgtgccagccactgttctaagtgttttaattttgctcttaaaacaattctatgcagaaggttctattattatccccattaaacatgtaagaaaatcaagacccagggatgttgaattacttctctacaatcatacagagaaagaaaggtattgaactagaactaagtgcaggcagtcttgctgcagagcctgtcttcttaaccaggaggtacatggaaggggcagragctgagtattattacagagaaaatacaggtactgggagcatgtatgagatgtcactaacccagacttggggctcaaagagaagttgtgtatttaaaatgca

SEQ ID NO: 38861 - DNA, 507 bp, Homo sapiens
gacatctgatagctagaggtttggcatgaagcttggttcccagcaataataccagacacataagcaggccaagtgtcatggttaagtttcccagtaactccaaaaatatccgctcttacctgttttcccataaggatacacaaatgctaacctccatccttgtcacacttctagtactctctcaactctaaggcttacttctgggaatgatctaacattttatgcaaatagctagagtttggtttctttggattcctaagagcctccttctggaaatggtactgtcttggatggctttaaagattggtcaaagggtacaaagtttctgttaggaggaataagctatggaaatctattgcacagcacggtgactttagctaacaataaggtattgtatgcttgaaaattgctgagagagtagatcttaaatgttcttaccayaaacaaaaagtctatgaggtgacagattatattaacaagcttgatttaatcatttcactgtgtgtg

SEQ ID NO: 38862 - DNA, 570 bp, Homo sapiens
cttggctatatcagagagtcctcagactctaaaactatgatcttcttctctaactcccttcccccaaactaatctgaagccagctccttcttcaatcatcctctgaacctggcaatcatccttktcatctctttctctttcaaacccatcatcaccagttctgctcttaaataaatctgaaatgtatcacatttatccatgtttattgctacaaccctagcccatgctaatggtatgtttatcctggaatatagactcctgagagatgtctttttaggaatcttttagtagcaaatacagaaaacagcttaaacaataaaaaacttttatcagtttatataattgaaaagcccagagttggggtaggattcaggcaagacttgattgagcatatcaacatgtcaacaaaattctggtttattctatttctcctctcaaccttctactgttttatcttgctgctgaagccggctcacaatgtcaaacaagggggttgtcaggaggtcttagagcttcatgcttctttgttcatgatcttagggaagacagaacatctctctcagcagtttt

SEQ ID NO: 38863 - DNA, 570 bp, Homo sapiens
cttggctatatcagagagtcctcagactctaaaactatgatcttcttctctaactcccttcccccaaactaatctgaagccagctccttcttcaatcatcctctgaacctggcaatcatccttttcatctctttctctttcaaacccatcatcaccagttctgctcttaaataaatctgaaatgtatcacatttatccatgtttattgctacaaccctagcccatgctaatggtatgtttatcctggaatatagactcctgagagatgtctttttaggaatcttttagtagcaaatacagaaaacagcttaaacaataaaaaacttttatcagtttatataattgaaaagcccagagttggggtaggattcaggcaagacttgattgagcatatcaacatgtcaacaaaattctggtttattctatttctcctctcaaccttctactgttttatcttgctgctgaagccggctcacaatgtcaaacaagggggttgtcaggaggtcttagagcttcatgcttctttgttcrtgatcttagggaagacagaacatctctctcagcagtttt

SEQ ID NO: 38864 - DNA, 1687 bp, Homo sapiens
gcatgagatatccaccacactatatttacttttgccttcattcattttttctccacagtctaggtagcgtagtcttttaaaaaagaaaattgtgttgtgccacgtctttatttaaaactgctctttggcttcactttcctctttggataaagataaaatttaaaaagtccttatcatgccttacaagtcccactgtgatcaggccttgcctatccctccagcctcatctgttgccaccatctgcccttggtaaccatccactcacagcagctggctcttgttyattgtcttggattttcacagcttttacctgtctcagcaccttcaaatatactgtgtcagctacctggaatggtcttacctatactcttcacctggacaacttctatttacccaagcttctctgttttagtcctttttactatttaaaataagttctaatgaggttgtctacttaatgtttgtctttccaactagactgtaagcaccatgaatgaaaaggcagggcttacactttttaaaaaccacagtgtccttggcatctagcatagtcctcgggccttgtttgatgaagagacccaccattttcactctaacatcaaataaaacctcttacctggtttcaacagcggttcctccatctgcctctatttgttcatttgtcacatgggacatcattacccaccttgctcttcaaagatccaccactttaaagagcgaaggtgtcctcatatatattctgggaaaaagacatttatctgttgaagacgttatgaaattaaattagctaaagtgtgtataaatgcctagagcacttggtatagtctgacaaatatttgctaacttaaaattggaatcggtatttggagaactttgcaccaggtatctgttctagtattcactagtttcctggaaaatagctgagagacccttggaaagttattttgccatttatctttataaatattttttgaatctcaggacgtgtggcattttcccaggctattcggggataggcaagaaagggaatctagaataccgaagagagaactctgcagagctgtgagtcttatttgcacttcatcccaacttgacattaatgtacatattttacactgagattgttttctattattaaactctgaatctcattatataccaacctgcaaggtctttgtgaaggattttagtcctttgctcttgttttcatttttcaggttgtacttacgcttggctggatttctttttcagatttcctttgttaaaggcactgtcataaaaaaatctttttacatgaattattgtttcaagaagggttttcttaatgtatttctaaatattcactaaggttagtgaataggaaaggagctactaatgtaggtgggcatgttaacattcattgtcattttattattttaaaacactttttattctaaaaacaatgcatgttcactgtagagaatttggaaaatacagacaaggggaaaaggcatttgtaatcttatcactcaaagatacggttgacattttgatatttttgtcttacagacacattcacacacacacatacgcaccatttcaaataaccagaagagggtaaaaatattcaacaagttttttaatgtgttccacccaacaataagttataatcacaatgaattctcttattagtttctatactttcatc

SEQ ID NO: 38865 - DNA, 1687 bp, Homo sapiens
gcatgagatatccaccacactatatttacttttgccttcattcattttttctccacagtctaggtagcgtagtcttttaaaaaagaaaattgtgttgtgccacgtctttatttaaaactgctctttggcttcactttcctctttggataaagataaaatttaaaaagtccttatcatgccttacaagtcccactgtgatcaggccttgcctatccctccagcctcatctgttgccaccatctgcccttggtaaccatccactcacagcagctggctcttgttcattgtcttggattttcacagcttttacctgtctcagcaccttcaaatatactgtgtcagctacctggaatggtcttacctatactcttyacctggacaacttctatttacccaagcttctctgttttagtcctttttactatttaaaataagttctaatgaggttgtctacttaatgtttgtctttccaactagactgtaagcaccatgaatgaaaaggcagggcttacactttttaaaaaccacagtgtccttggcatctagcatagtcctcgggccttgtttgatgaagagacccaccattttcactctaacatcaaataaaacctcttacctggtttcaacagcggttcctccatctgcctctatttgttcatttgtcacatgggacatcattacccaccttgctcttcaaagatccaccactttaaagagcgaaggtgtcctcatatatattctgggaaaaagacatttatctgttgaagacgttatgaaattaaattagctaaagtgtgtataaatgcctagagcacttggtatagtctgacaaatatttgctaacttaaaattggaatcggtatttggagaactttgcaccaggtatctgttctagtattcactagtttcctggaaaatagctgagagacccttggaaagttattttgccatttatctttataaatattttttgaatctcaggacgtgtggcattttcccaggctattcggggataggcaagaaagggaatctagaataccgaagagagaactctgcagagctgtgagtcttatttgcacttcatcccaacttgacattaatgtacatattttacactgagattgttttctattattaaactctgaatctcattatataccaacctgcaaggtctttgtgaaggattttagtcctttgctcttgttttcatttttcaggttgtacttacgcttggctggatttctttttcagatttcctttgttaaaggcactgtcataaaaaaatctttttacatgaattattgtttcaagaagggttttcttaatgtatttctaaatattcactaaggttagtgaataggaaaggagctactaatgtaggtgggcatgttaacattcattgtcattttattattttaaaacactttttattctaaaaacaatgcatgttcactgtagagaatttggaaaatacagacaaggggaaaaggcatttgtaatcttatcactcaaagatacggttgacattttgatatttttgtcttacagacacattcacacacacacatacgcaccatttcaaataaccagaagagggtaaaaatattcaacaagttttttaatgtgttccacccaacaataagttataatcacaatgaattctcttattagtttctatactttcatc

SEQ ID NO: 38866 - DNA, 1687 bp, Homo sapiens
gcatgagatatccaccacactatatttacttttgccttcattcattttttctccacagtctaggtagcgtagtcttttaaaaaagaaaattgtgttgtgccacgtctttatttaaaactgctctttggcttcactttcctctttggataaagataaaatttaaaaagtccttatcatgccttacaagtcccactgtgatcaggccttgcctatccctccagcctcatctgttgccaccatctgcccttggtaaccatccactcacagcagctggctcttgttcattgtcttggattttcacagcttttacctgtctcagcaccttcaaatatactgtgtcagctacctggaatggtcttacctatactcttcaccyggacaacttctatttacccaagcttctctgttttagtcctttttactatttaaaataagttctaatgaggttgtctacttaatgtttgtctttccaactagactgtaagcaccatgaatgaaaaggcagggcttacactttttaaaaaccacagtgtccttggcatctagcatagtcctcgggccttgtttgatgaagagacccaccattttcactctaacatcaaataaaacctcttacctggtttcaacagcggttcctccatctgcctctatttgttcatttgtcacatgggacatcattacccaccttgctcttcaaagatccaccactttaaagagcgaaggtgtcctcatatatattctgggaaaaagacatttatctgttgaagacgttatgaaattaaattagctaaagtgtgtataaatgcctagagcacttggtatagtctgacaaatatttgctaacttaaaattggaatcggtatttggagaactttgcaccaggtatctgttctagtattcactagtttcctggaaaatagctgagagacccttggaaagttattttgccatttatctttataaatattttttgaatctcaggacgtgtggcattttcccaggctattcggggataggcaagaaagggaatctagaataccgaagagagaactctgcagagctgtgagtcttatttgcacttcatcccaacttgacattaatgtacatattttacactgagattgttttctattattaaactctgaatctcattatataccaacctgcaaggtctttgtgaaggattttagtcctttgctcttgttttcatttttcaggttgtacttacgcttggctggatttctttttcagatttcctttgttaaaggcactgtcataaaaaaatctttttacatgaattattgtttcaagaagggttttcttaatgtatttctaaatattcactaaggttagtgaataggaaaggagctactaatgtaggtgggcatgttaacattcattgtcattttattattttaaaacactttttattctaaaaacaatgcatgttcactgtagagaatttggaaaatacagacaaggggaaaaggcatttgtaatcttatcactcaaagatacggttgacattttgatatttttgtcttacagacacattcacacacacacatacgcaccatttcaaataaccagaagagggtaaaaatattcaacaagttttttaatgtgttccacccaacaataagttataatcacaatgaattctcttattagtttctatactttcatc

SEQ ID NO: 38867 - DNA, 554 bp, Homo sapiens
tttaattgaagatggaaagccacccattctgtactagctcagtccttgatcatgttctctttcccttgccacacagtcatacttaaaacattagtgctagctgttagtctgtttgggctgctataacaaaataccayaaactgggtggcttataaataagataaatttatttcttacagttttggaggccgtaggcataggtagattctgtgtgtgttgagaacccgtttcttggttcatagactgcatctttttgatgtgtccttatgtggcagatgagacaaaggatctctcttcggcctcttctataagagcgctaattgcattcatggggtctctgttcccatgacctaatcacctcccaagggctccacctcctaataccttgggggataggatttcaacatatgaactttagcggaacacaaatattcagtctacagcactagtaatatttactatttagccagaagcattaaagtcaccagtttctttaaagggatcacattttatcaaccccattagtagcctacttaatgcaatcttatttatta

SEQ ID NO: 38868 - DNA, 797 bp, Homo sapiens
tgcaaccatactcacatgtgcacatgcacacagaataacaagagctcagctttacaactgccaggcaagaaatgcaccacgttacactgaagaagccgtgaaagcagaaaaatcaatctaccattttaatgaaaaaatgtgagaaactgagatgaggtatggtgcaatcactttgggcagatttggctgtttggctattaatcatttctctactgtgcagtcagcacaactaagtctattcagcgtattgttggggccactgtagagacgctgtaaccaagtcagatgagattattaaaccatcattgtatcctaaggaccaagaactgtgcaaaaaattgcagttttcaagtgaaaaagattaactctaggaaaaaaacaatcattttccccaggactggaatattgaaatttcctsacatgacaacttacattctagcaattacaaatcttggatttaagataaaattttataccaaatctaaaatcaatcttctatcactttctgtttaaagaaagtacaaataagataataccttataacctctcattataagctattatcaggttaatactttataatgagagtcttaaatttgcttatagatctaattatttttctttatctttgccttctgctcccaaactaatttagagacctcagtgactgcctcagaggccatcacactatccttcctagtgtttgatacttacagaatcattctgctgactactgagttacctagagaatacggagtattttctaacaagccttttaaatccacccatctgagcct

SEQ ID NO: 38869 - DNA, 615 bp, Homo sapiens
ccaaaattagccaggcatggtggtgcacacctatggttccagctattcaggagactgaggtgggaggatcacttgagcccaggagtcaaggctgcagtgagccgtgatcacaccactgcactccagttctgggtgattgagtgacaccctgtctcaaaaaaaataaataaataaaaatagggccaggcagggtggctcgcccttataatcctagcactttgggacgccaaggcaggatgattgctcgagcccaggagtttgagaccagcctggggaacacagcgagaccccagtctttgttaaattaaaaaaaaaaatttaagaaaaaaagatagataagggatactcaacctgtatcactagtcatatcaatgtcctcttccttggtatactgtgagattctgggaggcaaggaaccctgccatatacgtctttacttgagtaaaatatttcacttcctttctgtgtgatgtttgagcaagttatgctctctacacttcatttccacatgtaaagtgatgctaattatacttcrtggtgttgttatggaaagtaaatgagttaataaatgtaaagcacataacagtgcttggcatagagtagatgttcaataaa

SEQ ID NO: 38870 - DNA, 535 bp, Homo sapiens
aatctaaaagattttggggatattaaaattctactcttttctttaacagatatggagactgagtcccagagagtttagtgacttgtctgaarttacatgcagctggggaatgataagctaagatcattagaccttgaaagtgaaccttaaatgccacctcttccataaaatttaatcaatttccctgaggagacttgctcactccctcttatctccaagacatccgttttcttttttctagcactttactctcacttctgattatagttgttcttgaccatgtctaatactccctttagaatgcgaggacctagatggcataaagtgccttaatcagttatgtattctttaacgtgccgagcataggattttggtatacagtaggtgtccaatacatgactgaatatttgaattgaactttggttcgcttttggactcctaggctgaaacttaaatgaaatgctctgtgaaatcagctttgactcctttcttttctctaactataaatttaattatttcaagtgagtaaacaaga

SEQ ID NO: 38871 - DNA, 502 bp, Homo sapiens
ttttctaagggattgttcaccacaatttgatgtaaaacagcatccagcagagataatactaagtaagatcctagctgggagatctgcagcagtgacattagcagctgtcacagaaaaactgatgagcaatacttacatgaaagaataaatgttcctgtttcctaggcaagggcagtcactggccagccaacaccagcacatggtcctccttgttgccacacatctcatcagtgctaaaagttccacgacccatgggggactgtcagcttttatttccrtatcactgacccacctgagtggccacagaccctctcaacttgacttccagccaatgccatcagctaacggctgcggctcactcccttccagcgaatgccccactccctattctgtgattcaagccttgagatacggaggtcttctctgattcctacttgtagagctggctatccatgatgtgttttttccagtatgatttatccttcatcctctcttaaagaaa

SEQ ID NO: 38872 - DNA, 976 bp, Homo sapiens
taccacccaactccaagcaatcattcatcacccacttcagaaggaagaagaaactttatttgcttttcctagagtagacaaatgaacatgaaatgcaatttatagatttcaaatacgtcacttctccttttttttttttttggtattagtccttctgacagctcagtgtcatcaaaaattaaatgcactttcactgtctttagtttgctccagattcaacatatggctacaggaagtaattctacaaaaggttggcaggcagctttctgatccttccagttgtcgtctcctgcgggccttcttcccagaggaatgctgctactatttagttttccaaattcttttcctagatatgctgttcttggaattccaccatttattggtttatgtggcgtggagttaataaaaagttcttcaccacctccgggcatatactttttcgtaccatttctttggtcctaatggaaaaagtatttattttatatgttgttcattatttgttggctcatttgtctattctttgtcataaatgggctggaatcaagcagaggtaatgggctgctgtgtggatatctcttttgctttactcagagcttaattcagctccagatgcccatatcacaggtgcataataaatgcttttcataatgataatgacaacagcaaagaaaaacagcaacagcagcaattaggcactccagttatctactgytacccactttattcaaacagaaatatttctctctataaacagaataaaagtctatttgcaaacctctgatctcaaaattaaaatcaaattaagcaaaatgtaatcagagaaagtaagtcatctgctgaccaatgagggtggaaaagctacctattctcaatgagggctgagtacttatccttcccagatgagctgagggaaagagcaattaagtgcttatcaattggcaactatttggaggacagtgttagggaaagttgaaca

SEQ ID NO: 38873 - DNA, 1053 bp, Homo sapiens
tgcatggagagggaaatggtggagatgagcctggagcttgtgaacgtgcagaatcagtacaggtaggatgggccgtggccccacttctgctctggcagcatttttatttcccttgcaaactgctcatctgtgctctgggaaaagttattccagaataaaaagtcttgtgggaaagagccttgagctcgaacagttaaaggacttgttcaggttcaagatgaccagaaaaatattcatagaagggccagctgtgccagatgcagaagaaacagatggctcttgcatgcgaatgtgggcggtgcttgtatgtatatgggaaaggttcttgctgacaaagcaaaaygggaaactggagcaatgagctgggtaattaaaacaagagacccatttttgtcggtttagctgagcaattcagaaaggtctagaagtaaaacagttctgtgatctgtggaggtcctctgagctggatttagcaatctcttcctcccaccagcaggtcattgccttgaacagcctctccctcccctccccatttcacctgctcactgagtccttcaaaacagacaaacaatactccacatagacctccagagaacatccaggcagttctttctctcctccctcttatacccttaaaaataaaacacattttcactagacattttacacatcaggtatcttgctgacagtagcttatgtgggtatgaagtagatgacaatgaactggtgtcttcctgtctgaaaatatgtcagatattcagggcagtggtttttactgtctttggcattaaacccttggagaggacagcaaagcaagagtttagtaaatggtaaatttagtgagtgagtaaaccacagttgtatccaattttaagccaagacaaatttactatttacacacatacccacactctcacagatacatatattaatacactaaatacgtgtgtgtgtattcagtagataaaatgtttaataaggggttctttaaatagaaaagtccctgagtacatttaaaatatgatttgatttacaacatgtgactgaacacaa

SEQ ID NO: 38874 - DNA, 547 bp, Homo sapiens
  misc_feature (1)...(547): n = A,T,C or G
tgtgnnnnnnnnnnnnnnnnnnnnnnnnnnnnnnnnnnnnnnnnnnnnnnnnnnnnnnnnnnnnnnnnnnnnnnnnnnnnnnnnnnnnnnnnnnnnnnnnnnnnaagaaaatcttgtttatttgtgctttccaatatggtagccacaagccacatgaagctattgagtacttaaaattgactatttctactgagatataattttttgttttagagatgggggtctcaaattcttgcctcaatctcctgagttgctgagactcaggattccttcatgccagctcaggaattaaatttacctattaatcaatataaagtaaaagtggataaccacatsgggctcaagaatatcttattgggcagtgcagtttgaggtaaatgttgcttctttagccagtgtattagttcattctcacattgctataaaaaaatgcctgagactgggtaatttattaaaaaaaagagatttaattggcttatggttgtgaaggttgtatgtaggaagtatgacagcatctgcttggtttctagggagtccttaggaaatt

SEQ ID NO: 38875 - DNA, 547 bp, Homo sapiens
  misc_feature (1)...(547): n = A,T,C or G
tgtgnnnnnnnnnnnnnnnnnnnnnnnnnnnnnnnnnnnnnnnnnnnnnnnnnnnnnnnnnnnnnnnnnnnnnnnnnnnnnnnnnnnnnnnnnnnnnnnnnnnnaagaaaatcttgtttatttgtgctttccaatatggtagccacaagccacatgaagctattgagtacttaaaattgactatttctactgagatataattttttgttttagagatgggggtctcaaattcttgcctcaatctcctgagttgctgagactcaggattccttcatgccagctcaggaattaaatttacctattaatcaatataaagtaaaagtggataaccacatcgggctcaagaatatcttattgggcagtgcagtttgaggtaaatgttgcttctttagccagtgtattakttcattctcacattgctataaaaaaatgcctgagactgggtaatttattaaaaaaaagagatttaattggcttatggttgtgaaggttgtatgtaggaagtatgacagcatctgcttggtttctagggagtccttaggaaatt

SEQ ID NO: 38876 - DNA, 690 bp, Homo sapiens
ttctctttctcttccagtccaactcattttcaaagcttctccttttgcattgcttctgttttttcatttccctactcacatttggagctagatctgccccactcaccctctactggactagattccatcatatacctcttttctcatctatggcttcaaaccctatctactaataacatccttcagcatagactcatgccacagaatgggagaaaatattttcaaagtatacatctgataaagtacttttgcccaaaatatacaaagaaatcttaaattttaacaataaaaaactagcaaacttattaaatgtaggcaaaagacctgaacagacacctcaccaaagaagatgtacagatggcaaaaaagcatgtgaaaagatactcaacatcatatggcattacagaattgtaacttaaaacactaatgaaatacacmcacatatacattctcgtgcatacccatagaaccggagagacttttatgtgtttataatttaggaatgctgaattgggcaagttcaaaagtttatagaaaatattatgagctttgcagtttggtaaatagaaactcttcccctttactaattggaggactttttggtcataatattcaatgtctgtgagactgagtcttcttccaacgaataagtataacaattcatatcccatgaattgtgaaaataataaa

SEQ ID NO: 38877 - DNA, 566 bp, Homo sapiens
ttttttctaatataagtagatagactatatacaatatctcacattttatctaggaaatcaaactaaaacttcaaattatttaagtagtttattttttataggtcttatcttagaggagaaaattattaaggrcagcaagcacttactatggaggtcatttatcagactaaataggcaaaacgtgtctacaaagtgcttagagcttgttttagttggcgtatatattcagacacagatagtttaagagaaagatgatacacattcaatgtaagcttctattcagatgttaaaagaacaaaaggtaatttttataatgttgttgcttcaataagtaatttgatcacagagagagtgagcaacagagagagagattgcagaagttgggacaattcattttcattggaaaggaaaggaaaaaaagattacctgattcaataattttattctttatcattgaaaaaggtgagtatcaaaaaatcttacagagtaatgcagcaaatggctcacctggaataggttttggtccttctcaaataatccaattacccttcaagtaaccaacatag

SEQ ID NO: 38878 - DNA, 566 bp, Homo sapiens
ttttttctaatataagtagatagactatatacaatatctcacattttatctaggaaatcaaactaaaacttcaaattatttaagtagtttattttttataggtcttatcttagaggagaaaattattaaggacagcaagcacttactatggaggtcatttatcagactaaataggcaaaacgtgtctacaaagtgcttagagcttgttttagttggcgtatatattcagacacagatagtttaagagaaagatgatacacattcaatgtaagcttctattcagatgttaaaagaacaaaaggtaatttttataatgttgttgcttcaataagtaatttgatcacagagagagtgagcaacagagagagagattgcagaagtygggacaattcattttcattggaaaggaaaggaaaaaaagattacctgattcaataattttattctttatcattgaaaaaggtgagtatcaaaaaatcttacagagtaatgcagcaaatggctcacctggaataggttttggtccttctcaaataatccaattacccttcaagtaaccaacatag

SEQ ID NO: 38879 - DNA, 2277 bp, Homo sapiens
aatcagagtgtcccacagtgctgaataaaagtccctttcaagttccctgacctccacaaccacagcaacttcccctctgcctgtagttccgctaggaaaaaaaggccactggacagctaccctgggggtctgggtatgagtttctcctaccactctctgagtatccttttccttaactggaaaatataaataataatctatatattctcatacaagtattgtgaggatgaaatgtgacaaggaaggcacctaaggtgctaaatgaccattaatttcatgttcaacatttctctactttcaggtcttcaaggagcctctggagtgctcctataacccttctgtcctgtccaggaccaggcaggggttgcctgtttgttgagtccatgaaaagcttctctcagcatctgggatgcttgyattagtaatgccagcccctgaacccatctgtctttttctcaagcaggaaacatttcgagcaggaaagattttcattttgtttaggtcttttcaattttttcctgtctgccaccttcatctagttagaagcatgcaggacatcatcatataaagcactcaagatataaaaatagaaaggaaaacagagctgtttggggatgtgtagagccagagatggcaagaaagggaaacagacagtcctttctctcttagcaacaggaggaaaggttttcggctgagacacgtgataatttctgatatcagtatagtgtaacagattccagaggcctccaggatcttgctccccactgctaccacagaaactcaatgagataaaacaggcatgatttgatattgcccccctttgacagatgagaaagctaaaccccagacaggtgaagtagcagagctggaacttggacccaggtgctcttgactttctccttctctaagcccaggtgcttcaaatgaccccaaccctaatggtgttgcctaattcccagggccccgaagcacttatccaattgagacccagaactgtagatcgccaagacagtcaactcattcccttgtgcccaactcaatgtattgcacttctctccatcttttccgagctagtttctccaactccaaaactagtatattgaagtccagatagggatcttaaatgttaagtggtcatagaaacttactcactactgctgggttggaaatcagggagagaacagatgctagtggatgtacctttgggttgctgcatgggaatcagagagaatgtgagatctgacttcgaacctctcctgtcatttattgtgttttctaagcaagttatgaacctctcaaagttttaattaccttatctaaaaaattgaatcactatctgccccaggagctgtgaagactaaaggaaatgctctaaggatttgctcatttatctatctatgttcttaaatattggtatcattttcttctctcctgccaaccccaccaccactggcaactggttaacaactgactctgattgttgttaacaagcctgattaacaataaagccctgagtcatggcatttgccaatttcctgagtgtaaatatcctccccttggctgatttcaagttaccaaaaaagtgtgtcactgaatgtggaattaagaagaggtgtgcacggtcagttattgtgagtctgtactaccagctggacccatcacatcaccactgataaaaatcagcctcaaatagttgggctgcccttgacagtttagagagcactttattttacgttatttcctgtgatattcacaagaatccttgaagggaaatgatcatccctatttccccaactgacagatggtaaaactgagaaccagagagattgagtgacttgctcaaagaccaacagctaactagtaagagttaagattcaatcctgagccttctggctccaaatctagggatccttctacgctctgtaccatacattacctgggtgatcactgcacaagctctgcaaatgtctttctctttcagggccatgatactaggacctgagcttctgtttttcaactggacaggcaggaatagtcatcccagcccttcgcagataccctgagaatcaaatgagataatgcagatgaaaataatttgtaaagcaccctacaaggataaaagtatgaatattatagttagtggctggagaaaaaatatggaaacaacaaatcccaagccctagagtaacttataaaccacagaggaggcaggaccaccctgcacacattcaccacattcacttcagatccacactcaaggggaaacatgcaataaga

SEQ ID NO: 38880 - DNA, 993 bp, Homo sapiens
caattattcttaagcccagaaggcatttagaaatgactgttgctaaccaccaaaacgaggaactgttctgtgacctttagactctgccttcttcagcagccatcttttgcagggcttgatctcacatgggagtgccaaagcacaaaatttatggagtcctcagagtttttgtggtcgcaaatcacaagactttatcaaacagaaagggaagtttgccttagagggtgagaacatacttttcagacatagcgatgggaatacaaacaggccaattcaatttcttttggggtcatggtttgtagctttattgaatgtgcgacattccctttttgaaagtccataggatgttttcacttcagagaataatttccacatcccattcgacaccaagaaatgggtaattattatatcacttggtgattatttatcacagtttgaatgaaaataaattgcttcaaagtgaaatcacattacatggttacctgtctgccctattaatttttcatttaattttctttattttaatgtgcatacaaatgtttgtgagctatctcatctgtctccctcataattccctccaatggatttaaatatgttaagagaaattaaataaataggttaaaggaaggctcgggatttgggaaatgggggtttagctgagagtggtaatttgtttctgaaccggctgtctcacttcctgtggaacagaagcacactggaaaatttaaaaaaattgkggaaaacacatgtatattcctaccatagaccagctagttagggtacaagtgttgattactatattttctggatccagcagtatccacagtgcccacactggcagttttcaccagtgatttcatttccactaataaaatccacagaacagcaccgcttttctctcaccctaagagtatgaaatcagtcttccctgagcctccccatttccaccttaatcctccaaagtctgaaaatctagttgaaaggacttgtcca

SEQ ID NO: 38881 - DNA, 820 bp, Homo sapiens
aagaattttagtaattattaactgagcagcagattgccactggactgttttaagatttactatcaccagtcttacatagatacataaattttaaaatctcacccatttcttcttataagactrttagaagatttaacttgccacagactggtcatgctttgttattcttggacccctgctttttcccaaaccactacattcacctttttgctataccaaactggaggtggtaattcttagttgagtcattttacctaggggaccacggtacagcgataagtcactcaattactaccttatgattgacagttcacactggaatcaaaggtgaattcatgggagtagaggtgagatatcgttaggcaagtctacaaagagagatagatgggcatttattcatcacgctgaagtgaaactactgcacaatattattacatcaatagcatatatttacttttgtaagttacacgtaatgcatctctgataagataaatcaagagggctccggggaggttagtttacatttcagcagtagtttcgtgaataatgctaaattaagaaatatataaacctcaccgacatgttttttctcaccttcttgtaaggagcctcaagcattgcttcaatatcaatatcgtctgccattttctctaaacgcctaggaagagaacaagacaatttcttgagtaaacatttctcttacaatgtgaaacaagtttcactcttgttgcctatatcgtctaacattttctctaaacgcctaggaaaagaacaagacgattccgtgagtaaacatttttcttttttttttttttttttt

SEQ ID NO: 38882 - DNA, 532 bp, Homo sapiens
aggttcttaacagtcattttctgtaagaggtctacagacatacatcttgcccaaacatctctaaataaccagctccctagcctacctaggtggcaggaacctgtaatctcagctactcaggaggctgaggtgggaggacttcttgagccccggaattcatgtacagcctgggaaacacagtgagactccatctctaaaataagtgaaataaataaccagatgccatctcaatatataaatgaaacatcagagttggaatatgtgcatcatagacatgaattgtatgctattgttgtaaaggarcaagggatgccgggcgcagtggctcaagcctgtaatcccaacactttgagaggctgaggtggggggatcacgaggtcaggagttcaagaccagcctgaccaacatggtgaaaccccatctctactaaaaatacaaaaattagccaggcgaggttgtgtgcacctgtaatcccagctactcgggaggctgaggcaggagaactgcttgaacccaggaggaggaggttgca

SEQ ID NO: 38883 - DNA, 604 bp, Homo sapiens
attctatcccactccccaaactcagaactggttttgtgactgcctggcccaatagaatgtggtaaaagtgggtattttgggaatcccaactttgactttctaactcttggaggcctcaaccataatgtaagaggtgcaggccaaagaggccacatggagaggttccggaggataagacatctctgggagactgagtccacttggaggaatcctgagaactcaagcgagtgaagaagtcatcttgaacattctagcctagctatgatttgattgcaagagtatgagaaacttcaagtgaaccagcagaagaactgcccagcagagccccagccagtccacagamtcatgagaaatacttgctgctgtcgtaagccattaagttttagagtagtttgttatgcagcaatgaataaacaaaataggcagtcatgttagaagcacaaatttttatggctcgaagaagggcttaacatcttagcaaactgccatatgtcttcaagttattttctgtgttatttgttcaaattgtaaacttcttaaggacacagaatgtgttttaatgttttatatgcctctcattctcaagcatagtgtgttaaaaata
